United States Patent Application Publication US 2019/0348154 A1 - sequence listing, part 97

SEQ ID NO: 362262 - DNA, 891 bp, Pseudomonas aeruginosa
atggaattgcggcaccttcgctgttttgttgcattagccgaagaattgcacttcacacgcgctgcagagcgattacacattgaacagccaccactgtcccgcaccattaaggaacttgaagacgaactgggaacattgctttttgatcgtgatcggcgaggaacgcgtctgactccagcgggcactgtgttcttgcaggatgttcgaaggcttttcactgttctggatcaggccagagaaaacgtcaaagctgtcgcggcgggcctcaatggtagtctgcggattgctatatcagacggcaccgtagaccagcgcctgtctgcgttcctcgcggactgccgagaggaagagccagagattgaaatacggctttctgaggttccattggctgaacagatacgcggactgcggtctggcgatttcactattggatttgcacatacagctgatgtcgagaatgatattgttgccgaacccatctggcgagaccccttggtaattgctgttccggccaggcacgagttgcttgcccacaaggaggttccacttcaggagatcggggatcaccccctggtcttgtgtgaccctcgggtgtgtgaaggttactgccgcgagctatcaaggttgctgcgaccactggagagagaaccaaatattgtcggacacgcatcctcgttggacatgatgctcacactggtcggggctggatacggtctcggcttcaccacagccgccagacttgcggtcagccggcgcgccgatgtcgttgctcgtcctttggccgtagattcggccgtgattaccacctacctactccggcctcgaagagacacgccgagccctccgttggagcgcttcattgctcgcctgcgctcgcaggtggacggatag

SEQ ID NO: 362263 - DNA, 396 bp, Pseudomonas aeruginosa
atggccgtcgccatgccgcctcggtcccgcttggtcgacaaggcgaagctcaccatcgccgatctccaggactatcccgtctatcgctggcaggcagaggcctgtccgcttctgaatgagaggctggcctccctcatgccagcagaccagaagagcatccggcgggtggtttctttcgagatgctggcgctatgggttgcagcgggctacggcatcggggtatctgcgcgatcgcgcatcgagcgtgcccatggatggggaatcaccatgcgaccgctcgccgacggcccctatgaaatcgtgacctatctgcagcggccccacgcgcaagccgaacccgttgcggagcggttcgagcgcagagcgatgcaagtcaccgggactggcgccacgtag

SEQ ID NO: 362264 - DNA, 1014 bp, Pseudomonas aeruginosa
atggatgctaatgacctgattctttacaccagtgacgacggtgaagctcaactgatactgcgtgtactggatggccaagtatggctaacgcaactggaaatggccgagctgtaccagaccagcaagcagaacatcagcttgcacgtgcagaacgtcctcgctgagggcgagctgacagaggaggcaaccgtcaaggaaaacttgacagttcaagccgagggctcgcgccaagtcaaacgcaatctagcgtactacgccctgccgatgatcattgccgtgggctaccgggtgcgctcaacgcgtggcacccagtttcgtcagtgggccacccgcaccctgagtgagtacctgcagaagggcttcgtgatggacgacgcccgcttgaaggagccccgctgggactacttcgatgagctgctcaagcgcatccgtgacatacgggcctcggagaagcgcttctaccaaaaggtacgtgatctcttcactctggccgaggattaccgcgccaatgagcaggacaccgcccgcttgtttgccgaagtgcagaacaagctgttcttcgccgttaccggccacaccgccgccgagctgatagtgcagcgcgccgatgccagcgcacccaatatgaacctgcttagtttcaagggcgaccgggtgcgcaaagccgatgttgtggtggccaagaactacctgaatgccgaggaactagaccagctcaatcgcttggtcggcatgttcctcgacttcgccgagctacgcgccgagcagcggaagcacttgatgttggccgattggcggcaatacatcgacagctttatggcctttagcgagcaaccgctactgcgcactgctggcagcatcagccacgagcagatgaaacaggtggcacacgagcgctacgagcagttcgaccagcaccgccgacaggccgaagccctggccgccgatgctcaagagctggcagagcttgagcgtctggaaaagcgcctgagcagccaaaaaaagaaacgctga

SEQ ID NO: 362265 - DNA, 1224 bp, Pseudomonas aeruginosa
gtgaaggatcgcactattagttttcagctgaccgattgcgccggtcatgccacaaactttcagagcttgcgctccttgctggctttctgtgaagcagaagccaacttttggaaggagcgtaaacagatcgttcaaaccgagagaagcagtaccaaccatacacatttacatgctgatggtgcattcactcaggcagccagtaccatacagagctggaaagaaagcattgatgattggactgatgatgaggtgagccgccaactacagcaacttcaacgaagtcatcttcaacacctaccgcagaactggctatggagcggccatccttttgttgagccttttattcagtgtctcaaagagcatggtgataagacagctaatgcttttttggacttttcgattcgcaactctgtacaaaatattagcaatatcgagcatttcagaggctatatgtatgcctatgaatttgctaatcaggactctcagataactaagcgtcgtaatggcgagaaagtatcgctcggacatctacgaacacagttcgctgaagccaaagatatgttgtttgctgaagtggatgagctgaaaaccagcattgaagactgggatattcagaacagagcagagagcagcaggcttgtacgggtacaaaaagccttaggccgccgcaagataaaaacgcaatccaatacatttgaacggcaactaaccgagtggactgaaaaagtcgcaatccttgagaaaacctatgaggaaaagctgaagctgaaaaaacctgccgagtattgggcaaaatcggcgcgtaagtatggaatacaaggcgggctttggacgctagctattgttgcttttgttatcgtcgcggcgatcaattttcaagaaatctttgttacctggttgcaaggccgcgagactcccgttcagctcaacacgatacaaggggttatccttttcggctcccttgcgggtgtgtatgcgttcttgctgagggtattgtcgaggctggcttttagctcgttccacttgatgcgcgatgctgaagagcgtgagcagctgacctacctgtatttgtcgctcactaacgaagcagagatcgacaaggaatcgcgggatattgtcttgcaggccttgttcagccgcagcgaaaccggcttgctggctcaggagcacggaccaaccatgcccggagcatctgaaatgctgcgctcaacgctaaagaggtag

SEQ ID NO: 362266 - DNA, 477 bp, Pseudomonas aeruginosa
atggctggcaagagcgtcgagagctatatcctgctcaagcgtggcgagtttgcttacaacaaaggaaactccaagacctatgaatttggctgcatatttgatctagattcttttgacgccggcctagtgcctcatgtttatgtctgctttaagctaaagccgggtcttagtcaccgctatttcaagtatctgtttgaggctgactacctgaagcctcagcttggccagctggtcaatactggtgttcgcaacaatggcctgctcaacatcaagcctagtgagttcatgaacactaaggttccggtgccttctctggaggaacaagagcggattgcagatatcctgcatgtcgccagcaagcagattattgcgctagagcagaagctcgcttgcctaaagcaggagaaaaaagccctgatgcaacaactgctcacgggcaaacgcagggttactgtggatgctaaggaggtcatgtga

SEQ ID NO: 362267 - DNA, 282 bp, Pseudomonas aeruginosa
atgaaactgtaccaaatcgcctatgacctgcgtaagcagcgtaactaccaagccctgtatgaccgcatcaaagcctatggcacctggtgtcggccactggagtctacctggatcattgccacgagccagagcgcagctcaggtaagggatcacctcaaagctgttatggatgctgacgacggcctgctggtaacccgtcttcggggagacgctgcatggtatggcattgcatccgagcaaacccaatggctgcataaccagtaccagcgctgcgaagtttga

SEQ ID NO: 362268 - DNA, 135 bp, Pseudomonas aeruginosa
atgcgtgccacgccgtgtagcggcgcccccttcacgggcaccgcctccagcctgcgcgcctcgcttgtggacaacccgggacggaggaagccaccacactctgattaccaggtgttgccgctgaccgaaaactga

SEQ ID NO: 362269 - DNA, 1650 bp, Pseudomonas aeruginosa
atgatcgaaccatcgacctccatccgggcgaagttgaacgaagggcgtgcactgattcgtccggtcagccaagtgacggttcgactcaagccgattgctgggcaggaccgtttcgacgccaccgtggaccacattctgcgttggatgaacaagagagcgggtcgcaaactgcctcccgtcgcgtgggagcggcggtcgtttgagttgtcggacattggctcgcagcgtgtagcagccgtaaccttggcgacgccacgttactggactggtcgcctcgatgatgatgacaaggaattggccaggcgcgactggattacggaagtaggagttggcttggacgagaacggcgatgtccttttcggggccaggctaatttgtgctacccgtggtgaagacacacagtttgatcgctcaattccagggtgtgtgaagcaaatcctcggctcaggatcggtcgaactggacggtgaactgatcaccgactcccctcgtatcgtagcctcagaggcggacgttgatcgcttgatcgagctgctcgaaaggccaagccgaactgcggatgtagttatcctcgctttgccagaaggttcggtcgatgctactcaaaccgccatctctgctgaaagccttttgcgtcaaacacaaggggttgcccacgttatagttctgaccggacctgcaagtttcctcctctcggatcgtgtgggacgcgaactttccaccttccgccatgcggtgcggacttacaagcctggtttcagaagctggatcgacgagccatcgcggcatcctcttgcgctcccccagcgtattacatcctggaatgaggaaggtccacacgctttcgaacgatggttggtgaaccaaattctggccagttcagttcgcggccatgaccgcgaacagcgactccctagcttcaacaccattcgccagcttgcagccaaggaagagctcaagcttctgaaaagatctggcggcagcgacgcagagcttctcgggctctatgagcaagacaacgaggcgcttcgcaaggaactggaggagcagaaggaactatatgacgggctattcgcaaccgccgatgacgagcgtaatgcagccgtccaggagctcaacgcggcgaaagcccaagccttcgcgctccgtgagcgtattcgatccctggaaaaacaacttgcaagcacgccacaccaatctctgcccccgatcccggcgacgttagacgggttcgaagcttggtgccgtgagcatcttacgggcactatcgaaatgactccgcggtctttccagggtatccgtaagtctgagtaccacaacgtggccctaatctaccaatcgctgctgctattgagagaccactacgtccctatgcgtttggaaggcggcgcggaaaagaaacgtctctacgacgaagctcttgcaggtctgcacctggaggaaagccctacaggcgatggcatcaatttcgaccaagatcaatacacagttcaatggggcggacgtcgccgcgccctcgaccggcacctgaagagcggggtgtcacgagaaccgcgtttctgctttcgcctctacttcttctgggacgacgaaagtcagattgtggttgttggctggctgccttcgcacctcgacaacagggctacataa

SEQ ID NO: 362270 - DNA, 510 bp, Pseudomonas aeruginosa
gtggcggtggaactgaaatcgcacctacccatcgagcggcaggtccgcgtcatcggtgcgacctggcttgaccaacagttgatcggcgggggcaagggactgggtgacctgggctttggcggtgatgccaagcaggccatgcagcagcgcgccgacttcctcgaagaacagggaatggcgcagcgacgcggacagcacatcatcctcgtccgcaatctcttgggcacgctgcgcaatcaggagctggcgcaggccgccaaggtcatcgccgccgaaaccggtttggaacatcgcccgatggcggacgggcagcgcgtggccggcatctatcgacgttccgtcatgctcgccagtggccgttacgcaatgctcgatgacgctatagggttctcactggtgccctggaagccggtgatcgaacagcggttagggcagcaaatcgccgcgacactgcgcggcgacagagtttcatgggagatcggacgccagcgtgggccatcagtgggatga

SEQ ID NO: 362271 - DNA, 759 bp, Pseudomonas aeruginosa
atgaccccgtacccacagaagacgtccccagttcgcaatcggcgacagttgacgtccctggtttctgaagtggcgtccaggtggaccgacgagcagctcgcgcctcgacccctgagcgccgtccgcggctcaatctcagttccacctcgaggcccgctagtacccttcgagtcgtcgatcgagcgcgacttcctgatgttttgcaggacgagccatcgcgtcaccgccgttcacgcccaacgcctggtgattgatttccaggatgtgaagcgcggagccgctcgtcgatacacgcctgatttcgtggtggaggtcgcagccgatgctgggctctcctggcgaagggcggtcgttgaggtgaagacccatcgcgatctttggcgctcccgcaggctgatgcgcgcgccctatgccgccgcgcgaacgtgggcggcggggcaagaaggcacgatcttccgagtggtgaccgaccggatgatgagcggcgaatggttgtccagcacccggttgttgtcaggccacctcgacaagcctttcgatgtgcaattcgagcaggattgcgtcgcgttcctgcaacaacgtgacagctaccgcatcagcgagattctcgcgctggcgcaacaacgaggtcttaatcctcaagctctactgcccgtgctctaccgtatggtcgcgcgaggccaactctccctcgaccgcggtcagccgattggacctcagacgtgggttgccgttgttggatcgcagaagcgactatga

SEQ ID NO: 362272 - DNA, 864 bp, Pseudomonas aeruginosa
atggacgacttgacctacaccctgcggcagctttgccagcgcaaccgtgacggcagctacacgacgcaggccgaccggatgcgctcgctgtcgctggccgcgcggcaactgcgcgaggccggtttccggcagatgaaggcatcgtcgctcaagggcaagcacgcccaggcgctgctggaacgctggcaaggcgaaggcttgtcgtccggcaccatcaagaatcggctctctcacctgcgctggtgggccgagaagatcggcaaggctggtgtccttccgatggccaacgcacagcttggcgtggctgaacgccgttatgtgaccaacatcagcaaggcccgcgaactgggatctgcacttgatcagatcaccgatgtccatgtgcgcatgagcctgcaactgcaggccgcgtttggcctgcgccgagaagaatccatcaagttccagcccagctatgcagaccggggcgatcatctcgctctcaaagggtcatggacgaaaggcggaagggcacgaaccgtaccgatcacaacgcccgaacagcacgaagtgctccgggctgcgcaccttctggcaggcgctggatcaatgatcccggcacacaaaagctacatccagcagcggcatgtctacgatggtcagtgtaaagcggcgggattgagcaacatgcaccggctacggcatcgctatgcacaggtacggtacgaggcgctgacgggatgggcagcatccgcagcaggaggcccacctcgccatgcgctgtcggcggaacaacgcgaactcgacacccatgcgagacgcaccatcagtcgggaattaggacacgatcgaccacaaattaccagcgtgtactgcggaagatag

SEQ ID NO: 362273 - DNA, 792 bp, Pseudomonas aeruginosa
atgcagcatgaactcatgatcgagcgcttgaaggcgctcaagctgcacggtatggctcaagcgctcaccgacctcgtgcagcaagactctccggcataccagagctgctctcccatcttgagccagcttctacgggccgagcttaccgagcgggaggtgcgatctattgcctatcagatgaaggtggccaagttcccagcatatcgagacttacaaggctttgacttcggatgcagcgaggtcaacgaagccctcgtccggcaactgcaccgcggcgagttcatcgaacccgctcacaatgtcgtactagttggcggccctggcaccggcaagacgcatctggcgacggccttcgcggttcacgccatcgaacacctgcgtcgccgagttcgcttcttctccacgatcgagttggtgaacacgttggagctcgagaagcaggccggcaaagctggacacctcgcccaccggctcatgcactcgcacgtcgtgatcctcgacgaactcgggtatctgccattcagccaagccggcggcgcgctgctgttccacctcatcagcaagctctacgagcacacaagcctcatcatcaccaccaatctcagcttcgctgaatgggcgaacatatttggggacgcaaaaatgacgactgctttgctcgatcgactcacccaccactgccacatcgtcgagaccggcaacgatagctaccgattcaaaaacagcagcacacagcccaaaaaggagcgtaaaacagccaaatctgtagcaaccccgacccaatcaaattag

SEQ ID NO: 362274 - DNA, 1095 bp, Pseudomonas aeruginosa
gtgatcaacggcgagcgcaccaagctccagatcgcgcagttcaagctttgccacagtcgcgccttcttcctgcgcgcctactggctccagacacacgagatgctgttcgatgcgcaccatcacgcttttgtggcatggggaggcatcccgcgtcgaggtatctacgacaacatgaagaccgctgtcgatagggtcggccgcggcaagtcgcgcgaggtcaacgccagattctccagcatggtcagccactatttgtttgatgcgcagttctgcaaccccgcgtcaggctgggagaagggacagatcgagaagaacgtgcaggatagccggcggcggatctggcaacgcctgccccacttttcgagcttggaagcgcttaatgactggttggccgacgagtgcgtcaggctgtggcaacagatacgccatcctgcatgtgaccagagcatctggcagatatggtccgaggaacgcccatttctgatgcctgttggccagccgttcgacggctttgtggaacacaccaagcgcgtttcccccacatgcttgatcgccttcgagcgtgaccgctatagcgtccccgcgtcctacgccaacctgcctgtgagtttgcgggtctatgcggatcgcctcgttgtcgtcgccgaaggtcacgtcatcgcgcagcatcctcgccacatcaaccggcgccatgaccgtggtgccactttctacgactggcggcattatctcgccgtgctgcaacgcaagcctggcgcgctgcgcaatggggcgccgttcaccgcgttgccggaagcatttcgccaacttcaggcactgctgctgcctcacgctggcggggatagagagatggtggagatcctgtcgttggtcttgttgcatgacgagcaactggtcctcgccgcagtgaccttagcgctggaggccggtacgccatcgaagcaaaccattctcaacatcttgagccgactgctcgacggcacaccgctaccgccgctgacggcgccccaagcgctctcgctcacagtcgaacccgaggcgaacgtcggccgctacgacaccctccgcactcaggagccacgtcatgcagcatga

SEQ ID NO: 362275 - DNA, 261 bp, Pseudomonas aeruginosa; identical to SEQ ID NO: 335821

SEQ ID NO: 362276 - DNA, 351 bp, Pseudomonas aeruginosa; identical to SEQ ID NO: 335823

SEQ ID NO: 362277 - DNA, 1212 bp, Pseudomonas aeruginosa
ttgactgcatctttaacctggctggacctgacctcagccgatcgcgataaggttcgccaaatccttgatctgttcaaggagcagggcactgttgacgaacttggcctcggtagtctccgcgatgccctgtctgatgcactgttcccagggacttctgtactgcatacacgcttgcgctatgtgctgtttatcccttggatttacaagcgtctcgagcaaacggggagtggaggtgatgtcgccagaactgcgcgctctaaagaggtggagttgatctcccatcttgcggatcaaggcaatgacggcgtgatcggcatacaggcgcgagagtcccttgctcgtctgccaagcagcgtttattgggtcgcactttcacgttgggggattttcgtacctcggcagagcctgagctggtatcacacccattttgatgagttacgccgcggggctcgccgccctgatgcatcggcagacgaccctggtgtgcttttgtccggtcgctatacctggcacccgagactgccttcagcaccggctggattccctgtaggagcagagttttctctgagtcgtgaagaggccgagttcgttcaggcccagatccgtgccaactgtaatggctctttgctgggttggctggctgatcatcatcttgccgagcaggctcataagctttgggaggttcacctgccacctgatgctccctcccagatagtttccacactcgagttggctcgccagttttcattggttgttgaaggtgcgccgctcctttacaacctgatgttggcggagaagcgtggcaagaccaatcagtcgaaagccgatatggaagcagctgactactaccgtcaggagttttccgaatggatggtgcgggccaaggcagacctgcagaccttccagccagaggtcttgtgggcttttgtgctgcgtcagcaggtgcgtagtccggagcctcaacgccgttttgtagagcgctggttgcagtgcgtcagtcatggggatgctgaacgagcgcttgaggatcgagaattacgctccctgattgaaatgcgagagcggcacctcaaaggccccaagcgggcgcgacttgcaaatgctggccggttggcagattggagtggccgtgtaggagttgggcgtatggagtttcgctggagtcaggtgcgccgactgttgatggatctacatgaggggttgtcgcactga

SEQ ID NO: 362278 - DNA, 1788 bp, Pseudomonas aeruginosa
atgctgtctcccgactcccgtgccgtggccatggatttgctcaagccgccaccaggttaccgacttgaacgcaccgtactgacgacctacagcctggatctagaagttctgctggctctgccgctggctgtattggctcagacagatgctggagtcgagcagctcttgctggatccgctggtgttgctcgaggctattcgagaggcaggtgagcgtatacaggtttttgtcgacgaagctggcattgccgtgcccgctaacagccgggctctatatggggcgttggagtccagcgttcatcaggtaaaagcgcctaacggcggagcattccatccaaaagtctgggtggcccgttttgttcgtgaaaatgaaccaccgctgattcgtgtatctgtggcttctcgcaatttaacctttgatcggtcttgggatattgccctgacgtcggaggcgactcctggcaaaaaaacaattgcagcaagcaagccgctgtctgacttgttgcgtcgattaccaggcctaggagatgaaacactggatgacgcagtcattgcaggcattcagcaactggcggatgaagtacagcggaccgcgtttccggcgccggagggattcgatagcggtcttgagtttcatgtgttgggttttggtaagcagaagggacactggagcccagtcgagcaggcaactcgggtgctggccatagctcccttcctgtctgacaaggcgctgcaaaaaatcgccagcctggcatcgagtgagtcactgttggttagtcgtgcagatcagctctcgcagcttgaagtggatctggccaaggattggagcctcgtacaagtactgagtccgacggccgatggagaagcggaggatggatctcagctacggccatctggcctgcatgccaagctgatggtatttgagcatgggcaccgagccagctggtttgtcggctctgccaatctgactgatgcagcttttaccgggagaaatgttgaggtgatggcatcagcctcaggtcctaaaggatgtgctgggggcaaaggaattggtatcaacctgttcatggagtcgggctttctgcgtctgtgtgaagactaccagccttctgagtacacgcctgaggaagaaacagcccaagaggctgcaaccaagctgaaacaggtccgagacgcattgctgggggcggagttgcttgtcagctttagaccagtagaaaacgattggcaaatggcagtgcagggtgagattgccctacctcaaggcgtcacactgacagcctggcccttatcggttgaagggcatcaggctaagaagtggcaggacggtgtcagttggcatctaccaattgccaggctgacagcatttatagctttcagcatcgccgtggatggacatgatgagaggctcgatcttgccatcaagctgcctgtagaagggatgccggaggagcggatccatcatgtgttacgcaccctgatcgatagcccagagcgtttcatgcagttcctgcgggccctgctaggcggcctggaagagattgccgggctcattggggccagctccggacagacttggaattttgccggagggcagggactccgaggtgagccattgctggaaggcatgctgcgcgccgcctcaagggacccgcagcggctgctcccggtaagacggctgattgctgatttgcgccagtcggaagaggggcgaaagatcgtgcccgatgatctttatgtcgtatggcaagtagttgattcagtactgaatgacatggaagctcaatga

SEQ ID NO: 362279 - DNA, 3168 bp, Pseudomonas aeruginosa
atgaaacgaccggatatcgagagtgttctggccccactgaagactttccagcggcgcacagtggagcatgctttctttcgcctgttcgatgctgatgacagtacgggccgcttcctggttgctgatgaagtagggcttggcaagacgctggtcgcccgaggtgtgatcgctcgggcagtagacaagctctggcaggatgtcgataggatcgacgtgatctatatctgcagcaaccagagtattgcccgctccaatctaccgaagctgcggatcaccggtgacaaccaggtcagtttttcccttgcttctcgcttgaccatgctcgctactgagcttgccccccgtgaggggcagctgggattggctggtagcaagctgaactttgtcagcttcactccgagtacctccttcaacatggggcgttcgaccggaatgcgggatgagcgtcggttgttgtttcacctcctcgatggtgtagttaggccgcgagtgggtctgatgaactttctccagggagcggtccagagccgtgagcgctggcgtcagcagctcaatgactggccactgccgctggaggagggcattgctgcacgtttccgggagcgattccgggatagcgggcgtctgcaacaggaggtcattgacgccgcaaccggctacttcgctcgttatcgggagtcctacccgctggatgctggtcatttacgccgacgcttgatcggcgaactacgccagttgctggctgaggtttgcgtcgaagcgctggagccggacttgatagtggtggatgagttccagcgcttcaaaacacttctggatccagaacaagtcgaatctgatcctgcggcagagattgctcaggcactgtttagcgctaaatcatcggagggagtccctgcgagggtgctgctgctttccgcaactccgtacaagctgttcaccacggacgcagagattgagcaggaggaccactataaggatttcattgccactaccgcctttctgcttgggcatgacgagaagcggggcgctcgtctgaagtctgcgattaccgaatttggtcgcgggttacgtcgtgcagcgaggggagaaacggatcaggtcttgccagccaagcaggagcttgaactctgcctgcgagaggtgatggctcgcaccgagcgcgtggcagctacagaggaacatgacggtatgctggtggagcctggtaatatcgtaaaactgcagcctgaggatgtacgccagtatctcgcggcagatgcggtgtttcgtgcggtaggcgagcgagatccaatggcttactggaagtccgccccctatcttgtcaacttcatgcatcgctacaaggtggacgagcggattcaggatacgcagcagcgcttccctgaaaagctggccaaggtgctcaccgagcaccaagacagcatgctgtccatcgatgcagtttcaaagctcgggcttgtgccggatgcgcatgcaaaactgcgtgatttgcgagaacgcttgatcgacagtggattgtggaagctgctttggatgccaccgaccgtaccatactggccattggctggagcctatgagggacagcatgggcagagcaaggcgctgttgttctctgcctggaacatggttcccgatgtagtcagtggtctgctcagctatgaagccgagcggcgaatgctggggcctgattttgagagttaccacgaaccggatcgtcgccagagcgccctgttgcgcctgactgaaacaggtggatctcgagcccggcatcgcctgttgctgctgcttatgccctgtctgacactggcagataaggctcatcctcttgctgctccagtaggtgttgaccggcgcgaatgggtacgtagtcaggtggctgagctgctccaaaccttgcctgatcctgagaatgctgcggtagataatcgttgggaatgggcggcgccgttgctgctggatcctggcatgcgtgagtttttgtctgactggccgcacgactctacggccccggagtatcgacccaatcctgagtacttgcctggctacgtagatgacctgctctccctggatatcagcaccctagggcgccgtcctgatcacttgcttgaaaccctcacggatgtagcgcttggctcgcctgctgtgcttgctgcgcgcatgcttgatgtgcctggattgtcaccgcaggtgcgtcgggagctagctgctaggaccgcctattcattctggcgtttgttcaaccgcccggcatcgattcgcctgatccgtcagctggattccactggttctgattccagcgatgaagatgcctactggcatcgcgtcttgcgctattgccgtgacgggaacttgcaagcagtgctcgacgaaacctggcatctagtgttcgagcagcatggttgggcggcaggccaggaaatcaactccgtctgccgtgactgcgtaaccgatgtggtggaaatggtagagccacggccttcacgagtgctggctcgctgctatcgggttaagggtaatcaggttgagacggaggagctgcatctgcggatgatgtttgctctgcgccttgggcatttgcagtcagaggagggcggtttgactcaggatgcagtccgaaaggccttcaacagcccattccgcccattcctgctctccagtacatcggtgggacaagaggggctcgacttccatccgtggtgtcatcggattgttcactggaacctgcccggtaatccggtggatatggagcagcgggaggggcgggtgcatcggtataaggggcacgcagtacgtaagaatgttgccgcccgcttttcctccaagtcactgtgtaactggcgtccaggtcacaacctctggcaagaaatctttgtgcgggctgatcgggaagcgcgtgcgcaggggcgcagcgaactagtgccttattgggtcgcaccgggagaggctcggatcgagcgccatgtgccggcattgccttacaccagcgaggttgaagccttcgccaggttgaaacgccagttggctgcttaccgggtggtctttggtcaaccgcgacaggaagaactgcttgatctgctcgatagctcccaagtatcgcagggacagttggaggcttggtctatcgacttgatgccgacagagagcgagttgcccaaagtgtcgtag

SEQ ID NO: 362280 - DNA, 603 bp, Pseudomonas aeruginosa
atgtctcagctctcccagcttcgaagtccggcggctgtacaggctgctatcgatgaatttgtgcagcttgggagaacgaaattcctggcgcgctatggctttggcaagtcgcgcgattttctcgttcgtgaccccaaaacgggggttgactgcgactccaaagctattgtcggagtcgccttcggcaagcagtttcccgatatgagcccgctaagcgcagacagtttctcgggcggcgaagccacggttgtgcctgtgctaactaccctcggttttaccatcatccgcatcggtgaagattggtcggaaatggaggtggaggccactgtcagcgattactttgaaatgctacgcgctgaagccgccgggagaccttttaataaatccgagcataaccaggcgctacgacgactgctgaatggccggagtaaatcctcaattgagctaaagcaccaggattctccgggactttgccggtcactatgctcgactcaggcaagccgtccgggtctatcgggccgccggctcgggagaacaatgcgacgcccaggtcggtttccctggtttccaggggggcgaacagcttgtcgaacgcatcgttga

SEQ ID NO: 362281 - DNA, 246 bp, Pseudomonas aeruginosa
atgcagagtgttttggctgacgttgccgtgagcgtttctgagctgaagaaaaaccccaccggtgtcatggctggtgcgggtggcatgccggtcgcagttctcaatcataaccgcgtgatggggtacatggtgccagccgagctgtacgagcagatgttggaccgtttggacgatctggatctgatcgatgtcgttaacgcgcgctccggtgagaagggtgtgccggtgaacctggatgacctataa

SEQ ID NO: 362282 - DNA, 981 bp, Pseudomonas aeruginosa
  misc_feature (814)..(823): n is a, c, g, or t
atgcattcgctaaacctggcagatatgaatatcgacaagctggcccaactttttcccagttgcgtaaccgaagcgactgatggcaagggcgggctgaaaaaggctgttgacttcgacatgttgagacaggtgctctctgagtatgtcatcgaggggcagcaggagcgttatcagctgagttggccaggtaagcgtgatgcgttgctcgcagctaatgctccgattgccaagacattgcttccttgtcgagatgaaagttctgattttgaaaaaacccagaacttgtttattgagggtgataatttagaagcgcttaagttgctgcaggaaagttacctggggaaggttaagctgatctatatagaccccccttataacacgggaaaagattttgtctatcgggataattttgcagagtcagctgaagattactttcataactctcttcagatggatgaactgggaaataggcttgtagctaatcgggattcaagcgggcgatttcactcggtttggctgagttcaatgtacagccggctaagtattgccagaaatcttctgaggcaagatggggttgtagtgatctcgatcgatgaggttgaacactcaaatcttcgcaagatgtgcgacgaagtattcggtagtcagaatttttgcggggagatagtttggaaaaatagtagcaaaaatgatcagtcttatatttctattcagcatgagtatttcgttgtctatgtcaaggataagcaagtcaatagcggcgattgggttgagcgaaagcaagggttagatgaaatatataaagctttcgatnnnnnnnnnngaagcaaatccatcaggcggcactcgactggtaccgtggattgcctccttctagcccagttcttgatagcaagcactatagctggatggatgagcgtggagtgtattttccggataatatctcagggccaaacgacggccaatatgtctacgatatag

SEQ ID NO: 362283 - DNA, 675 bp, Pseudomonas aeruginosa
atgactcggcccgcgccagctttgttcgcatttcccggccaggccagagttggccgtccggtgccgaaaaccaagatttatgagcacggccagatcggcagcgctctgcgtgaaaagtttgtcgctcagatcgagcaaataacctgggcctacaagctggcgccggagacccttaacctgtcggcgcggccggaggtgccggagattcagattttcaacatcgagctcaaaggcgcggagctggacggcgaagtcttgcgtgcgattgatcgagccattccgctgccgatcatttatcagctgcaccgagatcagcagacccgcatggtggcggcctttaaacgtcccagccaggccgaggcaggcaagtgggtgctcgatgactatcttgctggttcttggctgccagatgccactgagcgacagcccttgcctatggcgctggatcttcaggggctttacgaacagctgctgcgtagcctgctaccgcaagccgcccgagttggcgaaagcttgctcgagcagttggagcgtctagcccgactgcgtggccggcagagcgagtacaaaaagctggaagctcgcttgcacaaggaaaagcagttcaaccgcaaggtggcgcttaatgcccagttgcgggaactgaaaaatgaaatcgatcaactgagtgcatag

SEQ ID NO: 362284 - DNA, 309 bp, Pseudomonas aeruginosa
atgctcggtgcgccgctggatacgattacgctactgcattatgcggagaacagggcccggatggcacacaaaaacatcgtccgctaccagtgtcccattctgcgggatggccaaaaggtgtgggtggacgtcgaagactacgacaccggcaaggagcacgcggattacacttttgatggcattgcacgggcttacgtggcagaaggtcgtggcacacaggggagcgtgggcaacgcagagtcgtatctatttgatgcagcggatttagccgctttcgccattacgtggctggaagtgcggttcggttga

SEQ ID NO: 362285 - DNA, 966 bp, Pseudomonas aeruginosa
atgtcggacctgcgtctgtggccttggcgtccccgcccgcaggccgacgaactgctctctagttggctgcggcggatcgcgctcggcaactccgccaagctgcatagcttttgtcacgccgtctggcccgggctgcagatctggaatcgcgacatcgacgggctggcgccgcctcggctcatggaggggctggtcgcgcataccggggtcgatgcgcaggtcgcggagttgacgaccttccggccctgggtcggcacgttgttcgaagaggtccgggtcacgggggcgacccagtggctgctgcccgtgggcattcatcaccgcacccgccggcggccgggccagcagtggtgccccctctgcctgaccgaggacgccgagccctactatcggcgtcgctggcgcctggcgatcgccagcacctgtcctcgccacggcttggtgctggccgacagctgccatgactgcggcgcgcccgcggtccctcatcggggcgccgatccctggtgccacatctgcaccgccgatcggcgcgaccacccggtgatggcggccgagagccaggcgctacagttcgagtttcggctcagcgaaatgctcgcgcccgacgtcgtcccgcggaccgacttggaggccattcacccgctggcctatttcggcctggttcgtcaggtgatgaccgtgctcagcggcggcgagcggtcgcagggtctgcgcgacgaggtcgcgcgcagttggggcggtgatcccgcgccctacgccgccaagcagatcgagaccgcttcggccgctgatcgacatcgactatcaggcctcaccgcccgggcgatgcgcgggtggccgtggctgtttgtgggccactgcgccgacgcccgggtctggaagtcctgggcgtttgcggaccggcgctatggccgatcaccgttcgcctatgccgatccagtgatccgttacctgacgccctga

SEQ ID NO: 362286 - DNA, 933 bp, Pseudomonas aeruginosa
atgatcctcatctcgcaggaccgccgcctcaccaaggccgcccgcgaggcgcttgaggcggacaacaccgcccagcggctcaacctgatccggcagaaagtcttcatccgctacgccgccgccgatgcgatcaccgagcggcttcaggaggcgctggaggattatccgaccgaaggcgacagccacatcctgatctgggggccgtcgggcatcggcaaaagccaaatcgtcaagcgcttcgccaagttgcagaacctcccggacgatccgagggcgtccaaggccaacgtcccggtgctggtcgtgagcatggggccgaccggttctgcccgagggctgctggtgcggatccttgggcaactcaacgcgccctacggcaagagcgcgagcaccgacaccctttatcctgacgtcctcagactgctccgaaccagcggggtcaagatcctggtcatcgacgaattgcatcacatcgagaagggcaatcgcaaacaacgcgaagaggcgctggcgacaatcaagctgctcggcaatgacctcggcatcaccatcgtcgggtgcggcacgatcgccgcgctgcgcacgcttcggtgggacccgcagatcgagcgccggttcgagccgcatcgactcgaggtctggggtcataacgaacagacctatggcctgctcaacagcctggagacctgtctgccgcttcgccacgcttccgggctttccgatgacaagatcgcgacctggattatcaacgagtcggaggggaccacgcgcgagatcgcctatctggtgcgccgcgccgccctgatggccatccgctcagagaaagagcgcattgatcttccgctgctgcgctcgctgaaccatgtgaggccatcggttcggcggcagcgggaggacgtcctcctcagagccgcctcgctgccgccgctctga

SEQ ID NO: 362287 - DNA, 285 bp, Pseudomonas aeruginosa
gtgtcggtgtgggagttcaacgagacccgcaagcggttggtcgcccaaatcggcgacaagccggacatggcgaccatcatggcgtcaatggagcgccaacgcctgctggagcaggacgcacagaacgcgaagaagcgacacaggagtcgcttgaagcaggagcgtcggcgggtcggcgaacaagtcaccgccgaactcacgccgcatgcgcccatctccgaagacgcaccgccagcgccgcaggctccggttcgtcgcgacatcttttatgagatcgacgaatga

SEQ ID NO: 362288 - DNA, 1026 bp, Pseudomonas aeruginosa
atgagcgcagtcgcactggtaggtatcgatctcggcaagcacagcttccatctgcatgggcaggacaagtccggacgcgaggtcttgcgcaagaagacgacacgtctgcaaatgatgcgattcctgggcaacctgccgagttgcacggtggtgatggaggcctgcgccggctcgcatttcatcgctcgccaactgaagtcattcgggcacgaggtcaagctgatttcgccgcagttcgtacggcctttcgtcaagggcaacaagaacgacttcattgatgccgaggcgatctgtgaggcggcctcccgccccacgatgcgtttcgtgacgccgaagaccgaagcgcagcagacgctgtccgtactgcatcggatgcgcgactccctggtgcgtgaccggacgaaaaccgccaaccaggcccatggttttctgctggagtttggcatcagcctgcccaaagggctttcgttggtcaggcggctgcccgtcacgctagacgaatacccactaccccctcggttggtttccctgttgagccgactgcaccggcacttctgctacctggatgaacagatcaaggagctggacagggagatggccgagcaacttgccgaagatgatctcggctctcgcctgctgaccatcccgtgcgttggcccgatcacggcgagtctgctgtcggcagagatgggagacggtaagcaattcggctgtagccgagacttcgcggccgcagtcggactggtaccccgccagtacagtaccggcggtagagccaacctgctgggtatcagtaagcgtggcgacaagaacttgcgccgcctgctggtgcagtgcgccagggtctatctccagcgcctggagttccagaaaggagccttggccgactgggtgcgatcactgcgcgagcgtcgccactcgaatgtggtggtgtgcgccttggccaacaagttcgcccgcatcgcctgggcgatggcggccaatcactcggagtttgaaacagggccaagcgcttctgccgcctga

SEQ ID NO: 362289 - DNA, 2484 bp, Pseudomonas aeruginosa
gtgaccctggcggcggcggcgaacgaggagcatgcctacagcaagaccaggaaggtcacctaccaggaagacaaggtcgcccagcaaggcacccgcgtggatgccggcggcgacctggcgatcaatgccggacaggacctgcgcctgatcgcgagccaggccagcgccggcgacgaggcctacctggtggccggcgacaagctggaactgctggccgccaacgacagcaactactacctgtacgacaagaagaagaaaggcgacttcggccgcaaggaaacccggcgcgacgaagtcaccgacgtcaaggcggtgggcagccagatcagcagcggcggcgacctcaccctgctcagcggcggcgaccagacctaccagggcgcgaagctggaatcgggcaacgacctggccatcgtcagcggcggcgcggtgaccttcgaggcggtgaaggacctgcaccaggagagccacgagaagagcaagggcgacctggcgtggaacagcgccaaggggaaagggcagaccgatgaaacgcttcggcagacccagatcgtggcccaggggaatctggcgatcaaggccgtggaagggctgaagatcgacctcaagcatatcgaccagaagaccgtaagccagaccatcgacgcgatggtgcaggcggatccgcaactggcgtggctgaaggaggccgagcagcgcggggatgtggactggcgcagggtgcaggaggtgcacgatagctggaagtacagcaactcggggctgggggctgcgccgtcactggccattgccatcgttgcggctgcttacctcggcccggtgtatggccctatggccagcaatcttgccgttggcaccatcaataacggtggcgaccttggcaaagggctgcaacacgccaccagctccagtgctctcaagagctacgccatcgcggcggccacggcttacttgaccaccgagtacttcgacaaggtgctggacaccaagaccaacgtcgataccagcaaggtcacggtggacctgagtaccgtcagcggtgccagtcgcttcgccgccaaccaggcgatgcagaacctcaccagcacggccttgggtaaggctatggaacagggtggcagcttcggcgatgccctcaaggacagtctctacaatacctttgctgccgccggcttcaacgccattggtgacttcggcaagacccacaagctggaaaccggaagcgcgcaaatggtggtgatgcatgcgctgatgggaggcttggccgcccaagcgcgtggcgacagcttcgctgctggagcgattggtgcaggactcaacgaagcactggtgaaggacctggacaaactggtcagcagctactcgccggaaaatcgcgaggcgatgctggccatggcctcgcaactgacggggctggtcggggtagtcgcgaaggaccccggtgccagttacaaggagcttgaaacggggagttgggcggcgaggaattctgtccaatacaactacctaaaccacgaagaaaaccaggaacgcttcgaggccaagaaggcatgtaacggcggagactcaaccgcttgtagccgcgtcgatgaattaaaccaactcgaccggagtcgcgatctggcactacttacggcctgttcttcggacggtagtagcacgacatgtacagcgctgcgtaaagaggcttgggaatctgcccagagtttgaaacaggccagttggactccagaagcacaagagcagtaccggcaagccatgcagaacccgcaactgatggcatacaccattgagggcgagctgcgcagcatctaccagatcaacgacccgataacggcagctgattccaagcggctggccgaggcgatggccagcttgggttctgacttcatcccaggttatggcgatggcaaggcgtttgtcgaagcgcaagaccccttcgactatacgatggccggaataggcttggtgccgggcattggggatggcgctgcgaagatcctggccaaggcgaaggcactttacaaggaaggtaaagtatccgaggctgctgatttggtcgagggactgggtaagctgccggctccgcgaggtgcaaaaggcgaggtccaactgctacctaaacctggctccacgactgtgcctacaagtggcgtaggtgcgaatgcacaattcaaggttgattcagggcaattagggaagaagctaggaaagcacgtcgaagacttcggtggaagtgctaaaaatcctgctgatcggcagatggtacttgataaaatccaagatattggcaataacccagaaaaagtaatccctgggaaatttgcaggtcaagggagcggtggtacgagaggtgacgtcttcttccgaataaagggtgatgatgttgtggttacaaaaccggacgggacatttgtgacgattatgaaagatggaataaataatacgtccgtgaaaaatgcgctgaaaggtaatccacaatga

SEQ ID NO: 362290 - DNA, 297 bp, Pseudomonas aeruginosa
  misc_feature (280)..(289): n is a, c, g, or t
atggaggctgtcaagactaatgttatcgggacagaaaatttacttgaagcagcgatccagaatgacgtgcgccgtattgtttgtttaagcacggataaggctgtttatcccatcaatgccatgggaatctccaaagctatgatggaaaaggtgatggttgctaaatcacgtaacctcgaaaccacctcaactgtcatttgcggcactcgttacggcaacgtgatggcttcgagaggatcggtgattcccctgttcattgagcagatgcgctctggcaagnnnnnnnnnngccgctga

SEQ ID NO: 362291 - DNA, 738 bp, Pseudomonas aeruginosa
atgagatacagcgtttttaacttcaactaccaaaaagagagattagaaataaagccagagtataaacttgatttaactattgctaataatagaaacaaagaaaattattttgcatatcaaagcgagaataaaaagaaaaatttcgtcattactgatgattatgattttttcaaagataataaaatgatctatgacggaacacctgataagaaaaaaccttttttcgtcaagttcattgatttaagggattttggaagttttaaatatgcaaatgttaaaataacaaaaatcaagaaatacaaagcagcgaaaagcgtgtcattgacaacaaaattaacaaggcatatcgtcgcacaaaacgaacctataaataatgaaaaattcgataatgcaactttacaggcttttgatgaaactatgcacaatattgattttttcaaatttagagaacaatgctttgaatatagatttagaataagaggaatagacgataagggaaaaataatcggtaaaatagagttaaatgttggcgatttagcgtttatttattgtcctgagtatttccatattgatccgacagaagacagcacggaacgcaaaggaaatagatgctcgttagtcttcccggtttattctgttaatggcttagaatatgttgcagaagtgaacgaccaaaacaaacgctataaagaaatgattgagcaaaatagacttgttgaaaaaatgtttgaaatctaa

SEQ ID NO: 362292 - DNA, 312 bp, Pseudomonas aeruginosa
atgaccgaacaccgtaaagtgctgaccatccgcgaccccgaccccgagttgatccgtcaagccaagatcgctaccggcaggggcaccggcagccaggcgctcattgcgagcgccgaaaagatgatccaccagcgtgagcagatcgagcagatgcaagagcagatcgcccagatgcgcgagcagatcagcgcctatcaggcggtgttggctgatgcgcactcggcggccacccgcctggcggaagtggctgggcagggtgacatttttgccccatcgaacccgcttcgccttgggcaccgccgccagcgctag

SEQ ID NO: 362293 - DNA, 537 bp, Pseudomonas aeruginosa
gtggatcagaccgagatcagcgcggagatcgagcgcggcgcggccctcaagcgccaggtccaggcgctccgagcgactgtcgaggcgcgtagcggcctgaccgcgcccgtgctgctcgaaatggccgagttacgcgccgggctgcaaaaggagcctgccgcgattaatacggcctactggcgggcgctgctcgaccaggtgttggcccaggacggtttgcgcgacgccttgctgcaagccttcaccctgagtcgcgatatttacctgagccaactggacagtctggaacccgtactggcggcccgttgcagcggtcagcgggagcggcaggcgttcatcgcccagggtatctgggaagcctttgccgatgagctgaagcggctatttgcgggggcggaaaacggcatgggttcgcccatgctcgccagcctgccatcgcctctgcgcgacgaagtggtggccgagacgccgggcgagctgtaccggctccgacaggcgtccgccagtccgctcaatgggcgcaccgcactacgctga

SEQ ID NO: 362294 - DNA, 273 bp, Pseudomonas aeruginosa
  misc_feature (231)..(240): n is a, c, g, or t
atgagcagtattcagcaagaaatagaaaaagaggcaaaagcccttatagattcaatttgcaattacgctatcaaccacaaggacgatgaggatttttacaacaacatcaacgaattctacgagtggaagatagaaagccttatagagcatatggctgaatatagagataacggtatctctactttcttttgcattgaaattctaaagtctctttgggctttaggtgatttnnnnnnnnnngtgattttgcaccacttaacaatgggacaatga

SEQ ID NO: 362295 - DNA, 1953 bp, Pseudomonas aeruginosa
atggccaaaacagacgaagccccagcccgcaaggtgctctataagtacatccgcttcagttcgattcagcaggctaaaggctcatcctttgcacggcagaacgagcgtttagagaagtacgccgctgaaaacggctttgaagtagatgacagccttgacctgaaagacttcgcaaagtctggcttccacggcatcaacaaggaggttgaccaagggctaggccgcttcatgctcgccatcgagaaaggtctaatccctacagatggctcagcctaccttgccgttgagcagttcgaccgactaagccgggaggacattttcaaggcacaaaaaacgctcaatgacattcttgaaaggaacgtcaacgtcatcacgttgatggatggcagggtttacaccaagaaatccttgtccaatttcatggaggttctctattcactcttcctgatggaacaagctcaccaagagagcttgaagaagtcagaccgaatcaaaggggcttacaccaacaaggttaagaaccttaaagcccttgctaaagagcaaaggcaagcaatcattgaatgggaaaagcacaagactggtgataaaccagtgcttgaaccactcatcaatcaaattcagttttcttctcaggttccctactggattgaccagaaagtagaggttgtcagcgggagaaaattcagaaggtttgttatcaatgaagaaaaggccggaatcatccgttatgccttatctctcctaaatgatgacaacggctacatgaacgtagccgctacgctgaataaagaaggtgtcccaagactggactttgtttctaacaagaaacgcagcaccagaaaagatatttggacgaatagagcagtgaatgaattcgtcaacagtgacgcaatttttggtgatttgtcactgtatgagaatttctacgctgataaagaatttgaatatgacggcgtgaaggtatccaagaaggtaggaaaaagaactcacattgagaacattccaaactattacccagcagtcatagataaaaagcttgtgatgggcttgagagccagagcaaacgctaagaagaaaggccgagtagctggaagaactacaaataccaatctctttcagaaccttctattttgtggcaagtgtggcgactctatgcacttgatacagagcaagagaacgactaataaaggcacataccagcgtttctatctggtttgttacgcagcacgccacaaagcttgtgacgcaaagatgattgcttaccaagagcttgagcgtgaattggtcaagtatctggtcatgccaatcaatgaagctcatctaggcgatacgtccaaggtcatcaatgaagctcgaaatgaaaagattcttgagcttgaaggtgaaattaagggagtagaagaccagatagacgcctatcggcaggaaatgaagaacaacaagaacttgaagccttccattgccctcaccttcctttctgagctggagagtgacaaggaattcaagattcaccagcttaaagagcttcaactacagaaagacaagacaattgagtatcttgaaagcgagaatgtcagcagctttgacattaacaccgaggaaggacgcatagcctttaaggtagctgttaagcagcgttacgctggcttctttgtctttacagaagaccacgttgtcatggtatttgaacgcactggagcggctgaaatcttcaaggtagaaatccagaaccgcagaggcaaggttatggagccgaacagaacggcagacacaataaccttgttccaagagaagcttaaatacctgaaaaagctttctgagaattacaaggaaggtaagctttacgaactggtaaaagcctacaaagttaatgatattgatgtatttgaagaggaatatatcaaccgtggcttgccgcaaccattgagctatcaaagaaattttgattaa

SEQ ID NO: 362296 - DNA, 150 bp, Pseudomonas aeruginosa
atgcaactgactttctcgcatgccctactcgggccatccaagccgctggacaagctgctgttcgaccggctacgcgagatgccgagccaagaacgccgcgtcttgttcgatcagttggaaaatatgggcgtcatggaccgcaacacctag

SEQ ID NO: 362297 - DNA, 261 bp, Pseudomonas aeruginosa
atgaaaatcgaatgccccaagtgcggcggaaaagcccgtatctacacgcggcagaaagtgacctcggatttctgcaagctctactgccagtgccttgacacgaaggcatgtcatcaacgcttcgtcatgaatctgtcactttcgcactgcctcgaacgccccgaaacggtcctggacgaactggtgcacgagcgactgcgcggactcagtgtccagcagattaaagagatgcaagacaggatcgagaggacggcgatctga

SEQ ID NO: 362298 - DNA, 1332 bp, Pseudomonas aeruginosa
atgaatgacatgaccctcggtgccgtgtccgcccaagtgcgccccggcttcgccgtgtacgaccaggacgtaacgattgacgggaaggcgtaccgcgcgggcctctggtatcacgggcaagaacgtaagggcgcggcccgaacagtcgaacccgtggaccagtgggtatccatccccttgcatattgaggcggagaccctcgacgagaatggctatacggggcgcttgctgcgcttcacgaatcgcggacggcccgtcagatgggtgttgcccatgggcatgctggcgacgcacggcgggaacgtgctcaaggcgcttttccggcaggggttcaccgccgaccaccaagggcaccgccaagtgctgacctacctgcgcgaacacccacggcctgaacggttgatccagatcgcgacgaaaccgggctggcacgattcgggggtgttcgttctgccgggcaagcccatcggggcggcggacgtgtacctggacgcgagtcggcagcaagccagcttgtaccatcggcgcggcacgctcgacggctggcggcaaagcgtcggcctcggctgcctgggcgatccggcgctagaactggccgtctgcctggccctggcggggccgctgctcgatgccctgggcgtgcccggtggcggcgtgcatctgctgggcggaacggacagcagcgcgccgctggcggtgcgggttgcggcctcggtgtggggcgatcctttcgacctgaccgcttcctggcactcgacccaagctgccttgatccaggaagccatccagcgtaacaacacggtgctgccgctcaatggcggcgactggcccgacctgaacgccgagaagctgggggatgccatcgccagggggcggctggacatttaccgccatggcagttgctcgacgctggcctggcgcgtgctgatgttgtcccacggtcggcgtcggttgttctccgatgcgcgcaccgactggccgctggtggacattgcgacggatcggcctgcgcaagcagctcggcttgacgtggggcatgccctggagactcattacggacacctaggcccggccttcgtcgaaagcctgctggcctgtggtgggccggacacactggtgccgatgttccacgaagtgcggaaacgcctgcttgaagtggagacaccccacgtttggcgcgtggcggatcgtttcgccgctatggcggtagccggggagcatgccattgcctgcgagctgctggactggtcccgaggcaaggcgctcgaaacctgccataggctttacgagcagtggcggaccacgcgcaagcggcccgcctcacgacgctga

SEQ ID NO: 362299 - DNA, 291 bp, Pseudomonas aeruginosa
atgaagtcgcatctggattacctgcgcgagcggggctttgaagtcgcgtccgtggggcaggatgtcacggtattccccctcgaaaacctgacgccttccttgcgcctgtggatcaatctgcaccgcagcgaactgctggccgagctggcggcgggtgacggcatcgcgcggcattgtgtatggcgggtgtacctgcgcggcgagttcgtgtgcaccgccgtcagcgagccgatgagtctggatgaagtccgcaagcgggtgcggtttccgggagcggaggtgcgtccatga

SEQ ID NO: 362300 - DNA, 1557 bp, Pseudomonas aeruginosa
atggctgtcaagaaagacccctacggcgatcagtgggccggttccgacacgctcaacgacgccatcaagaagctgggcaccgatgccggtgcactgtatgaaaccaaggccctggcgcagttgaagaaaatgcgcggcagcgacccggccgccttcgcgcggctgcgcgccaaggtgaaggactcgaagatgctcagcatggccgagttcgaccgcctgacgattcccgccgaggatgaagaggtggcggcaggcggcgacatcttcaccgaggtggaagcctggccgaagccggtcaagggtgatgagctgctggatgaaatctgtgccgtgctgcgccgctacgtcgccgccgacaaagagaccattcgcgccgccgcgctgtggtccaccttcacctggctgatcgatgtggttcaggttgcgcccatcgccaatatcaccgcgccggaaaaacgctgcggcaagtcgatcctgctgactgcattgggcaagctggcctatcgcccgatgcaggtttcgaatatcgctccggcagcgctgtatcgcgccatcgaactgtggtcgccgacgctactgatcgacgaggtagacgccttcctggcagcctacgacgacgccaggggcatcctcaacgccggtttcacacgcgacagcgcctcggtgattcgttgcgtcggcgacgaccacatgcccacgcgcttcaacgtgtggggagccaaggcgctgtgcggcatcggcaagatcgccgataccctggccgaccgcagcatccccttgcgcctgcgccgccgtgtggcgggcgagaaagtggagcggctacgccactccgatccggtcatgtgggaacggctccaggcgaagctggctcgctggacggcggataacgcggtcacggtgggcgatgctcgccccgcccccatccagggactcaacgaccgcgccaacgactgctgggagccgctgctggcgattgccgaggcggcgggtgggcactggccgaagtcggcccggcaagccgcgattgtcctgcatggcctggagggggaagcgccgagcatcggcgcggaactgctccaggacgtgaaagcggtgttcgaggacaagaacatcaccaagattttcagtggcgagctgctggacgcactgctgagcgacgacgaatcgccctgggcgacctggaaccggggcaagccgatatcgacccggcagttgtcggggaaactgggtgattttgggatcaagtccaagcaaatccgcatcggctccgacagcaaaaagggatacgagatcaaggactttttggacgcctttaaccgctacctttcggctaatcccccctctgcaagcgaaacatcgaaacaaaccagcaaccacgcggcctccagcgatttttcaaacgaaacattgggggacggtgtttcggataaaaaaacgctacagcccagtaaccacgcgggttgtttcgatgtttcggataaaacaccccctcccggcagaaagggcggaaaaaagggagcaacaagccaggtttcgtatgaggaggttcggggatga

SEQ ID NO: 362301 - DNA, 384 bp, Pseudomonas aeruginosa
atgacgcctatcgacaaggtacttggccgcctggacaaggtgaagcgggtgaaggtcaacggcaagcaccgctggaaagcctgctgcccggcccatgatgacaagtcgcccagcctggatgttaccgaggccgaggacggcaccgtgctgctcaagtgctgggtcggttgcagcgctgccgagatcgtcggtgccatcggcctggaactgcgcgacctgttccccggcgagaagcgcgagcgcagcggccctagccccgccgccgtccgtcacgaacgcacgatctacctgatcggcaagaaccagctcgaccagggcggcgagatgagcgccgaagacctggagcgcttcaacctggccaagcaacgtttgggagtgcagtaa

SEQ ID NO: 362302 - DNA, 567 bp, Pseudomonas aeruginosa
atgaagaatattcaagagcgccgttcggcgctgacgggttcggcttgcccggaaaaggccgatgacactctgcaccaggaccggaccgacaactgtgagggctacgtcgcgccacaacgcacatgccgccacgttggcgaccggcagtgcgtccaggttggcgattttggcacggcggtcgcgggtgagcggggctatgccctggcgggcgaaagcggtttcgccctggccggtgatcgcggcacggcgcgggcgggcgatttcggcacggccatggtcggcgagttcggcaaggcgattgccggtgactgcggtatggcgtccgcgtgcgatggcggcagcgctcgggccggtttccggggcattgccagtgccggttttcagggggcggtcgcagcgggtgagttcggcgaactgcgccttacctactgggacagtccgagcaagcgctaccgcacggcggtcggctatatcggcgaggatggtttgctggcggacaccttctacaccctcgacagcagtcaccagttcgtcccggccaagacggagcgggaggcccgcgtatga

SEQ ID NO: 362303 - DNA, 387 bp, Pseudomonas aeruginosa
atgaccgccgcacgccgcaaggcatcccccgcaccgatcctgaccgagtggctcagcgcctcgcagttgtgcgccaagtaccaggtctgtctcaccaccctgtggcgctgggcgaagacccccggtttcccgaaggccgtgcgcgtgggtcgcgtgctgcgctgggatgcgggagaggttgacgccttcctacccaaggggctgagcgctgatgagctgtgcgagcgctatcagatcagccgggccaccctgtggcgctggacaaagctgccgggctttccggtggcgtccggcatcgggcgaatgctgcgctgggagccgcaagcggtcgatgcctttctctccaggcagcggcgagcgggcaccgctccggtccagtcggcgtaa

SEQ ID NO: 362304 - DNA, 228 bp, Pseudomonas aeruginosa
atgaccggcctgacctcaactcaagtgatcgataacgcccgccagcggatcgaagccgcgcaatgccgcgaaggactggacgttgcctgggatcaggggcttggtgcgttgcacacgctgctggccctggggcgtatcgacctgtccacctggcgctggcaccacgccgatttcgatagccgtgcggagcttcgcgcctttgccctggaacaagggggtgagcaatga

SEQ ID NO: 362305 - DNA, 201 bp, Pseudomonas aeruginosa
atgtccgcacttgttcccgccccaccccggacctcggttcggttctctgtcctggccctgctcggcgaggctgtcatcgtcaaccgcgtgaccggcacgtccgccagccgcacccggctgctcgccctggccgatatggcctatgccgtgtcgatggtctccgaactggaacggcaagccgtcatcgggggtgccaaatga

SEQ ID NO: 362306 - DNA, 192 bp, Pseudomonas aeruginosa
atgcaacaaaccccgccttcccccgtgtcctgggagtccgcacaacagctctgcaagcatttcaaagtctgccgcaccacctggtggcgctggagcaagacgccgggctttcccgcccccgtccgcttcgggcgcgccgtgcgctgggatagcgctgccgtcgaagccttcctgaccagtcgggagggatga

SEQ ID NO: 362307 - DNA, 1380 bp, Pseudomonas aeruginosa
atggcgaagcgaaatcggctcaccgagatggaggcttactcggtcaaaaaacggaaatccgagccagtcggcgcacgcggaaaaggcaccctgctcctggagcgaaaagcagccggaaccatcagcggctattaccgggagcgggtcgagggcaaggacaagcggatatacctgggtaccctcaacagaaagcctcgcagcggcaccgacgaactcaccttggacgccatgcgattagcggccttgcgcctctctcaaacagccctggaagccggtggactggagcacgtcaaactatccgcagccaagcaattgcattcctcgggagaaggttcgttcggggatctgctggatagctattgcgaccacctggagcaggccggaaaggtgagcgctcgcccggtgcgccgcatgcttgacgctcacgtgaaagcccaccacccggccttactgaggcggcctgcttcgaaggttcggcctgaagatatccagctcgttctgtcgcaggttttaaatcgccccccactccccggcggagcgggaagaactgcgaaagcccacgctgccaacggcatgcgaaccgtgtgcgaaaacctacgccttgcccttcaggccgccttcagccatgccgccaaagcccacctatcacctgaacgcctggccacccgaggaaaaaccttcgccatcagctctaaccccgtacgggacattccggcgatccgaggggcgcgccgcgccatcaccgagtcactgactcccgacgaactaggtgtgctgctgcgccatctagagactctgcccgaagcacaccgcgccattgctcaggcgttgatctacttcggaggccagcgtatcgcccagttctgcgccgtgccgtgggccgctgtgaccgacagcactatcagtctgctggacagcaagggcaagaaagaacgtccctgggagcacattctgccgatcacgccgcgcctgaccgagatcatgcatccattgctccagcaccggattgggccgggtccgttctctcttcgcgagagcaacaccgccagcccttcatcggtcatgaagattttcggcgcggcgggtcaatcactggcagctagcggcaaggcccgcccattcagttaccgcaacgtccgcgtcactgccgaaaccctcatggcgcacctgggcatcagctcggaaattcgcgcctggatactctcccacggacgcagtggcgtgcaggccaagcattacgaccgctacagctatctgccggagaagcgcgccgcgctggagcgctggggcgactacctggacggcctggcccgaggagacgcccctgcggataacgtcatgctgttgtcgagaaacagaaaagaatctgacgaacggtag

SEQ ID NO: 362308 - DNA, 321 bp, Pseudomonas aeruginosa
atgaaggattatgacttgctaaacaagcaaagagaaatactccaaatgtcgcaagttgatttcgtttcacacataatcaacaacggaataaatcaggttgtagaagtatctaacgaagaacttcaagcaaacattaagaccattgaaagaatcatcaatcaggttggagtaaatctcaatcaaattgccaagatgttaaaccaagggaaaacgccaaatgtaaatccaacactggaaggattgaataagaacattctaatattgatagggaaaatggataagttgaagaaggagagaataacaatcaaagaggatatatga

SEQ ID NO: 362309 - DNA, 1755 bp, Pseudomonas aeruginosa
atgcctaccgcatacgcctatatacgctactcatcaaaagcccagggtgaggccggtagggactcggtagaccgtcaaatggcttcaattcaggccatcacaaagcagcaaggtattgagctacggactgaaaacattttcagcgataccggcatttctgcacacgatggaagcaacaaacgaaagggaaaactaaaagacctgattgatatgattaacgacgttcatattaagccgggtgattatattttcgttgagagtattgaccgcttaagtcgccaaagacttttacaagccaaagagcttgtaaatggcattcttgaaaaaggcgtcattctaataacaacaatcgacgggcaaaggtatgaaaagcccaatgaaacaaatcgaatagatgaccttcagcaagatatccttttaagcgtcatcgctaaacgtgctcacgaagaaagcaagactaaatccgttcggcgtaaatcggcttggaatcgagccaagaaattagcagaagaagaaaaggccatttttaatggccataatccaccctatggcatttcatacaacaaagaagaaaatcgctttgaaattgtagaagaagaagccaaagaaattattgatattttcgagagcctgaaatatgtgggcgtatcgttgaccgttaagaaggtcaatgcttactcaaaaagaaaatggacaaatagaaacatcaagcaccttcttgataccaaatacgtgcttggctcatatatggctcaacgcagggatgaaaataagaaaaagatatttgaacgctacattgaaaaatattatccgcagattgtttcatatgagctttttaatgaagccgttggggcaatgaaacagagagcacatagaaaaaactacggcaatcaaaccgtagggagtttgaacatatttaggcattccattaaatgtgattgctgcaaggcttcaatgctctttgagaaacaaaccaaccccaagggggtggtttatccatatttccaatgcttcacaagaaaggaattaaagaacggctgcaatcagccacgttttcgctttgatttagcattcggtctatttcttgaacttgtgtatcaatccaccaccaaggaagactttgacccacacccttggcagttgttggagattgaagaagaaaggagagaacgcaaagaaatcactgcgaacggcatcacctattcacatgcaacaaatgaagaccttgaagaagaagaaaaacttgaaaacttcaaagacctactaattagcttgctttcgagcaaaaagcgaattgcagcagataacaagaaagttatcgaccttagcaattcattgcttgaacagaagagctacaaggaaaatcttgtgaagtcattctcaggcttcaccaatggagttattcccaaggaatttcttgaagtagtgagcaagacagaaatcaagataaatgagattgaagccgagctttcaaaacttcaagccgaaataaacaccagaaagacctcaatcaatatttactccgaaaacgacataatagacttatacaagacagaagaaggaagattgaaaatcaatcaattcttcatcagcaatgatattgtattcggctttaattttgaaacagaatcaagaaccctatatggcaagatttactatcaaggaatgatgatagataaagttgccaaacagtttagccttcataaccccctaaaagaattcggcattaacaacttgaatgaatattttaactaa

SEQ ID NO: 362310 - DNA, 168 bp, Pseudomonas aeruginosa
atggctgttgatatgttcatcaagatcggcgacgtcaagggtgagtccaaggacaagactcacgccgagcaggtccaggtcgactaccagccgcagaaggcggatggcgcgaaggacggcggtccggtcaagtacggctggaacatccgccagaacgtgcaggcctga

SEQ ID NO: 362311 - DNA, 1314 bp, Pseudomonas aeruginosa
  misc_feature (1182)..(1191): n is a, c, g, or t
atgattagaaagaaattaagcacatacaaaacaaccggatcaataggtaacggctgcaattacatatcaaaaaaagccgcattggttggcggcagtgaagcaaaatttgaaaatacgagtatggaagaatactcagcacttgcggttaaaaaatttgagcaagtcaataataaatttgaaaataaaaacggcagaaagcaagaaagcaaagccatacacgaaatgatctcatttcataaagatgacgatttaacgccagaaaaagccgccgaactcgctttgagtatatggaataaagcccttgatttagacaatagaaaacatagatgggccgttcatactgataccgatgaaatgcacgtccatttagtttggaacaaacgaaataatcaaggcgagatttacaatcaaaaagatgattatgcactttttgaaaaattgctttatgaaacagaaatcgaaaatgatttaaccattgttaaaaatagaaaattcctaaaccctttaacgccaacaaatccacaaccatcaaaggaatacaggcacgaacaaaaaggacttaaatcagaaaaatcaaaatttaaagacgaggtgaaatcagcgattgataacgctatgtcttcaagtgattttctcgaaattatggacgctcgcggcttttccattattcacaacggaaacaacgcatacacgcttgaaaaagacgggattgggtttaaggcttcggacgtgggagcgtcctataagcacttaaaaggccattttggcgatgatccagggttccccgctactctcgcccgcctgaacagaaaaccacgcgaaagcggcccagttggaagccttagcggcccacaattccagtccgcccaggactacgacaagaaacagaagaaaatgaaccgcgttcttgatcttcgttttgatactcaggacgggcagtcttataaatggaacggatcaaatcgtgaagcattcatttatgaaaataattctgcaacattctatacaacaagcccaacggctattaaagccggttttcagcgtcttgcagaaaatgcaaaaaatgaaaaagacaaagaaatgtatttaactggcactaatgattttaaacgtaatgcgtggttagaatttcataaaatgaatttagatcaaaaaggcttttccatttctggttataccccnnnnnnnnnngtaaaatctaaatattctgttctattagaaaaaaatgcagaaatgcaagagcaaaaaaatattgcgaagcaagaagaagataaagaaaataataaaaggcgaatgaaattaaagccgcaataa

SEQ ID NO: 362312 - DNA, 168 bp, Pseudomonas aeruginosa
atgggctggagcaagaagaagctctttgaaggcttcgcagtcaaggttgacctgaccaatgaagaactcatcagtaagtttgatggcaagattggtggcgtgaccgtagaagcccttggcgacaaaatgccgaagctggaaaccaagaaagtaggcaagaagaagtaa

SEQ ID NO: 362313 - DNA, 588 bp, Pseudomonas aeruginosa
  misc_feature (497)..(506): n is a, c, g, or t
atgactactcaagaaaccaccactcagaccaccgaaaccaccgctaccccggtagtcttctttggtaaagactttaccaccatcgaaggtaagaccaacaagaccaatgctgctgtcttgaaggaaaccttgggccagttcgccctgaaggtgaacaacaccaagatggaagacaagatcaaggtggaaggcgacaccatcgaggaaatccaagccaagctggctgagctgatgttgcagaagcagaacgcagcccgcaccgccgaccaaatcaccctcgctaccgccaccatcactgacattctcaagcacaagagcgacgaactcggctccttcctgttcgagcttctggaagaagtggcagttcaactgaagtctaccggcagcactggcaccaagaccacccgtgcaaactacaccgccccggccaagaccctgtatgccttcaaagtcgaaggcgtgaacgaaggcaaaccgttcttctctatgaacactgnnnnnnnnnngcttgaccgccgactatcaagaaaaaatcattgctggccccaagaaagaccaaatgggctggagcaagaagaagctctttga

SEQ ID NO: 362314 - DNA, 678 bp, Pseudomonas aeruginosa
atgaagctggccgttgaaacatacctcacactgtccaacccgtttaacgtctttgctttccaagcgtttgatgagttctattcgtgcgaagtggacacgattattaaccctatgtcgtctcagatgacaaagcttgccttcaagataaagccttttactgaacaacggctttggagcgttaccaaagagatttcggaaagggtggtatctgctgaattctcgataagcaagaaagggctgagcgttaagcaatacatgctcgatggtgattcattctggattaacactgacaacgacaaagccctatttggacatttcgccacgctgaaaactccactgttcaggccgatgcttgaacatagcattgatgtggtgaacaagaatggcccactgttcagccagattgaaagccatgtgaatacatacttcatctaccaatcaaccgcctttcctgacctcaaaaagcacttcacaaaagagcttctaaagacgatgaatcggaatgctgaagagtggtatgagtacagaaataaggtagaagccaaggaaagtctattggctggggtaaaccccttaaaccctgatgaatacgggcttaacgtccttcatatggtgatggggattgattaccctgagttcttggcgttgcacttcaagaataccggcaaggacaagtag

SEQ ID NO: 362315 - DNA, 699 bp, Pseudomonas aeruginosa
  misc_feature (469)..(478): n is a, c, g, or t
atgtctttgagggatacaatagaatacatcaaagaaagatttcttgatgatgaaatagttgttttcttctataagaatgagaaattccacatctacgcctatgaagacttcattcatgaagacgcgatttacgagcacttcaactctactattagagaggttactaaggaggaatttactcaggctgaaaagaaattcaatgatgattttgatttttcatcagagccatcatcggattcaatagctaacgtcatgaaaaacttaaaagaagacaaaccagcaatattagaagtgagaaaagaaagagaagagccaaatagcttaaaggaatcctcaatattcttattgtttgcaacaatattatttagcagtatattttcgtttttagtcctaatcttagaggattggcacaagaacaacactccagttaattatattgtcaattccttagactccataggtttaatgnnnnnnnnnnatagaagattgaaaacaacagaattactttgttacatggccccacaaacaagaaccgaagctttatttacagaggccgaaaaagaatactgcaaagaattaacaaagaacaatagagttaaaagactattttatgctccatcaagatttttctcctatataggctttgccatatattcaccaccaattgaaaaaattgaaaaaatggtaataaaacactga

SEQ ID NO: 362316 - DNA, 816 bp, Pseudomonas aeruginosa
atgaactttaagaaccaattaaacaagatagtagggagtcacattagcaaaggtggctttgctagagccgaaagaaactcaaaagatgaagtgagggtagaaaaccaattcaacattatgaatgaccacgataagaaattttatcttcttatcagtgctacgactcatgagcttatgagtcttatggtcaaggaatttgaaattaacgctgctaatgtaagactcacattagttgaaaagaaaaccaaagagcaaaaattcagagaagctttcaagctcgttgatgtggatatgatttgctccaagcacgacaaggtaacttgtaagagttgctttggtagcaattatgacttcgtgccagttgggagaactgccgctgaattcaaaaaggctaatgatgcaatcaaggctgtccatacggaaagcccaactgatagagctttctttagccaattggttgatgaattgagagggaaggtgattgacaatccaattgtgttggatagccattcaggcttgaagaatggagttgctacattcgtgcaaaactatcagtttgagtatgacaacaagcgtggattcactggaacaatctgtatccctgaataccttgagggattcatctatgagatttgtcttgatgattcaactgactttgagtctaagcgtatgtctttgattatcgaagtagagactttatatagaagcctttctatggcttgggcttcatatcaaaatcttaaaaagaaaaacaagccaaggtcagttgctgaatatctaggtaaattttctgagcaagataatgtgtttatttaa

SEQ ID NO: 362317 - DNA, 1500 bp, Pseudomonas aeruginosa
atgaacgctaatgaagctcagaagctcattgatgaacataaggccaagctagccgctgagagagagtttgtagaacagaagatgaaagagcttgacctctattggcacccaaaaagaggcaatccatacgacaaggacaaagagaaagaatgtgttgtctgcaataagtatggacgtgctctagtcacctacaagaagctctctggtgacataaacattcacgcttctggtatgcacaatgaagcggccttggcgttctctgcggctatggcctatgagagattcggtcacgacaaggtgcattggaatgtgtcaaagaccttccgtaaacacgctggctctgctgaagaactcgccttgatagctgatagaacgcttgacgctctcattaaggctggctttgagccaaaccaagtagtcttccctaaagaccttcaatacctcgttcaacgcaaggtggatgagcttatgaacaacgccacctttgaccaagccactccagaacaggcgagcgaggccaaagcggtgatggatgagctagcggccaaggcgaaggctgaaaacgccgctgctgacctcgatccggttcaggaagaaaccatacctgatgaagctcctataaacgctcctgttaagggtgttggtggtgctgagccagatccagcggttccacctgcaggcccggttcctgccgctggtgatggggtaggggagccagcaaccaaagcccctgtagctaagaaggccgtccatgtggtcaatggttgcttccttgtgaagaaccacgaaacggacacataccttctctacgggataaagggtaaggctcctgagaacatgcaagctcaaaccatgagcaaggtgattaacaagcttgctgaaaacctaaaccctgaaaaccctaaagagattattcaggctattaagggctgctggacgattgataagcctctttataccttgggtgaaatcaagaagcatgaagacgctattttgaatagctatgaaggtagcaagaaagagcaagccgctaaattcaaggaagaatacaactataagtctgcttaccagactcttaatagcttgaagcttgaaatggatgcaccaaagccaatctctgattctgcaccaactgaaaataccaacattgctggttttgaagtagatgagacagttgattcagacgtaccagaatacgaaagcgtagaacaagctgaacagcatgtagctgacgtattgaatcgtcctgatgttcttgattcagaagaatacaacaacttgaagaaagcaagaaatgaagctcaagctaaggttgatgaaccaaatattgagaatgcttcaactgctggaagctctaccaaggctgttgatggtttagacgactcaaaagctttggctgatatagaaaaagcaatgaaggagaaacaacaaaatgccattgatggtttgaacaaggcaatggcaaacaaaacaaacaaactagaaaaggagaaaatatga

SEQ ID NO: 362318 - DNA, 384 bp, Pseudomonas aeruginosa
atgaaagaagaaaaagagaatataaagaaaaaatcaattactcaatacactttgcaagaattgattagaagaattgacgaaatatgtttgttgttgaaaaacgacaaattgaaatcacgcataaaacaagccgctatggatgctttcacaaatggcgatacccaagcattaaggtcgttattgatcctttgtttagtcgctcaaaatagcgaggaactgattgctgataaagtggaaaaagaagggttggaatatgattttgtccttaaagaatatttgagcgaaatcgagccagcaaaagcaattaaagacattactcaagcaatgggcgaggtaagttctcaattaaagaataaatcaggtttcaagccaaaaaatgactaa

SEQ ID NO: 362319 - DNA, 402 bp, Pseudomonas aeruginosa
gtgcatgacgtgaagcagatgatcgacccggtaatgcgtgatgaaggcgacctggtggcgatcatcggttccgacctgctggcagcggagaagagcacgctgtacgccgctcagggccagaagccgaccgagaaggagcgaatcgaagaggtcaaggtcactgagacctatggcggcctgccctcgctgctggtgccgttcttcccagtgatgggcgtcgtcgttaccagcctggacagcttgtcgatctactaccaggacagcagttggcggcgtcatctgctggagaaccccaagcgctcccgcgccgaggacttcaacgggcgtaacgaaggctacgtgatcgagcagctcggcaagttcgccgcgctggagggatcgtcgctggaactggtgcgctga

SEQ ID NO: 362320 - DNA, 153 bp, Pseudomonas aeruginosa
atgaggcacaaccttacaccagatggcaaattcaccaagtcagtgaagtttaatggagcagtagaagacctatcgagcattgaggttatcgaagataacattgatgaagaacaaaccaacaataaggagaacgaagatgatattaaagaataa

SEQ ID NO: 362321 - DNA, 201 bp, Pseudomonas aeruginosa
atgagcttgctgctgagcattcttgcagttaatgcccttctccatttcagtatcatgggcgatcgtcagctcagcgattgctttctcggccactgcgagggcagcttccgcctcaatgttgccctcattgagggtgaagacccctggctgggatgcggcttcatggaaatttttctccatgaatgcatggttgtagactag

SEQ ID NO: 362322 - DNA, 426 bp, Pseudomonas aeruginosa; identical to SEQ ID NO: 325380

SEQ ID NO: 362323 - DNA, 318 bp, Pseudomonas aeruginosa; identical to SEQ ID NO: 325381

SEQ ID NO: 362324 - DNA, 135 bp, Pseudomonas aeruginosa; identical to SEQ ID NO: 325382

SEQ ID NO: 362325 - DNA, 357 bp, Pseudomonas aeruginosa
atgagcaagaaaagcaagcgcaataccaccgagcaggtgactcctgagtttctagccgctggccgcctctacaccagcatgtgcaagtccggcttgtcgcataccccagaagccgcaactgcgtttcagcgcatgtacgacgcagccccggagtcgttccgccaggaaatgcacgacatggctgtgcagatggggctgatgcctgccgttccggatggctataccgacgacggagagcccgtttacgaactggaagggatggccaagcggctgggcattgatcccgaagaggcgaagcgcaaagacgaagagctgggcctcaagccgaacaccctcaaagtccatagggtgaactga

SEQ ID NO: 362326 - DNA, 285 bp, Pseudomonas aeruginosa
atgccgatcacccgcatccgtgaggtgatcaatgaccgttatggcctgtcggccaccgtggtggacgcagtggttcggcagatgcctatcagcccgaagccctggggcatggtccgcaacggccacgagaacgcccagggcagccagtacgcggtctgggcgaccagcgatatcactgcggtcttcaagcgcttcgtcagcgagtgcgagcgggttaccgagacccaagctacccatccctatttcccgggccggttccggctggccccgaaggtgaagtcatga

SEQ ID NO: 362327 - DNA, 297 bp, Pseudomonas aeruginosa
gtggtgacaacggccgaagagatcgaaggctacactatagtcaaagccattgttcgatccgtggttgacgtaaagcgcatcgctgcccgcgacactcagagctacttcggtatcctattggatgacaacaaccgtaagcccatcgctcgtcttcacttcaacagatcacaaaagtacatcggaactttcgattccgaaaaaaacgaaacccgtcaccctattgagtccttggatgacattttcgctcacgctgaagcgctaaaggcgaccgccatctcctatgacacccagtcataa

SEQ ID NO: 362328 - DNA, 312 bp, Pseudomonas aeruginosa; identical to SEQ ID NO: 325389

SEQ ID NO: 362329 - DNA, 996 bp, Pseudomonas aeruginosa
atggggatggagtttcccatcgcccagtcgctgctgtcggagatgatcccggccagccgccgcggcaagtacattgcgctgatggacggcttctggccgctgggcttcgtcgctgccggctgcctgtcctacttcctgctgccgctgaccggctggcgcagcattttcctggtgctggcgctgccggcggtgttcgtcctcgccatccgcttcctgattcccgagtcgccgcgctggctggagcaggccggccggcgcgaacaggcggaccgggtattgcgcgacatagaagcacgggtgatgcgttcgctgggcctgaccgagctgccgccgccgctgcgccagccgcagcgggaacgcagccgtccgggcttcttcagcgccttcgccgaactctggtcgccagcctaccggcgccgcaccctgaccgtctggggcctgtggttcttcgccctgctcggtttctacggcctgacctcctggctcagcgcgctgctccagcaatccggcttcgccgtcacccagtcggtgtactacacggtgctgatttcgctggccgggatacccggcttcctctgcgcggcctggctggtggaaagctggggccgcaagccgagctgcgtgctgatgctcctcggcggcggcgcgatggcctacgcctacggccagaccgcggtgttcggcggcagcctggcactgctgatcggcttcggcctggccatgcagttcttcctgttcggcatgtgggcggtgctctacacctatacgccggaactctatccgacctccgcgcgcgccaccggctcgggcttcgcctcggcggtcgggcggatcggctcgctgctcggcccgctggtcaccgggctggtcctgccgctcaccggccagggcggggtgttcaccctcggcgccctctgtttcggcgtcgccgccctggtggtctgggccttcggcatcgagacccgcgggcgcaccctggaggagcttgccggctga

SEQ ID NO: 362330 - DNA, 3588 bp, Pseudomonas aeruginosa; identical to SEQ ID NO: 360378

SEQ ID NO: 362331 - DNA, 552 bp, Pseudomonas aeruginosa
atgaagctgccagaaccgattcggccgctctatgtctggtgtggctactttgtcctggctttggggttgacggctgtaacgagtgatgctgagtgggtgaagtccgcgatggccatctacctagtgtgggccatcgtcgagaccattcgattcatccgccacaagaagaagggcaagagcagccaggcgctggctcagcagtggattgacgtggccgagaatggccgtagctcagaagcacgcgcgaataacaccttcgagcacaacgatgctgagtacatccaaggcgaaacgatttggacgggggcgaagcagatccgcttcaactaccgcaacgcgcaaggcgagtactccgaccgcgaagtgacggtgcataaggtggtggccggtgaagacgacacctactttgtaggcctctgccacatgcgcaacgagccccgcaccttccgcctggatcgcgtgtatccacgcaacaaggttacggatacggctactggcgagatcaacaccctgcgcaagatcctgggcgttaagcgccgggctcgtagttaa

SEQ ID NO: 362332 - DNA, 252 bp, Pseudomonas aeruginosa
atggagttagcggagaagctgaaggcgattcggataagggagggaatgacccaagcggagctgtgtgaggcgacgggtatcagcctgagcagctacaagaaatatgagcttgccctacgccttgaggtgagttccgttgcgctgttgaagatcacgggccatacgcgattcaagaagtacgttctatggctgatgactggtgacaccgcgcccgattgcggtcagatcagtccgctggagcagcagaaatga

SEQ ID NO: 362333 - DNA, 231 bp, Pseudomonas aeruginosa
atgcagattgctatcgacacgccatacgtgactgtcgccgagttcgtgaagcgatccggccagtccaaaagcgctgtggaaaacgagatcagggcaggccattacctgatacggccaaagagggagggctcgcgtggggccgtgctgatcaacatggttcacatggccctggaagctgcagagcaggcgcagcgagtgcgcaacgaatcgaaagctggtcagcagcagtaa

SEQ ID NO: 362334 - DNA, 2691 bp, Pseudomonas aeruginosa
atgaacgcacgtgtaagccaggaccagttcgacgagatctaccgtcaggacgttctgccggcgctggaaagcgacgccgaactggatttcaagccgcatgaggcttcggaaaagtacctgaacaacggggtatgcccgggctgtgggaagcgctcgctgtacatcagtcgccagaagccctttcagctgaaatgcaatcggctcaacaagtgccagtacgaagagaagacccgcgaccgttactcctacctgttcgaaaacctctccgatcgcttcccccgatcggaggccgacccgcacgccaccgctcgcgcctacctccagcgtgctcgcgggttcaacactgatcgacttgccggttgttacgagcaagcgcggtacaagaccaagagcggcgagtgggtggaaaccgtccggttcccgctgtgcgacggctactgggaacgcctgatcgaccagcgcgggatccaggccaacgaaggcaagaaggcccacatcaagtacggcaccaactaccagaacaaggggtggacaccacctggccaggtcatcgagaagaacgacaaggtgttcatcgtcgaagggatcttccatgccatcgcgctgtggctcgccggctataaggtgatcgcctcgatctcggccaacaacttcccctgggcctacgtcgacgagcaccagggcaagctggtgacgtggacactcgccctggacaacgacaaggctggccgcaccttcacggtgaaataccgcaagcagttggcggaaaggaacgagctggtggccgtcgccctgctgccgctgcagggcaacggcgagccacaggactgggatgacgtctaccgaatcggccgcctggacgaaaccctggtaaacgatgccctgtacgaggggcggcttttcacggcacccacaccgctgaacaaggcctatgtcatgttccagcgcctgaatcggtcgttcttcctgctggagttcggcaatcgcctgtactcggccagggtgaacaagaacgagctgcagacagatggtgaagccccgggcggtggtttcctggaagagttcaagaagcacaccaccgtcgagcaggtcgccaattgcgtaccgcacttcgaatacatccagagcgacgtcattaccaacgaacagcaatacttcttccgcgtcgccttccccaacggtcgcaacagcgtgacggtcgccctgacagctggctctatcgctgagccgcgggccttcgccaaaacgctgcttgagcgcacgcctggcggggtgttcaacggtggcgagaaggttctgtcgatccttcgtgagcagtggacagagaacccggacgtggtgcggaccctaccattcgtggggtatgacgaagaaaccggcacctattgcttccaagacttcgggttcatcaagggccgcgagctgctggccaacgaacaccgctatctcgacacagggaagggtgcgctgaaaaccgcgttgcaaagcttgcatatcacctatggcgagcaggtgaacctggactggttcgacgacctggtggccgtacaccagatgaacggcctggccgctctttcctggtggaccggatcgctgttcacccaacagatcaagaagatggtcggtaattacccctacctggagttcacggggcagggcggtgcgggtaaatcgtccctgctgcgcttcctctggcgtctgttcggccgcaccaatcatgaaggcatcaagcctaacggtggcggcaccagtaacgtgggcctggcccgtgtactcgcccaggtcagcaacctgccggtggtgttcatcgaatccgacagcgagtccaccgacagccagggacgcatcatcatcaaccagttcaactgggacgatcacaaggatctcttcgactacaacggcacattgcgcaccactggtacgaaaactaccggtcccgaaaccgccagccttctgttccgcgccgccctgtgcatcgcgcagaacaatcaggtagtggcgagcgaaccgaccctgacccgtatcgttcacctgcacgcgaccagggaccaccacaccattgccttgaaagcagtcgccgaccgcctgcaccgcctcgaggtcggccacctggctggctacctacgtcactgcctggccaatgaaaccttgtggctggagcgcttctggaaagcccgcgacacctaccacaagttcttgctcggcgttagcgcgctgaagcacttccggatcgttgactgccacgccacggttatggcggcagcctatgcgacccagggactgctgccagggtggaccgacgaactccaactgcaagtcgtccagcatctcaagaatcgcgcacaacacaggcagcaggtcatcagtagcgaacccgagctgctgaccaagttctggaacatctaccacttcctcaatgagcgggtggtaacgatcaccgaccaggacgggacccgggaagagatccacgaaactctcaaccattcgaccgatccagccttaattgccatcaacctcgagcacttcacccaagcctcgaagaacgcagggcaggaactcctaccctcgaccttgctgcgtcgtgacctgcccaagagccagacctatgccttcatcgaaaacaaaaaggttcgatccgccctggagaagcgccctctgcagtgctggatctttcagaagaggtgcgtgtga

SEQ ID NO: 362335 - DNA, 720 bp, Pseudomonas aeruginosa
atgatgacctgcgatcccgtcaccggcgcctgcctcctgcccgagccagagtctgcgcaaagcgttgcgcaatctggggcgcacgccgctccaaccgttcactacatcggtgatccgatgtgctcctggtgctggggcatcgagccggtggtcggcgagctggcggctttctgcgccgccgagggcatcggcttcgcgctcacggtgggtggcctgcgcgccggtggcggcgatccctggaacgcggatttcatcgagttcctgcgcgccgaatggcgacgtatcggcgaagtcaccggccagccgttcggcttcaccctgctcgatgcgccgtatttcgactatgacaccgagcccgcgtgccgggcggtggtctgcgcacagatactcggagcggacagcgcggacccgagcgcccggcgtttcttctccgcggtacagcgcaggttctacgtcgagggcagggaccccaaggaaacctcgttctatgccgacctttgcgaggaggcaggcctggacttcggggccttccgttcgctgttcctgtccgccgaggcccggcaggcgacgcaagccgctttcctacgttgcaggcagtggggcgtgcgtgcgttcccgacgctcgctgtcgagcgccgcggggaactgctgttgctcgccgccggcttcaccacccgtgagcaggtgctgtcgcggctgcggcggggcctggctggctga

SEQ ID NO: 362336 - DNA, 270 bp, Pseudomonas aeruginosa; identical to SEQ ID NO: 361818

SEQ ID NO: 362337 - DNA, 870 bp, Pseudomonas aeruginosa
atgattgagtggtctactggtttagttgaggctattgctagaagaagatgtgttgtcatgattggggctggtgtctcaaagaactcacaaaatagtgaggggaaaaggccggcggcgtgggaagagttcttgaggaactgccttagtgatattagggatggtacgtatattgaagagcttcttggtagaaaagactatcttacggcatgcgaaataataaaatcaaaaattggccgtgatagatttattgacctggttcaggttgagtatcaacgtcccggctatcaacatgctgcaattcataagcacatatatgatttggacgtttctattgttgcaagtccgaattttgatattatttatgatacatatgctagttctgtttcatctgggtctgttgttgttaaaagtcatattagtgatgatatagctaattatttgcaaggcggggatacccgtctgattttgaagacacatggttctgctaatgatccgcaatctattatatttacaaggagggattatgcggaggctagaactaagtatgttttgttttatgaaatacttaaatctctggctttgacgcatactttctttttcattggttgtggtatggatgatccagatataaggatgttgtttgaagatatccagtttgcacatggaagaatgcctttccattatatgactattccagagggagaagctcatcctgatttgcaggcaattgcctctgaatcaatgaggatgaggtttatctcctactcttcagatgatggccatagggagctgtctgactcactagaggacttggtagggcgggtcgaagattataggtcttctactttaagtcaatcgcagaaatggtaa

SEQ ID NO: 362338 - DNA, 1161 bp, Pseudomonas aeruginosa
atggcagaccatcacacccgtcacaacccgccggggcaagacaccctgttcgccacgccggcctcgctcatgctcgatgctcgcctcacacccctggagcgtaacggatggcaggtgctgcgcatgctgcgcgctgccgagggtatcagcccgctggcgaacctggggcaactgcgccgctacctcacctcgaccccgctgggccagcgtgccggatacgaaacggcttggcgcgttcttatcgtgcttcggctgacggggtggatcagtctggtgggccagcaccgcgaccctctgaccggccatgtgctcactgagctgtatcaggttcacgaaagcgccctggacttccagcaggcctgcgcgctcgatgccagcctgcccgcgcttctgcaagcctccatcggtcacgaaaacaaccaggtggatcgggtggccatccacatccaggcaacactgccgcaggcgcctgaagcggcttccctcgcggctcacgatcagcgccacgatgacgatgatttgccccctacgccaccgccgccacaagtgaaccaggcggcaggccaggcaccatcggccggcggttctgctggcagcacggctgttccgcaacagaccggacacgaacgccagatgacggctgagcagggcagtacgtataagacgtatatgtataaaaaagaacgtacgtaccgcgcgcgcgaagatgacggcgatcccgcatcgcggccggtggatttgccgccttgcctgagcattgcccagccaaatcaacagaaggacgtgcaggccgccttgcggcggctaccgtcgcaacatcgccaggaagtgctggacgaattgcaggcacgcagccagagcggcaccgtgcgcaatgtcgtggcctacttcttcgccttggtgaagcgcgttttgtcgggcgaattccgcctgtgggcgggacgcaagcaggtagtgcctacccttgagcctgccggaagtcgcgctgccgcctccacccgcaccgaagccgatcctgaacctgcggcgcaacccgcatcgcgtgaaacggcgctggcgcacatcgccaatatccgcaagatgctccacgcgccgatgaatgcgggcgatcttgccgcacaggtgatgcaggcccgaggatggcggcctcgcccagcctag

SEQ ID NO: 362339 - DNA, 759 bp, Pseudomonas aeruginosa
atgcatgtactgatcgttctagcacatccagagaagcaatccttcaatgcccatcttgccgaggaaacgcgccaaacgtggattgatctaggtcatgaggccaccttgatcaatctatatggtgaagacttcgacccccgcgaggccgattggcactactctgccagaaaagatgtggacaagttcgacgcgatgcaggaacagcgtcatcactggcacatgaacaagctgcccagcacagtcgagcatcatatcagtctgctttcacgagccgatgccgtggtcatccatttcccattctggtggttcggtgcgcctgcaatcctcaagggatggttggatcgtgtcttcgtctacggcggcttgtacaaaagtgatatgcgacatgaagatggctcgatgcgagggaaaaaagcactgctcgtttccaccgctggtgcgtcgatgcaagcctgcgcgccgaatggacgtgacggcgacatgcgtttgatgctctggccattgatgtactcgttacattacgtcggctttgatgtccttgagccgcatttaatctatggcgttcggggaggactggttgcagacgaagaaaaacgccaacgggatcaattgacacaacagtcccttgaataccaggcaaagctggcccgctggacagattggccttcggttccattcaaccgagatgaggatttcactgacggacaggtcttgaagccgaatgcaccggtctacagtccgtttgttcgtcacgtgtag

SEQ ID NO: 362340 - DNA, 372 bp, Pseudomonas aeruginosa
atggcttttccgggcgatgtctatgcgagcaactgctcggcgcgcgatgcgcttgcattgatctcggggaaatgggtgatgctgatcctaccggcgctagctccccggcccatgcgaaacggggagttgcttcggcgtatcgaaggcatctcgcagaaggtgttgacccagacacttaggcaattagaacgcaatggcctgatcgagcgattagaggtggcggcgaaaccagcccatgtcgagtatcggctgaccccggtagcctgctctttggtcgacactctggcggcacttgatcggtgggcagaacaccattttccagagctggacgcagcctgggagcgctatgacgacgtgcactcggcggagtag

SEQ ID NO: 362341 - DNA, 264 bp, Pseudomonas aeruginosa
atgccggcgattgaattgccgatcagcatggtgaccaacacgctcgatccgcaggtatgttttgccgagcaagggttgggcatcgcttgccttccagagattgccgtgcgtcagcaattgcaagacggcaagctaattaccgtgctcgacgagtacaaccacgaaagcatggtcttccatgtgctgtggccttcaagccgtcacctctctccgaaaatcagggcatttgtggacttcgttgctgagaacttgtttcctttctga

SEQ ID NO: 362342 - DNA, 267 bp, Pseudomonas aeruginosa
atgaagcgatcgaagttcacagatagccagatcgtcgaggcgatcaagcgtgttgaaggcgggttggcggtgccggagttgtgccgggaactgggcatcagctcagcgacgttctacaagtggcgctcgaagttcagcgggatggatacgtcgatgatggcgcgcatgaaagagctggaagcggagaatgcccggttgcgcaagatgtacatcgaggagaagctcaaggccgagatcgcctcggagtacctggcaaaaaagtcctga

SEQ ID NO: 362343 - DNA, 825 bp, Pseudomonas aeruginosa
atggccaaagaggtagtcaggtgtaggcgagcatcgatccgtgtggcttgcgcggtcttccgcatcagcgaatcctgctatcggtacgaagccaagctcaaggtcgagaacgaggagatcgcggattggctgctgcgcctgaccgacaaccatcgcacctggggcttcatgctgtgctttttgtacctgcgcaacgtccgtggatttggctggaaccacaagcgcgtgtaccgcatctacaaggagctggagctgaacctgcgtatcaaaccgcgcaaaaggctggttcggcagatgccgcagccgctggcagttcccagggccattaacgaagtctggtcgatggacttcatgcatgaccagttggccgacggccgaagcattcggacattgaacgtgatcgatgacttcaatcgtgaggcgttagggatcgaggtggacttctcgcttcctgctgctcgggtagcgcgggtgttgaaccagatcatcgaacaccggggacggccgctggcgattcgttgcgacaacgggccggaatatgcaggttcaacgttattggcctgggcgcaaaagcggggcatcaagctcgacttcatccagcccggcaagccgcagcaaaatgcctatatcgagcggttcaaccggacggccaggtacgaatggctgtcgcagttcgagtgggaagacctggagcatgtgcaggaccacgccacgcgctggatgtggtcttacaatcacgaacgcccgaatatggcattgggtgggttcacaccaaagcagcggctggccatggccgcatcagtttctacttctgcgacccagtaa

SEQ ID NO: 362344 - DNA, 123 bp, Pseudomonas aeruginosa
gtgctgccggaatggcgcctggcgccgttgaaggtgtatgcggtgtggccgccgaacgttcccgccagcggcatcgcctaccgcctcatcaagcacctgcacgacgcgttcaacccgggctag

SEQ ID NO: 362345 - DNA, 1044 bp, Pseudomonas aeruginosa
atgaggagcgccttcttgagccccggacattcccactcgcacggccatccccaccaccatcatcacgatcacgatcacgatcacgatcacgatcacgatcacgcctccgcgccgccatggcggcgcctgctggtcgccgccctgctggtgctgttcgtgatcactgccgcctgcctggtgcaggtacgttcgggcgaggcgatggtgatcacccgtttcggcaatccggcgcgggtcctgctcgaacccggactggcctggcgcctgccgctgccgttcgagaacgcgatcccggtcgacctgcgcctgcgcaccacctccagcggcctgcaggatgtcggcacccgcgacggcctgcggatcatcgtccaggcctacgtggcctggcaggtgcagggcgatgccgggaatgtccagcgcttcatgcgcgcggtgcgcaaccagccggacgaagccgcgcggcaattgcgcaccttcgtcggctcggcgctggagaccaccgccagcgcctacgacctggccgacctggtgaacaccgaggcgtcgcgggtgcgcatcggcgatttcgaggcgcgcctgcgcgagcagatcgacagccagttgctggcgacctatggggtcagggtgatgcaggtcggtatcgagcgcctgaccctgcccagcgtgactctcggcgccactgtcgaccgcatgcgcgccgagcgcgagaccatcgccaccgagcgtaccgccgagggccggcgccaggccgcggagatccgttcggcggcggagcgcgacgcgcgggtgatccaggccgaggcttcggtgaaagccgcggagatcgaggcccaggcacgggtcgaggcggcgcgcatctacggcaaggcctatgccggctcgccacagctgtacaacctgctgcgctcgctcgacaccctcggcaccatcgtcaacggcgacacccgcctggtgctgcgtaccgacgccgcgccgttccgcgtgctggtcgacgggccgccgacgcttcccgccgaagcagcggccaacgggcgccggccatga

SEQ ID NO: 362346 - DNA, 900 bp, Pseudomonas aeruginosa
atgctcagtaagcgccagtggagtcttatcgaggaagcagttgctctagagtttgaagatgctcaggcctctggagcaacagcttttctacctcattttttggcacaagctactttgccgcacaaagatcccaagtgtacgtattttgagcgagggacttcaaaacttacgctgtcgataatggcacatccaagatatggaatgccctacgggatgatgccgcgattattacttgcgtggatgtgcactgaagcatgtcgtacgaactctccagaattgaatttggggcggaatcaaaatgagtttcttaagaagcttcagctgcctagtgatggaaaatatatcaaaaccctgcatgtgcaaactttgtctcttgtaaggtctcagctaagtgtcgaggtttcagatgctggagccttggcttttgaaaatatccaaatagctaagaatggttttgtattctggaacccaaggcatcctgatgaggaatgcctgtggaatagtagcttgacgcttggtgctgatttttatactgctgttacaaaggcgcctgtgccattgaagatggaggctctacaggctctgcgtaagtcgcccatggcgatggacatatatacgtggctcgtttacagaatgtttacgctaaacgtcgctgtgagatcgggacggtataaggaagcaaaaatcccgtgggctagtttaaaaagtcagtttggaagcggctatgaagatacgccgcagggcgttcgcagttttaaagcaaattttctcaagcagttgaggggagttttgctctattaccccgatgcaagaaattacatagacgagagcccggattgtctcgtgcttaaagctggggctcgcccggtggtgcagcaacgagccgtaagtggtaattga

SEQ ID NO: 362347 - DNA, 1017 bp, Pseudomonas aeruginosa
atgcgtaaacctggaacatcggataaaggcgatctgaggagattggctcgggctatcgtggataggcccctgaaagattcgaccattgctgaatactccagagtggccgcacggatgggagaaatgcattggcatgagtattcggtgagccagaaggttggtcgacgtaccgcagtggtagcgcgttgtgcatggcgaagaggtatggcgcaccgcttactgggtgtgttgagcgaaatcgaccgtgagcttgatcgcgataaacgacgtgcattgcgtcagacgatggttatctattcccagcagctccaagcaccacaacctatttatcatccggcgagccagagtcatgggaaaaggcagtcaaaacgagcgagcttgtgtggattgcctgctgattggcgagtcttgcttttggccagacttaagccgatagattggctgcccgcagctgttttggttctgactggatgccggcccgctgaacttagaaagggcgtccatgtgcgtagggttggggaatcacttgagtttaccatccagggtgccaaagtttctgatttaacgggtgcaggacagcctgagcggacgttgcttatcaatgcgaaggcaattctgggagaagaaattaacgagttacttctgaagaaagtttctttggaaggtgacgaaatggttattcaggacactggccaaaaccggtcttttgaaaagcggttgagtcgggcggcgaaccaagcaggattgcccggaatcagtgcttacagtctccgacatcagttcagtgcggacctgaaagatgaggtagaaccagatcgggtcagccttgcacttgggcatgtgtcaaggaagagtagaaaacgctatgggcatgcgaagcagcgtcggtcgggggctggaggattgctggtttctgttcaggctgatcgagagcttcggggggcggcgagtcgctatgcactcggagctaacactccagcattcaaatacgatgagcttgattggggctttgagtag

SEQ ID NO: 362348 - DNA, 696 bp, Pseudomonas aeruginosa
atgagcccaagcaaaaagatcattctagttacacttacatctgccatgctccctgcttgtactacccaaacgcactctcctatctatacccaccccagcctcgaggcagggaaccggcaattggcaatcgaggtcatttcaaaaagtgaaacctcgagcggatcagccgcatggattgggcacgggattgctctcactgcagcgcatctgtttctcggagcctcggaaagctcaaccatacgtgtcggcaacggcctgacctggggaagtgcagaaattattgcaatagatgatcctgcatatcgagatcttgcaattctaaaaattgaccaaaatagtctcgcgagccttgcctctccgaccaaccccgtaaaactatgtgaaacgcctattcggtcaggtcaagaggttctagtcgcatctggcctaacaaaaacagtgtcatcaacctacgcctccccagaaatgactaggcatagcaatggcgactcgtgggcggagcatttaacaggctattatgctcccggcacgagtggcgctgcgatttatgacgctgaaagtggctgcctaggcggggtagttagcaagcgtcgaaaaaccatctcaaatagcgatcttcaaatttactcgactgagctcgtagcactaccgcaaatactcgatttcctagatagccacatgcagaagcttcattaa

SEQ ID NO: 362349 - DNA, 747 bp, Pseudomonas aeruginosa
atgacggaaaaaccagactcaaaaaatccagatgcaaagcccttactatccgccagcataattgaaaaggcgtgggaatggcgctggggcgtgaaactcgcatatgcgattattttcctcgacatcatcctcttactcaataaaaaaccaggggtactgcatttctcattatctatggataaagtctgggaaaatttcggacttctgctatctgcaatttgcgcgttctgcctgaccgtatcatttattatccccgcactagccctaacgctgcggcacatagtcctatttatacccttcgacttcttctcatcaaagaatagttccgaacagcagccctacggacacgtcttaataagcgacttacgcgagcacgccttaagaaataataacgattttctatggaaactttacgaacagcgcatagctgattttgaacaagcccaggaacaccgcgagcaatttggcggacttatctttggcatcactatcctctgcctaattgattggtgggccagctataaatttggagcggactctttgacgagcataatactgtcctacatcggcccccaaggcggcgtcattacattgatgatagccatcttatttttgcagtgggcatggttttctgagtggaaaattcgttgggtttactatccgccgctttacgatgcgcaatttgaaaaactgcaggaacaacgaaaggcccgtgacgaaatctcacgaagcagagcgaacctctag

SEQ ID NO: 362350 - DNA, 252 bp, Pseudomonas aeruginosa
atgaacaacgcgacagcacgcatagtccaggccgaattcctcatgaccaagctgcggcgggacgcactgatccgccggcgccgcccgccagtagcggccgacgtccttcaggtcgcgggccgtcgcctgctggtgatggccgacatggggtcggtaccactgttcacctggtcgctcgacggtactgtcgttcctcctcgccaggtgcttgacctgctggccagcaccgcgcaggacggagttcagccatga

SEQ ID NO: 362351 - DNA, 2904 bp, Pseudomonas aeruginosa
atgagtcgacgtaacccggcacacactcccctgccattgttcggcgatacgccttcagattcagaaaattcgaagcattggctgtcggacatcggcacagaagcttccccacctgttgaggggctcgtctatgttaaggattacaactctgacgggcggtcgccggaagagatttcaatcatggagaaggcccgtgaatatggggctgcagcagttttctttgaagcggagcgcaatggccgagcacctcaaccgcaagccttcatcttcttaagtagcggtccggagacagacgcagagtttgccgagctccacaagaagctgtggagttgggggcaggtgccgttgctctatcgaaagctgccagggttagtgcaactattccgctgtgctcatggtccagatttcgtatccaaagccggcgatctagtttgcaagccagttaaaaccttaaagctcgcatcagccatcaatgatgatccttggtgggacagcacccagctatggagcggtgcactttgggatagtcctacagcgtgcagaacactgctctcagcaaagaaagcagcacataaagcacttatagatgctgtaaagagactgaacaacagtctgaacaccgaagagcttctgcccagggagttgcgtcgtcgcctactcattctttcgctcctgattgcgtacctcgagcagcgagaggttttcattgagggctatttttctcagtttctacctggagccacagagttctttgaggttttggccaatggaccggcgctggtttcattgctagaggctctggaggctcgattcaatgggcatgtctttgcgcttacgcctgaagaccggaaccgattaagagatagtacagagctgtctcgattctctagactggttgagggcaaagaggaagcgggcggccaactatcactatggcgactttattcatttagagacttgccagttgagctcataagccatatttaccagttattcgttaaagacgcggacagctcggtttacacaccaccatttctagttcgacttatgctagaagaatcgttgagctgggatcgacttgacgacctcatagcgaaaaatgaagtcattcttgatccctcctgcggttctggggttttccttgtcgaggcctataaacgtttagttctgcattggcggagccgcaatggatggaaaagaccgagcgaggaagttctaaaagagctgctcggccacgtttacggagttgaccttgaggctggagcagttgagctagcggcgtttagtctatgccttgccctttgcgatgccttgacaccggaagcgatacggtcaagcattaagttattccccctgcttgctggaaatactctacatccatcctgcttcttcgaggcaaaggaaaaaaatacaatcaaagcgcgtgttggcgtgattctaggcaaccccccgtttgcatcctcactaaacacgaaagctgcaaagagaagttacgcaaagtacaccgactctgtcggcctgttgcctgacaagcaaattggatatcttttccttcacgaagcaatggagatggtttgcgaaggaggtatcctttgcatgcttcagcaatataatttcctttataaccagcaatccttgggttttcgtcaaagctttatcgaacgatgggacgtccgtgaaatactggacttcatctctgtgcgtggcttgtttcagaaaggcaatgctgataccaaaatcatcgtggttgtagccgaggccaaggcaccatcggaagatcggcgaattcttcacgcgaccttccgccgaagtggccgagtcgacgcagagcaaggctttgatatcgactactacgatctgcactgggtccctagatcccttgcgctttcgaatgaccgcatctggcgcacaaacttgttgggcggtggtcgagcactggcgatcgttgatcggcttaagaaataccggacactaagtgaatacgcgcgttcccaagattgggattttggagaaggctttattgaaggcgggaggggggtcacacgtgatgccaaacacatcattgggaaagacttgcttcgctctaatgccttgacggagaaagggattgatgcccaaaaaattacgaaggcacctaacaagtcctacgaggggcctcgctcagaaaagcgcttcaccccgccaatgctgcttgttcgcgagcatatgaacattccacatgcagtgtgggatgcaggctatttgacttatacgcagcaaattgtcggattttgcgcgcccgcgagccaaaaaaaccagctcgaagaaattgatagttggcttggcgaaaatagcaacgcacttaaagcctacctcagcttgataagccctcgccttttcatacagaaggccacagcaattcaagccgatgacattttttcaattccctacccagaaagcggaactcttgacctcagccaaaatgaggaaataatagtcagcgatattgttgagtattatcgagacctggtcaggcttggtgacgaatcggcagcgatgtctatgacgggatatgaagctcttgccgatttcaccaaggtatttactgagcaaataagcgcgatctataaagaggaaccacttagagctcttgagccgcaattctggcccggaatcatttgccaaccatttgtttttggtgatggtgacgtcgactggactggtgctgaagatttaagagaaagactcaatggcctacttattgatcgccaggggtcggctctcagcatgatacggatatcaagagtctatgacggccgctatatatttttactgaaacctgcccctttacgctactggctgcgatcgatcgcattgcgtgacgccgatgaaacattggctgaccttagaatgcaaggcttatga

SEQ ID NO: 362352 - DNA, 726 bp, Pseudomonas aeruginosa
atgctcgctgactcgtactctcgtttctctcaatccggcgttgtagggaagtctgtaaatctacaggcaagctttctatacgaactgcttgacttcattgcggatgagttgccgagctggcgtgaccgcattgatcgcgacgaagaagacgccgagacagcgcttacggcacagttgtgtgcacaccttactagcgttgctcgaatgcgaaaaggttgggacatcttgcagtttaggacagaggttcctgacgaagtgaataagggacgcaaaattgatctggttccatcagcgtgcgcttcaacaatttacgttgatggacgtcgctgcaccgagttcgacatattgctcccaatcgaatgcaagaggcttccgacacctaagcagaaggatcgggacgagcgcgagtatgtagttacccagaactcgagcactggtggcatccagcgtttcaagctgggacaccacggctcgcgccataagcttggtgcaatgattgcgtatatccagcagggctctgctacggtttggttcgacactattacgacatgggtcgaaaatcttgttcagtcaaatgagccccattggtcgaaccaagatactctgacgctagtcgagtctgaccaagactcgcggataagtatctatcgctctaaacatacgcgtacgcagaacctggatgcaattgaactccgtcatctgtggctcgagatgaataggctttga

SEQ ID NO: 362353 - DNA, 1506 bp, Pseudomonas aeruginosa
atgtgtggcatcgtcggtatcgtgggcaagtcgaacgtcaatcaggcgctgtatgacgcgctcaccgtcctccaacatcgcggccaggacgctgccggtatcgtcacctgccatgacgataagctgtacctgcgcaaggacaacggcctggtccgcgacgtcttccagcagcgccacatgcagcgcctgatcggcagcgtcggcatcggccatgtgcgctacccgaccgccggcagctccagttcggcggaagcgcagccgttctacgtcaactcgccctatggcatcaccctggcgcacaacggcaacctgaccaacgtcgagcaactggccaaggaaatctacgagtccgacctgcgccacgtgaacaccaactccgactcggaagtgctgctcaacgtgttcgcccacgaactggcggtgcgcaacaagctgcagcccaccgaggaggacatcttcgccgcggtctccggcgtgcacgaccgctgcgtcggcggttacgcggtggtggcgatgatcaccggccacggcatcgtcggtttccgcgaccccaacgcgatccggccgatcgtcttcggccagcgccacaccgagaatggcgtcgaatacatgatcgcctccgagagcgtggccctggacgtgctcggcttcaccctgatccgcgacctggcgccgggcgaggcggtgtacatcaccgaggaaggcaagctctacacccgccagtgcgccaaggcgccgaaatacgcgccgtgcatcttcgagcacgtctacctggcgcgtccggattcgatcatggacggcatctcggtgtacaaggcgcgcctgcggatgggcgagaagctcgccgacaagatcctccgcgagcgtcccgaacacgatatcgacgtggtcatcccgatcccggacaccagccgcaccgcggcgctggagctggccaaccggctcggcgtgaagttccgcgagggcttcgtcaagaaccgctacatcggccgcaccttcatcatgcccggccaggcggcgcggaagaaatccgtgcggcagaagctcaacgccatcgagctggaattccgtggcaagaacgtcatgctggtggacgattcgatcgtccgcggcaccacctgcaagcagatcatccagatggcccgcgaggccggcgcgaagaacgtctacttctgctccgccgcgccagcggtgcgctatcccaacgtctacggcatcgacatgccgagcgcgcacgagctgatcgcgcacaatcgcagcaccgaggacgtcagcaagctgatcggtgccgactggctggtctaccaggacctgccggacctgatcgacgcggtcggcggcggcaagatcaagatcgaccgcttcgactgcgccgtgttcgacggcgaatacgtgaccggcgacgtcaacgaggcctatctgaaccggatcgaacaggcgcgcaacgatgcgaccaaggcgaagagccaggcggtcagcgcgatcatcgacctgtacaacgactga

SEQ ID NO: 362354 - DNA, 768 bp, Pseudomonas aeruginosa; identical to SEQ ID NO: 361819

SEQ ID NO: 362355 - DNA, 966 bp, Pseudomonas aeruginosa
gtgcctgaactgcgagaccggggtcagttccacgccgtgcggcgaatgttcggtgtgccgggagatcgacgaggggcgtttcgtcgacctgatcgaggtggatgccgcgagccggaccaaggtcgaggacacccgcgaactgctcgacaacgtgcagtactcgccgacccgtggtcgctacaaggtctacctgatcgacgaagtgcacatgctctcgtcgcacagtttcaacgcgctgctcaagaccctcgaggagcccccgccgcacgtcaagttcctgctcgccaccaccgacccgcagaagctgccggtgaccatcctctcgcgctgcctgcagttctccctgaagaacatgccgccggagcgggtggtcgaacacctgacccacgttctcggcgccgaaaacgtgccgttcgaggccgatgccctgtggctgctcggtcgcgccgccgacggttcgatgcgcgacgccatgagcctgaccgaccaggccatcgccttcggcgagggcaaggtgctggccgccgacgtgcgggcgatgctcggcaccctcgaccacggccaggtctacggcgtgctccaggccctgctggatggcgatgcgcgggccctgctcgaagcggtgcgccatctcgccgaacagggtccggattggggcggcgtgctcgccgagatgctcaacgtgctgcaccgcgtggcgatcgcccaggccttgccggaggccatcgacaacggccagggcgatcgcgagcgagtcctggcgctggcccaggcgctgccggcggaagatgtgcagttctattaccagatgggcctgatcggtcgccgcgacctcccgctggcgcccgatccgcgcagcggtttcgagatggtgctgctgcggatgctggcgttccgcccggcggatgccgacggcgcgccgaggacgccactaaaggacctggggatcagcaaggccacggctga

SEQ ID NO: 362356 - DNA, 699 bp, Pseudomonas aeruginosa
atggtgcgccgtactataagttcacctacaaggatggggttgaggtcagagttattgatccggcttctggatttaaacctggcacgatcaccagtgcccagcaatattttgatactgccggtaataggttgcgatatgaagctggtcagtggaagtcctgggagtaaagcaatgtctatttatattcctgacttaatggcggagctgtttcctgcgaaaggtgctgctggatttgagattggcgaaggctttgactcaattctaaagcgagtaggtttcgttgagtggcatgacaaagattccacgctagatgaaaagctttcctcaaacactggttggatcggggtgaggtcgagatgcggtttgcctggcggtccttgcacgctagtccagtcacttatctatatgaatgatgtgatctgcctggagtttgaggagagcttgaggctgtatagggtagatgttgggaagggatattgcggtagtttctttggggtaaagccgggagatggtctgcgaaatctagagggggcggggtttggtgttttattcaatgatatggatgatgattttcttattgtgaaagatgacggcatcttggcggggattagcttcttgacggattaccgggcttctttagaggatgctcccgatcaaatcattcagtacatttccatacatgactggtctcttcgataa

SEQ ID NO: 362357 - DNA, 411 bp, Pseudomonas aeruginosa
atggcgagagcctggatcaacaactggaagacgacactgagcgtagggctgtcgcctggcgtcgcgagcatgacggtaccggatgccgccgccgcgctgctgccgctctccggcggtagctgggtgctgttgacgctgtcggatgacgctggcgcacagcatgagatcgtgaaagcaaccgccaacgccggcggggcggtgacgattgaacgcgcccaggaatacaccactgacggcaactggccggcgggaacggtgatctatgcagccgtcacggccggcgatctcatggcgctgcaagcgcgaatcgcggccctggagggcggcacccccgaaggaactctggtcgatgcgagtggttcggctctcgtcgatggcgccggaaacaacctagtcatggagaacaactga

SEQ ID NO: 362358 - DNA, 963 bp, Pseudomonas aeruginosa
atggcccttcatcgtcgtggtgctgctgcaggccatgctggcgggcggcagtctctacgtcctctccgcggtgcgcagctatgtcggcggcgaaagcctctggtcgaagggccagaaggatgccatctactacctcaccctctatgccgactcacgcgccgacgaagacttccgccgctacgaggaggccatcgcgatccccctcggcgaccgcgagatgcgccttgccctggaccagcccgacccggacatcgaggcggcccgccagggcatcctcaagggcggcaaccatgccgacgacgttaccgcgatcatctggctgtaccgcaacttccacgacttcagttacttcgagcgcgccatcgagctgtggctggtgggcgacaagtacgtcatggaactgatcgatgtcgccggcaagatgcgcgcgggcatcggcgccgggcaggccagcgccgagcaggtgcaacagtggaagaccgagatccacgcgatcaacgagaaggtcacgccggcggccaaggccttcagcgacgccctcggcgagggctcgcgggccttgctcaggctgctgctggtggccaacctgaccaccgccagcgtgctcatcctcctggcgttcctgcggacccggcagcaactgatgcagcgccaggaagtggagaacgccctcgatgccgagcgcgaacgggcccagatcaccctggcctcgatcggcgacggagtgatcaccgccgacacccaggggggcatttcctacctcaacccggccgccgagcagatgaccaactggacgctggacaaggcccgcggcctgcccctggcgtcgctgttccggatcgtcgacgaaagctcgcgggaggagggcatgctgctgatcgagcagatcctcagcggcgagatcgacggcggtcgcgagcattccaagctggttgcgtcacgacggcagcagcgtgccggtga

SEQ ID NO: 362359 - DNA, 375 bp, Pseudomonas aeruginosa
ttgctcgacgcgcgcaagcgcgcgcgacacatcggcttcgccgtagacgacatagcgctgatcgacgaccaccgcgggaactttggtgatgccgagactccaggcgtcagtgacgccttggtatgcggcggcgaggcgctgttgcagcgctttcccaccttcatgcagacgacgctggaccaatgcagcggcctgctccggttcgttgggaagctgagcagaaagctcagcctcaatgcgtgtcggggcatccagttcgataaggcgatcaggcttgccccgcacgggatgctgctgatccgtgatgacccaaacctcagccgctgttacggcggtagcagcaagcgcggctgccagcgtcaacgcgagctgtag

SEQ ID NO: 362360 - DNA, 450 bp, Pseudomonas aeruginosa
atgaagtggattacacgtgagcgtcccaaaatcgaccgcatcgcttgtccctggctgattctgcgcttcatcgaccaggatgccgagttcctttacgtgccagcatcagaggttctggccgttgctgcaaaaactggtgctacgccctatgacattccgggggtggagttgagtcacgtcggcgagcaatgcagcttcgatgccttcctggcaaagtaccggataaccgatccggccctggtgcagttggccgatatcgtgcgcggcgccgacacttcgcgcttggatctcacgctacagtcggcgggtctctacgcaatctcactcggtctatcgcgcgtgtttgcggacgaccacgagatgctgcgccacggactggtaatgtacgacgcactctatgcttggagtcgcgagggccagcatgagacgcataactggccacccacctga

SEQ ID NO: 362361 - DNA, 501 bp, Pseudomonas aeruginosa
atgagtgcatccaacaaggttgccgacaccacaccctcagcgctcgcgcagtacgcgagcattcaggacgacccgttgatccgcgaggccatccgcctgctggagaaacgcatcttcaaacgcggcaccaagctgtctggccccgacggcgcgcgagactacctgcgcctgaaactcgcgggcgaagcgctcgaagtgttcgccgtcctgtttctcgacacgaagcatcacgtcattgcctacgagccgatgttccacggcaccatcgacggcgccagcgtgtatccccgagcggttctcaaacgagcgatcgagcacaactgctcggcggtcatcttcgcccacaaccacccctcgggtacgaccaagccgagccatgccgacaaggagatcacaagccgtctgaaatcggttctcgaactggtggacgttcgcgttctggaccatttcatcgtcggtaaaggaacacccttctccttcgcggaaaccggcttgctgtag

SEQ ID NO: 362362 - DNA, 741 bp, Pseudomonas aeruginosa
atgagcgattctttcgacacacatggctacctgtccgaggaatccgaacagttccgggtcgagcagtgggaaaggacaccgaacgatttcacacaggtcaggcaggcggtggcaacagcccttgagcagttgaaatccatcgctccggggcatgcggaacctggggtacttgcggcgcttggcttctggttgcggtgcttggaggcctgccagggcgtggtcttgcttgccgaacgcgggatggcgtcttccgcactggctttgctgagaaccgcctacgaatgcctgttctatgcttgcgcgctttggcgaaaacctgaactggcagacagactggaagccgcacatcactgcgagcggactaagcaggcccgcgcgatgctcgacgcggggcgcgatcgaatcgatccggaaaggcttgcggagcttgaggcgatagccgccgaaatctaccctcacgcttcgttctccgcttgggacgcggcatctgcggccgatctgcgcttcgagtacgagtcggcgtacaggggtcttgggctgattggcgcccatgcgacgctgcgtagcctggacgcctactacacggagcaggcagacgggtcgttcgatttgactgccaagccggagcctgagcgggtggcgtggattctcggtctggtcaacacctgcatccggtgcggcatgcaccgactgcgtgaggtagattttagccaggcggggatcagtggccgcccgtcttaa

SEQ ID NO: 362363 - DNA, 1050 bp, Pseudomonas aeruginosa
atgtccctcgatcttgaaactgttcccgataccgccgtgcagggcgacctgctggaagcggcggcttctccactcacgatcagcttgcaggatttcgtcaccgagttcggcgatgagctgctcgactctctcaatcgcgccaacccgcctgtctacgccgggcaggcacgggcgcatcgccagaccatcctggccggcctgaagcggaagctgtttcccgcccaggccgaagtcgtccatgccgtcaccgagctgctggtcgatcgtggcgaacgtgccgcgatcgtcaacggcgagatgggctgcggcaagacgaccgtcggcattgccacggccgccgtgctcaatgccgaaggctaccgccgcaccctggtgctctcgccaccccacctggtctacaagtggcggcgcgaaattcaggagacggtggccggcgccaaggtctgggtgctcaacggcccggacacgctggtcaagctgctgaaactgcgcgagcagttgggcgtaccaccccaggggcaggagttcttcgtcctcggccgtgtgcgcatgcgcatgggctttcactggaagccggtgttcgtgcgttggcgtacccgtcacggcgacgtgggggcgtgcccgcattgcggccatgtcatcaccgacctggacggcgagccgatcaacccggtggaactcgaagcggaggaaacccgccgcaagtgcggacactgcgcctcggcgctgtggacactgatccgtccccggcgcctgtcggtcaacgaccagtcgcaagccgtgctcaaggcgctcaagcgtattcccaccatcggcgaagtcactgcacagaagctgatgaagaagttcggcgagtcgttcctggcttcgatgctgggcgacaacctgtacgagttcatcaatctcatggacgacaacggcgagctggtgttttccgaccggcaggcccagcgcatggaacgtgcgatggcctcgatggagttcggcttcggcgaaggtggctatcagccttcggaatacgtcaaacgcgtgcgacgtgaagtcgcctga

SEQ ID NO: 362364 - DNA, 675 bp, Pseudomonas aeruginosa
atggctaacctacagcttctggctcctttgaggctagatagccctgcggccttggcgggtgcgtttcgcgtcgtccctttgggcgagtttcaagccaacgatggccgccccggcgtagggcagcgatggcagcttaatgaggttcgagggcaggccatcgttcaagcgctactgaatcggggtgatgctctggtgatcgattacgagcacaagacgttgcaggcaggtgaagtaaacccagctgccggctggattaagcggatggaaatgcgagtagacgggttatatgccgtggacgttcagtggacagatcaggctaggcaaatgatccggggcgggcactatcggtatatctccccagcccttacttacgatgcggctagtcttgaggtaactgggcttcatagtgtggctctgacaaataaccctgccctcaacggtttaaccgatcttagccttgtagcacttagtgcccttccgccagaacagggtggtaagttcgcaggcttgagcctggagtcccgtgcctatttggagcgcataataggcgtgccacttgagcaagccgccgccgagttggatattctgaggtacgtcccgctagcgcctgagggtatttcgcatgctgactggcagaagctataccaccagtttgggacgaccttgcttgcgtga

SEQ ID NO: 362365 - DNA, 429 bp, Pseudomonas aeruginosa
gtgatccgggtcgatttctacgtgatccccagcgccgatccgtcggcgcgcctgcaggtcgcctgccgcctggccgagaaggcctggcggcagggcatgcaggtctacctgcattgcgccgacgaggcgcagcgcagcgagttggacggccgcctgtggagcttccgcggcgaggccttcattcctcacagcctggccgaggaagacgccgaggcgcccgtcgccctgggcctgggcgagcccccggggaaccatcgcgacctgctgatcaacctgaccctcgaggcccccggcttcgtcccgaacttttcgcgggtggccgaactggtggtcgaggagccggcgatccgccaggcggcacgggataaattccgcttctaccgggagcagggctatcctctacaggaccatcgcctgccgcgtatctga

SEQ ID NO: 362366 - DNA, 1932 bp, Pseudomonas aeruginosa
atgaactggcatatcacctacggctcggtttgcagcggcatcgaggccgcgagcgtggcctggcacgtgctggggtttcgcgccagttggttcgccgagatcgaacccttcccgtccgccgtactggcccatcgctggccggcggtacccaacctgggcgacatgaccaagctcgcccgcgaggtgctgctgggaatcatcgccgcgccgctgatcctggtgggcggcacgccgtgccaggacttctccgtagccggcatgcgcgccggcctggccggcgagcgcggcgccctgacaatgaaattcgtggagctcgcagatgcaattgaccatgttcgaccagacggagacgagtgcgtcgtcgtctgggaaaacgtccccggcgtcctgtccgacaaaggcaacgcgttcggcaacttcctcgcagccctggtgggcgaatccgaagcgctggagccgtcagggccccgatggacgaacgctggttgtgtgtatggaccccgccgagcagccgcatggcgggttctggatgcccaatatttcggactggcccaacgacgcaagcgtgtgttcgttgtcgcaagtgctcgagcagacttcgatcccgcagcggtacttcttgagcgcgaaggcctgcgcagggatcatccgccgcgccgaggcgaggggcaagaccttgccggacgcgctcctttcggccctgcgctccagtgcggctgcgggtacctcttcgacctgagccttggtcagtggggatgtccgaactgcgagggcgacgaagggcctgccgtcgaagttatggccggcgtccccgccttcggtggggagagccagagccggtctctattccaggccggcgcgctgaccgcgcatggcgttcggaacgacttcgcatccgagacgttctgcgtggtgccggccgtggccggcacccttcgcagcagcgacggcggatcggatgtagatcatgccgcagccaaccacctggtcgccggcaccctccaggcgaacgggaaggcagccggcagcgcgacacaacaggacgcagagtcgggcctgctggtcgtacacggcacgcaagatcctgacgtcgtccaagattgcgcccacacgctgggcaggaaccacggccaggaaaatgccgtattcgatccgaaccagatcaccagcgtgacgaatcgcagccaacccactcccgggctgtgccacacactgccggcatcgagtcagccacccattgccttcagttgcaaggactacggcgccgacgccggcgaggttgcgccgacgctacgcgcgatggggcacggcgacagccacgccaacgccggcggccaggtcgctatcgcatatccactgcttgaggtcggcaagcggacaggtagaagcacatctgacccgcgcgccgggctgggcgtcggcgcggagaacgatccaatgttcacgctgcaggccagcgcgcagcacggtgtctgcgtcaccggcgacatcacccacaccctgaaggcggaaggcttcgacgccagcgaggatggaactggccgcggccaaccaatcgttgccgatgtcgcgccgacgcttcgctccggcaacttccgcagccacagcaacccggccacgcaggccgacagcttggtgatcgcctccgcagtacggcgcctcactccgcgcgaatgcgagcgcctgcaggggttccccgacgactacacgttggtccctgactgggatggctggcggcctatggatgccagcgaaacgccagagtcgtgccaagccgaaggcctggcggtgcggcaggccaagcgcagcaagcgctggtatgtccgcgacgtcgacggcccgcgctacaaggccatcggtaacagcaaggctgtccccgtcgtgcgctggatcggacggcgcattaaacagcaactggagagaaccgcatga

SEQ ID NO: 362367 - DNA, 990 bp, Pseudomonas aeruginosa
atgccagtgggacaaggctcgcgccggtggacgcagcgactgctgcgcggcccccaagtgcgtgtccagcgacggccagaggccttgcagcctgccaacctcgtcggcgaactgttcgggctccatcgtcacgcggaagaaatgctccggctcggccggactggcggggatgatgtatggcaagaacggccactcgctcggaagttcctcggcttcgacttcgccaagcccaacctgcagcagcaggctgcgcacggccttgacgccatcgggggcctgctcgcgctggcgcacccttcggccgaagatcaccacttgcttgaactgcgtctccaccgctcggtagatccgcagatcggtgtagtgacgtgtcagccagccgaccagctccgcgtcgagcacgtagccgggaacgatgaagaccagcacgccgccgtactgcaacagcgacagcgaacgctgatagaacagcttttcgaggcgggcacggccctggccctggtatccgatgttgccgttgacgtccttggacaggtcgccatacggcgggttgagccagagcaacccgaaggactgtttggagaccatcgtgtccatcaggtccgcgtgcaggcagtgatcgaccagacctcgggcatggcgtgcccgctccgcgtcgaactcgacggcgaacgccttggcctgctcgcgcccgagggcatgggcggcttcggcgatcgccacgccttcgccggcgcagggatcgaggatgcacatcggcccgtcgctgggcatcagtgcgttgagggctctttcgagcgtgggttcgtcggtcgggtagtacccgttcttggcgaaattgcgggcgagccgcgggaacatgagggccatggaagtctcctggttggcggggatgaaacacggaagcacgccaaggcgtgcctccgtgggtgggtcaggccgctaccacttccggcgtccagatcttggccgggtatggataggcggtga

SEQ ID NO: 362368 - DNA, 621 bp, Pseudomonas aeruginosa
atggagcgcttacgctacctgggcgaccgagggttgtcgctgcgccaaggcacgattgtcgatgccacgctgatcaatgcgccgagttcgaccaagaacaaggacggtaagcgcgacccggagatgcatcagaccaaaaaaggccagcagtactacttcggtatgaaggcccatatcggcgtggacgtcgagtccggcctggtgcacagcgtggtgggcacggcggccaacgtggcggatatcacccaagtcgacaagctgttgcacggtgaggaaaacatggtgggagccgatgcgggctataccggtgtcgaaaagcgtccggagcatgatggccggaaggttatttggcaggtggcggcacgccgcagcacctacaagaaactgggcaagcgcagcgctctatacaaagccaagcgcaaaatcgagaaggccaaggcgcaggttcgggccaaggtcgaacacccattcagagtgatcaagcgccagttcggttatgtgaagacgcggttccgtggcctggcgaagaacacggcgcaactggtgacactgttcgcgctgtcgaatctgtggatggcgcgcagacatttactgacgaatgcgggagaggtgcgcctgtaa

SEQ ID NO: 362369 - DNA, 396 bp, Pseudomonas aeruginosa
atgaagcagatgaccttcgccgacgccgagtacgccagcaagcgcaagcagacccgcaaagaattattcctgatcgaaatggatcgggtggttccgtggaaggggttgattgccttgatcgaaccccattaccccaagggtgatggtggtcgtccggcctatccgctgatggcgatgctgcgagtgcatctgatgcagaactggttcggttacagcgatccggcgatggaagaggcgctgtacgaaaccaccatcctgcgccagtttgctgggctgagcctggagcgcatccctgatgaaaccactatcctcaacttccgtcgcttgctggagaaacacgagctggccgcgggcatcctggccgtgattaatggctacctggtaagcgctccataa

SEQ ID NO: 362370 - DNA, 723 bp, Pseudomonas aeruginosa
atggtgaaaacctgtggcaaggccctgctcggcctctgcgccgcagccgccgtactggccttgctgatccactggatcacccccgcgaccatcctccactaccgcgaggacctgctgttctacttacaggcccacctggtgctggtcttcagttcgatggcggccgccctgctggttggcgtgccggccggcatcctgctcagccgtcccggcatgcaggcccaggccgaacgcctgatgcaggtgttcaacgtcggcaacaccatcccgccgctggcggtgctggccatcgccctggcgatcatcggcatcggcaacggcccggcaatcctcgccctgttcctcgcctcgctgctgccgatcgtgcgcaacacctacgagggcctgcgcaatgtctcgccggcgctgaaggaagccgccaccggcatcggcatgacgcccaaccaggtgctgctgcgggtggaactgccgaacgcggtgccgatcatcgtcggcggcgtgcgcgtggccctggcactgaacgtcggctccgcgccgctggcgttcctgatcggcgccaacagcctgggcagcctgatcttccccggcatctacctgaacaaccaccagcaactgctgctcggcgccgcctgcacggcgctcctcgccctgctgctggacgccctggtggtgctgttcagccgcatgttcctggaacgcggcctgaccgccaaggaggcctga

SEQ ID NO: 362371 - DNA, 297 bp, Pseudomonas aeruginosa
atgccatcgccgcaaccccggcgccgccgcgcgccgcgcatgaccagttggacgctggtcaccctcgtcctgctgatcatccttgcctacttccgcccggagcagctccaggtcgtgacctacaaactgctcctggtgaccctgggcgcagtggccggctactggatcgatcgcagcctttttccgtacgtggcccgcccgcacgaatgctcggccaacctggtggtcgtgggtgcctggctgcgccgcgggctgatcgtgctggcctgcatcctcggcctgacgctggggctctga

SEQ ID NO: 362372 - DNA, 624 bp, Pseudomonas aeruginosa
atggccgtccttaacctcctgcgcaccagtacgttctggctcgtgctgagcgcggtgctgtgcggcgccgccttggtgattcacggctccgccagctacgaccgtgggtatgccgccgcccgcgccgaaggcgatgctgcgctgctcaacctgcagctgcagcacgccaacgaacgcgctcaggccgcccaggacagcctcattcgctaccagcagcaggttacgcgggccaatgaggccgagcagctgctactgaccacccagcaacagctcgtcgatgccaaccagcagctcaaggagcgtattccccatgtcaccaccgtctaccggccagcgcccgcggctgcgcctgttgcccttcctcgttgcgtgttcactcgtggcttcgtgcgcgacctcaaccttgccctcggcgccggtgtgcccgccgcaggagccggcgcccttgccgccggcgctacgcaagaagcctggcccgcccccggttctgacgccgaactactggaaagcggcgtcggccaggctgacctcctggcctatgcccaggactacggccgctgggccagaagtaacgccgcgcaactgacggcgctgctcgatctgcatgacagggagacaaagtag

SEQ ID NO: 362373 - DNA, 309 bp, Pseudomonas aeruginosa
atgctcattcggacgggccagttcctgttcacgatggcagtggggctgttctcgatcgcctcggcgcggcgggccagttccaaggccgaggcggaacagctggccagccgactgggccagcaggatgcccgcatcctgaccctggagcagcagatcctgcacctgcccgacgggcaccagctggccgaactggccggcgacatgaaagccatcaaagccgagctgtcggggttggccaaagcgctggaccctttgacgcgctcggtcgaccgcatcaatgactacctgctcagcgagaaacgcccatga

SEQ ID NO: 362374 - DNA, 303 bp, Pseudomonas aeruginosa
atgacccacgcctactccgacttcctcagccaggaccgccgcctggtgatcctgcgcatcctgggggaaatgccgacctaccaggccaacagctcggtgctgcacaccgtcctgcgccagtggggccatgaccccagccgcgacctggtgaagagcgagctgcgctggctggaggaacagcagttggtggagatcgacgagatcgccgccggcaccgtgctggtggccaaactgaccgagcggggcgcggacgtcgccgccggacgcgcccgtatcgacggcgtcaagcggccgggagcctga

SEQ ID NO: 362375 - DNA, 549 bp, Pseudomonas aeruginosa
atggggcgcaaatccagcatcgaccggcagccgccggaagtgaagcgccacatcgagaagcgcttccgcgaggggcgtttgacgatcgacgagatcaatgcggaagtgcgtgagttgttccccgacctggagaacccgccgagccgctctgccattggccgcaagcgccggggctgggaggagatggcgcgcagcttgcgcgagatcgaggccgccagccaggcgctggttgccgaactgggcgaggacttcgacgacaagtccggggcgctgctggcccaggcggtcacgaccctggcgaccaacgccgccttcaactccctggagaaggacagcgtcgagatcgccgacgtgctcgatctcactcgcgccgccaagtacgcccaggaaacccgcagcctgtcgctgaaggaacgccaggcggtggcgagggaagcccgtgagcggctgatcgaggagcagcgggccaagctggacgaactgggccgctcgggccaggtggaccaggccaccttgcgcaaggtcatccaggcggcctacggactatga

SEQ ID NO: 362376 - DNA, 1383 bp, Pseudomonas aeruginosa
atgagcgccctcatcacccccgccttgccgctgtacgcctaccagcgccgctgggtgaacgatgacagccggttcaagatcgccatgttcgctcgccagtgtggcaagaccttcaccagtaccctggagctggccctggactgcgcgcgggccgaggccatgggccagcgccgtcgctgggtgatcctcagccgcggcgaacggcaggcgcgcgaggcgatgaatgaaggggtgaagctgcacctggccgcgctgtcggcgggcttccaggcgtacgactacgagtgggagcccggcgtcaaggcgctggaggtggagctgcccggcggcagcaagatcaccgcgctgccggcgaacccggataccgcgcggggcttctcggccaacgtgttgctggacgagttcgctttccaccaggacagccgggcgatctggaaggcgctgttcccggtgatctccaagccgggcctgaagctgcgggtgatcagcacccccaacggcaagggcaacaagttctatgacctgatgaccggcaaggatgacggctggagtcggcatgtcactgatatctaccaggccgtggccgatggcctgccgcgggacatcgaggagctgcgcaggggcgcgggcgacgacgacctgtgggcgcaggagttcgagctgaagtggctggacgaggcctctgcctggctcgacttcgagctgatcaccggctgcgaacacgaactggccggtattcccgaacactatacgggcggtccgtgctacgtcggcgtcgacatcgccagccgcaacgacctgtacgtgatctgggtgctggaacaggtgggcgacgtgctctggacccgcgaaatcatcgcccgccggcgcattagctttgccgagcaggaccaactgctggatgacgtgttcgcccggtatcgggtgctgcgctgctgcatggaccagaccggcatgggtgagaaaccggtggaggatgccaagcgccgtcatggcgagctgcgcgtcgagggcgtgctgttcaccgggccgaacaagctgaccctggccaccaaaggtaaagaacacttccaggaccgcaaggtccgcatcccggaaggcgacaacgtcttgcgcgccgatctgcacaagctgaagaaggtcaccagcgagaccggcgccccgcgcttcgtcgccgactcggacagcagcggccacgccgaccgtacctgggcgggcttcctggcgatccatgccgccggtggccagcagctcccgatcgactaccagtccagcggaccgcgtgtggccgtgaccggcgactaccagcccggtccgggcggcattctcacttcgcgcggcttcggcacggtgcgcggtaataacgactttggaggctattga

SEQ ID NO: 362377 - DNA, 1479 bp, Pseudomonas aeruginosa
atggaaaagcccgcccttggccgggagatcgccaccagcggcgacggtcgcgacatcactcggccctttatctccggcctgcaggtgcccaacgattcgatcctgcagcgccgtggcggcaacgacttgcgggtgtacgaggagatcctcagcgatgcccaggtgaaaaccgtctggggccagcggcaattggccgtggtcagtcgcgagtggaaggtggaggccggtggtgatcgcccgatcgaccaggctgcggcagaacacctggaggagcagctgcagcgcgtgggctgggaccgcgtcaccagcaagatgctattcggcgtgttctacggctacgcggtatccgagctgatctacggccgcgacgaccgctatatcaccctggaagcgatcaaggtccgcaaccgtcggcgcttccgctacgaccaggacggcggcctgcgcctgctcactcccaataacatgttcgagggggagccatgccccgcgccgtacttctggcatttctcgaccggtgccgacaacgacgatgagccctatgggctgggcctggctcattggctgtactggccggtgttcttcaagcgcaacggcatcaagttctggctgatcttcctggacaagttcggcatgcccacggctgttggccgctatgacgacaagaccgccacccccgaggacaaggccaagctgctggcggccctgcatgccatccagaccgactcggcgatcatcatgcccgccggcatgcaggcggagttgctggaggccgggcgttccgggaccggcgactacaagatcttgcacgacacgatggacgcgaccatcgccaaggtcgggctcggccaggtggccagcacccagggtacgcccggtcgcctgggcaacgacgacctgcaggctgacgtccgtctcgacctggtgaaggccgacgcggacctggtctgcgagtcgttcaacctcggcccggcccgttggctgaccgagtggaatttccccggtgcgcagccgccacgggtgtaccgcgtgatcgaggagccggaagacatcaccgccaaggccgagcgggatgaaaaggtgttccgcatgtccggcttcaagccgacccagggctacgtccaggagacctacgccgtcgaagtccaggacggcgtcgcgtcggtccaggccgagggcacggggccgacaccgtccgccgagtttgccgaggccgatccgcccaccgacccggccgcggcgatgacgccgcaactggccgacgcgatgcgcccggccgtcagcagttggacgtcccagctgcgcgccctggtcgatcaggccgacagcctggaagacctgcgcgagcgcctgctcgaactggcacctcagctcagccttgagcagtacacccaggccatgaccgaagggcttaccgcagctcacctggcgggacgcaacgacgtccaggacgagctggatggacgggggcgcgcctga

SEQ ID NO: 362378 - DNA, 1257 bp, Pseudomonas aeruginosa
atggcggtctccaccgtctacggcagcctgccgttccaggagcagatccgcttcctccaggccaagcatccgtcgatcgactacaacgcggtccggggtgcggctaacgaccagtccttcgtcagcgctggggcgaaccgcgccgatctggtggcggatctgcatgccatcatcgtgcaggctacccgtgacggcatgaccctggcggagttccgcaaggactacgacgcggtcctggaccactacgaatgggagccggagggcggccgggcctggcgggcgcgggtgatctacgagaccaacctgcgcaccagctatgcggctgggcgctatgcccagctgcaggcggtcaagggcgagcggccgttctggatgtacaaccacagcgacgccgtcgcccatcctcgcgaactgcacctggcctgggatggcctggtgatccatgccgacaacccctggtggcaggcgcactatccgcccaatggctggggctgccagtgctccgtcagcgcctacgccgaggacgaactggcgtccttgggcaaggagggaccggacgctccgcccagtagccggatgcgccgcctgacctaccgcggcgaggtggtcgaggtgcccgaggggattgaccctggctgggactacgcgccggggcggagcagcttcgagcagttggtccagggcgcgctgcagaagaccacgccgctgccgcccgagccggctgcaaaactcaaccagcaactgctgcaaaaccgcgcggtggccaccgccgtgcaagctgattgggagcgctggctcgacagcgtcgccaatgacccggtccggcgcgaccgccgcgtccatgtcggcacgttgtcgccgcagaccgtcgagggcatgagcgcagccggcgtggaagccagcacggcggtcattagcgtgggggacggcgacatcctgcatgcccttcgagatgccaaggccgttgcgacaaccaccgcaggcgcgcccaaagccctgacgatcagcgaactggccggcttgccgcagatcctcgcccagccacaggccgtgctgctcgatgcgggggccagcacgttgctctacgtactggcggctgaacggcgggaagcggctaaggtcgtggtcctggtcaactaccggctcaagggtgaggaacggaccaatgcggtgcgtacggcgtcgctgattgactggcagaacgtgcgcaaggatgtgaacaacgggacgctggtattgctggagggagcgttgtga

SEQ ID NO: 362379 - DNA, 573 bp, Pseudomonas aeruginosa
atggcaggcatcaccctggaatgggacggacggcgagcactggatgtactcaacgccggcagcgcagcgctgggcgaccctggtgtgcttctgcaggatatcggggagctgctgctcaatattcaccgccgccggttccgcgcccaggtgtcgccggacggcacgccctggcagcccttgtcgccgacctacctgcggcgtaagcggaagaaccgggacaagatcctcacgctcgacggccacctgcgcaacctgctgcgctaccaggtggagggcaatgagctgctgttcggcagcgatcgcccctacgcggccatccaccacttcggggggacgatccagcgccaggcgcgtagcggcacggtgtacttccggcagaatgaacggaccggggaagtcggtcggcagttcgtgcccagcaggcgcagcaactttgcccaggacgtgaagatcggtccctacaccatccagatgccggcgcgtccctggctggggacgtccgagcaggacgacgagaccatcctgcagcgtgtccagcgctacatgcagcgtgcgcttcgcgaacgcgcctga

SEQ ID NO: 362380 - DNA, 1182 bp, Pseudomonas aeruginosa
atggagttcaccgaagccatcctgcaggagatcgccgcgacctacgatccggcgctcagcgaggcccctctcgtcatcggtcaccccaagctcaatgcaccggcctacggctgggccaagggcctggaggtgcgcgacggcatgctctatgccgagccgcaccaggtggtgccggagttcgccgaggcggcgaaccgcaagatgtacaagaagcgcagcgcgtcggtgtacctgccggactcgccgggcaacccggtgccgggcaagcactacttgcgccacatcggtttccttggtgccgtgccgccggcgatcaagggcattcccgatgctcccttgagcttcgccgaggatgacggcgccctggccatcgagttcgcggaagcgccctacgcggtgactggcctgaccgagatcctgcgtcgtctgcgtgacttcttcgtcgagcgcgaaggcgccgaacgggccgaccagctcatccctcaatggcaactgtcctcgatcgaggaagatgcgcggcgagcggctgcccaagatattgctccgcaggcgtccgcctcgttttccgaacccgtaatagaagaaggcgttgacaccgcagcggcctctgccgtcgctgcggaggagccgcagggcaccgtcaccccatccgacggtgctgccgagtcagcggcagaggctgaccggacctctcatccctcacagcaggacacgaccatgtctgacgaagccgcgctcgatgagcgccaacgccagctcgacgagcgcgagcaacaactggccacccgcgaagcggagatggcccaacggcaagcccagaagcaccgcaacgagatcgccgagttcgccgaaggcctagtcaagagcggccaactactgccgcgccagaaagcgccggtgatcgagctgctggtgagcctgcctgccgacgcgcccctggagttcgccgagggcgacggtcaggtcaccaaaccggcggccgaggtgctgcgcggcctgctggccgaactgcccaagcagatcgagttctccgagaaatccggcgacggcggcgacctgagcttcggcagcgctcacgccattgcagcgcgagcgcagacctaccaggaagaacaacgccaggccggacgccacatcagtacgaccgaggccgtcagccacatcaccaagggagcccagtag

SEQ ID NO: 362381 - DNA, 393 bp, Pseudomonas aeruginosa
atgaagatccggtcgcagcagccgcgccgccgcaacaccatgctgcgcgagctggccgagttgatcgtcgagggcatgcagcggtgcggggttcccccgcaccaggcttctgacgaggcgaaagagattgcattccggcttcatcgccgctgggccggaatcaccttcgtgttcccggtgaacgatgagctggcccgcgagcgcttgatcctgcacatcctggaacgttacgacggcaccaatgccgacaagctggtccaggagttcggcgtcaccgaggactggatctacacgatcgttcgacggcaccgcaggcagcttgatcgtctcagcagagaccagcagaccttcgattttgataccactgacaaccgaggacgtagagatgggtag

SEQ ID NO: 362382 - DNA, 345 bp, Pseudomonas aeruginosa
atgggtagaacccgcataatcaacaaactgcccagcaccgtcagggaagccctgatcagtcgtgcagcagatcgtccggggctgacgctggatgaacatgttcgctggctcgaagagcagggctataatgtatctcgctccgccttgcaccggttcttgggctgccggaacctgaatccgagtgacgggcaggaccaggcgatgggctggacacccgatcatcagtcgatacgcttcgggtgtcttatagctgcctccatatgtgtgcccgccggcgataagtcgaatctgatgagcaccgccgaagagctgctcgaatgggtcaagggcaaggctccaatctag

SEQ ID NO: 362383 - DNA, 507 bp, Pseudomonas aeruginosa
atgccatccattcaccgccaacaccctgtcggacacgccgcgcttgccgccggtctgatcgccgccagtctgatcgccggatgcgccacgtcatccgtcgcgccactcgtcatcgagccggagcctgaagcacgcgcgcaacccgtgccggacggctggattcccatcgttcggtatgggcgctacacgctggtggagctggtcccggaggccgcccagcaagacctactgttgcaggtcatcgacgtgtcgatgccggcgaccctgcccgcgacggtcggcgaggccctgcgctacgtgctgctgcgctccggctacaccctttgcgaagccggctccgatgtcgcggtgctccatgaccttccgttgccggcggcgcatctgcagcttgggccgctgtttctgcgcgatgccctgctgacgctggcaggaccggcctgggagcttcacgtcgatgacgtggcgcggcgcgtgtgcttcacccaggaacaggagcctctgccatga

SEQ ID NO: 362384 - DNA, 1218 bp, Pseudomonas aeruginosa
atgatggtaaataaaaatagaaaactacgggctctggtagtggttggcgctggtgcctcggtagagtatggaatacctgctacaacacagttgggcgcgttaattgaagtgggtgttgctgcagataggtactgtgccaaggtgggtggggtcgatgtataccgcgacgtaaagacggcactggagggctactacgacggcaattccagcgaagcgcactttgagcgcatataccacgtgatgcgtgaactgcatgcacttcaccgaacacccagggccgtaccgaaattcagcccagtcatgttgccgtttctcaacaagcagaagaactactcgcaggagtccttgcaggctgcctgtcagaccatgctggcagtcatctacaaggaggcatccacgatctgcgataacccgaagaagccgctcaagtctctggaaagcttcttctctcaattggaggagcacttcctgccaagggtatacaccaccaactatgacgacttcatcggacaagccacggacgaccgctacttcaccggctttacccggtcacgcggcactcacgcgctattcgatccgcattcgtactggtcgcattgggacgatccagccctctttcatgtccatggctcggtccacatgggatttccgctaccgcaggatggttgtgagattggcgaactcgcctggtatccatccagagcggaggcactgaaacgctctggattcaatgggtcaagccttggccgtatggatggcacgggcatcgagcgaagcgccatcatcacagggctggacaagctcggccgcctgcaacagatgccctacggactctactacgcaggactcagccgagatgcaatggaggccgacgtggtcttcattcttggtagtggcttagcggacctgcacttgaacacgtggctcagggaagcacgtagacacaagcaacggcttcccttgctctatgttggctactggccaggtgataccacggagttattttcaaggttccacttcgattacgaggatcaggagatcgccctttttcacgaccttcggatcgatctggcgaacgttccagagtcccacttcaaggaggctagcggctggacgattgatgcgcacaagacagccgccgtttgggccgatggtttccaggcattcctgtctcacccggatgcgctcgcgggggcgatgaaggaaatcggcgtatag

SEQ ID NO: 362385 - DNA, 687 bp, Pseudomonas aeruginosa
atgctcggtcaactgccgctcctgctcggccaggcgagcgagagagcgctgagtcggatcgatggcacccagcaacttacgtgcggccgcatcctgcttggctgtttcagcagcagccttggctgccgcctcggcagcgcgttgctcggtcgccgcctgctggacgcgagcacgctcggtattgtgataggcgttcatggcggtggactgcgcttgagcgctatcgcgccaggcagtgttccccgcttgcacagcagcattgaagcgctgcgtactggctgccgcagcatcctgggccgattgttgttgcagcgaggccgccaccatggccctgatgcgggccgtctgctgatcagcggactcgccgacgctgctcagcttacggccagcttgctcggccttgtcgcctacgtcctggacagagcctcccaactgatcgagggcagccttgccttgttgcaggtcggcgcgcaggcgcagggcgagttcgagttccttggtgttggccatggcagaggactacggcaatggggttgccgccatcctcgcgcgcgcgtggatcaccgggcttttcggcgggccgaaaatcggctcagaaaaggccgggaggttccgacgacagatcccaggagaagatcagcacttctcgtgcggccgaaccttggccgccgccgaccgtgtaggtga

SEQ ID NO: 362386 - DNA, 384 bp, Pseudomonas aeruginosa
ttgcgcctggaagaagcactgtcggcggctcacctgcggctgagcaacacctacatcgagcacctcagctggcaggactgtctccggcgctacgatcgggagcacaccctcttttatatggacccgccgtactgggagacggagggctatggcgtgccattcggcttcgagcagtaccaggagatggcagtgatgctccgccagctcaagggcaaggccatcatcagcctgaacgaccaccccgatatccgggagtgcttcgcctccttccatatcgaatcgaccggtatcacctacacggtcggcggcggccaaggttcggccgcacgagaagtgctgatcttctcctgggatctgtcgtcggaacctcccggccttttctga

SEQ ID NO: 362387 - DNA, 327 bp, Pseudomonas aeruginosa
atggacaaccagcaccgcaagatcagtggctatcgcgagttgactcaggacgacatcgacctgatgaaccgcgtcaaggccgtaggcgcggaactgctggcattgcaggcagcgctggccggacggctgagtgcggacctggaggttaagcaggccgccgcaaaggcgtcgaagctggcacctgagcatgagtcaagcccggagtgtatcgagcttcgtcgcttcctggctgcagaaccgttgcgctgggctgcgatcgccaagaccgacatccagacgggtgtcatggccttggtgcgcgccatcgctcagcccgagggctgctga

SEQ ID NO: 362388 - DNA, 195 bp, Pseudomonas aeruginosa
atggcccgtaaaacgagcaacaacgacgatgtatccggtaccgatgctattggcgagaagagccgctacatcgtcaagcgggaacgcctggatcacgacggtgaatcctacacctttggcgacagcatcctgctgaacagcgatcaggccgaccaactcctacccatcggcgcgatcgttccagaggtgctgtga

SEQ ID NO: 362389 - DNA, 819 bp, Pseudomonas aeruginosa
atgagcttcagtgatcgcgagcggtcggtcgccgatggccaggcgattagcttgtacgacttccgcctcggcccgatccgctggacctacacaacagcgaatcgagacatcgagttcaacaacatgacctttcgcgcgcggccggtgagcgacgatggacggcgcatgaccggccaggccagtgccgacatcatgactgttactggcccgagcgacctggaggttgcgcagctgtaccgtggcgctcggccgtcgaaggctccaacactgaccgtctgggacatccactggaacgagccccaggggcttgtggtgtggatgggcaggatcgacgaggtgaactggccggccgacagccgggtgcagatcaaatgccggctgctcggcaccgaaccacgcacatcgatcagcctcgcatggggacgtgagtgcccttacacggtgttcgataacaactgccgggtagaccgagaaccgtacggcgtaccgttcaccgtcgagttgcgtgacggcaacagcgtgacaggtgcaggcaacgcgattggcggataccccaacgcctggttccgcggcggctacgtcgaatgggacagcggtcagggagtgattgagcagcgcggcatcgagcaacacacgggcaaccgcctggtccttgtgggcggcacctcgctgttggctcctggtactcgggctgtcgcgttccccggatgtgatcagctcattcagacctgcaacgacaagttcgacaacacgccgaactgcggtgcagtgccattccttccgggcaagtcgccgttcgacggcgacccttggtggtag

SEQ ID NO: 362390 - DNA, 1020 bp, Pseudomonas aeruginosa
gtgctcctcgatctcagcttggccggctggggcggacgaatctgggcactgccggtgtggccggacatacaactgctggcaagcgtcaccgcggccggagcacaaacggtcgagtgcgatacccgctggcgggattttcgtgctggcggtcttgcgctgctgcgcggtgagtcagcgttcgagtacgaggtggttgagatccaggatctgaccgcgtctgcgattcagctggcccgccctgttcagcggcgctggccggccggctcccgcttgtaccccattcgcaccgcacagctgacggagcaaccggcgctgacccggctgaccgacaccctctacagcgcacaagcgcggttcctggtgatggacagcagcgattggccggaggtcatgccgacgacaacgtaccggggctggcctgtcctcgagcagcggcccgaggagtccgaagacttgtccctgtcgtaccagcgcctgctcgatgtcctggacaacgaaaccggcctgccacaattcgccgaccaagcggcgatcggctttccggttcacggcttccgctggcagaccgagggccgcgaggagcatgcggcgctgcgcagcctgctgtacgccctgcgcggccgacagaagccgatctggattccgacccatgccgccgacctggagctggtcgacacagtggctgcgaccagctccgtcctcgatgtcgagctgtgcggcttggcgcggttcttcagggctgatgctcccggccggcgcgatatccgcattgagctgttcagcgggcaggtcttccaccgccgcatcctcgacgtcagcgagctgcgcgtcgacgtcgagcgcctggcgatcgacagcgcgctgggcagcgttgtccggccgagcgacgtcgcacgcatctcgttcatgacactttgccggcaggacagcgacagcgtgcagatcacccacgaaaccgacaccgacggcatcagcacagccagcacggtgttccgaggagtacgcgatgagcttcagtga

SEQ ID NO: 362391 - DNA, 231 bp, Pseudomonas aeruginosa
atgtgggtgcaaatcgcgattctggtcgcgtcgtatctgatcagcagcgctacttctgcgaaagcgccgaagccgaaacctgaggcgctgacttccgaagatcttccgcagaccgaggacggcaccggccactacgtgatcttcggcgatgtgtggatcgaggactggatcgtcctcggtaccggtaacgagcggacgaaggcagtcaaatcgaaagggtcgaagaagtga

SEQ ID NO: 362392 - DNA, 162 bp, Pseudomonas aeruginosa
atgctgagtaagatactgatttataaggagtttatagtggtcataaactttgaccacctctactgtccagcgttccgactagcatccgttgaatgcgaactgaaatggacgaaaaataccgtgtccaagggaataaagatggaccttttacgtagtgcgtag

SEQ ID NO: 362393 - DNA, 1056 bp, Pseudomonas aeruginosa
atgtccctcgatctcgaaaccactgccgctgaatccgcgcccgtacagggcgaactgctcgacgcggaatcttcccctctgaccctgagccttcaggattttgtcggcgagttcggcgacgaactactcgacgccctcaacagcgctaatccgccggtctataccggccaaccgcaggcgcaccggcaactggtggtcgccagcctcaagcgcaagctgttcccagcccaggccgaagtcgtccacgccgccgccgagctgctgatcgaccgtggcgaacgtgctgcgatcgtcaatggcgagatgggctgcggcaagacgaccgtcggcattgccacggccgccgtgctcaacgccgaaggctatcgccgcactctggtgctgtcgccgccccacctggtttacaagtggcggcgcgagatccaggagacggtggccggtgccaaggtgtgggtactcaacgggccggatacgctcgtcaagctcatcaagctgcgcgagcagttgggcgtgcagcccacgggccaggagttcttcgtcctggggcgcgtcaggatgcggatgggctttcactggaagcctgtcttcaccacgcggcgcacccgccacggcgacgtggcggcctgcccggactgcggcacggtcatcaccgacctcgacggcgagccggtcaacccgatcgcgctccaagccgaggagtgccgcaggaagtgcggccactgcgccgcgcccctgtggacactgatccgcccgcgcagtctgtccggcagcgaccagtcctcggccgtgctcaaagccttaaagcgcataccgaccatcggagaggtcaccgcgcagaagctgatgcaaaagttcggtgacgggttcctggcgtcgatgctcggcgacaacatccatgagttcatcaacctcatggatggcaacggcgagctggtgttttccgaccgtcaggccacgcgcatggaacgtgcgatggccaacatggagttcggctttggcgagggcggctatcagccgtccgagttcatcaaacgcgtgcgacgtgaagtcgcctga

SEQ ID NO: 362394 - DNA, 1056 bp, Pseudomonas aeruginosa; identical to SEQ ID NO: 292108

SEQ ID NO: 362395 - DNA, 306 bp, Pseudomonas aeruginosa; identical to SEQ ID NO: 292109

SEQ ID NO: 362396 - DNA, 696 bp, Pseudomonas aeruginosa
atgggcggtaccgcgttcaatcctggcgcgctgccgccgggcggtgacttctggacggcgttcgttaactacagcccgcgagtacagctgcttgcctggaaccagccgatgccctactggttcttcgcgaacggccgcaggttctggatggtcgtcaaggtcagcacgatctacgagtcggccggcgccggcttcgtgctgccgccgtgcccgccgtcgcagtacccctacccgctcgctgtggttgggtcgtatcgcggggacgtcgctgtgcgctggtccgacgtcactgaccggcacaggggcatcagcagcccctacgagcgcagctgctatctccgcgatcccgccgggcgctggcttggtttcactgtcgaaggaggggctgccaacgagtccgactacagcaatcggacgctcctcccgctgggctgcggccgttatgcgggcagcagtgacaccgtggtcaaacaactgcgtgattcgttcgggaagttcccgctcaaagcgctgtcgttcgtcacccgcgaaaccgagggtcgccgaaacctgggcgacttcgacggcgctttctacgtgccaacgctcaactcgggcgccgaggacgtgattgtcgaggacggagtggaccacgttgttttccaaaccgcctggcgctcgggcaacccctggctctacgcaatcaggaaggactga

SEQ ID NO: 362397 - DNA, 159 bp, Pseudomonas aeruginosa; identical to SEQ ID NO: 330260

SEQ ID NO: 362398 - DNA, 300 bp, Pseudomonas aeruginosa
atgagcaccaaacgcacccacgacagcgtcagccgcgccctgcgagtactcaaggccctgcgcggccacaccctcaatgggctgagtaacgccgagctggccaaggcgctgggcgagagcccggcgaacatcacccgctacatggacagcctgatcgaggccggcttcgccactcgcctcgacagcggacgcttcgccccgagcatcggctttctgcaatacgcgatggccaccgccgaggagctgcagcgcggcaccgcacgcatcaacgagatccaggcgcgcatcagcgcccactaa

SEQ ID NO: 362399 - DNA, 240 bp, Pseudomonas aeruginosa
atgttaatccgggttatccagaagctggtcgaactcataactgtgtcaattgctctattgctactgatgcaacactggcaggaaatcctgcatcgcaaatggcaaactccggaaatggtgctcgtggagttgtatttggatcttatggtccgggtcagccaggccatgtttttaatgtggttaatcaaaatggtgttgttagattccttgatggacagactgggacaccggcaaatttag

SEQ ID NO: 362400 - DNA, 183 bp, Pseudomonas aeruginosa
atggacgatctgcgcccggtactgggacaggtgcgggatgccctgatcggctgggtgccgcctggtctggcgggagcccgtgactgccaactcatccaggggcaacccgtggactacgacacgtccgttttgatctggaccgacctctatcagacccaacacgccatcgggagaacctcatga

SEQ ID NO: 362401 - DNA, 786 bp, Pseudomonas aeruginosa
atgaatcatggccacgaataccgacggcagcctgacgctcgacctggtccttcgcagcgaagggtacagggccgggatggacaaggttggcaggatcaacgatcagaaaatgcgtgccatggaggcgcgcgcggaaaaggctggcaaggctatcggcaaaagcctggacagttcggcactgattgccagcagcgtgctggaccaggcgctggacatgctgggcaggaccagtcgccaggcgggtcaggccaagaagcctgtgcagagcgcccaggacaaagtactggccgagtggaagacccggcagaaggagctgggcgaagcctggaagagctatcgcgaaccactccaggatctgtccaagctcaacgaagcactactgaagaactcttccgacaagctcgacaaggcgctgctcaatctcagcgagaccggccagctgtcgcttgccaacgtgggcaaggccgcctacgccgatgccgcgcgcctcgcctcgcggcagatgacgctgatgctgctggacgggctgtttggctgggtcgccagcgtcggtaccgagaagcccaaggtcgacgacaaggcgggcaagggacaggcgaaggccggcgacgacgagaaggaacagccgtcgctccagtcgcaggtcttcaagcagtggctgttgcagatgaacagtgtctggggcgcctaccgcgcgccgctgcaggatatctccgggatgaccgacgagctgttcagaaatgcgtcggagaagctcgagaagtcgctgttcaatttcgccactag

SEQ ID NO: 362402 - DNA, 264 bp, Pseudomonas aeruginosa
atgaagaagaccatcccgttcttgttggctgcgatactgactggctgcggcccgaccgaaacgccagagaacaagaacgtgccgaccgttgaagaactggcgtccgatcccgcgcgcctgaaagagctgcgccagcaatgcaagaccgatcgtgccacgctgggcgacgtgctgtgcaaccgggtggccgaagccacgcgcaagcggttctatggtgacggcgatacgccctacacaccgccgaaggagccacccaagttctga

SEQ ID NO: 362403 - DNA, 1551 bp, Pseudomonas aeruginosa
atggagaagacacgttcggcggtcgccgtggacgaccgatacaaggtgctggcggcgatctgcgtctccgcgatcatcattcccctggtcttcaccgggccggcgatatccacgccggcggtcgggcgcgacttgggcggcgaccagtccgccttgggctggatcgtcaatgcctacgccatcgcgttcggcggttgcgtcatggcggccggcgccatcggcgaccagatcggccgcaagcggtgcttcgtggcaggactctggattttcatcgccacgtcgctactgatcggtctgaccccgaacctgttgctgctcaatctgctgcgcgccgccgaaggcgtgggcggtgctctggtgctgacttcggccacttctctgctggcacaggagttcgagggtgcggaacgcactcgggctttcagcttcctgggcaccgcgttcggcgtcggtcttgcgttcgggccaatggcctcggggttcctgatcgaacacctggggtggcgctcgctctacttcgccatcgcactgatcgcggtcttgatcctgatgctgggtacgcgacgaatcagggaatcccgtgacccggaggcgcaaggcatcgactggccgggcaccatgctgttcacggctgccctggtgtcgctgacgttcggcatcgtgcgcgggccgcaagacggctgggcgagcctgcgcgtgctgtcgctgctgggcagcactgttctgttgctcggcgccttcgtcgccgtggaactgcggcgtccgcgtccgatgctggaactctccttgttccgttacccgcgtttcatcggtgtgcagttgctgccggtggcaaccggattcagcttcattgccctgatcgtctatgtcccgatctggttcatcgtcatccaggggcgcgatgcgttcacggccggccttgcgatccttccgctgaccgcaccgatgctggtggtgccgctactggccgggcgcatggcccagcatgtctcgccgggtttgctgtccggcatcggcttcctcatctcggcgctcggcgcctggctgttgatgggcctgtcgcctgacgggagcttgtgggcgatggcgatccccatgcttctgatcggcatcggcaatggcctgccgtggggcttgatggatgccttgtcggtcagtgtggtgcccaaggagcgcgcaggcatggcggccggcatcttcactaccatgcgcgtggcgggagaagccatcgccatcgccgccatcggtgccgtgttggtcggtttgacggccgcgaacctgcgcgcagcggcgcaggccggctcactgtcgctcccgcaggacgccacagcgatcgccagccagataggagccagcgccggtcatggttcttctaccggcgccgtcagtgcaacggatggggcaatcatcgaacttgcacatcatgcctacacctctgccttccacagcatctttggtgtgctggcggtgctctcgatcctgacagccgtggtctgcatcgtgacgctgcgaaagtcggccgatcagcaaggcacatcgttggggtcttga

SEQ ID NO: 362404 - DNA, 924 bp, Pseudomonas aeruginosa
atgaacggcaccgagttcgagcagatcacggctttcctggccgccgtcgagcatggtggcttcaccgccgccggccaggcgctggggcgcgatggctccatcctctcgcggcgcgtcacggcattggaaaagcgcctgggcgtgcgcctcatggagcgcaccacgcgaaggctggcattgacggaagcgggcgaagccttccatcagcgcatgcgcggcgccttgcaagcattgcaggagatcgagcaggacaccgcagcagcggcgaccggcgtgcgtggcacgctgcgcatcgccttgcctgctaccttcggccggatgtgggttgccccgatccttcccgccttcctggcggactatcccgatctggtcgtggaaacggccttcgaggatcgttatgtcgatctggtggcggagtccttcgatgtggctgtccgcatcggaacattgaccgacagccggctggtggcacgcaggctcgcgccatcgcggcgcttgctttgtgcgtcgcccgcttacctgcaagcgcacggtacgcctgtccggccagccgatcttgcgcaacacgcctgcctagggttctcccgcctcgcctcgcatcccctttggcacctgcgcgacggtgacaaggcaacggcgattcggatcgcaggcccgctggtcacggacgatgcgcaaagcctcgtacaagcagccgtttccggtgctggcatcgcaatggtgtccgactggctggccggcccggaactatgcagcggccggttggtgccggttctgcccgatcatcccgtggagaacaacgagacggtctacctcgtgcatccatccgcacgattggttccagccaagacgcgggcattcgcagactggatcgtgggagagcttggtacaacgccgtggctgagccaggcgtcagccaactga

SEQ ID NO: 362405 - DNA, 315 bp, Pseudomonas aeruginosa; identical to SEQ ID NO: 82597

SEQ ID NO: 362406 - DNA, 1788 bp, Pseudomonas aeruginosa; identical to SEQ ID NO: 82598

SEQ ID NO: 362407 - DNA, 537 bp, Pseudomonas aeruginosa; identical to SEQ ID NO: 82600

SEQ ID NO: 362408 - DNA, 1416 bp, Pseudomonas aeruginosa; identical to SEQ ID NO: 82603

SEQ ID NO: 362409 - DNA, 762 bp, Pseudomonas aeruginosa; identical to SEQ ID NO: 82605

SEQ ID NO: 362410 - DNA, 3498 bp, Pseudomonas aeruginosa
atggccgcgacacttgaagaactcaggacgagcatcgatgcagccacagtgccaggattccgtgcccgtctgcttgcacgggggctggcacgcgggatgatctggcgcgagggcgtgctgcctgaggaggcgccgaacttcggtctagagttgtcggatgacctgttgtcctacggctactcactgctgctgcatggcctccgctacaccgacttaggaggtgatgctgcgacagcgcgcaaggcattcgaggtgtctgctgaggcgcttgaagctgtggtcgaacggggagcggcctatgccgagcgtgactttcaccgccttgtcgccgcagccgcctaccacctaggtcgattctcggctcgggcctactcgctactattcaaaggactcgccaagacaaatctttcaacgatggagaaggcgctggccaagctcatgctccgtgaccttgatggcttggctgaggatattggtgcatggttcgccgctggtcgaggaagtgaagaggcacttgtcgccgcgctgagccagtcgaacgtgcaagacaacggcgtgggtgcaatagaggaagaagcacatgacgggagaatcgacgttgtgctcattgccctcgaagacaacttcatggctgcactggcgaccgcgacgctagcgctggagcgcggcgatgaagcgttgctgtcacgagcacgcgagcggctacagaacggcatcgaggttgccgctgacctcgaactcgtacctgcgtggtggattcatcgcctgactatccacctgctgggcgacctctgggacaccagcttccacaaggtattaccgctgggaggactccctggtagcgatgtcggcgattgggcacgattgcgcaagctctttatcgcttctctctatcgcagaagcaaagccgagatagaactctggccatcgcaacttcaagcagcgcggcgcgtgctcgatacaggcgtgaacctagtgctatcgctgccgaccagtgccggcaagacgcgcatcgctgaactgtgcatactggctagcctcgcacgcggcaagcgaatcgtcttcgtcactccacttcgggcgctatcggcacagaccgaggccgggctacggcgcacgttcgccccactgggcaagaccgtttcgagcttgtacggcagcatcggcgtcagtggagccgacgtcgatgcgttgcgctcaacggacatcgtagtcgccacacccgagaagcttgacttcgcactgcgcagtgattcaacactgctagacgacgtaggcctcgtggtgctcgacgaagggcacatgattggtctaggcgagcgggaagtacgctatgaggctcagattcagcgcttgctgcgacgttccgacgcggccgagcgacgcatcgtgtgcctatcggcaatactacctgatgggaaccagttggaagacttcgcggcttggttgacatgcgaccaagctgacggactaattaaggacgactggcgcccaacacggctacgcttcggcgaggttgaatggaagggccagcatgcccagctcagcgtgagtgtgggtgacgagaagcccttcatcccgaagttcatagtcgcgaagaagccaagtcgcggtcgtgccagaaagctgttcccatccgaccaagcggagttgtgcatcgcgacagcatggcgactagtggaggaaggccagactgtcctcgtgttctgtccgatgcgtcgatcagtgctgccgttggccgcgaccatcattgagatgcacaaacgtggacacattgattcggtgcttgagcaacctgtgtctgcgcttactacggcactggcggtcggcgcggagtggttcggccacgatcatgaccttcttgcatgcctgaggcttggcgttgcggtacatcatggcgcgctacccacaccgtaccgcaaagagatcgagcgattgctacgtgagggtgtactacgggtaacagtatcgtcaccgacgctggcccaagggctcaacctcgctgcgacttcactcatcttccgcggagtgaggcgaggccgggatctcctcgacatttcagagttccgtaacgtagtcggcagagctggccgagcctatattgacgtcgaaggacttgtgctatatccgatgttcgatagacacaggcaacggcgaaccgattggcaggatttgatcgcgaatcagggcggtcgagaaatggaaagcggcttactccggctgatagtggctttactttcccgcatggcgaagcaaataggcacgagcgatatgggaaaacttctcgaatacgtcgccggacaggccgtgtgggaattctcagcaattgcgtcggaaacggctgaagaggcgactgaagaacgacaacgatgggatcggcatttggcgagcctggataccgcgatctttagcttgcttggcgaatccgttgtgtcctatatggaggtgggagccaaacttgatgagatgctagtagcctcacttttccagcggcgccttgtccgctacagtgaagacgttcgcaagctgttacctgcgggtcttcattctcgggccaagtacatctggaacaacaccactactacgcagcgacgtggttacttcctggctggtgttggattcaccgcaggccaagctcttgatgagcatgcatcggagttggagcacctgcttctcgcggccaacgtgaacgtcgatctcaacgacgaagacgaggcaataacggcgatcacggctttcgccaaaatcgtattcgacatcgcacctttcaaaccagaaagattggtcgctaactggcagtccctgctcaggcgatggctccttggacagtcagtggttgatgcctcgtccaaggacaacgacgaggacatccagttcatcgaacaggcgttcgtctacaacctaccctgggcaatggaagcggtccgagttcgggccgaggcacatgaggatatatcctctgacgaggtgaaattatcggagtacccgcgagcgaacgcagttgccgcagttgagacgggtactctatcagttgcggctgctacgctgatcaaagctggctttggctcgcgtcttggtgcgattcaagctatcacgtccaccggggcgagttatgattcaatgcgcggtctgatggcttggcttgcgtcggaggatgtagtaaatctttctgctgctttggattggccgacaccggaatcgcacgcactatgggctgcgttcaacggccccgatggggtcgagaccacgcaaacctgggatgcgactgagtacaggagcaacattaagtggcacggcgttccaatgccgcctggtacccccttgcgtattggcggtgggcctgggcgggagtgcagcgtattcacagccgatttccaagagattggtatgctcagatggacacccagtagcaagggcttgattgttgcaacagcgactgcaaacgctgcgaagttcgatcttgaatacctcggccctggcaaagtgacaagaaaatga

SEQ ID NO: 362411 - DNA, 258 bp, Pseudomonas aeruginosa; identical to SEQ ID NO: 82607

SEQ ID NO: 362412 - DNA, 729 bp, Pseudomonas aeruginosa
atgcaaatcaatatcattggcaatcatttcgccttcatggacagcgccatgttgctgcatattcccgccatcttcaccgccgaggaagtctcccggatccgcgcagccctggagcaggcggaatgggccgacggcaaggcgaccgccggctaccaatcggccaaggccaagcacaacctgcaactgccgcaggaccacccgctggcccgggagatcggcgaagccatgctgcagcgcctgtggaaccatcccctgttcatgtccgccgccctgccgctcaaggtcttcccgccgctgttcaactgctataccggcgggggctcgttcgacttccacatcgacaacgccgtgcgcgacgtccatggcggccgcgagcgggtccgtaccgacctgtcctcgaccctcttcttcagcgacccggaggactatgacggcggcgaactggtgatccaggacacctacggcctgcaacaggtgaagctgcccgccggcgatctggtgctctatcccggcaccagcctgcacaaggtcaatccggtcacccgcggcgcgcgctacgcctcgttcttctggacccagagcctggtccgcgaagacagtcagcgcaccctgctattcgaaatggaccagtcgatccagcgactcacccacgacgtgcccgaccatccctcgctgatccgcctaaccggcacctaccacaatctcctgcggcgctggtcggaactctga

SEQ ID NO: 362413 - DNA, 999 bp, Pseudomonas aeruginosa
atgaacaaactctactttgatcttctgaactcgcctgccgaggctcattcgtcgatacaaaaatctatatctgtgcaggcactctccacaactgttccaatactggagttcccttcagagaccgtatacgcttattccgcgtatatcgatgcattaagtataggtcagcgtgtagaccctgcattcacccagagcttaacgagtgccatttccaacctggctggtcgcccggttgctgtaaacgacatttaccagaaaattcacgaaacgactttgcgaacaccagtcgagatggggattcgccccaacagcgtcaccattgaggagtatcagaccaccataaatcagcaagccatcaacatggttcaagatatgcaggatggcgacaagggtgagaaggtagaagcgatccaaaccaacatgcagtttctctatggtcagaaaataaatactgacttcattgctcgcaacgaacttgcgtctggcttgagggcaaaaaccgttgccatagtccagggacatattactattggatatgggttcgataccgcagtgcacaacgcttcggacttgaacaatctaaacctagtcggctctactcggcaaaaggttttgccagcattacaactctcaacggctgacccaagcttctggagcgtctacgcttcgctgggacagcacttgactgatgacgatggattgctgttgttcagcgctaaagctcaagctgttgtgcaacatttggcgggagaccagttttcaggtagttggagcggactcccaccagcagtcaaaacggtcgtgctagacctttattatcaatacgggcaaggaaataatttcccaaaattccaacaggcaataaatagtcatgattggccagcagctatccatgagctcagaaactggaacggcgtaccgaatgatccgaacctagaggttactaaacgtctagaagagcgcgccaaatacctggcgatatccttcaattatgaataa

SEQ ID NO: 362414 - DNA, 729 bp, Pseudomonas aeruginosa
gtgttcagatcaatctgctcgttcatttttttggccataatggcgcccgcaatggctttagctgcaaaaattccagcaaatgagtattcgctgggggatgggaaaggttatatcaacatctggccgatacagaatggtgttcaggcatttcttatccacaacgacggacctaatggagctacatgcagccttaaaggagtacttagaaataatgagggattagtggggccgccacataactccagatcatgccaattgataatcacccaatcaggattgttgtcagttagtgtcagtcgaaaggccccatcactagacagttgctcagattggtgtggccctagtgttgggttcgtgggtgtatattctgtcccaccaaagggttgctactacatgcaaataaggaaaaagactcggcgcatctcagacttgattgaaaaaaaggagtttgatgctgcttactcactttccaaggaacttttgtcaaactgtgcgactgagttacctgacaccaccaagatatatcaaaccaacttgcttgccatgattagtgctgaaaagggagagaatgctcgctgtttggagtatgcccattgggtgcaaaagcaaattcccgtaagagatgacggccaaccggctgaattcttgcttccggcgaagcatgcattcgccctagagcaacgcgccaaggctgatgctctattcaagcagtgcggcggtacgaaatga

SEQ ID NO: 362415 - DNA, 297 bp, Pseudomonas aeruginosa
atgacgaagacaaagaagaagagcgaatgggccaagcttccactgcgctggattcacaagggcgggctccagaccttcaccgatatgaaactgaagaagacgcgcgtgccggaggggcaggaatggactgaggccttgctgcacgacagggaagcccggaacacctgcatcgctgcgctccgtctgtacctggtcctgtgctgccgcgctgactacaagagtggcgaggccgctgtgacgtatccggagctgatgaagctggggtttggggagcaatggaaccaaaaaccaacgtaa

SEQ ID NO: 362416 - DNA, 354 bp, Pseudomonas aeruginosa
atgtcctatcacacccggaatagagcattgaccatgacttacgacgagacccttgcatcctatcaacgtcttcttgaagccaatccagggaaagctatgcaaatcggcgacgattgctatgcggtgttgatcaacggaaccttgtgcggggcatacaccaacctggatggggctgttgatctcgggacaaccttcgcctttgatcgagaggcatgggatgctgaatgcgagtgttgggaaggcgatgtgtctgggatgcaaacagcattttgcatagcaaccccatcccttgttgcacttctcccacccgcggcgggcagcaactcgcccaaccagggggaaaaagaatgttag

SEQ ID NO: 362417 - DNA, 342 bp, Pseudomonas aeruginosa
atgacagccatccaacatttccagcagcgccaatcagagccggtctgcaccgatctgattcagatgattcgtgacggcatgattcgcggactcaagcgattcgttgtagagccttacgatgacggtatcacctggggaattcagacagtcgccgtagcactaccaaatgctgatgagggcaaccagtttccggttgtaattgttgaccttcacgaagatgaccaggctgcaatgtcgtttgccttgagcgtcttcgacgcgctcaaagccgtaggccgcgcctcaagcgaggatgtatgccaatggcgacgaagcctctttacgcttgtgcctgactactga

SEQ ID NO: 362418 - DNA, 195 bp, Pseudomonas aeruginosa
atggttgagcgcatgacgccggaggcgttcaaggcggaatgcaagcgcaagggctggacggggcgcgccctagctgaacgctggtcaaaatcggaggcgtggatcagtcgtattggcagtgatcctgagcgcgatctgcactgggatgacgctgtgcgcggactgccagacctgaaatgtttgaacaatagttaa

SEQ ID NO: 362419 - DNA, 702 bp, Pseudomonas aeruginosa
atgggtgcggacgttgtgcttagcaaagtagatcaacacatcaagtcgatgatgttgacttacccgaccctgttccgtagtcgcttggcagccctgcaacacctcttcatgaccaacgggaatggttacgagtggaatgccgatggcgagctggttcgcctctttgaatccacccgcaagcaggaaatggactattccgacctcgaagagcgtaagcgggaagttgaccgggaactggctgcaaatcacacgggcagtctcggcaggctcttcgctggccgtgcagcagcgctcaagcgtgagttctctgagcgccgactgattgaagcggacattgacttgtacgccgtcgagcatgtgatgggtgaagaccagcagagcggagtggaatggatgaagcacttcgatccgcaatggtgtgtgatgcgcgatgcgccattcggcgctctcaatcctgaatgggccgctgccgccgaagagacaatgcaggttgccagctccgcgatctggcgccacctaggcatgtatcacgacagttttgacagagcgaaagcagacgcaaaatggctgcgggtctatgaccagcttgagcagattctggacaagctagacctgaccaccggcaccaagaagcgtgttgccaagcagaacgaaatggccaagaaaatgattgatgagatactggctgagcaaggccagtag

SEQ ID NO: 362420 - DNA, 189 bp, Pseudomonas aeruginosa
atgaaaaccgagagacacgaagtcagcccattggcaagtcagtcaattgaagaggccgctcttgctgcacagatccaaggtaacccggccgccgccatgaagttagttctgatgatgagcgaaaagcagcaagaggcactggccgcagcgtgcaagagcctgatcgctttcgtccccatgaaactctag

SEQ ID NO: 362421 - DNA, 213 bp, Pseudomonas aeruginosa
atgcctacgatgaagaacactcaagcaatgactgtaaccctggacgccaaagcggttgaagcgctgtcgcagtaccggcaggcgctgacggcatttcaggcggtcggccacggtactgacgaaggtgcagccctgttcctggcctccgagcgtgccgccgaagaactgggccgccaggtagaagccttggccccttctaccgacagccactga

SEQ ID NO: 362422 - DNA, 207 bp, Pseudomonas aeruginosa
atggctatcgctggctttttcgtggactggaacggcgacacacgcaggactgagcagcccggcgactacttcgagtgcgtcgttgatgagcagactgcccacgtcgatgtagttgatagcgaggggttcgtcgttcacgaatgcagctacttcccgacgctcgatgctgttgaagctgccggcgtatcggtcaaattggttcagtaa

SEQ ID NO: 362423 - DNA, 231 bp, Pseudomonas aeruginosa
atgatgatcgatgccgaacccctcaagccgtacctcgccgctgtcgccaaggcccgtgaggactgggagtctgtaggcgctgcctacgatgccgcgcctgcggagaagagaggcgagttgttcgccgtgaaattcccgctggccgagcaagcgtattaccgggcctgcgaagagctggcgtttgtcgtacgcgcccaggtgaaggacgccgaaagcgcctcggccggttag

SEQ ID NO: 362424 - DNA, 207 bp, Pseudomonas aeruginosa
atgttccagctgataatactccgctgggtagaggaggccctcatggcaatgggtggtagcttgattgctaccggccttgtgctcatagctactccacaatcagatccacgcttgttggcactatgcctcgtgcttggtatcttgatgatggtggggaagctggtgctatccttagctacagccctgagcaatccgaaaggagagtga

SEQ ID NO: 362425 - DNA, 255 bp, Pseudomonas aeruginosa
atgagtgagttgctcaagtcgccgtttttcgtcttggccattggcctgttttctattgggttcgccaaggcgtgtgattatctctctaaacgggtgccctggctccgcgaaagacgtaagcctttcatgattggtgcgctgaccctctcaatggttcttctggcttcccttgggcagattccacttcggtatgcgcttaatgatgtgcttgctgagtaccgagatgaggtgccagatcacagtccgccccattaa

SEQ ID NO: 362426 - DNA, 426 bp, Pseudomonas aeruginosa
atgagtgaatgggactacaccagctattggcggaagaactacgaggctcgagaagctgttgcgtggggggcctccatgcttgccggcacagccgtgcaactgatgacggacatgccggtaaccccatacctgatcacgttgggcgtgcaggctggattcggcctggcggccataccaagggcactccgggttcatagggcaaaagcatgtctcgctggagtagatctctcgttcatcaccttggaggaggtcatagagctggtgaagcgacaccctcacgaattctatttcggcgaggccttcccctggcggcagcggcacggccagtatgcatttgagcttcaggcgaaggatatcgaggccattatcggtaagcgtggccgccgcaacgctgcggttaaggaaactctgaaaaagacttcctga

SEQ ID NO: 362427 - DNA, 3432 bp, Pseudomonas aeruginosa
atgaagaagccgtccaggacgtctttgctgtcacttgctaaggcgatttatcaccgactgcccttgtcgcaagagaccaaatggcgcttgcgtgctcgactgcagccagtcctgttagacctgacttcgggcaaatcagcggacatctccctcaaatccatcggtggtgtgctgcgtcccggcaaacacggtgacaactccgctcgagaccatgaccttgaactcgcactggcagccatcctgcaggacatggcagctcatgcagagcggcatggtgcaccccgcctctggatagccttgccctttctgacgaccgggggggctgaatgggccgcactacacctgtgccgagccgcgttggagcttcgtcccgatcaatccgtggttcttctggtcacggacaaagatctggtcagcgaccgtatgccgttgccgcctggggtgttgctggtggtcctggacaggtacctgtccgtaccatctggctacgaacgcaagcagactttgctacacaacttgctgagggccggtcaaccgcacaccttccacaacatcaacagcgaagtggcctggcatctgatcttggcccacgggtcgcaactggaacgatacacccgtctgttcgccagcatctttgcttttcagttcgctcctgaccatcgcacaaagatcggctatgccgcctactttctcaagaaaggtatgccccacctggcagggcttctgtcagacaaccagcgttttctgaaggatgcagcgcgggaatacgccttgtcggcctccgagacggcacgcatggctgttctctatcagccgtgccgtgtgttgctcgacggttcgccggaatcccctgtgggcgctctgcaaaggcgccagtcccaaacgattcctgttgatagctcgcaaccgaggcgacggcctcaggttctgtgggccggtcgtctggacgccgaaaagcgtgtcgacctgttcctggagctcgtgcgtcgctgccagtttgccgacttccgggtgtttgggcaggtggtgctgaatgatcaggcggccttgcctgaaatgcccaacctgagctacgaaggccctttcacgtcgccgctcgagtggctggaacgctacgagtttgacgccttcgtgttcacttcccgctgggaaggaatgcccaatatcctgctggaagtgggggcactggggattccggtgattgcgcccacggtgggcggtgtcattgagctcatcgacgagaccaccggttatccgctgcccgagcaacccagtgtggccgactatgagcaggccttgcagcaagtcgcctccgatccggcccaatcactcctacgcgcgagcaagctgcaaaagctgatccaagagcgccacggatggtctggctttgtgaagggggtggctgagctgcccaattacctgccacccgccggtagaccagaccctgcggcaggtacgtacaacgagggtgcatcgcccctggtgacggtcatcatcccctgcttcaatcagggacactacctggagcaaagcgtgatgtcggcgctgtcggcagggacctgcccgatggaaatcctggtggtggatgacggcagcaccgatccgagcatcgctgaccagctggcccgcgcggaaatgctggctccgggcgtcgtccgtgtccatcggcaggttaatcaggggctttccggagcgcgcaacaccggcattgcattggcacgaggcaagtacgtgcagtttctggacgcagacgacctcatcgcgcctggcaagctggatgcccaggttgctcagctcgagatcaatccggagctggacgtctccgtctgcaactacctgttgtgtgatgaagcacgtggaatgttcaccaagactgaggaggccattgcgcgcttcgaaataagtgagcaggattttctttaccgttgggaacgcggtttcgtgatccccattcacgccggcttgttccgtcgcaccgtgctgacacctgagctccgctttgacacccacgcccgagccaaggaagactggttgttctggacccacctgtccctcgcgggagcgcgtatcgcttaccttgaaggccactgggcgatctaccggcaacacgaaacgagcatgcggcgctcctatgtcaacatggggctggcctggcttcaagccggactgaagatcaacgaaaaggtagcgcaccgagaaccccttttcttcgaatcggtcgtttcatggttcgagcagtgctatcgctcaaaccccagctaccgggccgaaattgcgcgccgacaggccgcctcttccgatccggaaaaagtctcacttgagcctgcgcctgccgaagaccctagccttcaggcccggcaggaggcgtgcgctattcttgaagcgttgtcttctcttaggccgctgcaggagcgtccgatgattagcgtggtggtgccagtctacggccacttcagttatctgcggacttgcctgggctccttggccgaacaggggcaggtagccttcgagatcatttgtattgacgacggctcacctgacccgcgtgtctcgctgctgatggatgagctgcgcgacaagcatccccgactgattgttcacaaagaaccttgtaacgtaggtatcagcagagtccagaatctggccgttgagatggccagcggcgagtttgtggcctttctcgactgcgatgatgcgctcgttccaggtgctctggaattggtttggacgacactgcagtccaagcctgacgtggactatctgttcactgaccgtatcgacgtcgatgaaacgggtcaaaccctccgtgtcgcccgctacgggggatacgagcggctgaagttcaagtcacaagacctgatccccgatgacctcctggatggaatggtcgcatcgcatttgaaggtcatacgtcgcagtgtctatcaggctgtgggaggttgtgacgacaagcattcgggcgttcaggactgggacctcgcgctgcgcatcgcacaggctcacaagctgtattacctggcccaacccttgtaccaacaccgaatccacagtcgctcggtcacccgaagcaaccatgtcagccagcttcgcaagacgaacgcggtcttgcgccagcacctggagcgctggcgctcttcggccacaaagccagcttcggtccacacgttcggtctggcagatttccctgtgccgctcgatcagctcaaaagcatatggaagcagggtggtcggtgtgtcgccgacctttccggtgacgttgccctggaacatatcaactacctgcgagagttcaacgcctacttcgatcgcgtggtctggaaagaccccaaagtgcccgcttctttgttcggatatctgtgtgacgccgtccagttgatgactccaaaacaacacctcgagcatcagatggagggtacgcgacgtgagcactga

SEQ ID NO: 362428 - DNA, 1626 bp, Pseudomonas aeruginosa
atgagtagcctttatttttatgctgatgacgccagtcagaaaattcttgctggagatgcccaaaagatcatttccatagggagtgatttcggctacggcaacttcggcgatgttcttcagcacatcaatgcattgagagccatcaaaaaggcaggaagatttgcaaccgtttctgtcatggccgccaaagccattaacagccaagccttcccgtcgtttgtgtctgaagcttacaaaactgacgcggttattttcgtcacgagctacccattaattcttgccgacactgatccacaattgacacgggttgcagaagttcgcaatgtcgcagggctttggctttacggcggtggttttctgaactcaatgtggggtgactttgttttatccgtagttgaacatttccttcgactcgatcaagagatcaattattgggtctccggccagcagatcaccacgccctttgaagctcgtgttttagagcacatcaaggtatttcaccccaagctgtttggggttcgtgacgaggtgagcctacggttgcttgctgagcgcggttatgacgcagatttttcatttgatgatgcgaccgaggcgcttgaaggtttgagtgatcgactgtcgattcggcaagggcaggggctggcgctccatatcaattcatctgattacactggcaacacctctttggcggatggcttaggccgagagttggcgagcgtagcttctcaagatgccgctaggcacgaagtcactgtttttcaggcgttcagagattcccgccaagatgtgtttgattccagcgaaaccatcaagcggttggattatctttttccgttccacgagtatcgcacaatcgatttggttggcctcttgttcgatcaatcatctagtaataagaaaattaaattagatttggcgcttggctattcgtgctcctatcacgtgacactttggttgcaattggcgggcatcccttgttggttacgcagttcgaattcgttttacgatcaaaaatcacgtgcgctacaggtgtcgcaggggctggatgagtttcttcgaaatccgaaactggctgatcacacctcaaatttggagcggcgtgcgacttggaatgataagttgcagcgtcatctctcgagtattgaccctatcgagaactgtctgtgttttgaaaatatcgagagtggacctgcgccttggtccttcttttacaaggggcatccaacgcttcaggataagttgagctcagcggagaaggacaatctatggcttaaatcccgtgctgaggtggccgaacgcgatctgggtgcgacaagaagtgaaaacgttgagttacaggggcgagttacggctttgtctgcccagttgaccgaggtgggtgatgaggcccatcggcagcgagagcgtgctgaggtggccgaacgcgatctgggtgcgacaagaagtgagaacgcggaattgcatgggcgggtggaggcgttgtcaacgcagatttcggtcattttggcctctcgatcttggcgcctgacacgaggacttcgtgtcctgggccgtctgtttcgcggcgagtttggtgctgttttcgcagcgctccgccagcgcttcacgcgacaccgctcatga

SEQ ID NO: 362429 - DNA, 2133 bp, Pseudomonas aeruginosa
atgagaaagattgatgtcagtgtggtgctcaacatgcaccgtgaagcactctatttgcgtccaactttgctttcactggacgcttgcgccaatgaggcaaaaaatgccggaatcaatgtcgaattgattgctgtcttcgacaaaccagatcaagacaccctggaagtctttcatcgaaccccgctaaaagcttttgaacaaataaaaaccactaccatcgatgtaggatctttggggcttgcacgtaatgcaggaattgatcttgctgaaggcgaattcgtctggacttccgacggggatgacctagtatccagaaattcaatcgttgaactcgtcaagaccgcccgaaatcacccacactcaaagatcgctgtgtttatcgacttctgggttgcctttggtgaaccataccatgtcgcgcgttatgtgagcgatcagtggttgaccgctgctgactttgcttatcatcacccttatgtttccagaatttttatcaagcgagatgtgtttcaacatctgtcctatcgcgacctaaaagttaccacaggctttgcctatgaggattgggatttcaatgtccgcctgtttgcttctgggttcgaattcctggttgcacaaaataccattatattttatcgacaacgaagcaacagtctgttaaagcaggctaatgcggtatcggcaagaatggttccccactctgccctgtttgaaccgaaaacctttgttgcagccatggctgatgcgcgcaagagaaaccctgattggcaaaagtttatgcgtgaaaggcaggcgatttacgaaaggaaatttgtgcatgagatgttggcatcggagactttggttggctacgcgactgaagcagctcaatttgatcccgaagtcgagcccatccgaattgaagccgcaagcaattattgtcctgtgccttgggaccctcaacactggggattccagctggagaggttctaccagttagttggcgatcagcctttttccgatgttttgctgttaccctggcttaaaccgggtggcgcagagaaatacatcctgcaagtcctgggtgagttatggaagtttggcgcttgccggcgactattggtattgagtggtcaggcggcgagcaggcatgaatgggcgagcttgctacccaaaggctccgtttttgttgatgtatttaatgcatttcccatgcttgacgatgccggaagagacgccatgatcgcaagagcgcttttggctgttgcagccgaaggcgcgcgcttgcacatcaaggccagccctttttcccatcgtttaatggatagctttggctccgtcttgtcttcaacatacaaggtcgtctattaccgcttttgtgatgattcgtatgcctggcgcaatgagcgcgtcaatagcccttgggctgtcgcctttctgcgtcgccagttgaacaatattcaccttttgatcagtgactgcggcagcatcgtcgcggccgattgggctcgattgggtgcgcacaaagaaaaatatcaaaccatttacgctctttgcgcagctcaagagcatccgtcaatcaaacgcttgcccaacaagcgcttgctttgggcatcaagagtttcagctcaaaagagacctgatttgcttggaaaaatcgccacagcgctacgtcaggattgccctgaaattgttatcgaagtgtacggggtggtcgaagaaggctacgaacagcagtctttattcgatgcccccggtgtggtgtatcgcggaagttatgacgggtttcaaacgctgcccatagatcgtttcgatgcgtttatctataccagcgctttcgatggtctccccaatgtgattcttgaggttttgggggctagtgtgcctgtgatcgcgcctgacgtcggaggtattggagaggctgtcatcgagggtgagaccggttttctggtgcctgatctcgttgatgaaaacgcactggtcgaagcgtatgtcgatgcggtacgacgtctctatggcgactgggatcgcacggtggaaatagtcgagcgtgggcgacaattgatcgcggatcggcatggcgaagccaagtttcggcaacgcattagcgatgtatttgaactggctttgcatggtgagaaggtcaatctatga

SEQ ID NO: 362430 - DNA, 1329 bp, Pseudomonas aeruginosa
atgtcctctgaagttgcgcttacggtccaggggctggccaaaagatactatatctacgacaaacctcaccgaagactgctgcaaatgctgctggctcgcacaggtagaaggttctacagagaatttgttgccctgcaggatatttccttcaccgtgcccaagggcaaggtcgttggcattctgggcaaaaatggggccggcaagtccactctgctccagatcatttgtgggacgctgacgcctagcgatggcacagtagaagtgcgcggcagagtagcagcacttctagaactggggtccggattcaacccggagttcaccggtattgaaaacatttacctgaatggccagatcctcgggctcagccgagaagaggttgatgcaaaacttgccgatattcttgcattcgcagacattggagattttgttcaccaacctgtcaagacctattccagcggaatgtttgcccgcttggccttttcagtggcagtcaacgtagaacccgatctgttgattgtggacgaggcattgagcgtgggcgatgcctggtttcagcacaaaagcatggcacgcatgcggcagctcatggaaagcggttgctctgttttgttcgtcagccactcgatagacgctgtgcgcgcgctctgcgatgaggccatctggctggagcaaggtcgggtgaagatgcagggtaacgtcacggatgtgacgaacgcgtatatgaacgatgtgttcattgagcataaccgaattgttttgcagtcgatgaaacaggtagtggctgctgaagaatcgaccagcctgccgactacgacccaacaagatgtgcctgagctcgatcacaggagtgaaaaagcagagcaacctatatcggcagaccttgttgacgggactgttgtctccgtccgttcaaagttgctgaaaaaccaacaagggcaggtaacagatcacctccatcaaggcgaaagattttcactagagttcgagatcgaaattcacaggcagataaataacctgagtctcggattcctcatcaaagatcaatttggacaagaactcactggcgagagtttttttaacacatacagaaagagtctgaatttcgaagcaggacaaaccgtgcgttttgttttcagctcaacaatgctcttgcgtggcggtcagtcctattcagtcgcgctccgcatcaatcaggtgagccagtgggatcgcagtgacaacgtgattatctttgtggacgaattggccatggtgttcgatgtgttagctgatacagataatccgatgtggtttatgttcaaaatgccttttgaagttgcatgtaaatga

SEQ ID NO: 362431 - DNA, 828 bp, Pseudomonas aeruginosa
atgaacccccacgcagcacagtcgttgcggccgtcagccttgctgaggtcctttcacaccaaccggagcctgatcttcaatctcatcaagcgagaagtggttggccgctacagaggttcggtcatgggcttgctgtggtccttcttcaacccggtcttcatgctggtcgtgtacacctttgtgttcagcgtcgtcttccgggcacgctggcttggcggctcggattccaaggtggagttcgctctggtgctgttcaccggactgctggtctacaacctgttttcggaagtgctcaaccgggcccccagcctgatcctgaacaacgccaattacgtcaagaaagtgatcttcccgctggaggtcttacccatcgtggcttttggggcagcggcctttcacatgctggtgagcctgctggtatggctgcttttttacgcaatattctttggtctgcccacctggacggtgattcaactgcccgtcgtgctggtgccattgatcctcatgacgttgggcctggcctggattctggcttccctgggggtttacctgcgcgacgttggccagatcatcggagtgatcacgatggcactgatgtttatgtcacccatattttatccggtggcagcgctgccggatcaataccacgccttcatgtacatgaatccgctgacctacattgtcgaggagacccgcaacgtcatgatctggggaaagttgattgactggaacgcctgggcccgctggacagcgggagccgccgtcgtcgcctggttgggttttgcctggttccagaaaacgcgcaaggggtttgccgatgtcctctga

SEQ ID NO: 362432 - DNA, 582 bp, Pseudomonas aeruginosa
atgctcaaagatcagattagtatgttaagcgatccggtaattcgcgcggcattattagacaaactaaacaggggaaggcctcagccaaaagccctgatagaagagttgcgtatccataacggtaatgccatagcagatatagtggcagtttacaacgaagctcattgctatgaaataaaaggtgaaaatgacaaaatagagagaatcatagagcaggggcgatattatgatcgcgcctttagaaaggttacacttgtaaccacctctcgccacattagaaaagcagtggccattgcccctgagcattggggaatattggaagccaagagaaacaacgtaggaaaagtaacatttaaggctattcggtcagcaaggaaaaatattggttttgataagaaggtagctctactgacactgtggcggaacgagttgatagaaatagcaaatcagatcgaagaaaaggtaggggcaaaagctaatagagatactctctctcagctgatctctcagtcctatgggatagaagagcttagccatacgattagcaaagctcttgctgttcgcggcgttacaagatactaa

SEQ ID NO: 362433 - DNA, 615 bp, Pseudomonas aeruginosa
atgaaggctcttcccgagaaaatcctggacatcattcaacagcttccagaaggtgaggttctgacacctagcagattcctgcatcatggttctcgccatgctgtgcagcgaggactctctcgcctggtcgaaggtggaaagctgtttcgcgttgctcggggcatttatgttgccgcagtcgaaactcggttcggcgtgcgcccgccggcaccggagaaggttgtccactcgctggctaatgcgctgggtgaagtgctggtcgaccacggggctcgtgccgcgaataaattagggctgagcacacaggttccagttcgctatgtctttctaaccgacggacgctctagggagcttcaggtaggcaagaccaccgtgtcgattcggtatgcgcctcgatggttgatggctctaggcgctactggagcgggggaagccattcgagcattggattggattggcgaggcaagcgtggggtatgccgttttcaaacttcataaactactacccgagagcgaatggggtgatctggtgtcagctcaccgctcgttacctatctggatggcgaatgcaatctgcgctcagtcgagttgcacccaccctgtcaagttgggctag

SEQ ID NO: 362434 - DNA, 189 bp, Pseudomonas aeruginosa
atgagaggctccgacattccaccaccagggtatcgccctaccccgctcgccaccctcggccagcagttggtccgcctgggccaggcgatgcagaaccccaacaccaagctcggcgagttgaccgaactggtccagacctgcggggtcgacctgcggatctgcgacacgaacaaggagagccggacatga

SEQ ID NO: 362435 - DNA, 999 bp, Pseudomonas aeruginosa
atggacgcaaacggaatgaacgcaggccccaacgttgtttgcctgatctcggatgagctgctcgcctttgagttcggtattgcttacgaggtcttcggcctgccccgccctgagttcgcggacggctggtacaggttcggttgcgcggcggtgcggccgggaactatccggtccagcggcggcctgcctgtgtgtgtcaaccaggggctggaggctttggaagaggccgatctggtggtcattccgggctggccggatgttgagtcccctgtcgagcctgacgtgatcgaggcggtgcgccgagcgcaccggcgtggcgctcgcatcgcttcgctgtgctctggcgtggtcgtgttggctgaggcggggctgctgaacaatgggaaggcgaccacgcactggcgttttatcgacagcatcgcgcctcgctttcctctgattcagttcgatccggacgtgctgtatgtagaccgaggcacggtcctcacggccgccggtagcgccgccggcatggatttgtgtatccatattgtccgccaggatttcggcgttgagcgggcaaatatcgtcgctcgggggctgataatgccgccgcatcgcgagggtgggcagtctcaattcatcccccagccggtgccaaaggcctatgaggcatcccgcatcggcgccgtggtggagcacatgaggcagaacctgggcgatagccaccctgtcgaagagctggccaagatggcggggatgagcttgcgcacgtttcagcgcaggttcgaggctctgactggcctgccgcccagcacttggctgatgcgcgagaggctgcgggtagcctgtgatctgctggagcatacggctgaacacgggctggaagagattgcagcactgagcggcttcggcagccttccgacgatgcgtcaccatttcagaaaagcgctcaacaccagcccgcgcagctaccgtcgagtcttccagggaacatcccccatcagccactttggctag

SEQ ID NO: 362436 - DNA, 306 bp, Pseudomonas aeruginosa
atggctaccactgaacgcaaccgccgcatgaaagctggttcacccgagttcaacggccgccccttgtttgatgagttacggcgccttgctcacaagaacccaggcggcgattgctacattgcgatgaccctagctgccgacgcgcttgaatcgggggatcaggttgatttcaaaggccggtcgctggttgatacgctccatttcaacatccgcaacgcaatgggagattcaaaggcggctatccgctctgccattgatgtgctgtcctcgaagccacagacccagaggcgttttataagtgggtga

SEQ ID NO: 362437 - DNA, 339 bp, Pseudomonas aeruginosa
atgaccgacatcaacaagctgagggaactggcggaactgtgtctttccccggcagacggagaaaccgccagtgagagcgcaaacctagatgcgctacggcgcgtttatttccgccaagaagccaatccccaagccatcctcaagctgattgccgaggtggaacatctgcgcaaggacgccgcgcgataccggtggctgcgagagcgagaccttgagacgatcagccgcggcggggttttcgcagggatgaccccggaaaacatcgtactcaatctggaggacctggacgcggaaattgacgcagcaagatttagtaaatccgacgctccagcgtcctga

SEQ ID NO: 362438 - DNA, 813 bp, Pseudomonas aeruginosa
atggcgacatcatcgaaagcctggggagcgatccggcctagtcttgcagaccatagcttttacgatattaagaccatcgtggggctgtccgggctggatgtgggccagctttcacatctcgtgcaggtgagtggtggcatgagtggcggcgctaccaagggccaactcatgaccgcaattgactcagccttcggaaatatggatgtgcaagatcgcctgaattttgtcaccttcgtgacggaggaacttctcagaagaaaccctggcgttcaggaacaacttgaagaacacctttctcggcatgggtggggagtagttgacaactgtcttgtgctgctggaactcttcgatcctactggccttgcccaattactagacgcaccgcgtaccgatcttttgaaggcggcgcaacgctttcgagacggagacttgagcggtgccatttcggccgcttgtggtgcagttgatacggttacatccgcgatctactcagagtgctcgcttggcgacccaaccagggcgtcattccaagagcggtgtagtcgagccctcgaagcccgcaaggtgctgtccgatattgaaggtcagcttcgagaattggcttgggacgacacaacgctgaaaacactttcccaaaacttcaaaggtgcgttgaaccaaggcgcctacgtcatgcagacgcttcgctcgaacatgggcgacgtacacggcacaaaaccaattctgaaacccttggtatttgacgtgctgaaatgggctgagctgttcgtgcgcacgctaagctccccttgctcctctgtcatccagcgttag

SEQ ID NO: 362439 - DNA, 744 bp, Pseudomonas aeruginosa
atgaagccgttattgaatacctaccaacaactgcttgatctaggcctgaaaggtatggcccgtgcctatgagcatcagttaaaccaaccgagtcttcagaaacaaccgttcgacttacgtcttggcctgatgatggagtccgaaaccagtgagcgtgaaacccgtaaggttgagcgttttctgaaaagtgccaaactgcgcgagtcacaggccacattggaaggtgttgaatacaaggcaagccgagggctggatcgcaacatggtcacaacactggcagattgtgaatggttacgtcgccggcagaatctcattttgaccggagctaccggtaccggaaaaacctggttggcctgcgcctttggtaatcaggcctgccgcctggggttcaatacctactaccgtacggccacacagctgtttgaagacatcacactctcttatgcggaccacacacttccgaaactgcgtaggcaattgatcaaggcgcaactcctgattatcgatgacctgggcatcgggggcattgactcccagctcggtcccttccttttagatatcatcgaccagcaatctcgtaatggttccttgctgatcaccagccagtaccccaaagaaaaatggtacgacctttttaccgatccgacgattgccgatgcggtgttggaccggatcgttcacaaggcgcatgtgattccgctcaagggtgaatcgatgcgcaaactcaaaagcagaaagcgctga

SEQ ID NO: 362440 - DNA, 1275 bp, Pseudomonas aeruginosa
atgacattggacttactctggcaagagttccgggaaaaagagcccgatggggtgtcttacgcacaattcacccggcattatcgggcctgggtgaaaacgcagaaaatcagcatgcggcaagtgcatgcaccaggcgacaagatgtttgtcgacttctgcgggcgcacgatgccgatcaccgatcctgatactggtgaagccaccgcctgccaagtgtttgttgccacgctaggctcttccggctatctgtttgcgatagctgtcgccagtcaaacgacacaagactggcttcgttgccacatcgaagcactggagtacttcgacggtgtgccgcgctttgtcgtaccagacaacctcaaggccgcggttctcaaaactacccgtaacagcctcgtcctcaacaaggcttattcagaactctccgagcactacgacttcaccatcattccctcccggccacgcaaaccaaaggacaagtcgatggccgaggtcggcgtgcaaattgtccaacgctttgtcttggcgcgattgcgtgatcggacgtttttctccctggacgaactcaatcagcagatcagctattggatggagcaactgaaccaacgggtaacgcgttcctatcccaagagtcggttggtgcgatttcaggaaacggactcacccgccttaaagccactcccggaaaggcaatacagctatagccaatggatatatcaggtgcgcattggtggtgattaccacgtggagtttcaggggcggtcctactcggtgccgtatcaccatgccaatcaactggtggatctgcgtgtgaatgccgattggctggaggtcaccttccagcgccgcgtgatcagcagtcatcgtatcgataccacaccaggggtcagcaccttgcgtgagcatttggcccccaaccaccatcaatttcaggactcccaaccgccagccttactggcatgggcggcggacattggccctgagacgcacttctatgtgcagcgtaatttggaagaccgccgggattttgcaacaggattgagggctgtgactgcacttaaacgagatgtgcgtaaagagcagataccccaccagcgcctggagtcagcctgcgcgtatgcaaactcacttggcattgtcagctccgaacggctgcgcgccattttgcgtaatggctcggaccttcgacgtccgccaataattacgacccccgccattgaacattcgaatatccggggagcgacctactacgcctcccaagaggagaagcctgtatga

SEQ ID NO: 362441 - DNA, 1038 bp, Pseudomonas aeruginosa
atgtctgattttaaaagaattaaggaaatctacataagtttcgcagagagtgtgcgcacctcattcgacgaaaataatttcgccgaaatcgaaacaattgacactctgcgagtgcgttattggtatgaagagttgaggatgcgcaccgggttggagacggcactcgacatggagtactactttgagaaggagtcgttcaaaaggaacgcgaagggagctgttgcctggtatcgaaacaaatggtcccgctatgtgaacgggcagcatgtacctaaaggcaaaacacttcgtcgagtcgaggcgcgagagcatggctctactcgagaactctacctcccactttgggaggtacttgatgtctcaaatacccgtgtgatgcaggacgacagctttctcaggcgtttagatcctgaaatccaagcagctatttgggtgcgatcatcgtcaggaatgctgacctactatggccgagcggacatcactcaagtcctactggaaaagttggagcgccgtgccagtctggatgcactcgcttgcttgacatggctgctacgcgaatcatccatgctgggggattcggaaaacgcgctgaaaatatctcgctcgctctacaatgtgttgttgatgctgagcattgaactgcatgcgcgcaaaaccggtttgccactgctgggtttgttcattcgcgacattctgccgcttgggcttgagccgcatctcaaaatgtggatggttgaaaacgactttatgcaggcatccgcccatctcaatctgctggtctataacacagagcacggttacaagcgctccctgagttggccgcagcgggtcaaggtcatgcaacgcttgctcaaaggtgatttcgggctggatgtgcagttcgctatggccccacaatttgacctgaatgatgaaacgaataccccagcggttgtcgtcaagaattactggcgtgcgacacggctacgcgagtggggctgggagcagattgcgaacggtcggtgtgaaaagtttccaccgagcgaactcatgctgtaa

SEQ ID NO: 362442 - DNA, 180 bp, Pseudomonas aeruginosa
atggaccccaaaaccaacgcaagcccgaatgtggaggccggcagcctgattcgggaatacctctctcccaatggcagcctggatcgattgcgcgaaacctgtgcagaagttcaggcctccggcggtaacaactatttaccgctgatctggaagcactttaaatcccatcgttcgctatga

SEQ ID NO: 362443 - DNA, 126 bp, Pseudomonas aeruginosa
atgatcgaggctcggctgttgatccaggacaatgcgaacttgcatagggagttgatcgacgagcatgcggccccgccgttcgcctcatatctctacgccgtcggtctgccaataaggcacctataa

SEQ ID NO: 362444 - DNA, 324 bp, Pseudomonas aeruginosa
atgagcaacgaatcgaagtccgcggcgaccgaagcagaaatactgccctgtacgcaccctttcctagatacgttggcagagctggccacctggtgcttcctcaccttcggtgttgtggcctgcctgctgttctggatgggcataattggctggagcccattggacgcaattacgccttcgggcgagagcttcatcagcccggaacaggcggccgctgccatggatcttgtacgccccttcatcggtgggctggcttggttattctgcggaggactgccggcgttcctggtggcgctcatccgaggaagagtaccccatcgctga

SEQ ID NO: 362445 - DNA, 480 bp, Pseudomonas aeruginosa
atgcctatcgaaccccgcacccttgccgccgtcttcacccaggtcgcccgctgccttgagggacacgatctggcactggagacgctggatgactacagggcagacgcggccgccggcttgctgaccgtggaccgtctgcgcggctttctacaggggctgagcgccgccggggcgcttccatacgaggactattgcgaagtcgacgcgatgcttgatgttggtccgcgcactgctcttctagccatgcacgtcgacttgatccggggtctcgacactgacctaggggtacggagggccgcaagctgtgcgatgggctaccttcaggcactcctcgacattcaaagcatcaactcggacagctacagggcgcaccgagaggaaatccagaagttggagcaggagcgacttgaggaacttacctcgttgcgcctactaacggcagcccatgttggggcatccacggcgaagaggagtcagtga

SEQ ID NO: 362446 - DNA, 216 bp, Pseudomonas aeruginosa
atgggcatcaacgaagaaattcaatcggtactcagcaaccctgaaaccagctattggctgaagaacagtttggcgaatgcgctccaacgcgattgcgtggatgcggccaatgatgcagagatgctcaacgatctgctgactcggaggtgcgatgaggccttgaatgcaggctcagcgttgctctgtgccgatcacggaaggcgcatccgttcgtga

SEQ ID NO: 362447 - DNA, 3219 bp, Pseudomonas aeruginosa
atggagttcactatctacacgacgggcagcgccgagttccttgagatcatgctcaatgcctgcgcaatgatcacaggaagcggtgatgcagaaggccttgcccgtattggggcgctattagggctctttctgttggcgttccaagccgttttcaataaccaggccattaccttcggaaaggcgggtcttatgctcgccctctacatgatgttctacggaccgacagccaccactgttatcgaggatacggtgtcttcgcaggtgcgggtggtggacaacgtgcctcttggcccagcctttgtcggctcagtcatctcaacggtggcctatggcatcacaagaaccgcggagcaggcattctctactccaagcatgaccgactacgggctgttctcaagcctgagcacattgtcgaaggtgcgcgatgcgcttcggaatccgatggctctggacggcttccaaaactaccgaaaagcggatgggtgggatctgcctcgaaccgtgaacgagtatctggccttctgctctctgaaccctgtggctttgagaacggacaagacgctgaccgagttgtaccgatcgcctggttgggcacaggtgatgtcaaatcagaacccatcaatgttcgtctacgtctatgacggtagtggtgccggcactttgaaaagttgtgcagaggcccggtcgttcctcaatgcccatctgcagaacgtctacacggatgtgctagaggacattctccagaaagggttcagcgaagaagttaagaccaatcgcatgaccagcggtgtccaggtgcaagctgctaccgaccaagctatccagagtctcgcactgagtagcaagtcggctcaggactacgttctgacgtcgctgatcgctccgatcttcaacagctcccgtgttgatgccttgaaccattggcatgagaaacgagccgctatggctcttcgcgaagcgctcaaccagcaagagattcaatgggcggggaagggagacagctttaaacactacatgaggccgatgattgccttcttcgagggcttgctctatgcgatgacgccgtttatggctttcgctttgctcctgggcgggcccgggctttcaatcctcgggaagtacctggtgctgccactggcggtcggtctttggatgccgctgttgagtatcgtgaatgcctttactctttggtacgcaggctctcagatcgacgcggtattcagcggatacgatcccacgggtcctggtttcgcaatgcttcagctcttggacattgacaaggcgatcggcaaggcgcttggcataggtggtctgctcgcagcatcggtgcccccattggcactattcatcgtttccggctctgccatggttgccaatagcgtcatgagccaaatgacggcgggcgacaaattcaagtccgaagacgttactcctcgatctcaggagagcgctcctgttctaagcaccaatgcttccttcacatccgatcaggtaagcaccggtgttgctaagacaggaactccgcagcttgcagaaaccatcagcagcgagcaggccgcgagtgcagtcgtacagagcgccaatatggcctcccaaacggcaacctcgcagtaccaggaaagcctcaaggcggccgggcaacaactcaactcgtctgccgctggaaggcaagcacttgcgcagataggggaaaacctttcggcaggttcggtcctcagttcgaatgcttcttacaacgaggcaaaagagtctctgcgcagcctcggcttctccgagtcgtcgctgaatcaggccacgtccaacgccgcaatgggcatttctacaccacttggcggcatgaagcgggcggacaacacctcggccgacaccatgactcaggaaagcagagccaaggcggagaaagcattggcgcaacttacgcagtctgtccaggcaaccgattcgagcacgttgaccttcgcgacgggcgatgccttctccagtagcgcgttggcacagcagagcgtatcgaacacagacgagatcgggaaaacccgttcgagtgcccttcaggcgcaacagacctatagccaggcatctgctcaacaagactcgatcaaggcaggtcaatcactcaaccttagagacgccggcgtcaaagcgctcacccgcggtctcggccgcaatgaaactgcgctggcgcttgagaaaatggcaggacaaacagagtcaggtaaagatctgtacaaacaagcctttggtagccaaagcatccaagacatgtcgaaagacactagcgagcgtcgagcgatggcagcgattcgcgctatcaaccaagatggacgccttggtgagctgttgatgagcccctacaaccccttcgacttcaacgtcaatcaaggtgatgccagcgcgaacgccagtctcaccggtgatgcggcgaaggctacgtccggcacagatgccattggcggcaggttcgatgcgaagtggaacgccaatgcgggtgcttacgcgagctcgaacgacatgaacgtcagtggttatcaggctacgaaggaggatggggctacggctattgatcagcgcaatgctgagaacctgaaacccgtgattgaggcaagcacggcgcattctggagccatcgataatcgttcatcccaagccgcctatgacaccttggcagagcgaggcgaagccgcaagacaaggctccaatctgggccaggtagtggccgaaggtgcaaactcggcgtttacaggattcgatacgattgctcgagcgttccgcagcagctcagataatgaaaagctcgacaactactatgatattggtatcagtcagggcctgaagccagaggaggcgcaatactttgctgccaaagcaactggtgagttcgggcagtcccaaggggatgcttatcgtgagctgaatagctactaccgcagccaaggaatccgggatgacaactacatcgccggggctattactgcgatcgatgatgctgccaaagcccctgaaagcggttcttatcccaccctgacggcgcttgccgactcaaggggtgccgtgcagtatcaggtgtatcagggtccgtcgaatgaggatgttcctcaaattccaacgcaggctccgaccccacagtcagccagaactgttccaccacctaccccatctccatcatcgggggagctcaccaaactaaaacctcagcgaccaacaggaattaatgctgactag

SEQ ID NO: 362448 - DNA, 501 bp, Pseudomonas aeruginosa
atgattaagaaaattatacttgtaagcgtgattgctgcattgactaccggctgcacaaatctcctcaacataggggcaagtgagtacgcatgtaaaggtatgccgaacggctctacttgcatgtcggccaaggatgtctattccgccaccgagggcgatgactacaaaaccaaactgaagcaagagcaagaaggtgcggaaggtagcaatgaaaaattatcgggaaccggcgatacgcgagtgctcatcgctgagggcgcggacaaccccccaatgccgatgagagcgagaaatcctcttccgattcgctcgcaggcaatagtcatgcgtatcgctgttgacccatgggaagacgagaaaggcgatctgtatgtgcctggcttcatttataccgaagtggaagcgcgtcgttgggagatcggcgcgcgaaccccacaggcaacaccaaccttgcgtccactcacaatcgctcagccgccgcaggttaatcctgcaaagtag

SEQ ID NO: 362449 - DNA, 336 bp, Pseudomonas aeruginosa
atgatccgcatcgatgccatctggctggccaccgagccgatggatatgcgcgccggcaccgagacggcattagcccgggtgattgcggtgttcggtgcggcgaagccgcactgcgcttatctgttcgccaatcgccgggctacccggatgaaagtgctggtgcacgatggcgtcggtgtctggcttgccgcgcggcgcctgaaccaaggcaagttccactggcccggcattcgccacggctgcgaggtcgaactcgacagcgaacaactccaggcgttggtgctgggcctgccgtggcagcgcgtcggctcaggcggcgtgatcagcatgctgtaa

SEQ ID NO: 362450 - DNA, 1035 bp, Pseudomonas aeruginosa
atgcccgcgatttcctctttcctctcgtggcccagggcctggtcttaccgctctcacatcatcccttggcagctccatgccccactcttcctggtcatgtttgctgttgtttcagtgctgaactcgattcccagtgacgggagctggcgtgatctgacgctgaatcaggtgctggaagatttcggagttttcatcttcttcatggcgttgtggtcaggaatctactgccatttccgcaggactgtcgatttgacttggcttctgatcattttcgtggttgcgatcggccaagaggagttcaacctttggaacaagctgtggcaacagctttgtcttctatttgggcatgagatttcttctagcgagcgccagcgcggagacgtgttcatgatggctctcgtgttcggctcattgctggtcaggtttgcattagggggattcaaatccttctttagaatccatatcacctttttcatctgcgttttcgtcactttccagggttggattcatttcatcttcccctactacatccagcaacacttgctgaacgaacggttgacataccagaaagaactcaccgctacctacgaaggccgtttccgctttcaatgcgatcacctccccatcacctgtttcgagtgggtgggagatgcagttccgatcacctcgatcgctaaacacgtttcgactgagtccatcacccaggtgctgcagtctgtgggcaatgcaacaacgagcctgacaggctggctcagtgtggttgaccgaggtgacgtagaggttttccgaggggttgatgccaaccagaaagtgctggtcacgctgtacaagaatcacgagctgtaccgcgttgtcgtcgacgacgaatacccgacagaggcccacaatgtgatcagctcagccttactctctttcgccacgccttttgcgctggtctggtttttcggcggactgtgggtggttttcatgcaccaggcccgggtgtaccggataaagtacggcaagcaattcagagcaatggagaatcaccagtga

SEQ ID NO: 362451 - DNA, 2208 bp, Pseudomonas aeruginosa
atgggcgctaaacccaaggctcaggtggtcgggtggcgctattacttcgacatccatttcgccctgggcaagaaggtcgatgaagtctgtgctatccgggcgagtggtaagactgcatggaaagggtcaatcaccagcaatggccaggtccgcatcaacgcgcctgagctgttcggcggtgacaagggcgaaggcgggctcgatgggacgctggatgtcctgttcggtgaagaggaccagggcgtcctgccgcgcctggcggcgatgctcggcggcctggtgccggcattccggggcgttaccacgtgcttctattccggcctggtgacttcggttaacccgtacccgaagaagtgggagattctgcgccgaggcgggaaccgcttgtgggacggcaacccctggtatcccgaaaagcagtttgtctggctagcggacggtcagatcaaagcgatgaacccggcgcatatcctctatctcgtctacaccggccgggacttccgggggctggcccgcacaagaatggacgaggcgagctggcgggctgctgccgacacgttgtatgccgaaggcttcgggctgtgctttgagtggacccggtccgacagcttcaagaacttctgcgagacggtgaaatcgcatatcggcgccgaggtttacccgaaccgacagaccggacaaatcagcatccgcctcctgcgggacgactacagcgttgcagacttgccgctgttcgacgaggacagcggcctcctggagatcacccaggagaagaccggctcgacctcgctcgcgccgagccagcttatcgtcaagtacatcgaccagaccgacggcgcgcagcgccaggtcatcgtcaacaacaacgcggtcgccgcttcgcaggggcggcggtcgtccgaggaagtcgagttcctgggcgtgccgactggcgagctggccgggcgagtcggggagcgggaaatgcgtctgaagacaaccggcctgaagcgctataaaggcgtattcgaccgccgcgcccgcagcctgaaccccggccaaccgttcctcatccgctcgacccgacgcggcatccctgaaaccgtcgtcagggtcggccggatcgaggacaacttcctcggcgacggcaagatcactctgaccgtcgtccaggaccagtttaatctgccggcgacaaccggcgtggcgccaccgccaccgggctggattccgcccgaccggacgcctcgggcgatcactgtgcgccgactgatcgaggcgccatatcgcgaactggccggcgtgatcgatccggcgaatctccagctcctggacgtgtccgcatcctacctcgctgcgctggccgaggcgccgacaagcttgtcgcagagctacaccctgaccgaccgcgtcggcagctctggcgcgttcgttgatcgaggaaccggggattggtgcccgaccggcctgctcgccgccgagctgccgctggcggccgggccgaacgtggtcacgctgaccaacgccagtcggctggaggacgtcactgtcggccaggccgctgtggttgacgacgagatagtccgggtcgatgccgtcaactatgccagtggcaccgtcaccctggcgcgcggctgcgccgataccgtgccggccaagcacttggccggggctcgggtctggttctacgacacgttcgaagcggtggacgagacggtatacagccagggcgtgacgctccaggcccggctgctgaccaacaccagcgagggccaactggccccggcgctggccgccaccgacagcctgacgctgaccgggcgccaaggtaagccgtacccgcccggccagttccgcatcaacggcagcgcgtacccaacgaaggtctacggggcgctgtcggtgagctgggcgaagcgcgaccggatcggccaggccgaccagttgatcgataccactgtcggcaacatcgggcccgaagatggggcgacggtgacgctccaggtctacagcggcacgacgctgaagcgcacctatgccggcctcacatccagtaactggtcctatccgctggccgaagacgtcgctgacggcccgctccaggacgtgcgcctagtcctgcgcagcgtccgcgacggaatccaatcctggcagcaacacgacatcaccatcgaacgacacggcctgggcttccgcttgggcgaagaccttggaggcgtttccgcatga

SEQ ID NO: 362452 - DNA, 240 bp, Pseudomonas aeruginosa
atggacccgatcacaatcaatctcgccatcctggcggcgtcgtacatcctatccagcgtcctggcgccgaaaccgcagaaacccaagccagcagcattcgatgccgctgacttcccgctatgcgaggaaggggaagatcaagcggtggtgttcggccagtgctggtcgaagtcgtggatggtgctgacggtagagcgccgccgcatgaaggccatcaaaaccaaggcgagcaagaaatga

SEQ ID NO: 362453 - DNA, 1704 bp, Pseudomonas aeruginosa
atggcgacgtttccagggttccaggtgccgaagcctgtggaggggatcgttgccggcatcacgccgaatatcgacgccctggagctgaaccaggacatcagccttgcagcggtcgcggcctcgacctgggccggcgcctatggggcgcatcagccggtagaggtgatccattcgacctaccaggctgtccaccaaagcgctctggaagagaactactacaaccgcctctggttgattccgaccgcaatggaactgggcaacgtcgtcagcacccagatacgaccggcatcagtctggaacgcttatttcagcccgcgcatgctgaccgctatcgaccgcgaagccgcagacggcattacgctgtccggccaggcttcgccgccgctgggttttgccgccctggaggaacgcacctggacggtcagcattggcaccgacggcccgcccgtagtcaatgcccggatcatctggaggctccagggcgagccggacctggccctggtcatcactggcaatcgcatcatcgcctggacgttcgcgccggactggggcgacagcatcgtcgaacgcctgagcgcatcgacaaatatcctgcaaagcgaatcggccgtgacccagcgccgagccatgcgcctggcgccgcgccgagagttcgaagcgaacatgtacgcggtggatcgcgagcggcagttgctggacatgacgctgttcggctggggtgcgcgcatttgggcgctgccgatctggcctgatatccagctgctccaccagccgctggcggccgggtcgctgagcattccgtgcgacacggccggcctcgacttccgcgacggcggtctggcgatgctgcgcggcgaggacgcttttacttacgaggtcgtcgaggtcaagacggtgaccgccagcggcctggacctggtgcggcccgtccaggccgcgtggggaactggctcgcgactgtacccagtgcgcaccgcgcagctgaccgaacagcccacgctgacccggctgaccgataccgcgcagtctgcgcgggtgtcgttccttgtgatggaacccagcagttggcccgaggtgatgccggcgacgatgtaccgggggcgtcctgtcctggaacagcgccccgacgaaagcgaagacctgacgtcgagctatcagcgcctgctgtccaccctggataacggcagcgccattccccgcgtgaccgacgtcgccggcatggcgctgcccgtcatcggtcatcgctggatcggcatgggccgagccgaacggtcggcgttccgcagcctggtctatgcgctacgcggtcagcagaagccgctgtgggtgccgacccacgccgacgacctgaccctggtcgccaccgtctcgcagctgtccaccgcgctggacgtgcgcaatatcggctatgcccgtttcgccaatggtcggccgggccgtcgcgatatccgcatcgagctgtacgacggcaccgtctatcaccgacgcatccttaccagcaccgagctggacgccgacaccgagcgcctggccatcgacgccgccctgggccggctggtcgagcctggcgacgtggcgcgcatttgtttcatggcgctctgtagcgccgcaagcgacgtggtcgagattgagcacgtcaccgacagcgagggcgtcgccactgccgccctgacgttcaagggggttcgtgacgatgagttttaa

SEQ ID NO: 362454 - DNA, 783 bp, Pseudomonas aeruginosa
gtgtctacgaaaccaggggcgattcacaccgctatagcccctcgtttgagtcgattgaagaatgaaatcgtgatccatttggaggtgggagtagaaaagaaaataaaggaaattcggatgctcgcgcgccctgaaattttcggaatgaatattccgaaacttcttgatgacgggcggttcatcctgcttcaatttcctggaatggaacatccagtgggaattaatatccacgagtttttgatgatgcactgcatcaacattggcgtagacacagaagttctctatgtgggctcaactgacgaccctgcccggcggccacttaaacgaaatcatcgtggctatagcgattcaatctatggagtcaataccaccgagaaagatgtgtttgtttactataatttattcaaggcaatttctatttctcagcgtagccctcacaaccttcaattcatgcttggcaattcaatgattgatgaggtgcaaaagaaagatgaagggatgctgcttgaacatggtctaatccattattttggagcaaagagccaggaaaaaagcaaagggctggagtatggcaggcttcggagtgggctaaggaaactaaagcaaaaatacaacatttcctcagtaaactatcacatagaagctgaaacttcgactgaatactggaatctgtactcaagagaagtttctcgttccggtcgccatgaattttcgttggtactgcaagagaatcgggtgttgatcggcaaggcaaagggtaccatgactgatccacttggttag

SEQ ID NO: 362455 - DNA, 906 bp, Pseudomonas aeruginosa
atggtcacggaacgtcaagtcgcaggggccggcatactgctcgtcctcatctatgctctacagttcctgacggctcgggccagcctccaggggcatataacaccggctggcctgacggtccttcgcttctacgcggccggagcccttttcctgccctacatctgcaaggcatcggctcgcgccgaggttgcccagctcggcctggccaagatcatcaccctttccgtccttgcaggcttcccctacctcatggtgatcaacacaggcatatccctgacctcggccgggtacgtggccaccgtgggtccggggtcaatcgtgctgttctcgttcctgctgcccttgttcctgctgaaggcgacgccggatcgggtgtcgatcattagcacctcgcttatcacgctcggcatccttctgttcatctacaacacgtttctggccaaaggcctgtcgccggtcggcacagcgctcttcgtactccagggcctgatgttctcgatgtatggcgtgctcatcaagcggtggcaagtcagcccggttctcggaaccgccgttgtttccctagtttcctgcctaccggcattcgccgcccatgcggtaacgccgaccggattcgctcaatccacgatggcggaaatcctcttccaggccttcacgcaaggcatcctcgccggcgcggccgcgatattcctttacacctacatcgtgcagaagtccggcccacaacgagcgtccctggtcatgccgagcgtgcccatcatcacgaccgtggccggttgtcttctgctcaacgaaccactgagtgcagttcaggtcgtcggcctgatctcgatggccctgggcatggcaatgcctgggttggcggctcttcgccgtaagcatccaaccgcagttacctctacctag

SEQ ID NO: 362456 - DNA, 792 bp, Pseudomonas aeruginosa
atggacattcaggtacagcagcgcatctattggagcgatctggcagaaagtaaactcacccgtcactctctcgatcaccttcttgacgggcagattccctatattcggatcgcgaactttgcatcccgcgaagaatgcgaagccctggtcacaagcgcggtgaacgaaggtttcggcccgtatcgcggcgtcgaaccggtgatcaatcggatcggcaacaccgtgttcgaatacaacagcatttcgaagcacgaatatttcgagaagaacatcgacctgaaccgcgttcagcagcggatattcgacagctcgttcaaccccctggaacggatcattgggctgctggagcagcaggcacagcgccgcgccggggtggccaggaacgtcgaggggcagccgtactatgccggcctggtccggcgtatagaaaacggcacgctgctacacgtcgattttgccccaggcgaacaacccggctgggaagttgcggtggtggaggaacaactggcctggaatctctatctgcgggtttccgacccgtacagcggccgcacccatatcttcgaccgccaatggcagcctgcggacaatgcactgaaggagggcatctacggctacaacgcccgcgtcgtcgccggcatcgaagacgcaagtttcgctccggcggttggcgaggtggtcatcttcaacacccgcaatttccactacgtggagccgactgcgggcgagcgcgtgtcgttcacgtccgccataggccggcttccttcgggcgacctggtgctctggtcatga

SEQ ID NO: 362457 - DNA, 624 bp, Pseudomonas aeruginosa
atgcctaccgcgatccacgccgtcgagcgtggcggggtagccctgggcgatctcgttgtggtccagggcgccggtccggtcggtatctgcgctgctatcgcggctcgccagtccggcgccgaggtcttcgtctgcgatatggcgccgttgagattggaagctgcccgccgcatgggcttcaacgtcctcgacctggccggggatgctgaccgcccctccgcgcttctgaccgaactcgccggcggacggcttgcggatgtggtcatcgaggccacgggagtatcgtcggccattccagcgggggtggcgatgacacgggacggcgggcggtatgtcgtcgtcggccactacgccgattccggcgaaacgcggctcaatccgcacctcgacatcaaccgaaagcatctggatatccggggcacctggggaatcgagtacagccattttcacaaggccatcggccttctcgactcgctcacctcagtcggcggtgacgtgctgttcgaggacgttatggcttccacctacagcctggacgaagttcagcaagctctggacgctgtgcgggatcgacgtgtggtgaaagccgttatttcactccagtcgaaaggaaaagcagtatga

SEQ ID NO: 362458 - DNA, 825 bp, Pseudomonas aeruginosa
atgacggccaatcaccggatcggcttcattggcgcaggctcgatgagccaggcgattctggcaggcctcgttcgcagcgggaatttttcgccggcaacgatcggcgtcgtggggaagaccggcgctcgcgccgctcagctcagcgagcgcttcaacatcgagcacgatgcgagcatcgaggccctggccacgaatagcgatgtgctgtgcctgtgcgtgaagcccaaggatttgcaaagcgtctcccggaggctggagggcgttgccctggaggggaaactggtcgtctctaccctcgccggagtcagcttggaaactctgcggaagcactttcctcgtgcctatctggtccgctcaatccccaacatcgcctcagcagtcggtgaaggcgtgacgctgtggtctgccgaagagttgccgaccgagctgcacgaactggtgcgtctgatctggcagtcggtgggcgcctctctggaagtggcgcatgaagaccatattgagctgggctcaccgatcagtggcgcagcgccggccttccttggcattttcgcggaagcactggttgacgctgcggtctacctcggtctgccgagggacatggccagccagctcgtcatgcaatctctgaaaggaagctgtgagctgatccagcaggagaattgcgatgcccatctcgttcggcagcgagtgaccagcccgggagggctcaccgccgcctgtattgcaacgctggaagccaaaggcttccgctcggccctgctggatgcggtcgtggcaggacacgttaagacgacagaactcgggcagcggtcgagtaccgcttga

SEQ ID NO: 362459 - DNA, 612 bp, Pseudomonas aeruginosa
atggatcaggacctgtattgccgtgggaaaaaactcgatgccgatcccgcgcgcctcgggacgctgcgcgactcgtccgatatcgttgacgacgaggcgctgttgcggcaacggatggctgaagatggctatctgctgttccgaggcctggtggagcgcgagaaggttctacgcgcccgcctcgagatcctgctgaagtacgcgatcatcggtgagattgacgccgtgaaccacgatgtgatggacgcgatcttgcaggagcagagcttcatcgcccaagtaaatctgatcgccttcaccgaaagcatccgtcgaggtgtcgcctacgaagagctgacgcaagatgcgcggatcatgggcatctacgaaaagctcctgggcggaaatgtcaggacgttcgatttcaaatggcctcgcttcgttcgccccggcgagggaacaggcatccactcggacaacatctacgtgtcgggcggggcaaagaatgtctggacgacatggattcccattggggacgtggcgctcgaggaggggccgattgtgctgctggaaaagagccatctgtcgcccaagctgaccacgttgtgggatgaaaataaagtttcatcctaa

SEQ ID NO: 362460 - DNA, 222 bp, Pseudomonas aeruginosa
atggatggtccggtggccaaagttaagtggctggcggacatgctggattgggcgccccccgtacagatgcttagcttggcccaatgtttggccgccagctgcaggtaccgcttcgccaatgaagtgctggcgaaggtaccgtatgagagactcttccccgatcaacggttgacctaccatctcacccggtttgccattcagaatcgcctagggaaactctga

SEQ ID NO: 362461 - DNA, 954 bp, Pseudomonas aeruginosa; identical to SEQ ID NO: 325134

SEQ ID NO: 362462 - DNA, 219 bp, Pseudomonas aeruginosa
atgatcgtcttcgaggtcgggcgcacgcagcacccgaaccacgccggcatctacctcggtaccgacgcggctctgcccggggaggacagcaaggtcttcggcgccgggccattcctgctgcaccacctctacggcaagccaagcgagatcatcgtctacggcgggaactgggctgagcgggcgcggctggtgctgcggcaccgtcaagccagggcatag

SEQ ID NO: 362463 - DNA, 273 bp, Pseudomonas aeruginosa
atggctaagccgtatcctatcgtcccgctgtcctggttggacggtttcaacgatctcaataaccaattggtcgcctacgagatggccgtccaggcgctgtttcggcagttcgatgcgcacggatcgccctacgagctggagacggtgctgtccggtctgcatgacctggtgcagccggtgatcgagggttaccaggcgattgctgaacagtgccgcaccgctgaatcgatgggcatggttggagtggcccagctggccgacgacaaggaataa

SEQ ID NO: 362464 - DNA, 831 bp, Pseudomonas aeruginosa
ttgctgcgggccgttaccggcctgggccatgctgccgcagggatcatccccgaaaccatggccatcgacttccagcaggccgcgcagggtagcagcgagccgttcctggcgatgatgcggcaaagcgaagacgccatatccaaggcggtcctgggcggcaccctgaccagcaccaccagccagtcaggcggcggcgcttttgccctgggccaggtgcataacgaggttcggcacgacatactggcatccgatgcccgccaactggcggccacgttgtcccgcgatctgctctggccgctcctggtactgaaccgtcctggcagtcccgacgtgcgccgggcgccgcgcctagtcttcgacctgcgcgagcaagccgacatcaccagcatggcccagtcgattccggcactggtcaacgtggggctggagattcccagcgcctgggtctatgacaagctcggcatcccgcagcctgccaagaatgagccagttctgcgtccggctgcgcagcctgcaatcctgagccgccagcatggacaacgggtggcggccttggccaccatcgttggcccgcgctatggcgatcagcaggccctggacaaggcgctggccgacctgccggccaaggacatgcaaaaccaggccaacgacctgctcgccccgctcctggacgcggtcaaccgcggagacagcgaaaccgaactactcggcgccctcgccgaagcgttcccggacatggatgacagcgccctaacggacgcgctccaccggctgctgttcgccgccgatacctggggccgtctccacggcaacctggaccggatcgactga

SEQ ID NO: 362465 - DNA, 147 bp, Pseudomonas aeruginosa; identical to SEQ ID NO: 337198

SEQ ID NO: 362466 - DNA, 288 bp, Pseudomonas aeruginosa
gtggcagctttggccaccatcgttggcccgcgctatggcgatcagcaggcgctggacaaggcgctggctagtctgccggccaaggacatgcaagaccaggtcaacgacctgctcgccccgctcctggaagcggtcaaccgcggtgacagcgaaaccgaactactcggcgcccttgccgaagcgttcccggacatggatgacagcgccctgacggacgcgctccaccggctgctgttcgctgctgatacttggggccgcctccacggcaacctggaccggatcgactga

SEQ ID NO: 362467 - DNA, 417 bp, Pseudomonas aeruginosa
atggcccttcaacctcgcggcatccgcaacaacaaccccggcaacatcgtctggtcggcacgcaacaactggcagggccagctcccgcacaacccgaaggtcgagccgcgtttcgcccgtttcgataccgcacataacggaatccgcgccttggcaaagctgctgctgaactatcgcaaggtccacggcctgcgcaccgtcgaatcgttgatcgcacgctgggcgccgtccaacgagaacgacacccgcgcatatgctacggccgtggcccgagccatgggggttccaccgcaggccggcctgcacatggaccaggacaccctggccgccctggtgaccgcgatcattcggcacgaaaacgggcagcagccctacagcgccgagcagatcgcccaggccgtgcgggaggtgctgtga

SEQ ID NO: 362468 - DNA, 603 bp, Pseudomonas aeruginosa
gtggccctgttcgttgatgaagcccatgacctcaatggccataccctgaccggtctgaagcgactgctcgaactggtcgaagacgacagtggccggcgacgtttgtccattgttctggccggccatcccaagctgcgtaacgatctacgtcgtcccacgatggaagagattggctaccgcaccgacattttctcgctcgacggcattgccgggagtcagcgtgagtatcttcattggttgttggacacctgcacagaaggacgtgccagggctgaagaaatcgtaaccgaagaagccctcgacctactggccagccggttgcgcacgcccctgcagatccagttacatcttggactggctctggaggccggttaccagaccggcgaaaagcctatttcggcagagctcgtccagtccgtactctctcggcaactggatgacttggaacccacactcacacgccacggctacaacgcgaaaagcctggcagagcagttcgatgccaaacctgccgaggttcgtgcgttgttcagcaatacgttagatccggcacgagcggctgagcttcgggagaagatgcaatcggccgggcttcccgtgtga

SEQ ID NO: 362469 - DNA, 141 bp, Pseudomonas aeruginosa; identical to SEQ ID NO: 361452

SEQ ID NO: 362470 - DNA, 168 bp, Pseudomonas aeruginosa; identical to SEQ ID NO: 350166

SEQ ID NO: 362471 - DNA, 384 bp, Pseudomonas aeruginosa
atgagcgcccgcgacctggcgcgcgtcggcctgctgatgcagcgccacgggcgctggcgcgagcggcaactgctgccgctggcatgggtcgagttcaacctgacgcccttcgcccgctaccggccgagcgcggaagaggagggcgaggcggtgccgggcggccagtggtggttgaaccgtgcggtgaaaggcgcgccggcgccctggccggacgtcgccgagaccgccttcgccgcgctcggccactggggccaggcgctctacgtgctgcccgaggagaagctggtgatcgtgcgctacgccgacgaccgcgacgggcgtttccgtcacaacgaattcctgcgcctggcacaggcggcgttcgccggggaggcgcggccatga

SEQ ID NO: 362472 - DNA, 360 bp, Pseudomonas aeruginosa; identical to SEQ ID NO: 352176

SEQ ID NO: 362473 - DNA, 807 bp, Pseudomonas aeruginosa
gtggtcccccacgacaaggacaaagacaatcccagcgaactgatccgcggcaaggacgtggcggccttcggcctctggtcgttgccgagcttcgacgagccgcgcgacgagccggccgttgccgcgccgcaggtgcccgcggtcgccgaacccgcgccggcgccgccggcggtggaagaggtcgagctggagaccgtcaagccgccgacgctggaggaaatcgaggcgatccgccaggacgcctacaacgaaggcttcgccaccggcgagcgcgacggtttccacgccggccagttgaaggcgcggcaggaagccgaggaggcgctgaaggagcgcctgcaaagtctcgagcgcctgatgacgcagctcctggaacccatcgccgagcaggacgccctgatcgagcagggcatggtcaacctggtcaaccacgttgcccgccaggtgatccagcgcgaactgcacatggactccagccatgtccgccaggtcctgcgcgaggctctgaagctgctgccgatgggcgcggcgaacatccgtatccatgtcaacccgcaggacttcgagcgggtcaaggcgctgcgcgagcgccacgaagagagctggcggattctcgaggacgattcgttgctgcccggcggctgccgcatcgagaccgagcacagtcgcatcgacgcgaccatcgagacgcgcctggcgcaggcagtgaagcaactgttcgagcaacagcgcgaacaggcgacccatccgctggccagcgacatccggatcgacctcgacgcccccggagacgtcgatgcgccttga

SEQ ID NO: 362474 - DNA, 1017 bp, Pseudomonas aeruginosa
atgagtgagaatcgtctcgccgccaaactgaccaaggtcgacaaggccgccatcctgctcctgtcgctcggcgagaccgacgcggcgcaggtgctgcggcacatggggccgaaagaggtgcagcgggtcggcgtggccatggcgtcgatgcgcaacgtgcaccgcgaacaggtcgagcaggtgatgggcgagttcgtcgaagtggtcggcgaccagaccagcctcggcgtcggtgccgacggctacatccgcaagatgctcacccaggccctcggcgaggacaaggccaacaacctgatcgaccgcatcctcctcggcggcagcaccagcggcctggacagcctgaagtggatggagccgcgtgccgtggccgacgtgatccgttacgaacacccgcagatccaggccatcgtggtcgcctacctcgatcccgaccaggccgccgaggtgctcagccatttcgaccacaaggtgcgcctggatatcgtcctgcgcgtctcctcgctgaacaccgtgcagccctcggcgctgaaggaactcaacctgatcctggagaagcagttcgccggcaattccaacgccacccgcactaccatgggcggggtcaagcgcgcggcggacatcatgaactacctcgacagctccatcgaaggccaactgatggattcgatccgcgaggtcgacgaagacctgtccggacagatcgaggacctgatgttcgtcttcgacaacctcgccgacgtcgacgaccgcggcatccaggcgctgctccgggaagtctcctcggacgtactggtgctggcgctcaaaggctccgacgaggcgatccgcgagaaggtcttcaagaacatgtccaagcgtgccgccgagctgctgcgcgacgacctggaggccaaggggccggtacgggtcagcgaagtggaaggtgcgcagaaggaaatcctcaccattgcccggcgcatggccgagtccggcgatatcgtgctgggcggcaagggtggcgaggagatgatctga

SEQ ID NO: 362475 - DNA, 1797 bp, Pseudomonas aeruginosa
atggccgatgcactgatcgacagccaggttcccgccaagagcggcggtgccgggatgctgaagaaatccttcccgggactgtcgttcctcgacaacctttccgagatgaccatgctgcgccagatcggcctgctggtcggtctcgccgccagcgtggcgatcggcttcgccgtcgtgctctggtcccagcagccggactacaagccgctctatggcagcctcaacggggtcgacgcgaaccgtgtggtggaagcgctgaccgcggcggacattccctacaaggtcgaacccaactccggcgcgctgctggtcaaggccgacgacctcggccgggcacgcatgaaggtggcctccgccggcgtggcgccgaccgacaacaacgtcggtttcgagatcctcgacaaggaacaggcgctgggcaccagccagttcatggaagccaccaactaccgccgcggcctggaaggcgagctggcgcgcaccgtgtcgagcctgaacaacgtcaaggccgcccgcgtgcacctggcgatcccgaagagttcggtgttcgtccgcgacgaccgcaagcccagcgcctcggtgctggtcgagttgtatccgggtcgcagcctggagccgagccaggtgatggcgatcgtcaacctggtcgccaccagtgtgccggagctggacaagtcgcaggtcaccgtggtcgaccagaagggcaacctgctctccgaccagcaggaactctccgagctgaccatggccggcaagcagttcgacttcacccggcgcatggaaggcctgctcacccagcgcgtgcacaatatcctgcaaccggtgctgggcaacggtcgctacaaggccgaggtgtccgccgacgtcgacttcagcgcggtcgagtcgacctcggagatgtacaacccggaccagccggccctgcgcagcgagcaacgcaacaacgaggaacggcagaattcgtccggcccgcagggcgtgccgggggcgctgtcgaaccagccgccgggcccggccagcgcgccgcagcaggccaccgccagcgcgccggccgactacgtcgcgccgggccagccgctgaaggacgccaacggccagaccatcatcgatccgaagaccggcaagccggagctggcgccgtacccgaccgacaagcgcgaccagaccacccgcaactatgaactggaccgctcgatcagctacaccaagcagcagcaggggcgcttgcgccgactgtcggtggcggtggtgctggacgaccagatgaaggtcgacgcgaagaccggcgaggtcagccaccagccctggagcgccgacgaactggcgcgcttcacccgcctggtacaggattcggtgggctacgacgccagccgcggcgacagcgtcagcgtgatcaacgcgccgttcgccccggcccaggccgaagagatcgacagcattccgttctactcgcagccgtggttctgggacatcgtcaagcaggtgctcggcgtgctgttcatcctggtcctggtgttcggcgtgctgcgtccggtgctgagcaacatcaccggcggcggcaagggcaagtcgctggccggcggcggcggtcgcgacggcgacctggcgctgggcgagagtggcctggaaggctcgctggccgacgaccgggtgagcatcggcgggccgtcgagcatcctcctgccgagccccacggaggggtatgatgcgcaattgaacgcgatcaagaacctggtcgcacaggacccgggccgcgtcgcccaggtcgtgaaagagtggatcaacgccgatgagtaa

SEQ ID NO: 362476 - DNA, 330 bp, Pseudomonas aeruginosa
atgagtcagggtgtcgagttcaatcgtctgatgctggaaatgcgttccatgcaaatggaagccatggccaaggccaaaccggttcaggcgccggccgaagtgggggcgccgagcttttcggaaatgctctcccaggccgtggacaaggtgaacgagacccagcaggcctccaccgcgatggccaacgccttcgaggtcggccagagcggcgtcgacctgaccgacgtgatgatcgccagccagaaggccagcgtgtcgttccaggccatgacccaggtgcgcaacaaactggtccaggcctaccaagacatcatgcagatgccggtctga

SEQ ID NO: 362477 - DNA, 1416 bp, Pseudomonas aeruginosa
atggcagccaaagtcctgctggtcgaagacgaccgcgcactacgcgaagccctcagcgacaccctgctgctgggcggtcacgagttcgtcgccgtggactcggcggaggcggcgctgccggtcctggcccgcgaagccttcagcctggtgatcagcgacgtgaacatgccgggcatggacggacaccagttgctcggcctgatccgtacgcgctacccgcacctgccggtgttgctgatgaccgcctacggcgcggtcgatcgcgccgtcgaggcgatgcgccagggcgccgccgactacctggtcaagccgttcgaggcgcgggcgctgctcgacctggtggcacgccatgcgctgggccagttgccgggcagcgaggaggatggtccggtggccctggagccggccagccggcagttactggaactggccgcgcgggtcgcgcgcagcgattccaccgtgctgatctccggcgagtccgggaccggcaaggaagtcctggccaactatatccaccagcaatcgccgcgtgccggcaagccgttcatcgcgatcaactgtgcggcgatcccggacaacatgctcgaggccaccctgttcggccacgagaaaggttccttcaccggcgccattgccgcccagcccggcaagttcgagctggccgacggcggcaccattcttctcgacgagatatcggaaatgcccctcggcctgcaggccaagctgctgcgcgtattgcaggagcgcgaggtggagcgggtcggtgcgcgcaagccgatcaacctggatatccgcgtgcttgccacgaccaaccgcgatctcgcggcggaagtcgcggcggggcgtttccgcgaggacctctactatcgcctgtcggtcttcccgctggcctggcggccgctgcgcgaacgccctgcggacatcctgccgctggccgagcgtctgctgcgcaagcacagccgcaagatgaacctcggcgcggtggcgctcggccccgaggccgcccagtgcctggtccggcatgcctggccgggcaacgtacgggaactcgacaacgccatccagcgtgcgttgatcctgcaacagggcggcctgatccagcccgccgacctgtgcctcaccgcgccgatcggcatgccgctcgaggccccggtgcccatgccggcaatgccaccggccaccccgccgagcgtcgagattccgtcgccggccgcaggccaggacgctagcggcgcgctgggcgacgacctgcgccgccgcgaattccaggtgatcatcgataccctgcgcaccgagcgcggccgccgcaaggaggctgccgagcgccttggcatcagcccacggaccctgcgctacaagctcgcccagatgcgcgacgcggggatggacgtggaggcctatctctacgccatctga

SEQ ID NO: 362478 - DNA, 1209 bp, Pseudomonas aeruginosa
atgcaaccagccctcaacgccttcaccgagcagccagccgatacggccgaggccaccagccgcgccggcctcgagcaggccttcgcgctgttcaaccagatgtccagccagctcagcgagtcctacagcctgctggaggagcgcgttaccgagctgaaagggcaactggccctggtcagcgcgcagcgcatggaggagctggcggaaaaggagcgcctggccaaccgcttgcagagcctgctcgacctgcttcccggcggcgtcatcgtcatcgatgcccatggtgtggtccgcgaggccaacccggcggccctgggcctgcttggcgaaccgttggtgggcatgctctggcgcgaggtgatcgcccgctgcttcgctccgcgcgaggatgacggccacgagatttccctgcgcgacggacgtcgcctgtccatcgccacccgctcgctgaacggcgaaccgggtcaactgatcctgctcaacgacctcaccgatacccgccgtctccaggagcaactggcgcgccacgagcgcctgtcggcgctggggcggatggtcgcctcgctggcccaccagatccgcacgccgttgtcggcggcgttgctctatgccgggcacctcagcgagcaggcgctgccgaccgaccagcagcaacgcttcgccgggcgcctgaaggagcgcctgcacgaactggagcatcaggtacgcgacatgctggtgttcgcccgcggcgagctgccgctgaccgaccgggtggcgccgaaggcgctgttcgacagcctgcgcgcggcggccgaagtccatgtccaggggctccaggtgcgttggcagtgcgaggcgcgcggcggcgagctgctgtgcaatcgcgacaccctggtgggcaccgtgctcaacctggtggagaacgcgatccaggcctgcgggcccgaactgcgcctgaaggtgcatctctatgcccgcgccgacagcctgcgcctcagcgtcagcgacaacggaccgggcatggatccggcgaccctggcgcgcctgggcgaacccttcttcaccaccaagaccaccggtaccgggctcggcctggcggtggtcaaggccgtggcgcgcgcccaccaggggcaattgcagttgcgctctcggccggggcgcggcacctgcgccaccttgatcctgccgctgattccggcggcgcctctttctgcgattcaggagtaa

SEQ ID NO: 362479 - DNA, 1473 bp, Pseudomonas aeruginosa
atgtggcgcgaaaccaaactcttgctgattgacgacaatctcgatcgcagtcgcgacctggcagtcattctcaacttcctcggcgaagatcagctgacctgcaacagcgaggattggcgagaggtagcggcgggcctgagcaacagtcgcgaagccctgtgcgtgctgctcggcagcgtcgagtcgaagggcggggcggtagagctgctgaagcaactggccagttgggacgagtacctgccgatcctgctgatcggcgagccggccccggccgactggccggaggagctgcgccgccgggtgctcgccagcctggagatgccgcccagctacaacaagctgctcgactccctgcatcgcgcccaggtctaccgcgagatgtacgaccaggcccgcgagcgcggccgctcccgcgagccgaacctgttccgcagcctggtcggcaccagccgggcgatccagcaggtgcggcagatgatgcagcaggtcgccgataccgatgccagcgtgctgatcctcggcgagtccggcaccggcaaggaagtggtggcgcgcaacctgcattaccattccaagcgccgcgaggggcccttcgtcccggtgaactgcggggcgatcccggcggaactgctggaaagcgaactgttcggccacgagaagggcgccttcaccggtgccatcaccagtcgtgccggacgtttcgagctggccaacggcggcaccctgttcctcgacgagatcggcgatatgccgctgccgatgcaggtcaagctgctgcgcgtgctgcaggagcgcaccttcgaaagggtcggcagcaacaagacgcagaacgtcgacgtgcggatcatcgccgcgacccacaagaacctcgagaagatgatcgaggacggcactttccgcgaagacctctactaccgcctcaacgtattccccatcgagatggcgccgctgcgcgagcgggtggaagacatcgccctgctgctcaacgaactgatctcgcggatggagcacgagaagcgcgggtcgatccgcttcaactcggcggccatcatgtcgctctgccgccacgactggccgggcaacgtccgcgaactggcgaacctggtggagcgcctggcgatcatgcatccctacggggtgatcggggtcggcgaactgccgaagaaattccgccatgtcgacgacgaggacgagcaactcgccagcagcctgcgcgaagagctggaagagcgcgcggcgatcaacgccgggctgccgggaatggacgcgccggcgatgctgccggccgaaggcctggacctcaaggactacctggccaacctcgagcagggcctgatccagcaggccctcgacgatgccggcggagtggtcgcgcgggccgccgaacgcctgcgcatccgccgcaccacgctggtggagaagatgcgcaagtacggcatgagccggcgcgacgacgacctgtcggatgattga

SEQ ID NO: 362480 - DNA, 294 bp, Pseudomonas aeruginosa
atgagtgcagctgtacagatccttgaagaaaccggtagcgccctgcgcgttgccctggccagccagaactgggaggccatcggtgaactcgaccagcgttgccgccaggccgtcgacgaggcgatgctcgatgtacaggacgaagccaccttgcgggcgcggatggaagagctgctggcgctgtatcgcgagctgatcgatgtctgccagggcgagcagcgcaagctggccaccgatctgatccagctgaaccagtcgaagcaaggcgccaaggtctaccagatgttcggataa

SEQ ID NO: 362481 - DNA, 381 bp, Pseudomonas aeruginosa
atgaacgcaatggcagccatgcggcaataccagaatgtcagtacccaggctcaggctatcgatgccagcccgcatcgcctgatccagatgctgatggaaggcggcctgacccggatggcgcaggcccgcggagccctggagcgcggcgaagtggcgctgaagggcgagctgatcggcaaggccatcgccatcgtcggtggcctgcgcgaagggctcgacttcgaggcgggcggcgagctggcagccaacctcgaccgcctttacgcctacatgtcgatgcgcctgacggaagccaacttgaagaacgacgcgggcaagctcgaggaagtttccgagctgttgcgcaacatcaaatccggttgggatgcgattgccccctga

SEQ ID NO: 362482 - DNA, 399 bp, Pseudomonas aeruginosa; identical to SEQ ID NO: 318359

SEQ ID NO: 362483 - DNA, 1437 bp, Pseudomonas aeruginosa
atggcgaacagtacgacgatcaacggctacaactcgggccttgatatcaagaacatcgtttccaccctggtggcggccgagaaggcgccgaaggaggcgcagctcaagcgcctggaaagcgacaccaccgccaagttcaccggcatcggccagctcaagagcgcgatctccgacctgcagaccatcctcaaggagctgaacaagcccgagctgttccagaagcgctcggcgagcaccagcgacgagaagttcgccaccgccaccgccaccaaggacgccctgccgggtatctacaagctcgaagtgacccagctggccagcgtcagcaaggtggccaccgcgtcgtttgccgatggctacaagaccacttccggtggcaccctgaccatcaagcagggcgccgacgatgccggcgtcacggtaaacgtcgcggcgggcgcgaccctcgccgaagtgcgcgactcgctcaacgcgcagctgaaggacaagggcatcagcgccaacatcgtcaacaaccctggagacggaacctcgcgactggtcttcaccggcaaggattccggcgccggcaaggacgtgttcgtccagggcagttccggcctggagaacttcaacatcggcagcgtcggcgccgatggcaagctgaccctgtcccagttggacggtacgtcctccagcagcagcggctatatcacccaggcgaagaatgccaagttcagcatcgacggcctgaccctggaaagtccgaccaatacggtcgacaaggtcatcaacggcgtcaccttcgagctgaagacggtcaccgacactaacaagccgatcaccatctcggtcgagcaggaccgtggcggcgtcaaggacaacatcaagaagttcgtcgaggcctacaacaagctggtcggcgtgacttcggaactgaccggcgtgaccaaggtgggcgacgacaaggctcccgtggtcggtgccttggtcggtgacagcagcgtgcgcaacctgctcaccaccatgcgcaacgagatggtccagccggggcaaggtaccgatgttcgcatgctcgccgacatgggtatcaccaccaagaaagacggcaccctggagatcgacgacaagaaactcgacaaggttctgaaggacaagttcgagtcggtttccgctctgttcaccggcgataccggcctgatgaagcgtctcgacgacaagctcacgccttacacccagaccggcggtgtgctccagcagcgcctggatggattgcaggacaccatcaagtcggtggatacccagcgccaagcgctcgatcgccgggtcgagcagttgcaggatcgtttgctcaagcagttcaccgccatggaccagttgatcggccagctcaaccagaccagcggacgcatggcccaggctcttagcagcctgcctggccttgtgaagaaaagctga

SEQ ID NO: 362484 - DNA, 387 bp, Pseudomonas aeruginosa
atggacgtcagcaatgtcaacaattcgacggctgctccggtaatccggctgttcggctcggcgtcttcttccgatggcgcacgcccggccggccaggccggcgaggcggccgccagcgcaagcgcgcaacggacgggcgacgtcaggatgggcgacaaggagcaacgcgctgcggtcgaggaggcggtttcctccatcgagaagttcacccagagcatccgccgtgatctgagtttcagcctggacgactccacggggcgggtagtggtcaaggtgaccgattcgacttccggagaagtcatccggcaaatcccttccgaagaggccctgcgcctggcagagcgactggacgaagcgcgcagcctgctgttcaaggcggaagcctga

SEQ ID NO: 362485 - DNA, 1164 bp, Pseudomonas aeruginosa
atggccttgaccgtcaacaccaacatcgcttcgctgaacactcagcggaacctgaacaactcttccgcgtcgctgaacacttcgctgcagcgtctgtccaccggttcgcgcatcaacagcgccaaggacgacgccgccggcctgcagatcgccaaccgtctgaccagccaggtcaacggcctgaacgtggctaccaagaacgccaacgatggtatctccctggcgcagaccgctgaaggcgccctgcagcagtcgaccaacatcctgcagcgtatgcgtgacctgtccctgcagtcggccaacggctccaacagcgactccgagcgtaccgctctgaatggcgaagtgaagcaactgcagaaagaactggatcgtatcagcaacaccaccaccttcggtggccgcaagctgctcgacggttccttcggcgtcgccagcttccaggtgggttcggccgccaacgaaatcatcagcgtcggcatcgacgagatgagcgcagagtcgctgaacggcacctacttcacggctactggcggcggtgcggtcactgctgcaaccgcttcgggcaccgtcgacatcgcgatcggcatcactggcggcagcgccgtgaacgtcaaggtcgacatgaagggcaacgaaaccgccgagcaggcggctgccaagatcgccgctgcggtcaacgacgccaacgtcggcatcggtgccttcaccgacggcgcgcagatcagctacgtgtccaaggctagtgcggatggtactaccagtgcggtttccggcgtagccatcaccgacaccggcagcaccggcgcaggcaccgcggcaggcaccacgacgttcaccgaggctaacgacaccgtcgccaagatcgacatctccaccgcgaagggcgctcagtccgccgtgctggtgatcgacgaggcgatcaagcagatcgacgcccagcgtgccgacctcggtgcggtgcagaaccgcttcgacaacaccatcaacaacctgaagaacatcggtgagaacgtatcggctgctcgcggccggatcgaagacaccgacttcgcagccgaaaccgccaacctgaccaagaaccaagtgctgcaacaagccggcaccgcgatcctggcccaggccaaccagctgccgcagtcggttctgagcctgctgcgctaa

SEQ ID NO: 362486 - DNA, 3507 bp, Pseudomonas aeruginosa
atgagcgcgaacgttcgtgtcagcatcgtcatgccgacctacaagctggagtacttcgaggacgccctcgacagcgtgctcgggcagacctatccggccctggagctgatcatctgcgacgacagcagcgacgagcggatcgccacgctggtcgagcagaagctcgcctccgcggcgttcccgatccgctacttccgtaacgagacgcgcctcggcgagctgggtagcacggcgaaaggcatccgcctggcggagggcgagtacgtcaagtttctccacgacgacgacgtgttgcttcccgagtgcgtcgaggcgttggtgggagcgatggagcgcgagccgaacgtggtcctggcctcgtcgcggcggttgcgtatcgacgaggaagggcagccgctgccggacatcctggcgacctgcttcccgttcgccggcgacgtcctgatcgacggtcgcgagctggtctcgttcctcgccgaccacaccatcaacttcatcggcgaacccagttgcctgatggcccggcgcgatgcgctgctgcagatctgcgagcgcctgatgatgctcaacggccgggccatcgactggatcggcgacctggccatgtgtgcgcagttgctacagcgtggcgacctggcgttcctgtcgcggccgctgacccgtttccgcgtctcccgccagcagttcagccagatcgggcgcgaccagcccggtatcggcgagcagggccatgccgacttccgcctggctatccgcgaactgggttggtatcgccaggccggcgacaaccgcttcgtccgggtggcaccgatcacccgcctggacgcccgtgtcttcaagccggtcaacctgctcgccgcgctgaggcgggcggcgggcttcggtagcgtcacgctgtcgacctggctggaggcgcggcggccggatgcggtgcagaaggtgctgatcgatcgattcctgcaggagcagggtggtgggccgcgcttcgcggtgctggtgctcgatgcccacggcgataccgaggccgtggagcgtaccctgcagagcctggagcacgtcaattcgtatccacgtgtcgagagccacctgttcgcgccgctgggcacgagtccgcggaacggagcgatgctcttcgatccagaggtggggccggtgccgacgatcaaccaggcgcttgcccggcttgataccgactggttgctcctggtcgaagcgggtgtcgaattcactgtcagcggcctgctggtggcggcgctggacctgctggcggcaccggagagctgccaggcggtgtacgccgacgaactcatgcgcctggatgacggcgagctgggcgcggcgttgcgcccggacctgaatctcgaccttctgctcagtttccccgccggcctgtcccggcactggttgttccgccgcgagccgctgcttgccacgggcggattcgacgagaccgccggcgaggctttcgagctggcctaccagttgcgtctcgtcgagcagcggggcctgggctgtatcggacacatcagcgagccactgctgtctggcccagcgctgcgcctgcaggacagcaccgccgagcgtgcggcgatcgaaggccacctgcgtgcccgtggctacgcgcaggcgacagtcggaagccggctgccggggcgctacgagctagactacggccacgccgggcaaccgccggtcagcatcctggtgctggccggggagcgcctggcgcagctccagcgttgcgtagaaaccgtgctggagaataccgcctatcccaactacgagatccttctgctggaacagggtggcgaagcggccgacgttcgcgaatggctgctcgccgtcgaaggcatgggcgtcgagcaggtgcgggtgctgcgaggcgatgggcagttgtcccgtggggctctgcgcaacctggcggcgtcccgggcgcgcggcgaattcctgctctggctcgatgccggcagcggcatcctcgacaaggactggctgcagcagttactcaaccatggccagcgtccggaagtcggcgcggtaggcgccaagctcctggcggcggacggacgggtctgccacgccggctggctgctcggtttgtgcggaccggccgggcgggccttcgaagggcgttcgcacgaggacgccggttacctgcagcgcctgcaggtggaccagaactactcggcggtggctggcgaatgcctgttgatgcgccgcgagttgttcctcgaattgggcggtttcgacgaggcgctgacgcgctgggacgatgtcgacatctgcctgcgggcggtccaggcgggctacctgaacgtatggacgccgcgtgcgcggctgttgctcgatgcgcctgccacgacggcggcgagcgtcgaggaagaagatgcgctgtacgcgcgctggctaccgttgttggcacgcgatcccgcctataacccgggcttttcgttgcaggccgaaggcggtttcaagctggccgacccgcagctggcctggcgcccgttgcaggggtggcggcccttgcccactgtcctggcgcaccccgccgacctgttcggctgcggccattaccgggtgatccagccgttcagcgcgttgcgcgagtcggcatccatcgatggcgcgctgtcgatcggcctgatgcacgtggccgatctggagcgctacgacccggacgtactggtgctgcagcgccaggtcggcgaggagcgtctcgaggccatgcggcggatgcaggcgttctcgcgagccttcaaggtctacgagctggacgactatctgcccaacgtgcccctcaagagcgcccatcgccagcacctgccgaaggacatcctgcgcacgttgcgtcgcgggctgggttacgtcgaccgcttcgtggtgtcgacgccggccctggcagaggccttcgccggtctccacccggatatccgggtgatcgagaaccgcctgccggtggggtggtggcaggggctgcgggcgcagcggcggcgcggcgagcggccacgtgttggttgggcgggcggctcgagccataccggcgacctggaactgatcgccgacgtggtccgggaactggccgacgaagtcgactgggtgttcttcggcatgtgcccgccgtccatccgtcccttcgtcagggaagtgcatgcgggggtgcctatcgaacgctatccgcgggcattggcggctctcgatctcgacctggcgctggcgccggtggagcagaacctgttcaacgagtgcaagagcaatctgcgcctgctggaatacggcgcctgcggtttcccggtggtctgcagcgacgtgcgctgctaccaggacgatctgccggtgacgcgggtgaagaaccgtttccgcgactgggtggacgcgatccgcatgcatacccgcgacctggatgccgcggccagggcaggggatcacctgcgcgaacgggtgctggcggattggatgctcgacggcgagcgtttgcgcgcctggtatcgtgcctggatgccggactga

SEQ ID NO: 362487 - DNA, 1149 bp, Pseudomonas aeruginosa
atgatggcgggaaacgatatgacgcaggcggacttcctttcgcgatgcgaacggagcggatatctattggtgctggtgcctacttcctatcttggaggggtgttccgctcacaggtggttgccggtttgtcgcagcgtctgcctggggttcgcctgattgctgtggacgatgtgcttttcgccagcaatagcgttcccgatggtttcgaccaggtgattcctaccgcccagttgaaggaaccatgccacgcagggaaacccgcagtgaattgtgcctattcgctgcctacctggctgacgctggatcacctggcgaagactgcgcaatgcatcaccctcgatctgcccgagcttctctacctgctggatattcctttggtctaccagaccggcgcgctgactcgcgaattggcgatgcagcatcacgccgagttcgtctcgctgcgcgagcgcctggccgacgagcgaagccggaagaccctggaagccatcatgcgcctgcgtttggacggcaaccgcgctgcgttgctggacgtgttgtgtccgggagagcaggaatacttttccctgtaccggggccccgagcatccgatcgtcttgcgaagcgacgagcattacgtggatatcggtgcctacgatggcgatacggtgaagaagttcatgctggcggctcgtcatgaatatgcttcgatccatgccttcgagcctgatccggcgaattaccggctcatgcatgcgtcgcttgctggaagtgtcggtctccatctgcataaccaggcggtgtccgataccggcggccatctcgcattcgcagcccacggcaccatgggaagcagggtcgagatagacggcaccgtgcaggtgccgtgcgtgcggctcgacgatgtcctcgatgtcatgaccttgctgaaaatggatgtggaaggccatgaggcacgggttctgcggggggccgcgcggctgatcgacgagtgccggccgcgcatggccatcacctgttaccaccatgtgcaggacctgctggacatcgtcgccgcgatcgacgggatcgctgcgggagcccggctgcgcctgcgccattactcgctgtatttctacgacacgatcctctatgtcgactggcccgatgctcttcgtgaagggcgctga

SEQ ID NO: 362488 - DNA, 615 bp, Pseudomonas aeruginosa
atgaagcaggcgatcatcgtcggggaagggcgcgcgctcgaacgggcggacagtactgcgcgggaacggggactgggacaccgggtcctggagctgaatgctgcggatcgacacaacttcgatattgcgcctctgctcgaacgctaccccgctgcggaaagcgaagtattcgtggcgctggacgagcgggcggtgaactacgcccgccacaagctcatcgcggatatccgcctggcgggctaccggctattcgatatcgtctcgcctcaggccatcgtcggcgaaggcgtgcgactgctgggcaacgtgttcgtcggcgccggttgcgtgctcgccggtcctgcccgcatcggcactggcagttggctggagctgcaggtcctggtggaggaggactgccgggtcggaacctgtagcacgctgctcgctggcgtgcagttgggacggcgagtggagatcggccagggcagcacgctgggtgcgggcagcgtcgcgctcgccgacacccgggtggggcgacactgcgaatggttgttgccgggcaggcttccccgggaactgcccaattactccttttacgatgaactcatgcccgatggggcacgcatcctatga

SEQ ID NO: 362489 - DNA, 1131 bp, Pseudomonas aeruginosa
atgactcgccatgcgctggacgcagcgcactacaccgagccgcagacgctcgcgctggagcgcgaaaggctgttcggcaggctctggatcttcgtcggcttcagttcgatggtgcgcgagcgcaaccagttcttcacccgcaagatcgccggcgtgccggtcgtggtgcagcgtaccgagtccggcatccgggcctttctcaaccagtgtccgcatcgtctgtcggccatccagaccgaatgcaccggccagcgaccgctggtctgcccgtaccatgcctggtcgttcggcgccgaggggcagctacagggcattccgaactccagtctgtaccagttcagcgccgaggagcgggcgcggatcggcttgcgcaagctgcacctggaagaggtggggcaactgctgttcgtcaacctggcggacgacccgctgccgctgcgcgagcagttcgacgatggattcctggaaaccttgcgggaggtctcctcgcacctggatacgcggctgatctacagctgccacaaggtgcgctacaactggaagctgaacatggagaacgtgaaggactacaaccatgttcctttcgtccatccgaagaccttcctcccggtgatgaccgccccggtgcgcggtctggcacgcgaggctgcggtgccatccgaggtgctgcgcctgctgcaggaaggcgaaacgccggagctgcgttcgctgagcttccccaccaaggcgccgatccagccctacaagagctggttctccgacctctgtgagggctacggcgacgagcacgcctactacaactggttcatctacccgaacgtgaacttctgcagcgtccgtggcgagcacttcctgctccagcagtacgatccggtggctcccggcgagaccgactaccacctgtggatgatgactgcccggcgcaaggatccgaagaccgatttcagcgctttgctgagcaccctgattcgcggcgagcgtaacgtgatcggcgaggacaccctggtcctggaacgcctccaggaggggctgggcgcacattcgccgccgttcatgcacggcgactacgaggtgcagctggtgcgccagcacctgtggtatcgcgcgcaggtactgggggagagggcatga

SEQ ID NO: 362490 - DNA, 633 bp, Pseudomonas aeruginosa; identical to SEQ ID NO: 359738

SEQ ID NO: 362491 - DNA, 768 bp, Pseudomonas aeruginosa; identical to SEQ ID NO: 340605

SEQ ID NO: 362492 - DNA, 1041 bp, Pseudomonas aeruginosa
atggccacctccacgctgaagaacgtccgtttcgccgggatggcgacctgcgtccccaagcgcgttatctccaacctgaccgactgcaagccgcagttgcgcgccgagcgcgaacgcctggtgcgcaacatcggcatcgagacgcggcgcatggcgcaggagtggcagtgcttctccgacctggccttcgacgccgccgagcgcctgctggaaagcctggagtggaagcgcgaggaggtcgatgcgctgatcgtcgtgacccagtctcccgactacctggcgccggctaccgcgatcatcctccaggaccgcctggggctgccgcattccaccgtggccttcgacgtcaacctgggttgctcggcctatccgttcgccctcaacctgctgggttcgctgattgccgccggcggggtgaagaagggccttgtgctggtcggcgaccgcggcgccagtgtcaacgatccgatcttctccgacgcgggcaccgcgacggcgctggagttctgcgaaggcgcgccgccgatgcatttcgacctgaacagcgacggcagcggctacaaggccatcatcctgccggtgggcggccatcgcgaaccggtcggcgtgcagcacctgatgccgttccgcgaggacgagaacgaccattggcaccgtgccatcgacctgcagctcgacggcaccgccgtgctcagcttctccacccagcgcgtaccgccggcggtggaaaagctgctcgactatgccggtgcgagcaaggacgaagtggactacttcgttttccaccaggccaaccggatgatcaacgagaccatccgcaagaagctcggcctgccggtagagaaggtgccttcgaccctgcgcgacttcggcaacaccagcggcgcctccctgccggtgaccatgaccgcgcggatcaaccgggaactcgaggccggccgcaatcgcgtgttgctctgcggcttcggtatcggcctgtcctggggtacctgcctggtggatatcgaaggggcgaagttccccgacctgatcgaatcctga

SEQ ID NO: 362493 - DNA, 225 bp, Pseudomonas aeruginosa
atgagccaagcaaaattcatcgaagacttcctttccgccaccgatttccagaatcccgtcgaggtcagcatggacacccagctcgaagacctgccggaatgggactcgctggccgcgctcggggtcatcgtcatgttcgacatggaatacggcaagaccatcaccggcgaagacctgatcaaggctcgcacggtgggcgacctctaccagatgctcggactctga

SEQ ID NO: 362494 - DNA, 1137 bp, Pseudomonas aeruginosa
atgaacaacaagacgatcccggtcaccagcccgctgctgccgcccctggaagagttcatcccctacctggaaaagatctgggagagccgtttcctgaccaacgggggcgacatgcaccatgcgttggaagaggccctgtgcgagtacctgggggtgaagcacattgtgctcttcgccaacgccaccctggcgctcatcaccgcgctgcaggcattgcgggtgaccggcgaggtgatcaccacgccgtactccttcgtcgccaccagccacgcgctgctgtggaacgggctcaagccgatcttcgtggacatcgaccaggactccatgaatctcgacccgtcgcggatcgaggcggcgatcaccccgcagaccaccgcgatcctgccggtgcattgctacggcaacccctgcgatgtcgaggctatccagcggatcgccgatatccaccacctgaaggtcatctacgatgccgcgcatgccttcgccgtgcgcgacgccggcggcagcgtgctgcgccacggcgacctgagcatcctcagcttccatgccaccaaggtgttcaacaccttcgagggcggtgcgatcatctgctcggacgaaaacacccggcaacgcctcaaccaccttaagaatttcggcttcgtcgacgaggtcacggtggtcatgcccggcatcaacggcaagctcaacgaggtcggcgctgccttcgggctgctgcaactcaagcacgtcgaccaggccctggagcagcgcagggagatcgccgagcgctatcggcgcctgctggccggcgtccctggcatccagtgcctccggcctggtacccagaccttcgccaacaacgcctatttcccgatcctggtggaagacgattttccgctttcgcgcgacgagctgtaccagcgcctgcgcgacagggatgtgctggtgcggcgctacttctacccactcatcagcgacttccccatgtaccattcgctgccctcggcggcgcccgccaatcttccggtggcgcggtcgatttcctcgcgggtgctgtgcctgccgatctatcccgggctggccgccgcagacgtcgagttcgtcgccggcctgatcgcttccgccgccatgccgcggcggcgagcatcaagttga

SEQ ID NO: 362495 - DNA, 1302 bp, Pseudomonas aeruginosa
atgcgcatttccaccatccaggccttcaacaactcggtcaacgggatttcccgcaactacgcggacctgaaccgtaccttcgagcagatcagcaccggcaagcgcatcctgaccccggcggacgacccggtcggttcggtacgcctgttgcgcctggaccaggaacaggggttgaacgagcagtacaagaccggcatgaccgaggcgaagaacagcctgagccaggaggaaaccatcctccgttcggtcggcaacgtcctccagcgcatccgcgagatcgccggccaggccggcgacggcgcactggactccaacgacaagaagtcgctggccagcgagttgcgccagcgcgaggacgagttgctgaacctgctcaacagccgcgacgcgagtggcaaatacctgttttccgggtcccagggctcggtgcagccgttcgtgcgcaacgaggacggcacctacagctacatgggcgacgagagccagcgcgaggtgcagatcgccagcagcacgcggattccggtcagcgacagcggcaaggtgctgttcgaggacatcgtcaacgccgctcgtctcgataccaaggcggcggctggcaataccggcgacggtcgcatctcggtcggcctggtcgaggacgagctggccttcgacagccagttcccggcgagcaacccgcctgcggcaaccgacggcttcaacatccacttcgtcagcgacaaggagtacgtggtctacgatccgaagagcctgcctccgggctatgactggaccacctacgatccgaattcgccgccggcctggcaattgtccaagggcgccatcgacgacgacccgaagaccatcgacaaggtgctctacgccggcgtcagcgtgacgatcgacggcacgccgaaggcgggcgacgagttcaacgtcaactacaagccgggcagcgagaagcgcagcctgctgaacgtggtgtcggacctgcgcaaggccctggaaagctccaccgacaaccaggccggcaacgacgccatccgcgatgcgacggcggtggccctgaccaacctctccgccgtggctgccgccgtggatggcggccagggcaagatcggcgcgcgcctgaataccgtggaaagcaccgagaccttcatcgacgatgtgaagctggtgaatgcgtcggtgatgtcgcagatccaggacctggactacgccgaggcgttgtcgcggctgtcgttgcagtccaccatcatggatgccgcgcagcagagctacgtgaagatccaggggttgagcctgttcaactacctgaagtga

SEQ ID NO: 362496 - DNA, 2049 bp, Pseudomonas aeruginosa
atgtccgacctactctcgataggcctgtccggcctcggcaccagccagacctggctgaccatcaccgggcacaacatcaccaacgtcaagacgccgggctacagccgccaggatgccatccagcagacccaggtcccgcagttcagcggtgccggctacatgggctcgggcagccagatcgtcgacgtgcgccgcctggccagtgacttcctcaccggccagttgcgcaacgccaccagccagaacagcgagttgagcgcattccgtagccagatcgagcagctcgacggcctgttgtccaacaccaccaccggcgtcagcccggccatgcagcgcttcttcgccgcactgcaggccgccgccaacaatccctcctcgaccgaagcgcgcgaggcagtgcttgcccaggccgaggggctgggcaagaccttcaataccctctatgaccagttggacaagcagaacagcctgatcaaccagcaactgggcgcgctggcttcgcaggtcaaccatctgtcacagagcgtggccagctacaacgatgccatcgccaaggccaagtcggcgggcgcggtgcccaacgacctgatggatgcgcgcgacgaagccgtgcgcaagctatccgagatgatcggggtgaccgcggtcacccaggacgacaacagcgtcagcctgttcatcggtagcggccagccgctggtggtgggcaatactgtgtcgaccctgagcgtggtgcccgggctggatgacccgacccgctaccaggtgcaactgagcaacggcaactccatacagaacgtcaccggcctggtgtccggcggcgagatgggtggcttgctggcctaccgcaacagcgccctggacagcagctacaacaagctcgggcagttggcgatcaccctcgccgataccatcaacaagcagttggggcagggcctcgacctggccggcaaggccggcgccaacctgttcggcgacatcaacgatccggacatcaccgcgctgcgggtcctggcgaagaacggcaacaccggcaatgtccacgccaacctgaacatcaccgataccagcaagctgaattccagcgatttccgcctggacttcgacggcaccaatttcaccgcgcggcgcctgggcgacgacgcaagcatgcaggtcacggtcagcggtaccggtccctacaccctctcgttcaaggatgccaacggcgtcgaccagggcttcaacctgaccctcgaccagctcccggctgccggcgaccgcttcaccctgcagccgacccggcgtggcgcggcggatatcgaggcgacgctgaagaatgcctcgcaactggcgttcgccggtaccgcgcgtaccgaatcgaccaccgaaaaccgcggcaccggcaagatcggcgcgccgaccctcaccagcggtccgtcgccggtggacccggcggtgctacagggcgcgttcgggcccaacgggatcagcctgggcgcgacgctcagcgccgacggcaagacctataccctgtcctcgccgttgccggccggctggaactacgtcgacaaggacggtaacgccctgagcggcagcccgacgctgaccagcggcaataccaataccgtgcgcatggcgttcaccgacccgagcgggcagaaatacagctacgaattcgagctcagcggcgtaccgcagaactccgacagcttcaagctgggcttcaacgacaagggcatttccgacaaccgcaacgctctcaacctgctggccttgcagaccaagccgaccgtcggcggcaccgacaacaccggttccacctacaacgaggcctatggtggcctggtcgagcgggtcggcaccctgaccgcccaggtgcgtgccagcagcgaggccagcgccacggtgctgaagcaggcccaggacagccgcgattcgttgtccggggtgagcctcgacgaagaggcggccaacctgatccagttccagcagtattacggtgcctcggcccaggtgattcaagttgcccgcactttgttcgataccctgattggagcgttccgttga

SEQ ID NO: 362497 - DNA, 1203 bp, Pseudomonas aeruginosa
atggattcccgtttgctcagcggtatcggcgcaggccccgacagcggctcctataccgatctcaaccgcctcaaccagctcaaggtcggcaaggaccgcgacggcgaggcgaacatccgcaaggtcgcccaggaattcgaatcgctgttcctcaacgagatgctcaagtccatgcgttcggccaacgaagcgctgggcgacggcaatttcatgaacagccagaccaccaagcagtaccaggacatgtacgaccagcaactgtcggtgagcctgtcgaagaatgccggcggcatcggcctggccgacgtgctggtgcgccagttgtcgaagatgaagcaaggctccaggggcaacggcgaaaacccgttcgcccggggcgccgagaacggcgccggtcgctggccgagcaaccccagcgcgcaggccggcaaggccctgccgatgccggaagccggccgcgacgactcgaagctgctcaaccagaggcgcctggcgctgccgggcaagctggccgagcgcatgctcgccggcatcgttccctccgcctcgccggccgccagccagatgcagagcctgggccaggacagctacctgccggcgcagagctacccggcggcgagccgccgcggtttctccaccgatggcgtcgacagccagggcagccggcgcatcgcccagccgccgctggccaggggcaagtcgatgttcgcctccgccgacgaattcatcgccaccatgctgccgatggcccagaaggccgccgagcggatcggcgtcgatgcccgctacctggtggcccaggccgcgctggagaccggctggggtaaatcgatcatccgccagcaggatggcggcagcagccacaacctgttcggcatcaagaccggcagccgctgggatggtgcctcggcgcgcgccctcaccaccgaatacgaaggcggcaaggcggtcaaggaggtcgcggcgttccgctcctactcgtcgttcgagcagagcttccacgactacgtcagcttcctccagggcaacgaccgctaccagaacgccctggacagcgccgccaaccccgagcgcttcatgcaggaactgcagcgcgccggctacgccaccgatccgcagtacgcccgcaaggtggcgcagatcgccagacagatgcagacctaccaggccgtcgccgccgccggcacgccgcctctgggttga

SEQ ID NO: 362498 - DNA, 1110 bp, Pseudomonas aeruginosa
atgaccaagttcaagcacctgctggccctcgccgcgctgctcctggccgccggcgcggcccaggccgagcggttgaaggatatcgccagcatccagggcgtgcggaccaaccagttgatcggctatggcctggtggtcggcctgagcggcagtggcgaccagaccacgcagacgccgttcaccctgcagaccttcaacaacatgctggcgcagttcggcatcaaggtgccggccaacgtcggcaacgtgcagttgaagaacgtcgccgcggtatcggtgcatgccgacctgccgccgttcgccaagccgggccagccgatcgacgtcaccgtgtcgtccatcggcaacgccaagagcctgcgcggcggcagcctgctgatgactccgctgaaaggtatcgacggccaggtctacgcggtcgcccagggcaacctggtggtcggcggcttcgacgccgaaggccgcgacggctcgaagatcaccgtcaacgtaccgtccgccggacgtatcccggccggcgccaccgtcgagcgcgccgtgccgagcggcttcgaccagggcaacagcctgacgctgaacctcaaccgcccggacttcaccactgccaagcgcatcgtcgaccgcatcaacgaactgctcggtccgggcgtcgcccatgcggtggacggcggctcggtgcgggtcagcgcgccgctcgacccgaaccagcgggtcgactacctgtcgatcctggagaacctcgacgtgcagccgggcgaggcggtggccaaggtcatcatcaattcgcgcaccggcaccatcgtcatcggccagaacgtcaaggtatcgccggccgccgtcacccacggcagcctgaccgtgagcatcaccgaagacccgatcgtcagccagcccggtgccttctccaacggccagaccgcggtggtgccacgctcgcgggtgaacgccgaggaggagaccaagccgatgttcaagttcggtcccggcaccaccctggacgacatcgtccgcgcggtgaaccaggtcggcgccgcgccgagcgacctgatggcgatcctcgaagccctgaagcaggccggcgcgttgcaggccgacctgatcgtgatctga

SEQ ID NO: 362499 - DNA, 696 bp, Pseudomonas aeruginosa
atgaaccggctgatgatcgtctccctgcttggcatcgccaccgccctgggcggttgcgtcaatccaccgccgaagccgaacgatccgtactacgcgccggtgctgccgcgcaccccgctgcccgccgcgcagaacaacggcgcgatctaccaggccggtttcgagcagaacctctacgacgaccgcaaggccttccgcgtgggcgacatcattaccatcaccctcaacgagaagacccaggcgagcaagaaagccaactccgatatccagaaggacagcaagaccaagatggggctgacctcgctgttcggcagcggcatgaccaccaacaacccgatcggcggcggcgacctcagcctcagcgccgaatacggcggctcgcgcgacgccaagggcgacagccaggcggggcagagcaacagcctgaccggctcgatcaccgtgaccgttgccgaggtgctgcccaacggcatcctctccgtgcgcggcgagaagtggatgaccctgaacaccggcaacgagctggtgcgcatcgccggcctggtccgtgccgacgatatcgccaccgacaacaccgtgtcctcgacccgcgtggccgacgcccggatcacctattccggcaccggcgctttcgccgatgccagtcagccgggctggctggaccgcttcttcctcagcccgctgtggccgttctga

SEQ ID NO: 362500 - DNA, 786 bp, Pseudomonas aeruginosa
atgttatcggcactgtgggtcagcaagaccggtctgtccgcccaggacatgaacctgaccaccatttccaacaacctggccaacgtatccaccaccggcttcaagcgcgaccgcgcggagttccaggacctgctgtaccagatccggcgccagccgggcggccagtcgacccaggacagcgagctgccttcgggcctgcaactgggtaccggtgtgcgcgtcgtcggcacccagaagatcttcaccccgggcagcctgcagaccaccgagcagccgctggacatggcggtcaacgggcgcggcttcttccaggtcctgctgccggacggcaccgtgtcctacacccgcgacggcagcttccacctgaactccgacgggcagatcgtcacctccaacggcttcgccctggagccggcgatcgtggtgcccaacgagacccagaccttcaccgtcggccaggacggcaccgtctcggtgaccaccaccggcaacgcccagccgcaggtgatcggcaacatccagaccgccgacttcatcaacccggccggcctgcaggccatcggcaacaacctgttcctggaaaccggctccagcggcgcgccgcaggtcggcacgccgggtctcaacggcctcggcacggttgcccagaacaccctggaaaactccaacgtcaacgtggtcgaggaactggtgaacatgatcaccacccagcgcgcctacgagatgaactccaaggtcatctccaccgccgaccagatgttgtccttcgtcacccagaatctttga

SEQ ID NO: 362501 - DNA, 750 bp, Pseudomonas aeruginosa
atggacaagatgctgtacgtctccatgagcggggccagccagaacaccctggcgatgcgtgctcatgccaacaacctggcgaacatctcgaccagcggctttcgtcgcgacttcgagcaggcgcgttcgatgcaggtgttcggcgacagcttcccggcgcgggtattcgccatgagcgagcggcccggtaccgatttcagccatggcagcctccaggaaaccggcaacgagctggacatcgccatcgacggcgacggcttcgtcgcggtccaggcgccggatggcagcgaggcctacgtgcgtaccgccggcatgcacatcgacgccctcggcatgctgcgcaccggcgacggtttgccggtgctcggcaacggcggaccgatcgccgtgccgccggaggaaaaggtggagatcggccaggacggcaccatcagcatccgcgcccttggcgagaaccccaacgtggtcgccgtggtggaccggatcaagctggtcaacccgaacctgaagcagatggagaagggtaccgacggcctgctgcactacaagccgcagccgggcgagcaggcgccgctggccgacgccaacgtgaaggtggtctccggtttcctggaaagcagcaacgtgaacgcggtggaagagatgaccgcgatcctctcgctgtcccgtcaattcgagctgcacgtgaagatgatgcgcaccgccgaggacgattcggcggccatggcgcgggttttgcaaatcagctaa

SEQ ID NO: 362502 - DNA, 1389 bp, Pseudomonas aeruginosa
atgagtttcaacatcggcctgagcggcatccaggcggcctccagcggcctgaacgtcaccggcaacaacatcgccaacgccggcaccgtaggcttcaagcaatcccgcgcggagttcgccgacgtctacgccgcctcggtgctgggttcgggcagcaacccgcagggcagcggcgtgctgctctcggacgtctcgcagatgttcaagcagggcaacatcgactcgaccaacagcgtgctggacctggccatcaacggcaacggcttcttcgtcaccagcaacaacggggcgatcagctacacccgcgccggctacttcaataccgacaagcaggatttcatcgtcgacaacaacggctaccgcctgcagggctatgccgtcgggccgaacggccagttgcagaacggcgtggtcaccgacctcaaggtcgagcgcgccaaccaggcgccgcaggccacctcgagcatccagcagtcgtacaaccttaactcgacgctgaagccgccgaccgtgacgccgttcgatccgtccgacgccgccacctacaactcgtcctcttcgctgggcatctatgacagccagggcaactcccacaccatgagccagttcttcatcaagaacgagccggacccgaatgcgaccccgccgattccggagaacagctggaccatgaaagtgctgatcgacggggtcaatccgctcgacccgtcgaacaagacgccgatgagcttcaacgtcaccttcgacgccagcggccagatgacctcggtacgggctccggacggcagcaccagcgggccgggcttcagcatcgacgcgaccaccaacgtgatccagttcagcccggccaccggcaatccgccgactcccggcaccggctggattccggcggcctcggacggcaagaccccgccgacctacgcctggaatggcgcgaccggtgccgccagcggcatctccttcgacatgcgcaagaccacccagtactccaccgcgttcgcccagagcaacccgatccaggacggctacaccaccggtcagctggcaggcctggaaatcgacgacaccggggtgatcttcgcccgctacaccaacggccagtccaaggtgcagggccaggtggtgctggccaacttcgccaacatccagggcctgacgccgatcggcaagacctcctgggtgcagtccgcggagtccggcgagccggcggtcggcgcgccgcgctcgggcaccctgggggcgttgcaatccggcgcgctggaagcgtccaacgtggacatctccaacgaactggtgaacctcatcgtccaccagcgcaactaccaggccaatgccaagaccatccagaccgaggatgcggtgacccagaccatcatcaacctgcgctga

SEQ ID NO: 362503 - DNA, 714 bp, Pseudomonas aeruginosa
atgagcatcgataacgtcagcggcaccagcagcaacaccggcaacgtcaacggcagcaatcgcgccgccggcagcggcgccaccgagaccgggcagagcgtcaagggcagcagcaacctgggcaaggacgaattcctcaagctgctggtggcccagttgaagaaccaggacccgatgtcgccgcagcagaacggcgagttcatcgcccaactggcccagttcagcaccgtggaaggcgtgcagtcgctgaacaagagcatggagagcattctctccaactaccagtcgtcgcaggccctgcaagcctcgtcgctggtggggcgcaaggtcatcgtggcgaccgacaagtcggtggtggacaccaaggacaccttcaaggcgtccctcaacctgccggtttccagcagcaacgtctgggtcaacgtctacgacgacaagggcaccgtggtcaatcgcatcaacctcggccagcaggctgccggcagcgtcagcttcatgtgggacggcaaggacagcagcggcaacatcatgccgccgggcacctacaagttcgaggcgcagacctcgatcgacggcaagacctatgggctccagacctacctgccggccaacgtcgacagcgtcaccctggggcagaacggcggcgagctgatgctcaacctcgcaggcctgggcagcatcgcgctgtccaaagtacagatcatcggccagtaa

SEQ ID NO: 362504 - DNA, 441 bp, Pseudomonas aeruginosa
atgtccctcgccagtgtcttcaacattgccggtagcggcatgagcgcccagagcacccgcctgaacactgtggccagcaacatcgccaacgccgagacggtttcctccagcgtcgacaagacctaccgcgcccgccatccggtgttctccaccatgttccagcaggcccagggcgacagcggctcgctgttcgccgaccaggacagctccggcgccggcgtgcaggtgctgggcatcgtcgaggaccagagttcgctgatgccgcgctacgagccgaaccatccggccgcggatgccaacggctacgtgtattaccccaatgtgaacgtggtcgaggaaatggccgacatgatttccgccagccgtgccttccagaccaacgcggaaatgatgaataccgccaaacagatgatgcagaaggtcctgaccctgggtcagtga

SEQ ID NO: 362505 - DNA, 408 bp, Pseudomonas aeruginosa; identical to SEQ ID NO: 318387

SEQ ID NO: 362506 - DNA, 363 bp, Pseudomonas aeruginosa
atgttcgaaccaggccacctccatctggtcagcctacccggcctcgaccagcaggacatcaacatccatatccgctacgaggtgcggcagaacgccgaatccggcgcctatgtgcacttcgacatggacggcgagatcgacggcaagccgttcagcgactccttcgagctgccgcgcgataccgccttcaacttcgccagcgatgccacgcgggtcgcccagaagcacggcctgcacccgaagttcggcgcgatcacccgggtgcacaaggaatacgatgcgatgttcgaggacattcgcgccaagctgcatgcccatcccggcgaaccggtggatctcgagcggatcattcgccacgagtga

SEQ ID NO: 362507 - DNA, 318 bp, Pseudomonas aeruginosa
atgacagaacaaactagcaccctctatgccaagctgctcggcgagaccgcggtcatttcctgggccgagctgcaaccgttcttcgcccgtggcgccttgctccaggtcgatgccgcgctggacctggtggaagtcgccgaggccctggccggggacgaccgcgagaaggtcgccgcctggctttccggcggcggcctgagcaaggtcggggaggatgcggccaaggacttcctcgaacgcgacccgaccctctgggcggtggtggtggcgccctgggtggtcattcaggaacgcgcggaaaaagcgacgttgcactga

SEQ ID NO: 362508 - DNA, 1122 bp, Pseudomonas aeruginosa
atgaagaagggtactcagcgtctatcccgcctgttcgccgcgatggccattgccgggttcgccagctactccatggccgccgacaccatcaagatcgccctggctggcccggtcaccggtccggtagcccagtacggcgacatgcagcgcgccggtgcgctgatggcaatcgaacagatcaacaaggcaggtggcgtgaacggcgcgcaactcgaaggcgtgatctacgacgacgcctgcgatcccaagcaggccgtggcggtcgccaacaaggtggtcaacgacggcgtcaagttcgtggtcggccatgtctgctccagctccacccaacccgccaccgacatctacgaagacgaaggcgtgctgatgatcaccccgtcagccaccgccccggaaatcacctcgcgcggctacaaactgatcttccgcaccatcggcctggacaacatgcagggcccggtggccggcaagttcatcgccgaacgctacaaggacaagaccatcgcggtactgcacgacaagcagcagtacggcgaaggcatcgccaccgaggtgaagaagacagtggaagacgccggcatcaaggttgccgtcttcgaaggcctgaacgccggcgacaaggacttcaacgcgctgatcagcaagctgaagaaagccggcgtgcagttcgtctacttcggcggctaccacccggaaatgggcctgctgctgcgccaggccaagcaggccgggctggacgcgcgcttcatgggcccggaaggggtcggcaacagcgaaatcaccgcgatcgccggcgacgcctcggaaggcatgctggcgaccctgccgcgcgccttcgagcaggatccgaagaacaaggccctgatcgacgccttcaaggcgaagaaccaggatccgagcggcatcttcgtcctgcccgcctactccgcggtcaccgtgatcgccaagggcatcgagaaagccggcgaggccgatccggagaaggtcgccgcggccctgcgcgccaacaccttcgagactcccaccgggaacctcgggttcgacgagaagggcgacctgaagaacttcgacttcaccgtctacgagtggcacaaggacgccacccggaccgaggtcaagtaa

SEQ ID NO: 362509 - DNA, 1044 bp, Pseudomonas aeruginosa
atgggcatgtcgatgctcggccgggtgctcgacggcgccggccgcgccctcgacggcaagggcgggatgcgcgccgaagactgggtgccgatggacggcccgacgatcaacccgctcaagcgccacccgatcagcgaacctctcgacgtcggcatccgctcgatcaatggcctgctcacggtcggccgcggccagcgcctcggcctgttcgccggtaccggggtgggcaagtcggtgctgctggggatgatgacccgtttcaccagggccgacatcatcgtcgtcggtctgatcggcgagcggggtcgcgaggtgaaggagttcatcgacgagatcctcggcgaggaaggcctcaagcgctccgtggtggtcgcctcgccggccgacgacgcgccgctgatgcgcctgcgcgccgcgcaatactgcacgcggatcgccgagtacttccgcgacaagggcaagaacgtattgctgctgatggactcgctgacccgctacgcccaggcccagcgcgagatcgccctggccatcggcgagccgccggcgaccaaagggtatccgccatcggtgttcgccaagctgccgaagctggtggaacgcgccggcaatgccgaagccggtggcggctcaatcaccgcgttctacaccgtgctctccgagggcgacgaccagcaggacccgatcgccgacgccgctcgcggcgtgctcgacgggcacttcgtattgtcccggcggctggccgaggaaggccactatccggccatcgatatcgaagcttcgatcagccgggtgatgccgcaggtggtcgaggccgagcacctgcgcgacgcccagcgcttcaagcagctctggtcgcgctaccagcagagtcgcgacctgatcagcgtcggtgcctacgtggccggcggcgatcccgagaccgacctggccatcgcacgcttcccggtcatgcgccagttcctgcgccagggcctcgacgaaagcgaaagcctggcggaaagccgtgcgcggctggcgagcctgctcgccggcgggcaggcctga

SEQ ID NO: 362510 - DNA, 756 bp, Pseudomonas aeruginosa
atgagcgccgcctgggtccggccgttccgcctgacgccgatgccgcgcctgcgcctggcctgcttcccccatgcaggcggaagcgccagcttcttccgtagctggagcgaacgcctgccaccagacatcgacctgcttgccctgcagtacccgggtcgcgaggaccgcttcaacgaggagccggccacccgcctggaggacctcgccgacggcgccgccctcgccctgcgcgatttcgccgacgcgcccctggcgctgttcggccacagtctcggcgcggcgctggcctacgaaaccgccctgcgcctggaaagcgccggcgcgccgctgcgccacctgttcgtctccgcccatccggcaccgcaccggcaacgcggcggcgcattgcaccgcggcgacgaggcggcgctgctggaggacgtccgccgccagggtggcgccagcgagctactcgaggacgccgacctgcgcgcgctgttcctgccgatcctgcgcgccgactaccaggcgatcgagacctaccgacgggcgcagcccatcgccctggcctgcgccctcgacgtcctcctcggcgagcacgacgaggaagtcagcgccgccgaggcgcaggcctggagcgacgccagccggactcccgccaggctgcggcgctttcctggcggccacttctacctgagcgaggggcgcgacgcggtgatcgagcacctgctgcgccgcctcgcacatcccgacgccctttcccgagaggttgcatga

SEQ ID NO: 362511 - DNA, 414 bp, Pseudomonas aeruginosa; identical to SEQ ID NO: 343727

SEQ ID NO: 362512 - DNA, 672 bp, Pseudomonas aeruginosa
atgcatatccacgtactcgtcgtcgaagacaacttcgatctcgccggcaccgtcatcgactacctcgaggccgccggggtggtctgcgatcacgcccgcgacggccaggccggcctcaacctggcgcgcgccaaccgctacgacgtgatcctgctggacatcatgctgccgcgcatcaacggccggcaggtctgtcgccagctgcgcgaagccggcctgcagaccccggtactcatgctcaccgccctggataccttgcaggacaagctcgacggcttcgacgccggcgccgacgactatctgctcaagcccttcgaactgccggagctgctggtccgcctgcaagccctcagccggcgccgcagcggccaggcccagcgcctgcaggtcgacgacctggtgatggacctcgacagccgccaggccagccgcggcggcacgcccctagcgctgtcccccaccgcctggaagatcctcgagtgcctgatgcgcgccagccccgcgctggtcacccgcgagcagctggggcgcagcgtctggggcgacgagccgccggaaagcaacaccctcaacgtgcacatgcaccacctgcgcagcaccgtcgacaaggggttcgccacccctctgatccataccctgcacagcgtcggcttccaactggagcgcaaatga

SEQ ID NO: 362513 - DNA, 297 bp, Pseudomonas aeruginosa
atgctggtcagcacggtcacgccgatgagcaacggcctgggcccgctgaaggcctccagcgtctcgcggcaggcggccatcatgcgcaggccgccggagcagtgcacgttgaccatccacacgcccatctcggcggcggccttcaccgccatcgccgtggtgttcgggatgtcgtggaatttcaggtcgaggaacacctcgaagcccttgccgcgcaaggtctcgactatacccgcggcacaactggtgaagagttccttgccgaccttcacccggcacagtttcgggtccagctga

SEQ ID NO: 362514 - DNA, 387 bp, Pseudomonas aeruginosa
atggctctgcctggcgatgtagcctgggatgcggccaatactggcgccggcgcggttggcatcgaggcgggccgcctcttggtatcgctggatgatctgtgcgatttcgacaacctgaggattcaggtcagacacatcctggtcattaccaatgcgccaaagagcatccgcgatgtcttggtcggagtctccccgagcaaggacgccaaccagatcgcctcgctccaggtcattcaacatcccgccaatgtacgcatcgccgagcgccttctgttctgccgcaacggagaggcgagccccctttcgcgcaacgtttgtcccaaccaagaacgactcaacgccaaggtcgggacggtcggcaaaggtgttgcgcacaaagcttactag

SEQ ID NO: 362515 - DNA, 252 bp, Pseudomonas aeruginosa
  misc_feature (30)..(39): n is a, c, g, or t
atggtgcgcctgcgcccaaaccggataccnnnnnnnnnngagacctttcgacttcgcttcctgtcggccttcattcgtacgctccagtattctctgacgttcagcctgagctacagccaacaggattgttaccaccattttacccatttcaccatcggtgctgatcccatcatcaataaaccggacagctacgccctgggcatcaaacgtttttatcagttggatcataactgccggatgccttatcagtaa

SEQ ID NO: 362516 - DNA, 777 bp, Pseudomonas aeruginosa
atgccgcttgtccgcgaccacggcgtatttcagggctttgttgaccagctccgtccggccgcgctcgtaggcgggatgcgactggtagggcgcgatggtgcgcaggtcggcatcgagcagcaccttgtagcgccgcgacaggttgtcggggtggcgccggtagcgggtgaccagcaccggcagcttgtggatctggtagccctggctggcgatgcgcagggtcatctggaagtcctgcaccttgatctcgggatcgtagaagccggcggcgcgcagggcctccatgcggtacagggacaccggggcgccgcagacataggcgttgccgagcaggtagtcgaagtccagctggcggatgcggttgccgttctgccgcttggtttcctggccttcgctgtcgatgtagatcaccagggcgccgacgcagccgacctccgggtgctggtcgaggtacgtggcgcgcacgctcaacgagtgcggcagcatgatgtcgtccaggtccggcgtggctacgtagtcgccgcgagcgtgttgcagaccgaagttcagcgctgcgctgacgccctggttctgctggcggtagagctggaaaccgtggactttctgcaactgctccagcatggcgtagctgttgtcggtggagccgtcgtcgacgatgatcacttcgaaattcgggtagtcctgctcgtagatgctgcgcagggcttcttccaggtacttttccgcgttgaagcagggtgctacgacggataccagcggggtgtccgtcgtgcctga

SEQ ID NO: 362517 - DNA, 600 bp, Pseudomonas aeruginosa
  misc_feature (175)..(184): n is a, c, g, or t
atggcgacaaaaattggcgtaattgccgaagacaatagcgacgtagacgtaataaaagaaattctttctaaatacttaaaaaaggaagccttctctatcacgcacttcgtaggaaaaggctgtggaaagctaaaatcaaaatgcgctgcctgggtagaccagttagagaaaaaannnnnnnnnnctgcctgggtagatcagttagagaaaaaagggtgcaaacacattttcctctttcacgaccttgacagaaacaaggaggaaaacttaaagcgggaacttactaaaaagcttgaaaactgctcattcccgtcgacacttataattataccgagggaagagctagaagcatggcttctagctgacacagaggcaattaggcgagtattcgcaatccaaaagaaaatcaaacccttcgccgatatcgaacaggtaaagtccccgaaagagcatctagagagactcgtcagacagcaaagcgaaaagaaataccttaacacaattcacaataaaaagatcgccagtgaaattgatgtttcgctactggagaactatccatcatatcaaccatttcataattatgtgaccacaagaatttaa

SEQ ID NO: 362518 - DNA, 195 bp, Pseudomonas aeruginosa
atggagcgcctgttccgcagtctgaagtcggagtgggtcccgtcaacgggttacctgacggcgcaggaggcccaacgggacatcagtcattacttgatgcaccgctacaactggatcaggccgcatcaattcaacgacgggctaccgcctgcggtggccgcagaaaaactcaacccactgtccgggatgggttga

SEQ ID NO: 362519 - DNA, 243 bp, Pseudomonas aeruginosa
gtgctggcggagctgggctatcaccgcccgcagctccccgacgatgcgctcatgctgggcgacggtcataagcgtttcgccgtcagagcagtgctggtaaagggcattggcgtcagcttcgcaaactcgcccgaatccttgggcccgaacaacagccacaacatccggccgctccacctctgcctgatcggacttgagtgcttcggcaggcgcttcgttgaacgcttcagcatgcggggctag

SEQ ID NO: 362520 - DNA, 327 bp, Pseudomonas aeruginosa
atgagcgacgtcaaacgctacgactgcaccaacggcggagttgccttctgccgtggctgctacgagatgaaggaagttcctctcggagactacgtccgagccgaggactacgccgcgctcttgcaagagcgcaaggctacggagtggacggcctgcgctgaccgcctgccacccgtgaatgagaacgtccttgtcacctgcgagttcgtcacaaatgactggcgcatcaaaacaggtggcctcgatgagcgcggcaactggtgggtgtttggggcgagttggaccccaacccattggcagccgctaccagccccaccagccgactga

SEQ ID NO: 362521 - DNA, 285 bp, Pseudomonas aeruginosa
atgagaaagcatacgccggggccgtgggaatactcgccggttagagggagtattgcgttgctccacatctactgcgctgacaacaaaggcccgttccatgttgagagatcggacgctgagactgacgccaacgccaagctgatcgccgcagcgcctgagcttctggaggcccttcagcacattgaagagtactggaatcgcgattcgaacgagcaagcgatgaccgacgcactctggcacatcatcgaaacggctcaggcagccatcgccaaggccaccgcctaa

SEQ ID NO: 362522 - DNA, 159 bp, Pseudomonas aeruginosa
atgaagaacaagcagcgcggctacatcggcaaaggcatcgcagatgccatcgctttcgccttcatcggggtggcgattgtctccgcagttggcggctgggctctcatcgaaggcctcatctggatcttcaggcatctgaccatcggatggtccgcatga

SEQ ID NO: 362523 - DNA, 465 bp, Pseudomonas aeruginosa
atgagtggaggaaggcctagcgattacacccctgagatcgctcaggcaatatgcatgcgcatcgccgagggtgagtcactgcgcatgatctgtcgtgatgactcaatgcctgataagtcaacagttctgagatggattggtaggcacgcggagttccgcgaccaatacgcgcaggcgaaagaacttggtgttgaggcgattgcggaagagttgttcgagatcgctgacgatggcactaacgactggatggagatgactgactcagaggggaatgcctatgggtataaagtcaatggagagcacatccagcgctccaagctccgaattgatacccgcaagtggtacctatcaaagatcctgcccaagaagtacggcgaccgtattcagcaagacttgaccgtcgacatgaaagaaggcttggccgagcgcctggcaaaagcacgtgaacgcgcaagaaaagattga

SEQ ID NO: 362524 - DNA, 795 bp, Pseudomonas aeruginosa
atgggtctggccttcccaggtgtcgaggtagacgttgccgatctggtcggaggtgcccttgtagctgccgtcggcgttcagcttcagcgacacgtaggtgccgccataggcgtagttggcgctgttgacggtggtgttgccggtggaggtctgcgacgcggcgctaccggcagtgctgtactggccgttggagacggcggcggccaggtcgttcttctgctggttgaagttgccggcggcgacgttcacgcccaggttgcccgagacgttgttggccgagttgctcagcgatgcggtgttggggttggagtagttgttcagcgtattgccgtagccgctctgcagcacgctggtgctggcggtcgcggtgccgaacacgaagctggcgtcggcgctggccagcgcggcggcgttggcctgctggttgttgtcgccggcggcgacgttgaccccgacgttgcccgaggcatccttgatcgagccgctcaccgaggcattgttcaccgtgccgaagttgctgaccttgttgctgtagttctgctgcgtatccaccaccagggccgtggctccgcccttgttgttcgactgcgggttgggtttcggcgggtgccagccaccttcgtttccggcgtaggccgataccgacagcactgcagccattgccagggccagcggggtcaggaccatagtcgctttcatggcgtttctccttgcatttctgtgcttagtgttgggcttgtgttggcttggcagagtcattccatgaccctgacactgagggtgttcatcgactga

SEQ ID NO: 362525 - DNA, 825 bp, Pseudomonas aeruginosa
atgcaggcgctgcacgccgatcatcacggcaatgacgatgaaggcgatcgaggccagggcggtgacggccacgccgacggtttcgccgagcaggaagcccaggcccatgatgacgaggaagcacagcgtcatcgccatcgaccagccgagatagcgcagacgtccgatccggccgttggtggtgaacacgttcagctcgccgaactcggggagggcttcgccgacctgggcgctgggtggtgtgtagggagacgcgcccgcgcccgcggccgcggaggccgcaggcgcggcgttttcgccgagctgcgcctggcgcgccaggtacttctcgatgatgatgccgcaagccgaacattccgctccgctgggctgttcatggccgcatttcgggcaagtcatgggaggcaggtcttgcgctggggtttcctccgcgacctgggggttgtgatcgggcgtttccaccaggctcaggctggccgccaggtcgacttccttgtaggcattggcgccggcctggcgcagggcggtcaggtaacgctccgcctcggcctctggaagttcgcgtttcagcaccaccgggcgaccgccgaagagggcgtcgatcttgcccggttcgctcttgaacaggcgggcgagattgtccttcacggtttcgagcgatgcgtcgggcatcagctcgccggagaagacgatcttgaagcgttggtcggtcatgcaggcatccttgtcagctggggtgagagaaatgcagccgacagcctaatcggcggccttggcgcccacaagcgcgagatgagaactcccgcacaagccggggcgccgtga

SEQ ID NO: 362526 - DNA, 342 bp, Pseudomonas aeruginosa
gtggtattccgccaggcgcggcggcagatggatcgccgcggtgctgtacatcgagccgagggcgaaatcgcccaccggttcgcccccctgcaccgccgcgcgcgcctcctcctgcagggcgaacagccgcgcggcgtagtccagcaggaccttgccggccggcgacagttgcaggcgctggcgttcgcggaggaacaggtcgacgccaagctgttcctccagttgccgcaggcgcgtcgacaggttcgacggcacccggtgcaggcgctcggcggcgcgggcgatggagccttcctcggcgaccgcctggaagatcctcaactggccgaactccacgattaa

SEQ ID NO: 362527 - DNA, 741 bp, Pseudomonas aeruginosa
atgagtgaattcaacgaccggttcgccgtcgtcaccggcgcgagttccggcatcggcctgaaactgaccgaaacgctgctcgggcacggcgcgactgtcctggcgatggcaaggcgcgaaggaccgccggaaagcctgcacgcccactccggcaagcgtctgcactggctggcgggcgacgtcacccgcgaacgggacctggacgccctggcttcgcgtgccgcgtccatcggccccgtcgattacctggtgcccaacgccggcatcgcccagctcgccgacggcctggacagcctggcgttcgagcagcagtggcgggtcaacggcgccggggcgctgaacaccttttccgtgctcagccggcaaacgagcaaaccggccagcgtagtcttcatcggtaccttcctcagccaagtgaccttccccgggctcgccgcctacatcgcttccaaggcggccctgatcgcccaggccaggacgctggcggtggaatgggcggaaaaaggcgtgcggatcaacctcgtctcccccggccctaccgccaccccgatatgggcgtcactgggcctgagcgatgcccaggcggagtctgtcacccggagcatcaaccagcgcctggtcgacggcagcttcctcagccccggggaaatcgtcgacgtggtgatgttcctgctgtcgtcgaaatccgccgggctctacgggcaggagttgatcgtcgacaagggctacggactgcgctga

SEQ ID NO: 362528 - DNA, 402 bp, Pseudomonas aeruginosa; identical to SEQ ID NO: 329443

SEQ ID NO: 362529 - DNA, 2001 bp, Pseudomonas aeruginosa
atgatccacctcaacaaaatcacactcaagaacttcaaaatatttggtggcgagccatacaccatcagctttgaggacagcaatctcgttctgcttgatgggccaaatggatatggaaagacatcagtcttcgatgctattgagctaggccttacaggaaatatcactcgtcttatttctcttgagaaccgtcaaaacccagccgacatagttgttgcgcataacggcgcagaaaacgttgagatcattctggaattcaaaaataaagactctaagctaaaaatatttcaaagaaaactaaagactcaaattcccaatatatccaagagaatctctagattcgcagagctttgggagctcaacgaaatcatagatgggaaatccttcccaacgcaccagaatgcactggagcaatactttgatagccagaacttcccgcgagacttcttgctatttcattacgtgcagcaagaagaaaccgctaggttcctgaagacgaacaacgaaacccaaagggctgaagagcttgcacaactgtttggcaatacgcgggaagcagatgagcgacttagtaagctagcagatatttctcgcaaggttgcagcttccaaaagaagcgtcacgtcgcggatcgagagcattaaatatctgtataaaatcgatgataataccagcatcgcagccggagacatcgagccacacgtttatgctttcccatggctagccaaggccaataagagtcccttctgggacgcaattacgatttcggagttaaatcaggagaaacttaacagctccttggtagagatcaactacactaagagtcttcttgcgcatcagcactttttcgtaagaagccgccgatttgaaaatgccgctctccagcgagaggtgcttgaactctatattggttactataattcgataaatgatcatgatctgcacatcactaggagcagcacgtatcaattaatccggcagtcctatacgacgcttaaaagtggtgactcgaaactaattcgcaccattaatagctttgagaccatcttccaagccttgaccctcggaagcagcgccgcatttgaaactgccctccaaacactcatcgaagaggagaacaaagcgagtggtttgagctccatttactccgagctcctcaatcaccacgatgccatgtctgccggacttcagaaggtgccaaacgaggctgcctgcttgctttgcgggcacgactataagactcatgatgcgctggctcacgccattgctcagcatggccatctaattcgctcacaactctcagggcaggatcggcaactggtggcggcgagggattctttcaacacgattcatctctctcccttgctccagacctgtgccacttatctcgagcggacggcggcttccacccaagaggacttactcgcactatctaaagcgctagctgcaaaagagcgctttgagaagctcagaaaatggctactgtcggaacgcattgagcatgatgacttgcttgcaacgacgtttccggttcaaggcggatataactacattgccgaggcgaccggaaacttatgtgagcggatacgctcggcaatcggtgcagcaccagagggctattacgaagccaacggcgccaatgtatttgaaagaatttatagggattatttcaacggcgaacaggacaagttggctctggtgagcatcgacctgctagataagaaagagatctacatcaagagcctctatttcaactcgctgaaggagatatccgaagagctcgccaagctgctgaaacagtatgaaaatttagagcgtgctgcatcagacgtgggtgagctcataacaatagttcggactcagatccggcagtaccggaaaaagctgatcaccgacatcgagattcccttctacatttactccggtaagatcctccagacccatcaggctgggcttggccatgcatattcatcaaagacccaacgggtgaagatgagctga

SEQ ID NO: 362530 - DNA, 690 bp, Pseudomonas aeruginosa
atgttcctcgacggcttcggcccgcagatactcgccggcaccctggtgaccctgaagctggcgctgggctccctgctcggcgccgtgctcatcggcctcctcggcgccagcgccaagctcgccgccaaccgcccgctgcgcgccctggccagcggctatacgacgctgatccgcagcgtccccgacctggtcatcatgctgttgctgttcttcagcctgcagatcctcctcaaccgcgtcaccgacgccctcggcatcgcccaggtcgacatcgacccgttcgccgccggctgcgtcaccctggcgttcatctatggcgcctacttcacggaaaccttccgcggcgccttccaggcggtcccggccggccaggtcgaagccgcgcaagcctacggcatggggcgctggcgagtgttccgccgggtactcctgccgcagatgctgcgctacgccctgccgggcatcggcaacaactggcaggtgctggtcaagtccaccgcgctggtctcgatcatcggcctcggcgacctggtcaaggccacccaggacgccggcaagggcaccctgcagttcttccacttcaccctggtctgcgggctgatctacctggccatcaccgcaatctccaacgccgcgctgctgtggctggagcggcgcagctcgctgggcgtcaggaggccgctgccatga

SEQ ID NO: 362531 - DNA, 240 bp, Pseudomonas aeruginosa
atgaacggtggaccagcgtttcccgtgccacttaatccaggggagccataccaagggcattcgcctttcgacggcatgaccctgcgcgactacttcgcagccaaggcggtacaggcttggatttcgacctatggagtcagtcatcctgcaacaaacagcacctgcgacacggttgcaaagcaggcctatcaggttgcagacgccatgctagaggccaggaaggaaggaggtggggagtga

SEQ ID NO: 362532 - DNA, 1281 bp, Pseudomonas aeruginosa
gtggctccccgagaagcgcagctcgtcgagcttgaacaaggccaggtcggcctgcttgccgggggccagctcgccgatgtcgctgcgtccgagcaggcgtgccgagccacgggtggcccagcccaaggcgagttccggggtgatccgctcggcgccgtagcgcaggcgttgcaggtagagtgcctggcgcgcctcgaggatcatgttcgaggcgtcgttggaagccgagccatcgacccccaggccgatcggcgcgccggccgcctccagctccacggtcgggcagatgcccgaggccaggcgcatgttcgaactcgggcagtggcagataccggtgccggcctcgccgagacgacggatctcctcggcgttgaagtggatgccgtgggccagccaggtgcgcgggccgagccagccgacgctgtccaggtagtccacggtgcgcaggccgaagcgctgcaggcagaagtcttcctcgtcgagggtctccgccaggtgggtgtgcaggcgtacgtcgtggagcgccgccagttcggcgctggcgcgcatgatctccggagtcaccgagaacggcgagcagggcgccagggcgatctgcacccgggcgccttcgccgcgctggtggtagcgagcgatcagtcgctcgctgtcggcgaggatggtctcggcttcctgcaccgtctgctgcggcggcaagccgccgtccttctcgccgaggctcatcgagccgcgggtgagcatggcgcgcatgcccagttcctcgaccaccccggcctgcacgtcgatggcctgttcgaggccgccggggaacaggtagtggtggtcggcggcagtggtgcagccggacagcagcagctcggccagcgccaccttggtggccagttcgagcttctccggggtcagccgcgcccagaccggatagagggtcttcagccaggggaacagcggctggttgaccaccggcgcccaggcgcgggtaagggtctggtagaagtggtgatgggtgttgatgagtcccggcaagaccacgtgccggctggcgtcgaactggctggcgcagggctgcgcgggctgctggccggcgccgagcagctcgacgatgcggccgtcttcgacgaccaggccgccggcggcatcgagaccgttggcggtgaagatggcgagggggttgcgaatccaggtgcgggacatgtgcggaccttcgtcggatcggcgggccggcgcgaacgctgccggccctcggttgatgagagccagctcagtgttcaccctgtctgctga

SEQ ID NO: 362533 - DNA, 144 bp, Pseudomonas aeruginosa
atggcgatcaccaagcttgaggatggccgctggctggccgacgttgaaccgatcaagggtaagcgcttcaggaagcgtttcaagaccaagggcgaagcccagcggttcgaagccacggcgattttcaaggtagttgtcgcgtga

SEQ ID NO: 362534 - DNA, 228 bp, Pseudomonas aeruginosa
gtggtcagcagtcccggcgcggcggcgctggaagcagccatcgaaggcggcctggcgatcggcgtgatcgaccgtgcgcgggtcggcccgacgatgcgcgtgctggggccggcggagggcttcgccgaactgcccgcccaccgcattcgcctggccttcgccccgggagagcggccgccggcgctggagcgcctcggcgaactgatcgccgaggagttccggctctga

SEQ ID NO: 362535 - DNA, 714 bp, Pseudomonas aeruginosa
  misc_feature (20)..(29): n is a, c, g, or t
atgggtgaaggtgggcatcnnnnnnnnnnaatagaacttgaactagccagatatctaagaccacaacttgccagatctgttggagcagagaataattttaaattcgaccaaaaagaagtaacaaaaggcaaatcagcctttgctctactcgaccaaatatataaagatgaaatttgctatgatgaactaaaatcgatatttatcggactattttcacgctctgcaaacaatgcgatatcgccaaactataccgagcttagaattgatgtacttcaaaacttcgaaagagactctgaaaaatctaaattcctagaggctcttttcgtgctccacagcaaatcatctacggcgatggagtctttgaaagatggtttgttaaaacctgaaattatggatctatttaaaagattttggaaagaagacaaaccatcatatagggcatttgtcacactcttagccatattcagcgcccttgacaaaaaaaatcgcaggtttgaagactacaacgacataaagagcggaataataaaactagcaggacaaatagaaatcgaccccagcgaatacatagaaacatatataaaagcctttaaaactatagcgctagacgtcctcaaaggcagcgaggacaaggataaaatgctgcaaagcatgtatcatcacattggctcaatgaattttgaaaatgctttactatccatgtcactattgtaa

SEQ ID NO: 362536 - DNA, 702 bp, Pseudomonas aeruginosa
atgcgcacgaactacgttctgatcgactacgagaacctcccggtcaaatccctggagctgcttcaggagccgcacttccgcctgcgggtcttccttggccccaagaattcgaagctcccgactgagctagtcgtcgcgatgcagcgcatgggagagcggggcgaatacgtcgtgctagagacttcgagcaccaatgccctggatttccatattgcgtattaccttggccgtctcgccctggaagagccaacctcgttcttccatatcatttccggtgacaaaggcttcgacccgctgctgaagcacctcaagggcaagggcatctatgccgtgcgctctgagagcatcgaggcgatgccctgcttcaaagcacttccggcaatcgaagcgaccattgccgcgaccgctgccggtggaaacaagtcaccctcaagcaatccggcacccagcaaacccgctccgaagaagacaaagactccagtctccggccagctgaaagttgcgatgcatgaccttatcagccgcaaaggcgcaaagccgagaaccatcgcgaagctgatcaacacgatccattcgacgctgggtaaggccagtggcgtcaagctcgcggaggccgaagccgtgtacaagcagctctgcgatcagggcttcgtgaaagtgaatggcgataaggtcacctactcattgccagagcgcgtctag

SEQ ID NO: 362537 - DNA, 1257 bp, Pseudomonas aeruginosa
atgtgcgcccaagccacccgcctctcggacctcaaagtcaaatctgccaagcctcaggacaaggactacgtcctgagcgatggcgatggacttcaaatgcgagtgagaagcaatggatctaagctctggaacttcaactaccgccacccggtgacgaagaaccggatcaacatgggccttgggaccttccccgaagtttcattggcgcaagcacgcaagcgcaccgttgaggcacgtgaactcctctcccacggtgtcgaccccaaagagaaacgggatgccgtacagcaggccaagaaggcggcgaccgaacacaccttccagaacgtggcgacggcctggtatgagctgaaaaaagatgcggtgacacaggcctacgccgaggacatctggcgctccctcactctgcacatcttcccggacttgggcagcaccccgatttccgccatcaacgcccccaaggtcatcaacctgctccggccgctcgaaaccaagggcagccttgagaccgttaaacggctgacgcagcggctcaacgagatcatgacctacggggtcaattcgggactgattcacgcgaatccgctcagtgggatccgctctgtcttcaagaagccgaagaagaagaacatggcggcgctccctcccgatgagctgaaagagctaatggtggcagtcgccaatgcgagcatcaaaaggaccactcggtgcctgatcgaatggcagcttcacaccatgacccgaccagcggaggcggcaaccacacgctgggcagacatcgacatcgagaagaagatttggacgattcctgcggaacgcatgaagaaacgccggacgcacatcgtcccgctcacggaacaggccctcgcacttctggaggcgatcaagccgtacagcggacaccgagagtacgtgttccccgcagaccggaaccctcgcactcactgcaatagccagactgccaatatggcgcttaaacggatgggcttcgaagggcgcttggtcagccacggcatgcgctcgatggcgagcaccatcctcaacgagcatggctgggatccggagcttatcgaggtcgcgcttgcccacgtcgacaaggacgaggttcgtagcgcctacaaccgggcggactacatcgagcgaaggcgtccgatgatggcttggtggagcgagcacattcagaaggcagctaccggaaacctgtccatgtcagccatcaaggaagatagagacagaaaggtcgtttcgatacgctga

SEQ ID NO: 362538 - DNA, 810 bp, Pseudomonas aeruginosa
atgctaatagatcaactacccgtcgggacactattctatttccctagagaaatccggcccgagccaggacatgcaactgctccaactacaatccccacagagcacaatctagaaagtttcttctatcaccatccagctcgcatattttggctgaaaacgtcgccggatggagtaaaggaggtggtagatggggccgctacaactggccaagaatttcggtggctacactactacccaggattaatcgcccatacagataccggcaccttcgacatcatgagcggaccaatgtctggatgttggatagtgacgttcattgctatgggagtactacaagcagggcatatcggaactttagttgatcaagacgaggaaaactctcgaatcaagagcgcatggaggttattcgcaagcacatatactgtagacctaagagccgcgtataaccctttccgttcagcactagaactaggaggaggaagcgtccctgaaagaatggaagatgaagatgggccgccgaccttctgggcggtaatgcagtacgaagcagaatcgacaacgtactcttttaacgtaatagtcacatataataaacgagcagcaggtgccgatagaatcttatgtcgcgttgcagcagtgtacaccattaatcctgcgacgtttctaggtgcagccctaactaacatctatccgccagtaacagttccacttctggcacctgcagcagtcgcgcacgctcccttggtggctccccccaccagcagcgggatgttctggaagcgcctgaaaaccgcttttaaacgaagatga

SEQ ID NO: 362539 - DNA, 285 bp, Pseudomonas aeruginosa
atgaaagaacgtccgatcctattcaccgggccgatggtccacgccatcctgagcggccagaagacggtgacgcggcgggtcttgaagggcctcgacccggaactcctgggcgagaccatgacgcgcgcgcagtggcagaaggtaaaccgggagcgtcccgtgtccttcggcgcaacctacttctgcccctacagccagccaggcgaccggctgtgggtgcgcgaaacttggttcgatgtgaatctgttgggtgcgccggacattgcccagcccttcagtaggtaa

SEQ ID NO: 362540 - DNA, 1554 bp, Pseudomonas aeruginosa
atggctcatcttcgccaggaagcggctcttcgcctcgttctccacccgcgcctgctcggccgcctggcgcgagcggaagccttcctccttgagcgcattgatgcggtcggcgaggccgatggacagggtcaccagttccacggtcatgccgatcttgaccacgctgctgccgaacaggccgaacagttcgaagcccagcgaggcggcggtggtgaccaggaacgacagcagcagcgcgccccaggccaggatgtagtagaggccgtagcgcaggccctggcgccagacgtggacgccggccagcagcaggctgagggataccagcatcaccgtcaggctggcgaggacgttccaggcgcgcaaccccaccagcggctcgctggccaacagggccacgcaggccagcagcatgccgcggaggaagcggtcgaggcgcgggaagtcgcggcgggtgtagaggtagccgcggctgaactggatcgacaccaggcagctcaggtacatcagcaggtagatgccggccgactccagcgccacgtgtcctggcagcagcttgaacagcaggccgtcgaagctggcggaaaacaggccgaggctgaggttgtacagcaggtaccaggcgtaggtggcctcgcgcagcgagacgaagaggaacaggttgtagcagaacaacccgaacagcaccccgtagaaggccccgttgaagcccatcagggtttcctggctggccgcgctggccgcgtaggtgctgaagtacagcggcaggtagacggtgctgctgctctgcacgcgcagcagcagggtgctctcgccgggcggcagtcgcagcgggaaccagaagttgcgcacctgcaccgggcgctgggagaaggcgaacaggtcgccgctctcctgctgttcgatgcgcccatcggcggtcagcaggtagaccttgaggtcgtccagcagcgggtagttgacctccaggaaaccggccaggtcggcgccgttgcggttgtccaggcgcaccctgaaccaccaggccgcggcgttcttgccgaagttcgcgtggtcgccgcgcagggcggtgaaggcctgggccggcaaggcgaggatgtcgcccaggcgcgccttgccgccggcgtcgcggtagtactcggcgtatgcgcccagggacaggcgcaggtcctctccgtccagcggtgcgggcggctgcgcccgggccggcagcgcgcagcagagcaacagcaggaccaggcagagtcgggacatgcaactactccatggacacgagtcggcacgcatgatgctacggaggaaatgagacaggcgagggaacctgccatcagcctagcagttggctggagaggagggcggcctccccggggggcggggaggccggcgcgggctcagcccttgtcgctgttgttgctgctgtcgagcacttcgtccaccggcgggacgtgggtgcagctttccatgtgcaccggatgctcgagctgcttgttgaagcgttccagcgaggtttcccggggcttggcgtcgctggcgaagaccggcgggctgaggatgtag

SEQ ID NO: 362541 - DNA, 291 bp, Pseudomonas aeruginosa
gtggtgctggaccagcaccagtacatggtcgtcctcggccagttgcaacaggttcacccgcagcagcggcccccgttccaggtcgaatggctgcacaacgatggcctgtatccgttcgatcaggccttcttcaccgaactgttcccgctcgatagaaacgctaaccgcaggttgtacctgctggtacgaacgccctccctccagccggaagcgggtacgcaaggtttcatgccgcgcgaccaggctgtcgaagctgcgttgcaaggcatccacgtccagccgcccgcgtag

SEQ ID NO: 362542 - DNA, 282 bp, Pseudomonas aeruginosa
atgaccgacttccgaatgacctacgacgaacgcgagcatttgaaagcctttgctgaccagggcgagagcctggctgaggtggtcgtgatgattgcccattggatgagggagccgatgttcgttccgttcggcttgtatgccgcccactgggcagccgcacagcagaccagcgacgtatccgcaatgcgccaccactggcctctggaaggccgccgcatgatcgcggacaaccagaccgcatggggcagctacagggctgatacggagcttccgcccctctga

SEQ ID NO: 362543 - DNA, 309 bp, Pseudomonas aeruginosa
atgaccgtcctcagccacctccgcgatcaggggctcaacgtccgcaagatcggcgcccgcatcatcctcggtcccaaggccctaatcactgacgacatccggcagtacgtcaggcggtatcgcttggcgctgcttgccgaactggccgccaacgacggcatcgagcgtcgctgttcctggacagtgctggtacccggctaccgccccttcacgatgatcagcccgcccgtcacccatgccgaggccctggacgacgttcagagccggtgggcggacgcccagcttgcacctgaggtaaccacccaatga

SEQ ID NO: 362544 - DNA, 1179 bp, Pseudomonas aeruginosa
atgaaaaacacgctcatgggtacagaaactgtacccatggagaggtttcacttggtacagaaactgtactccttcttagatataccaggcgcagcctgggatttagatcttctgatctacctcttttgcagttcaagaaagccctcagatgtgcgcggcatccgcatcctcgctggcgctggagccgatctggcgcgagcccacatcatccagggccggatcaaccctcaaggtgaggttgagccattcgacccggccagcgatatcgacctgctgcgcgagaccgccgaggccatcggcggcgtctccctgctgatgctcgatcccgtggtgagcgccatcaaaggcgacatgcacaaggccaatgaggtgcgccggggactgcaatgcgtcgtggacttcgccgaggcccacgcctgcgccgtggtgggcgtttctcacttcgccaagggcacggcagggggatcgcctgctgagcgcgtggtgggctcccaggcgttctcagcgctggcacgtacggtgttggtggcggccaaacaggaggactccgacctgcgcgtgttggccagggcgaagtccaacatcagcatcgatgagggcggggtctcctacaccatcgagccggcgaccatcgagaccgagcatggccccatcgagaccacccgcgtgctgtggggcgacaagctggagggtaccgcgcgggacattctcggcgacgttgaatcgaccggagagcaggacaatggcgacgatgatgacccggtggaggcattgcggcgcatcctgagttccgggcagctaacgggcaaggaggccaagcgcctgatggcggacaacggatacacgccaaaacagacccgaacggctcgtgagcgactggctgttgagaccatcagggaaggtttcggcaaggacatcaagacgtactggtccttgccgaaatcgggcggcgcattcgtgcccgaaactccattcgtgccctcgaaaccccattcgtgcccaccctataccgtgggcacgaatggggaaaaagggcacgaatgggaaaatggggcgcaagtgagcggagccgaagagcggcccgaacctgagaagggtgtcaacgaaggtcttgagtttctcaatgtcctgcccggcgagagagagaccctggacgctgacgaggaggacgtgcgatga

SEQ ID NO: 362545 - DNA, 702 bp, Pseudomonas aeruginosa
atgaaattttcttggtgctgtcctttctgcaaccatcacgcgactataactgacgagaattttgcgaagacgagattcgaatttaacaaggggaataagtatggataccaagcgcttatttcatatgtcatcacatgcccaaataaagattgcggcgaatacgctttaaacctaacacttcacgatcacgttcaagatggaaacagtcctggagggtataaagaccttgaagcaaaaagattctggcagctaaccccgtcctcatcagcaaagccgcttcctgactatgtacctcgtgcgatagttgaagactacaacgaggcatgcgcaatcaaagacctttcaccgaaagcgtccgcaactctctccagacgctgcattcagggaatgattcgagatttttttgcagtcaaaagcggtagattagtcgatgaaatagacgcaattaaagataaggtagacccagccacctgggcaggaatcgatgcggttagacaaataggaaacatcggagcgcatatggagaaggacatcgaccttattgttgatgtcgagcctgacgaggcgcagctacttattaatctaatagaaaacctaatcgaagattggtacgtaacaaaacatgctagagatgaaagactaaaggcacttgtaagtattgcaggcgaaaagagagagcaaaggacggccaagccttcttaa

SEQ ID NO: 362546 - DNA, 546 bp, Pseudomonas aeruginosa
atgggtgcgagtagcgagagccggttaaacccttcacgagaagaaggtgaaaccaactttaccaagctgcgggtggatgcgcagcgcatccagagtctttctggtgtggcggagggcttgaatctctatctagccggtaccgcgcaaaccgcattcggcaaacgtttgctttcgcctgaacaatttggcgtgggcggcagcgagttcgggcgcggctatgatccttcggagattaccggcgacagtggtttcgcggtgaagacggagttgcaatacaaccgcgttcatagcttcaaagaccgcgccgttccgactcagtattatggcttttgggatttcgggaaggtctggaatgaggaccctagctgggtgcgcagcgaaagtctcgcgtcaactggtttcggcgcacgcctgaacgtattcaaggacgcatacgtttctcctgaggtcgcgctcccgcttactcgatcagtgtccgccaaggaactggacgacgataacggcaaggagccgaggttttacatcaactttctgaaacttttctaa

SEQ ID NO: 362547 - DNA, 813 bp, Pseudomonas aeruginosa
atgcttggccgcgcgtgctgcgctcatgactaccgtgccattgccgacctcgatctcaccgctgttggatacgccgccggccaggtcggcgttgacactttcgttgccgccgggctcgccgccgatggctatgttcagcagaccgtcgccatggaagtccagcgctgcctggggcccggtggccagttgaaccttgccttttcgcgcctggaccacgccggcgttgttcacctgcgcgccgagaagcgcaaccatgccgttgtcgtggacagtgatgcagccttcgttactgacgttgccggtcagttggatgttcagtttgccggtctcggcgaactgcctggcttgctcctcggtcaggaagccggcgctggcaaccagagcgctggaggaaatatgcgccttgggcccgaccatgatgccgttcggattgaccagtatcagttggccattggacgtaacggctccatagatcttcgaagggtcgcgaccagtcaccctgttgagggttacggactttccgtccggctggttgaaggtgatcttgttgtccgagcccacattgaactgcttccaattgatagccgttcggtggctggacgtgtccactgtcatgctgttgccctgctgcgtgatggtcgcctgaccaccaatcacctggcctccctggggaaggccatcgatgttgcaggaatgacttgcactaccggcgctctctgcgccgtttgccgccattgcggtggcaatggccagagggctggccaagaaaaggatcaaatgggagttcttcatcatgaagtcttaacctcttga

SEQ ID NO: 362548 - DNA, 840 bp, Pseudomonas aeruginosa
atggctaagggtggaccaagcgcagtgcaactgatgctaggggacgagtcacagcatgctcgctatagcatctggctttggctttatctgcagtattgcgagaaggccaatttcgccccggagacctgttgcagcagcgagatgcaaaaggtgaccagcggatacttcgacggaagacctgatttcatcgcaggtgacatcagcaccatgatggtccgctggctggcgccaacagagcacctagcatggattagcgaagacgacaggcaaattcggtggcttttgcccaggctggaggagatcaccaagctgtctgagctacgtgcattgccgagactgctcggcagagagcttttggtaggaatgattgatctctggaatgaggatctgtccgagaagatcaagcagcttcaatggctgcacgatgactggctccggcataaagcccgggacagccaactcaaatggttcaaggagaaaaaggaaggtacggaccgatgccagtacgcatggagctggttacaaaaaaacgatgaatggctactttcccgtcgatcacatccatttgaaaattatcaggatttgctgattttcttcgactccaaggatttacgggagcgtgagcggaaggacatcgtccaaagcatccgccaaagctggaatcgccaaaagtacttggaacggctagaggacaggaagcagtacaatttcatcctgtcgaacaggacgatcgacctcctcgacaagatggtgacggagcacggcatgaaacgaccagagctcctagagcttttggtggagcaggagtccgagcgggggctgtacttgcggacaacgtaa

SEQ ID NO: 362549 - DNA, 1005 bp, Pseudomonas aeruginosa
atgaccgaacgaatcaccaccacccttggatctcagtccgataccgcaatccgaattgagcgtctcatcaacgccatccagcgtacagatagccaagcctgccgagtcacttactcgaagcatggagatgagctggtcagtgaaaccagactgtcaaaatacttcgatgggatcgtgcagatgatcgcgttgttcgacggagatgtggcgtatcagtacagctggaacttgagcctttttcaggaagcctgccaggctattgggattgagcgcagccccttaggcatcacctgcttgagcgaggatgaagcgcgctatctgagctccagtcagacgctgaacgagctgactaggtgcatccgtactctcctcacccagacgagatacaagcgtaggaagcacgatcagcgctaccaggcgattcagcaagaggtcgaagtcgatcgctacgttgatgccatgtttgatctctacgcccggatctgcgtgatcagggttgatctgtattaccgtgcagaggtccagtcgagattgcgtgtggagcgcgtattcgacgatcttaatcggctgatagctgagcgtgaacgtaacctaatttttgaccatgaaatcggctacatctgcagcgttgaacaaggcgaggatcggggctatcacatccatgcggcgttcttcttcaacggtgctgaagtgagtgccgatatctacagggctcagcggatcggtgagctgtgggagcggattactcgtggtcagggctgcttcaacaactgcaacctcgaaaaagataaataccaagacaggttggggcttggcctgatccacaggcggaacctgaaggcgcgggctaacgtgcactgcgccatgcgttacctggtcaagaacgatcaacatctgcggctcaagccggtaggtgctcgttgcttgcgtaaggggcaggcaaggaagaaggtttccgggatgcctaatcgatccattcccagtcgagtccaactcatcagttag

SEQ ID NO: 362550 - DNA, 1185 bp, Pseudomonas aeruginosa
atgatcgaggacaagtggcgcccctggatgaatcagcgcggcgtggcggtcgccccgggcgagtcggtcagcaaggccggcgagatccgcggcgaagccgacaccgcgggcttcacccactactcgatatgggtctccgggctgtgctcgtttgccgtcaagaagtcctacgggtttctggccaagaagctgctggcggcgcaagtctccggcgaccctgccaagctgcaggcggtctacaacaccggtttcggcgagtgctacgccgaggcgggcgatgcgcccagctgggaggaggttcgagcccagtgctatggctacgcggccggcgagctgctgctcgaaccgctgcggatcttctgcactgtggacgtgcagaaaaaccgcctggtgtacgtgatacgcgcctggtacgccggcctcggctcgatgctcctcgagcacggcgagctctggggcgagaccgaccaggacgccgtctgggagcagcttagcgagctgatcgacaccgactacgacggccacccgatcaacgaggccggcatcgacatcggctatcgcgacgaccaggtctacggctttatcaacgagcacaaaggccgggcgttagccctgcgcgggcgcgatcgcctcgacaagccgttccgcaaggaagtggtcgaggtcgaccgcaagggcaagacgcgcaagcgaggcgacgcccgttgggcattcgactcgccactggccaagcgctgggtgcatagccgtttcgggcgccctgacacccgcccgggctggtggctgctgcatcagcaggtcaccgacgactactgcaagcagctggtcggcgaggagtggcgagagtctgagggcaagttcgaccaagtcggcgaaaaccactacctggactgcgaggctatgcaatacatcatggccatgcgcgccaagctgcaccgtcgcaaggcgggccagctgaccaaggcgcagctgcgcgaggcgatcaaggccggcccgctggccgatcgcctgcccgacgagcccgccccggtcgctgacgctgaccaggaggagccgcccgaggatctgcaggaagccgaggaggccgccaagccggtggccaagcccgcggcggcccgcaaggcagatgccccgaaggccaaggccaagtcccgattcaacatcatcaggaagccccggcggtga

SEQ ID NO: 362551 - DNA, 1875 bp, Pseudomonas aeruginosa
atgccgaagagctcgactccgacgagtagcgcgccgctgcctgtcattcgccagatcgaagggcagcagctgcagcgctcgcttgccgtggacatcggcaccctggacaccgaacagcgcaccgtcgaggtcgcggtatccagtgaataccccgtgcggcgctggttcggcatggaagtgctcgaccactcgcccgactcgatcgacctcacccgcctgcatgccggcgcgccgctgctcgaccagcactggcggcagatcggcgtagtcgagaaggcctggctggacggcgaccgcaagctgcgcgccctggtgcgcttctcccgcgggcagtacgccgaggagatctggcaggacgtcgccgacgggatccgccgcaacatcagctgcggatacctggtgcatgaaatggtgctcgagcgttcggagaacggcctcgatcactaccgcgttacccgctgggagccctacgaggtttccagcgtttccgtgcctgcagacccgaccgtcggggtggggcgctccaacgatgcaacaaccaacaccatcaccattcgaggtattgcaatgccgaagccgaacgaaccccaagacgacggtcagacccgcgagcagccggccgttaccaccgacccggtgctgctggagcgtcagcgcatcgccgacatcaacatcctgggcgagcgctacaaccagcgcgacctggccgccagcgctgtgagctctggccagtcgctcgaccagttccgcgccgtgctgctcgagcgcgccctgccgggccagccgaagccgctcgccccgcgcgccccgaaggacaacgagcgcgatctgccgggcttcgtgcgtgatgtttccgccgccggcctgggcatgaccgaaaaggagatggatcgcttctcgctcatgcgtgcgatgaacgcctacgccgagaaggactggtcgaaggcgggcctcgagcgcgaggtcagcctggccctggccgataccctcaagaaagaggcccgcggcttcttcgtgccgcatgacctgctcgtgcgcggtatgtcgaagggcgaagcgggcaagggcggcgagctggtggccaccgagctgcgcgttgaccagttcatcgacatcctgcgcaacaagaccatgatggccaagctgggcatgcgcatgctcggcggcctggtcggcgacctggatctgccgaagaaggtcaacggctccaacttctactggctgggcgaaggcgacaacgtaccgccgagcgacttcgacctgaccaccatcgccctgtctccgaagaccatcgcgggcgcgatcccggtcacccgcaagctgcgcaagcaggcggcgaagtcggtcgaggcgctcatcatcagcgacctggtcgagggcctgggcgttgccatcgacctggccatgctgcgcggtaccggcgccgacaaccagccgctgggcctgctgaaccaagtcggcctgccgtcggtgacctacccgattggcggcatcgactgggattccgtcgtcgagatggagaccaaggcggccaccttcaacgtcgagggcagcggcctggcctacctgaccagcccggtgcagcgcggcgcggcgaagaagacccaggtcttcgcgaataccggcgagcggatctggcaaggcggcgaggtcaacggctacgccgcccacgccaccaaccagatgccggccaacgactggctctatggcgacttctcgcagctggtgtgcggcctgtggggcgtgctggatctcaagcccgacccgtatgccctggctggcagcgacggcctgatgctgcgcgtcttccaagacgtcgacgccgccgtgcgccgcaaggaagccttctgcgtcggcaagaaagccgccgcctaa

SEQ ID NO: 362552 - DNA, 414 bp, Pseudomonas aeruginosa
atgtctaccacgcaagcccgcaccgccctggtggtgctgctgacggatctcaccgtgcacggtgacgtgatccccgaaaacaccacgctcgaggtcgagcgcgccatccgcaacgactggttcggctcgaaactgtgccgcgacgcgaccgaaaaggagattgccgagtatcgcgcccaggagggcggcgccgacggttacgacgagcagctgcagctcgaccaggcgcagctgatcgccgacatcgaggcgaagaagggcgacttggtcaccctgcagacctcggtcgagcagctgaccgagaagcgcgacaccctgcagaccgaggtcgacggcctgggcaagcagaagaaggccctggccgatgaagtcgcggccctggaaaaggccaaggccgcggcggctaagaagtga

SEQ ID NO: 362553 - DNA, 759 bp, Pseudomonas aeruginosa
atgagccttgaaactcaaattgccagtttggttagcgcttctaataatttgaccggcgcagtaaacgggaaaatgggtcagatcgacgcgaaggtggcccaagctgaagctcgcttcgatcagaatatggaactgatgaagaatcgccttccgcgcctggcggttacgcaaaacttcgtcatggagaaacaccctaccggaaactacccggataaattcgggtttcaccaagaactgacgtggacccatgtttcgaagatttcggcaaatagcgaagccaccgggcgtgatcctgctgatgttgcgcttttggcgcagatagaggcggacgtgcgggaacagtatccgggcttcatcatcaggaagtcggactactatcgaagcgcggtaaacgtatggcaattctcatggtcaaagcgagatgttgttaattcggtttataccgcatatccgagtgcagctgatggcgtccaaacatacggcgtttcctcggtgccaatgaattctttcttaacggttggcgcgtttgtcaaggtcgtggatggggaggtcactgggtcatgggcgaccggatgcgttaaagggaagtggcgttggtgtagctatgttattaacccgaacgactacttcgctaattatctgcaccttcatccatcgcgcgtttctaatagcggtgtagtgcagtgcatgttggttggggcgacgacaggtgttatctcaaaccccgttcattggggcgcaatgatgtctttgggttaa

SEQ ID NO: 362554 - DNA, 237 bp, Pseudomonas aeruginosa
atgaaaccggtattccctgattccgagctgcacccacttgtaaagtgggacctgatccgtaatgcgcgcgacgccgagctggccgaaagtgactatgccgcaatgcctgactatccgctgagtgaggtacagcgtggggaggttggagcatatcgccaggctctacgtgacatacccgaccagggccaggacccggatgcggttgtttggcctgaaaagcctgcctatctgaaatag

SEQ ID NO: 362555 - DNA, 150 bp, Pseudomonas aeruginosa
atgtccgcacgcgactataccaccgcggcaagcctgccgctgcacctggcgcgagatccgcgctatcgcgacctggtgcgccaatttgccgagcagcaatgcttgacggcctggcacggcatcctgcgcatgatcggggaggcagcctga

SEQ ID NO: 362556 - DNA, 291 bp, Pseudomonas aeruginosa
atgaataccatcctggggaccgcctcgagcaccatcgagccggaagacgtccaccgcgtccgcgcaatcgccgcggcgctcctcgagcaccaaggccaccgggcgtgcgagctgctcgacctggtcatcacagatgagaccccggcgagcaccgtcacgcccagccgcgctcgagccgagagcgccgtgcgcctggccgcgaccatcgtcaactacctgcgcggcgagtggggcgtcgagaccatcgaccacgagctcctgcaggcgctgcgccgggagaccggtctatga

SEQ ID NO: 362557 - DNA, 165 bp, Pseudomonas aeruginosa; identical to SEQ ID NO: 353825

SEQ ID NO: 362558 - DNA, 924 bp, Pseudomonas aeruginosa
atgacgaccgccgttgacctgttcgccggcatgggaggctggtctaccggcgcccgcatggctggcgtcgacgtgctatgggcggccaaccactggcaggccgccgtcgaatggcacagcgcaaaccacccggacacgctccacgtctgccaggatctccaccaggccgactggtcgcgcgtccccgcccatgacctgctgcttgcgtcgccgtgctgccaggggcacagcaaggcccgcgggaagctgtccggcaatccgcagcacgacgcctccaggtctaccgcctgggcggtggtctcggccctcgagttccatcgcccagagggcgccctggtcgagaacgtgcgcgagttcttaagctgggccctgtacccggcttgggcaatggccatcgaggcgctcgggtactccatcgcgccccacctagtcgactgcgccgacctgggcgtgccgcagaatcgcgagcgccttttcctggtcctgaccaagagcagggcgccgctgctcctgcagctcccgcgcctcgagcacacgcccgcctcgagctttatcgacttcgaggccggcacctggtcgcagatccacaagcccggccggtcgcccgccaccctgcagcgcgtagtgaatggtcgcctggcgttcggcgagcgcttcgtcatgccctactacggaaagggctctggcactaccggccggagcctggcccgcccgatcggcaccctgaccacccgcgaccgctgggcagtcgtcgacggcgaccgcatgcgcatgctgacggccgacgaggtgctgcttgggcagtcattccccgccggcactaagcgcccgccacagcacgccctgaccgtccacctggccggcaatgcggtgccgccgaaagccggcaaagagatcatcgacgccttccaggctgctgcctga

SEQ ID NO: 362559 - DNA, 603 bp, Pseudomonas aeruginosa
atgcaccaagcaccccacgcaatcgcacgccgctgggtggcgcagaatgccgccatcctcgacacagaaacgactggcctcgatggccaggccgagatcgtcgagctcgctgtcgtcgcctgcagcggtgagaccctcctgcagaccctggtcaagccgacacggccgatcccgccaggagtgaccgagatccacggcataaccgatgccatggtcgcagacgccccgagctggcccgaggtacaggcccaactgctgcagatcctcgagggccgccaactggtcatctggcacgccgactacgacctacgcctgatcgagcagagcgccgcggcgcacggcatcgaggcgcccgatctgcacgccgagtgcgcgcagtcgctctacaagcacttctggcatgagcccggcgaagatccgggcagcgtgcggcggcagcgcctgaccaaggccgcagcacagcagggcgtcgagatcaccggccaggagcaccgcgccgaggtcgactgcctgaccaccctcggcatcatcctcgcgatggccagcgagcacggcagcaggtggcaggcagccacagcaaccgaggaagctagccatgcttga

SEQ ID NO: 362560 - DNA, 147 bp, Pseudomonas aeruginosa; identical to SEQ ID NO: 352822

SEQ ID NO: 362561 - DNA, 366 bp, Pseudomonas aeruginosa
atgaagaacagcaccaagatcgtactcggccttggcgtcgcggcgatcgccatcagcgcatacaaagacctctcgggccgagagaccaacgccctggccaacgcccacaaggcggccggctacgatcccgcgtgcgaaaccctgcagaccgatggcgagacctgggcgctgtgctcgatcggccgcggcgcgccggccgtgtggctgcagcgcggcgaggcctgggcaaccggcaacggcgtggcccagggcgtggccaagcgcctcgaggagcgcggaccaggcccctaccagcacctgccgcgcctgtacgtcgaccgcgaacaacccgtcatcatgccggcgctggtgcgcgccaagctgtag

SEQ ID NO: 362562 - DNA, 288 bp, Pseudomonas aeruginosa
atgtctatgtttaaccccccgcacccgggcgagactctgctcgaggacgtgctgccggcgctgaatatgaaggtcgccgagtttgcgcgccgccttggctatggccgcgagcacctgtcgcgcgttgtgcacggccgggcgccgataagcccggacctcgcggtacgccttgagcgggccggcattggcagcgcgcggacctggctggcggtgcaggctgactatgacctatggcaggctgaacgccgtgagcagccgccgattgagcgcttcgccaagatcgcctga

SEQ ID NO: 362563 - DNA, 279 bp, Pseudomonas aeruginosa
atgattaagagcttccagcacaaaggccttcgggtcttctacgaaaccgggtcgaccaaaggcatccgggccgaccatgccaagcgcctggcccgcgtgctgccctttctggatcgcgccgccgctccggcagacgtggatttcccgggctggcggcttcatcagctgaaaggtgacatggccggctattggtcgatcaccatcagcggtaactggcgggttgtcttccgcttcgtcggcaccgacgtagagctggtcgattacctggactatcactga

SEQ ID NO: 362564 - DNA, 1020 bp, Pseudomonas aeruginosa
atggccatcggctacaccccggcggtggagatctacggcgccaacgcggcgctgattaacgcgcgcctggtcgattgggagcacgtcgacgccgccggcatcgagtcggacaccctcaagctgacggtgaacatcgagggtctcgaggggctgcccagcgtcgacggcaagatcggcctgcgcgtgggctacaaggaaacgggcctggtcgacaagggcgagttcgtcgtcacgcgcaccacgccccagctgttcccggccctgctgctgatcgtggccaccgcggcgccgttcaaggtgaaggacgagaccggcttcaaggccaggcgctcggccagctacgccatgaccacgctcggccagatcttccgccagctgaccaccaagcacggcttctcgccgcgcgtggcggccgagctggacgcgatcccgatcgttcacgtcgaccagtcgaacgaaacggacatgggctttctgacgcgccttgcgcggcgttacgacgctgtaacgaagccggtcaacggcctgtatgtgctggcccgtcgcggccaggtcaagtcgctgagcggcaagccgctgcctccggtcaccctctcggtgacgaaggacaaccggccgggcgatcgcgcgttcatcgcggcgagcatcgaccaggacagccgggtccgcttcaagggctgcaagaccacctggtgggacggcagcgccggcaaggaatgcgtggtggaggtgggcgaggcgcccttcaagacggtgcgccagcggtaccaggacgaagctgaggcgaaggccgcggccgagggcgagcaccgcaagacgaagcgcgaggcggcgaagttgcggatcgactgcccgggcaacccggcgttcggtgccgaggggctgctcgagctcgacgacagctggcccagcttcatgcgtggcacctggtcgatcgacaaggtgaccgccagcggatcccgccagcagagctaccgctgcactatcgaggcgtcctaccccgacgggaggcaggagtga

SEQ ID NO: 362565 - DNA, 2559 bp, Pseudomonas aeruginosa
atggctgacaccaagtcgaagtactcgctgcggctggccgccgtggacgcctactcgaagacgttcggcgacttctcgaagaaagccgagcagctgcaggacgagatcaagggccagcgcgccgagctcgacaagctgaatcgcgccgctcggtctgctgacggatacggcaagctgaccgagaagctcgacaagaccaaggccgccctgcaggcggccagggtcgagcaggccagtttggccaagacgcaccaggtcgccaccgccacggtagcgcgcctcgagcaggaatatggcctggccgcggccacgctcaaggcgctggaaggcgccgaggcggccagcacggctcaggtcaaggcggcccgcgtcgagcagaaccggctcggccgcgagctggccagcgccacggccgaggtcaagcgtctggataacgcccaggacaagaacaccgccagcctgcgcaccctggaggcggcgcagcgtgctgagcgtaaccagctcaagggtctgcaagccgacctgaccaaggccggggtggacaccagccagctggccgccgagcagaagcgtctcgagacggccacggaacgggccagcgcggccctgcaggcgcagcgcgcacggctcgaggccgtgagcagtgcccaggggcgtatcgacgccaatcggggcgctcgcgcggatctgcgcgggcagatgctggagaccgccgccatcggctacctggccgccaagccggtagatcaggcgatgaacctcgaggtggccatggccgacgtggccaaggtcatcaacttcgaggagggccagcgcgaggcgatggcgcaggagaacctgcgcatggccagcgaccggctgatctcctcggccggcatcaccgcggtggatctcgccaagatccagtacgccgcaggccagtccaacatcggcggcgacgagaagaccagcgagggcaaacagcgggcggtgatggagttcacccgcgatgcggcgatcatgggggcggcgttcgacatcgacgcgcagacggccggcgaaactatggccggctggcgggcctcgatgaagctcgaccgagccgggacgctcgacctggccaacgccaccaaccacctggggaaccagttcaacgccacgccggccgatatcgcagcagtggttaagcgctacggtgcgatcggtagcgcctcgggtctgagtcctgagcagagcgcggcgctgtcgacggcgttcctcaacccgggtaccgagaaggaaatcgccggcaccggatttaagaacttcctcggtgccctgaccaagggcaaggcagccaccaagggtcagcgtgagacctgggatgctctgggttttgatcccgaggatctggccaggggcatgcagcagaacgcaccggagacgatccggtcggtgctgcaggcgctcaagcaacagcccgaggaagagcagaacgcgctggccacccagctgttcggctccgagtctatcggcgccatcatgccgctgctgggcaacctcgaggaggtcgaccgagccttcgcggcggtggccaacggcgccgaccgcgccggctcgatgatgaaagaggccgagggcgtggccagcacctcgcgtgccggctggaacggattcgtggccaagctgacgcggctatcgaccctggtcggtaccgccatgctgcccgccctggacgccgtcctggtgcccctgggcgccctggttgacggcctgagctgggcggctgagaccttccccaacgtgacggcggccattgcggtggccggtggtgcgctggcggcgatgaaggtcggcgcgctcggtctcaagttcgccggcttgctggttggccaggccttcaacaaggccgggctggctcgggccaagctcgacgccaccaccgcccgcacggcggtgacggccgacggcgcggtcatgcgcctgaacgctgccatggcccgcctgggcactggcggcggggtcggcgatctcggcggccggggtggtcgcggcggtcgaggaggccgcggtggtcgcctcggccgaggcctgggcatgaagggcggcggcgcgctgatgctggcggccggcgcggtggatctcgcccaggtggtgatggatgacgaatcgaccggcgaggactacggcgaatcgattggctcgaccgcgggcggcatgggcggcatgtgggccggtgctgccgcaggcgcagcgctgggctctgtggtgccgatcatcggtaccgctattggcgggatcctcggcggcgccctgggcgcctggctgggcagcgaggccggcggcgccctgggcggcatggccgggtccgcggtcgatcgcctgcgcagccccgacgaggtcgcggcggcggtgaccaatgccgacaaccggcagatcaccttcgcgccccagatccaagtcaacggcgccgaccaggccaccagcgaggcgctggccaaccaggtgatggcgaaaatgcgcggcgagtttgtgccgctgatgatggccgacccgctcgccgtgcggcgtggggcggcgctgaccgatgggagtgactga

SEQ ID NO: 362566 - DNA, 201 bp, Pseudomonas aeruginosa
atggcagaccgcaagaactacaccgtgctcgtgccctaccccaaaggcggcggccactggacgcgccagggcgataaggtcgacctgctcgaggtcgaggccctggctctacgccaggccggtcgcatcaagctgaccgccgagctcgaggccgaacaggccgcgccggctaccaccaagaaaaccatcgctaaggactga

SEQ ID NO: 362567 - DNA, 237 bp, Pseudomonas aeruginosa; identical to SEQ ID NO: 362554

SEQ ID NO: 362568 - DNA, 759 bp, Pseudomonas aeruginosa; identical to SEQ ID NO: 362553

SEQ ID NO: 362569 - DNA, 657 bp, Pseudomonas aeruginosa
atgagtctgctaacccagctcgagacgctgctcgcctcggtcaacaacctgatgggcgtgatcgacggtaagctgcgtaacaaggccaacaaggccgagacctatacgaagacggaattggccgacccgcagctaaccctcggtgccaatgcggagacggcctcgaagctcaaggtcgcacgcttgctgaccttggctggcgaggcgaccggcgaggtcggtttcgacggatcaggcaacgtcactctgatggtgaccgtgccggggctgctggataaggcggacaaggtcgacaccttgaccccggcgcagatcgatgcccgtatccaagccctgataggagcggcccctgctgctctggacaccttcaatgagctggcggcagcgctgggcaacgacccgaacttcgcaaccagcatggccacggcgctggcggccaaggctgaccaggccaccacctacaccattacccaggccgacggaaagttcctgctcaaggcgggcaaagcggcggattcattcctgctgggtggtaacgccccggtctattacgcctcagcggccagtgtggccgcactagaggcaacggttggcgatgcattccagcgtctcgcggattccttgaactctggcgccgcgcaaataaacgaaagatag

SEQ ID NO: 362570 - DNA, 348 bp, Pseudomonas aeruginosa
atgaacgggccgactctggagctgatcgagggcaccaccttcggcttcgaggcgacctggtcggacagtgcaggcgcaccgatcgacgtcaccggctgcgcggctcgtttcgtgatctgcccagcggacagtgctcgtccgctggtggagtgcagcaccgaggatggcggcatcagcttgggcggcgccgcgggcacggtggcggtgagcctggccccgggcaagacggcgggcaggcacagcacgcaatggcagggcgcgcgctatgagctgcgggtcaagtaccccagcggtgacgtctacagcctgttgcgcggcaccgtggcgttgtcgccggggctgctatga

SEQ ID NO: 362571 - DNA, 645 bp, Pseudomonas aeruginosa
atgagcgaggaaaacgccccgcgggcgagcctgctgccggtcaaccgttcggcactcgaggccggtctcgacctggctttcgcgcaactgctcgagcgcattgagccgccattcccggcgctgatggatccgactttgactccggccgagttcctgccgtacctcgccgcagatcgcggcgtgggcgattgggatcccgaggcgccagaaagtgagctgcgtttgaccacggcgctggcctgggcgatcaagcgccaggccggtacgcgccgcgccctggtgcatgcagtcgagtccatggagctcgaggccatggtcaccagctggcacgaaacgccggccggcgtgccgtacaccttcacggtcgaggcgacggtcggccggccctggctgccgggcgacttcccgcggctgtggcgacgcctgaacgatgccaagagtgagcgcgataacctcgacctgatcctggtgcatgagaccagcggaggcttgcgcgccgctgctgcagttggcacgccgctggccatcggcgacctggctctggccggtgcgctgcccgagctggatctgcgcggcgagctgggcggcgcgggtgcggcgcagcactacaccatcaacgattacgacctcgaggcgcagacatga

SEQ ID NO: 362572 - DNA, 525 bp, Pseudomonas aeruginosa
gtggcaggcttccaactgaatttcgaggtggacggctggggcgccgtggaacgcgccctggccgacgccccgcggaagctggacgttgccgccgcgcgggccttgcgcaagacggcgcagtggctgcgcacgcatagctcaagggagatcgcccgcgagctcggcatcacgcaaagcccgatccggcaccgctacaacatctacagccagtcgacggcccgcgaggtgaagctctgggtcggcctgcagccgatcggcgttcactacctgggcacgcccaggcagacccgcacgggcgtgaaggtcggccaccgggagtacgacgcggcattcatctcgccgatgaagtccacccagcgcctggtcttccgccgcaagggccgcgagcgcttgcccatcgagaaggtgaccgaggactgggaaggcccggcagtcagcgccctggagcgctgggagcgccgcgccctggagcgcttcatggagctgttcgagcaggaggcgcgctatgtcctacagaccgcttaa

SEQ ID NO: 362573 - DNA, 1041 bp, Pseudomonas aeruginosa
atgtatgacattgacgccgttgaccttttctgtggtgccggtggactcaccgcaggcttgctcaagaccggtatcagtgttcgtgccggatacgacattgatctcaattgtgagtacgcctaccatgagaacaatggggccgagttcgtagcggagagtgttgctgtcgtcgaatcccaggatgtggctgcttggtatcgccctgggcgaatcaagctattagctggttgtgcgccctgtcagccattctcaacgtacaaccatggtcgcgacacgagtaaagatatcaaatggcctcttttgtactctttcgaaaggctcattaaagacattaagcctgaattagttacgatggagaatgtgcctgatgtgaccaaacacaaggtctaccttgattttgtagaaggtctgcgaggcgagaattaccatatttgggctggcaccattcgatgcattgactacggtcttccccagcatcgacgacgccatgttctactggcctcaaaatttggtcctatttcgatgatccctaagactcatgcgggaaagcccgttaccgtcgcagaggctatcgggcatttaccgaagattgcagcaggggagtgtcatcctaaagatccgttacatcgatcggctaccctcagcccgacgaatctgaaacgtatcatggtatcgaagcctggaggcacttggcacgattggccggaaatattgcgggccgcttgccatcgcaaagctagtgggaaaaccttttctagtgtttatggtcgcatgcgtggcaacgagcctagtccaaccatgaccactctctgctatggattcggcaatggtcgcttcggtcactacgataaggagcaaaatcgtgcaatatcgctgcgcgaagcagcaattctccagtcttttccggatgattatagatttatgccaccggaacaaatcaccttcaaggcggttggtcgtatgattggaaatgcggttcctgtacgtctcggcgagattattggcctcagcatccagcgtcatcttgacgagttgaagtag

SEQ ID NO: 362574 - DNA, 2040 bp, Pseudomonas aeruginosa
atggacaccccgcaaagtaaatctcaaagacaaccattaaagataaatatcgacctaaacgttctaaaccatttaggaatcggcctctacagtaacaccccagcagttttgacagaaattgtcgctaatgcctgggatgcagatgcgctcaaagttgaaatcaacatagctccactgaaagaccaaatcacaattcacgataacggttgtggaatgagctatgaggagctccaagaaaaattcctcacagttgggtacgccagaagagacaaaggaaatgcaataacgccgcaagggcgccagtgcatgggcagaaagggcattggtaagcttgcgatgttctctctcgcaaacactatccgtctagtttcacgaactcaaaacggcgaacttaatggattcattgttgacgttgaggatctgaagaaaaaaatcaaagtaggtgatgaataccttccgatccccattgaaaaattcgaagagcatgaattaatttcccagggaacgattatcactcttgaaaagctcaacaaacaagtaaacaagaccgaaggttacctcagaaaacgcatcgcaagacgctttagcgtcctgggctccggctataactttgaagtaattctaaatggaacaccggtcaccttacgggatcgaggcttctactctgacatccagtttctatggacctttggagagtaccctccagagcttccggagttatgtaccaacttagccaagaaataccactaccattttgaaggcgatctatcttctggaaacaaagttaacggatttattgctagcgtcgtcactccagagcaactccgaagagacaaagacaacaacaacacgattacactattggcaaatggtagaatattcgaagaggacatacagaaaagaatcgatgactctagagtatttaacagctacctagttggcgagcttcaagcaaaccatcttgatgcaaacgaacttccggatattgcagtcagcagtcgccagggagtgcaagaaaacgatcttcgcttcaaagagtttattgcttacatccaaaccaggctaaacgaaattgcaaaaatgtgggatgactggcgccgagaactaggggccaaacagatatctacggaataccctgctattcaagaatggctaaatggattggatagagcggttaagccgcttgccactcgtctcattggcaggacgaacacctttaggttcacgggaaaccctgatgagcagctccgacaaaaacacgaagtcttaaaggctcaaatagttgcattcgaaaagctacaagttcaaaaaaatattgcctcaatagattctatagacatagaaaaaaacgtatcagacttcagagaagtgatagtttcaattgaagacattgaagcttcaatgtatcacgacatagtccgacagagattagcagtaattaagaagcttgatgctcatcagcaagacgccgttaaagaaagagtggttcaagatcatatttacgaacacctgtggctggtagactctagctgggagtataagcagcagcccacagacttcgaactaagacttagcgaatatctaaaacaggaatgcccagactccgaggaaggagcaagacttgatattggctatagaaccacagctggaaggtatgtagtccttgaacttaagcgacctggactgagagttaacatcgacaatttgatatctcaaggagaaaggtactccttaagtctaagacgttacttccatgaaaaccctggctcttgcccaaccccaggaataatgccctcaatcgacattatatttatcgtagacaaacgccctacgattccggagttcagcgctgattacactaacaaaaaacttgataacctcaacgccaaaataacaacatataaggacctagttaaacaatccaccgatgcttatgaagacttcttgaaagcatccaagagagtcgacagagtgagaaacatcatgatttcacttgataagattgaaaatggcgaagagcaaatcaccgaaacaacttag

SEQ ID NO: 362575 - DNA, 861 bp, Pseudomonas aeruginosa
gtggatccgtccggcctggccggcgagcacctggtggagcccgtcgacctcgatcacgtccaggagatggccaccggcgccggtggcgtcgaggacctggtgccgtggatccgtccggcctggccggcgagcacctggtggagcccgtcgacctcgatcacgtccaggagatggccaccggcgccggtggcgtcgaggacctggtgccgtggatccgtccggcctggccggcgagcacctggtggagcccgtcgacctcgatcacgtccaggagatggccaccggcgccggtggcgtcgaggacctggtgccgtggatccgtccggcctggccggcgagcagctggtggagcacgtcgacctcgatcactcctgcaggtggctatcggcgccggcggcgccgaggacctggtgccgcggatccgtccggcgcggccggcgagcagctggtggagcccgtcgacctcgatcactcctgcaggtggccatcggcgccggcggcgccgaggacctggtgccgcggatccgtccggcgcggccggcgagcagctggtggagcccgtcgacctcgatcactcctgcaggtggccatcggcgccggcggcgccgaggacctggtgccgcggatccgtccggcgcggccggcgagcagctggtggagcccgtcgacctcgatcactcctgcaggtggccatcggcgccggcggcgccgaggacctggtgccgcggatccgtccggcgcggccggcgagcagctggtggagcacgtcgacctcgatcacgtccaggggatggccaccggcgccggcggcgccgtggacctggtgtattagaaggggaggggggctatcagaatagatag

SEQ ID NO: 362576 - DNA, 891 bp, Pseudomonas aeruginosa
gtgggccttggcgtcggccaacgtcgccgcgtcgccatcggcgcgggctttcgcttcggcgtccaccagctgctgcgagtgctggttcgcactcgccagggtctgcgcatcgccatccgctcgggcctgggcttcggcggccaccctctgatcggtgtgggccttggcgtcggccaacgtcgccgcatcgccatcggcgcgagctttcgcttcggcgtccaccagctgctgcgagtgctggttcgcactcgccagggtctgcgcatcgccatccgcccgggcctgggcttcggcggccaccgtctgatcggtgtgcgccttggcgtcggccaacgtcgccgcatcgccatcggcgcgagctttcgcttcagcgtccaccagctgctgcgagtgctggttcgcactcgccagggtctgcgcatcgccgtccgccctggccttggcctcggccgcgtcggcatcttcccgggctttcgcctcagtcttgatcgcgctgtcagtgtgattgttcgcgctggccaacgtcgcggcgtcgccggcgtggcgggcctgagcctcggccgccacttgctgattggcatgatcgatcgcttcgccgaggacgcgagcgtcctcttgtccgcgtgtttgcgcttcgttggccacagcctggttcgtgtggttcgtggccgtgccgagaacccggttatcctcgtctgcccgcttctgcgcctctgcgctcacctgggtgtcggtgtagcccttggctgcggccagggtcgcggcgtcaccgtcctggacctggccgagattcgatgcatcggtccgcgcggatcctccggcaacgttggtgatctgtcgttcggcgccggcggcgccgacagacacggtgttgtcccggttgttctgtga

SEQ ID NO: 362577 - DNA, 1356 bp, Pseudomonas aeruginosa
atgagttctgaatggagcttcctggcgctggaagattgcctcgatgctctaatcgactatcgcggtaaaacgccggaaaaaactagttccggaattccgctgatcaccgcgaagattatcaaaggcggtcgaatcgagaagccgaccgagtttattgcgatagacaattacgactcttggatgcgccgcggaatccctatggaaggggatgtagtgctgaccgtcgaggctcctcttggtgaagttgctcagctcgggcctgaaaaggttgctcttgcgcagcgtgtggtcactttgcgaggcaaaaaggggctgttggataacacctaccttttgtatttgctgcaaacggaagagatgctcgaccaattgaaggctcgtgcaactggtacgactgtcataggaataaagcagagcgagttgcggaaggttcagctctcactgcctccccatgatcagcaaatagctgctgctcaaatcctcaaggcccttgacgaccgcatcaccctgctacgcgaaaccaacgccaccctggaagccatcgcccaggcgctgttcaaatcctggttcgtcgatttcgaccccgtgcgcgccaatgccgaaggccgccagccggaaggcatggccgccactaccgccgccctgttccccgatagcttcgaagagtcagagctggggttggtgccgaaggggtggagcttggttcctttcggtgagctgttggctcacacgatcggtggtgattggggcgatgagtcgccaagcgacaaaaatgacacccgggtagcgattatccggggtacggatattcctgatcttcaacaaagcgctgttaatcgagttccaattcgctacacgtcctccaaaaagctttccacccgaaagctccaagatggagatcttgtcttagaagtttctggagggagcaaagatcagcctacggggcgagctctatacctgacggatcacttgcttggtcagtttggctgcccagttgagactgctagtttctgtcgcctgcttcggccagcaagcagagatattggcgttctgctgggccagcagctgacctatatctactccattggtaagacgtgggagtatcagaaccaaagcacagggattgcgaacttccagactgctcattttctagagagtgagctcgtagtagtgccctctcctgaagtgctttcagaattttctgagatggttcgtccgatgattgatcgagcccaccactctcagattcgtgagctcacccaactccgcgacacccttttaccccgcctgatatccggccaactacgcctgccggaggcgcaggcgctgctgaacgatagggatattgcccaatga

SEQ ID NO: 362578 - DNA, 1206 bp, Pseudomonas aeruginosa
atggttgcacctaagactcttatggatagaatgagtaggcccatacaaatttatttagatagtagcgactattccaggttatctctcgcagaaacctgtccagaggttatggagataaaagaaactcttctaaaatatgctagagatgggcgggttaacttcaggtactccgcgattagtgtgctagaggcagcccctgtaaggttggaagatctagatcttggttgtagccggattagatgtatatatgagctttgcgggaagtattcactcatagaccctgaaagtttgcttcgaaaagaaattaacaatttaattaaaggggcttcagcagcggttgaggctaaaagtaacaaagggtactggactccatcctttaataatattgatcttataagcatgaaggaggttaaggaaattataagggctgagatcagaaaagagataccaggtctttcaaggaatcagatgcggaaaatgatttctagtaagagtgggattgtttctaagttaaatggtgatattttctctgaaatgtcctctagatacccggttaataatgctgtttttatggtcttgaaaagatacatacttggtagtgccactcacaagcaagtagttgacgccttgaaggactcatttgctgagctggatttgtttgccaagttatatgagactcattggagtgatgtttcaaagccaaccggttggttacgagtggaaggtagaaagttgagagaggccttcgatacctttcagcaggaaataaaatcactgtatttaaatgcagaaatgcatgggtttgatattggttttactaaaggtgttttaaaaagtgagcgagaaaaattagagaaaaaatttataggtaatgttgtagatcggattacagcatccgtggcggggagaaaaattagcgtatccccaccaagctgggagctttcaccaagtctattaagtatgatttctctatttatagaaaaaataagaattggcgcaaataatttaaatataaaaaaattagcaaaaaatagcgattttggggatgtggctcacgccttgtacctgccttatgttgatgttttcagatgtgacgccgcaactggagaattaatccggagggtcaatcctccactaaataccagtgttgtctctaagctggacggccttattcctgagatcgaaagaaaattgtcctcaccctaa

SEQ ID NO: 362579 - DNA, 2043 bp, Pseudomonas aeruginosa
atgacgaaaaatattctttccgaacttggtctcggcatcgactcgcccctggcggttcctggcacgccgaattaccgtccgccgtgctggccgccccagcgtgattggccggtcatcatagatgccgctggccaggtagtgagtcgttggggggatgccatctggcggctcgatccgtgggcgggaaaaccggtcactctcaatttcggagatggcccagctaagaaacatgccgccgcgatcgatcgtgcgaacgccgatttactgcggaccgttatcggttggtggctgtacggccccaatggagcccgtggataccgagggctgaaaacgcgcttcgaccagatgcgtcggctattcgtcttgtgtactcaagaaggcattctggcttccgaactgagtcatttcccgcgcgtggcagatcgcctcccggacgtgctccaagcttcccgggccggtgagtttctgggattgctgcacgatctgtacgagcggcgggatgcgctgggtttcaccttgctggatcgcggaggcttggcacgcctcgcagcggccatgcccgatcatcagaaagcccagacaccctatatcccgccccgtatttggcactatcaagtcactcgcttgcgcgaatgcctggatgactttttgtcccatcgagcacaaatcgaggaatgcttccgcttctgtgtggatgcctatcggcacaactctgccaatctcgaaggacaagccaggcctcgatccttctatccgtttcagtggccgtcggatggaacaagcggccagcggggggccgggaatcggtactatggcccattcatcgacaccgcgcatcggtttggcataggggagctattggggcgctggctgggcgtgagcaacgacgaaatccgtgttcaaaacttgagtcgctatctgcatctcgtgagccgagcaggcttgagctatctgctgaatttcagcctcatgcgagtcgaagaagcgtggaatttgcaggccgattgtctgcaaattgaacgcgatccgcggtttggcgacatccatgtattgcgtggacgaacgaccaagacgatgtcagatgctgaggccctttgggtgacgtctccttcagcgaaggtggcggttgaagccatgcgtgtaatcgcagacctccgcgcagaatgcgccttgccccccggcgcacgttcagatcgggaagatttggccaagcgctatttgattgattacatgcttgagccttggggaacgaagttcaccaaaatcaaccttgcgcttcgcccgacgatcccgagctatgccaacgcgcttcagtcgttcgacaagctgttcgattctgagcaattgcgcattacaccggaagattttgaactggcgcgattggtgacgcccacgctgacagacgaatttgcggtcggcaaaatctggccgttggcctggcatcaactacgacgaaccggcgcagtcaatatgcaggcatccggcttggtcagcgacgcttcattgcagtttcaactcaagcacgtcgccagagcgatgagtctctattacggacaaaaccattccagggtacggctggaagagaaggcccatacctactatgtccgcaccatgtacgaaaccttgggtaggcagctgcaacagctggcgagcaaccgattcgtcagcccccacggtgagaagcggaaatctgagatagtccgactgatctcagccgctgatgccaagaaagcgatcaatttggccaagaagggaacggtcactcatcgaccaattttgctgggcatctgcaccagtcgaaccccctgtccctatggcggcatcgacaacatcgctcgctgcggagggggcgactcccccggagagcccaaaccgtgtgctgacgtgctgtacgaccccgagcaactcgacgaagtcgaagtgttggaggcggtattggatgagcgcctggccgctgctgaggtaggcagtccgctgagagcttcacttaaagcccagaaacgtagtgtggagaactatcgccatgtcatccggcaaacatga

SEQ ID NO: 362580 - DNA, 273 bp, Pseudomonas aeruginosa
atgcgtaacgccatcacctacaccgcccttgctgccttcctcgccctgggagttgcgtccgcgggctttaccgaagaggccaaagctcccgctcaaagcagttcctccacaacgacgggtgaggacatgcacatgatggacggcaagcagatgccgatgatggacatgatgcaggagatgtccaccatgatgaaaaactgcaacgccatgatggaacacatggacaaacacgcgggccaggaggctccgaaggacggcagcaaggcgcagtag

SEQ ID NO: 362581 - DNA, 906 bp, Pseudomonas aeruginosa
atgccactgaaacaaacgctacaccgagcgcttccgctcggccttctggccgccttcaccctgctcagcgcctgcggtgatgcggcagtcaccctgatgcacgtgcacggcctggccttcagcccggacggtcagcagttgtccattcccagccaccaggggctggccgtctacaacgcggggcactggagcaaggccgccgggccggcacacgactacatgggctatgccgtgacgcgccgggcgatctacagcagtggtcatccggcccaagggagcggcctgaccaacccctttggcgtgatcaagagcagcgatgacagtcgcacctggcagcagctgggcctgcagggcgaagcggacttccacctgctggccgccggtttcgacaacggggcgatctatgttttcaccggccatccgaactcgcgcatgagtgcccccggcttgtacttcagcctgaacgagggcgtcgactggcaacgcgccgccgcgcaggggatcgctgaagcgcccgtcgccctggcggtgcatccgaccgacagcaagacggtcgccctgacgaccaatgccggcatgtacttgtcacgggatgccggcgagcacttccaggccctcgcccaaggcgaacaggctttggggctcgccttcgctctggatggcaatagcctctggttcggcagctacggcaatgtggcgaagttgtcgaaagtggagctggcgactggcaaggtcacctcactcggcatgcccgagctccaagaggatggcgtcgcctacctggcgcagaacccgactcagccgcaggagtgggcgatggctaccttcaagcgcgacgtctacctgtcacaggatggcggcaaatcctggcgcgcgattgccaaggccggccagacgctggaatga

SEQ ID NO: 362582 - DNA, 366 bp, Pseudomonas aeruginosa
atgaagaacaccctgatcgctgtctccagtgtggtggctgtgctgtcctcttcggcgttcgccgacgacatgccgggcatgaagatggacgccaaatccatggcgggcttgccgatgaaacaggcggcggagcaaatgccaaccgcccaggccaccggcacggtcaaggccatcgacaaccagaagcatatggtgaccctcgcacacagtgccgtaccggcgctgcactggccggcgatgaccatgggcttcaaggctacagctgagcaactcaatagcctgaaggtcggcgaccgcgttgcgttcgagttccgcgccgacggcatggacgcgaccctcgtgtcgatcgcaccgatgcagcaatag

SEQ ID NO: 362583 - DNA, 3159 bp, Pseudomonas aeruginosa
atgatcgccgcgctgattcgctggtcggtggccaaccgctttctggtcatactggccacactgttcgccactgcctggggcgtctggtcggtgcagagcacgccgatcgacgcgctgccggacctctccgacgtccaggtgatcatccgcacgccttatccgggccaggccccgcagatcgtcgagaaccaggtcacctatccgctggccaccaccatgctctcggtcccgggggcaaagacggtgcgggggtattcgttcttcggcgacagcttcgtctacgtgatcttcgagaacggcaccgatctgtattgggcccgctcgcgggtgctggagtacctcagtcaagtccaggggcgcctgccggccaccgcgaaaccctctctggggccggatgccaccggggtcggctggatcttccagtacgccctggtggaccgtagtggcgggcacgacctggcgcagctgcgcgccctgcaggactggttcctcaagttcgagctgaagaccctgcccaatgtcgccgaagtggccaccgtaggcggcatggtcaagcagtaccaggtgcaactcgatccggtccgcctggccagcctggggctgacccaggacgcggtgatcgaggccatcggcaaagctaaccaggaaaccggcggcgccgtgatcactctggccgaagccgagttcatggtgcgcgcctcgggttatctgaagaccctggacgacttccgcgccgtgccactcaggctcagcaccggcggcgtgccggtgaccctcggcgatgtggccaccatccagcaggggccggagatgcgccgtggcatcagtgagctcgacggcgagggtgagacggtcggtggcgtggtgatcctgcgcagcggcaagaacgcccgcgagaccatcgccgcggtcaaggccaagctgggcgaactgcagaagagcctgccggccggggtggaactggtcaccacctacgaccgcagtgggttgatcgatcgcgcggtagaaaacctcagtcacaagctgctggaagaattcctcgtggtcgccctggtctgcgcggtgttcctctggcatctgcgttcctcgctggtggcgatcatctccttgcccatcggtgtgttgatcgccttcatcgtcatgcgacagcaggggatcaacgccaacatcatgtccctgggcgggatcgccatcgccatcggcgccatggtggacgccgccgtggtgatgatcgagaacgcccacaagaagatcgaggcgtggcatcgggcccaccctggcgagacactgaagggcgagcaccactggcacgtgatgaccgatgctgccgccgaggtcgggccggcgttgttcttctgcctgctgatcatcaccctgtcgttcatcccggtgttcaccctggaggcccaggagggtcggctgtttggcccgctggcctttaccaagacctatgccatggccgccgccgccgggctgtcggtgactctggtgccagtgctgatgggctactggattcgtgggcatatccccaaggaggaacagaacccgctgaaccgctggctgatccgactctaccaacccgcgctggaccaggtgctgcgccatcccaagatcaccatgacggccgccgtcctgatcttcctgagcgccctgtggccaatgtcgcgactgggtggcgagttcctcccgccgctggacgagggcgacctgctctacatgccctcggcgctgccgggcctgtcggcgcagaaagccggccagttgctgcagatcaccgatcggctgatcaagacggtaccggaagtcgaacacgtcttcggcaaggccggccgcgcggaaaccgcgaccgacccggcgcccctggaaatgttcgaaaccaccatccagttcaagccgcgcgagcactggcggcctggcatgacgccggaaaagctggtggaggaactggaccgggtggtgaaggtgccggggctgaccaatatctggattccgccgatccgcaaccgcatcgacatgctcgccaccggcatcaagagcccgatcggggtcaaggtcgccggccccaatctcgcggatatcgacgccgccacccaggccgtcgagcgtgccgccaagacggtgcccggcgtcagctcagcgctggccgaacgcctcaccggcgggcgctacatcgatgtcgacatcgaccgccaggatgccgcgcgctacgggttgaacatcgccgacgtgcagtcgattgtggccagtgccatcggcggcgagaccattggtgaaaccgtcgagggcctggcgcgcttcccgatcagcgtgcgctacccccgggagtggcgtgactcggtcgaggccctggagcaactgccgatctacaccccgctgggcctgcagatcaccctgggcaccgtggcgcgcatccgggtcaatgaaggcccgcccatgctgaaaagcgagaatgcgcggccgtccggctgggtctacatcgacgtgcgtggtcgggatattgcctcggtggtagccgacctgcgccaagtcgtcagcgaacaggtcaagctgcaaccggggatgagcctggcctactcggggcagttcgaattcctcgaacgggccaacgcacggctcaagctggtggtacccgccaccctgctgattatcttcgtcctgctctacctgaccttcgcccgtttcgacgaggccttcctgatcatggccacgttgcccttcgccctcaccggcggggtgtggttcctctacctgctcggctacaacctgtcggtggccaccggcgtcggcttcatcgccctggccggggtggccgccgagttcggcgtgatcatgctgctgtatctgaagaacgcctgggccgagcgcgaggacaacggcgacgccaccgagcgcggcctggtcgcggcgatccgcgaaggcgccgtgctgcgcgtgcggcccaaggcgatgacggtggcggtgatcatcgccggcctgctgccgatcctctggggcagcggcaccggcagcgagatcatgagccgcatcgccgcgccgatggtcggtggcatggtcaccgcgcccctgctgtccctgttcgtcctgccggcggcctaccgcctgatgcgccgccgtcacctccgttctgtacctcccctccagcaaggaaaaactgtatga

SEQ ID NO: 362584 - DNA, 1482 bp, Pseudomonas aeruginosa
atgaccacgcgtatctggaccggactggtcctgacaggcctgtccgtggcgctcggggccgccggtggctactggttcgctcaacgccccacgaccgcgatgccggccgccagcgccgaagccgaacccgcgccgcaggacgagcgcaaggtgctgtactggtacgacccgatgtatccgcagcagaagttcgacaaaccgggcaaatcgcccttcatggacatggagttggtgccgcagtatgccggcgccgccgtggacagcgcgaccatcagcatcgaccccagcctgactcagaacctcgggctgcgcctggcctccgtcagccgtggtccactggccaacagcctggaagtggtcggcgtactggccttcaacgaacgcgaggtcgccgtggtgcaggcgcgagccgccggcttcgtcgaacgggtctatgcccgggcgccgggcgacgtactccaggccggggcgccgctggtggacctattgatcccggactgggccgccgcccaggaagagtttcttgccctgaagcgcagcggtgatgccggcctgctggccgccgcccgccagcgtctgcgcctgctcggcatgccatcggcgctgatccgccaggtggaacgcagcggtaagccgcaagcggtcctgaccctgagcagccccatcggcggtgtggtgcaggaattggatgtgcgcaccggcatgacggtggcagaaggtgccactctggcccgggtcaacggcctcggcagcgtctggctcagcctggcggttccggaagccgaggccggggccattgcccagggccaggcagtcgaggcgcaactgcccgccttcccaggggaagtgctggcggggacggtcgacgccatcctgccggaaaccaatccggatagccgcacgctgcgggtgcgagtggaactgcccaatgcggatggccgtttgcggcccggcatgacggcgcaggtccgcctgaaccggtccacgtcgcagaacgtgctgtggctgcccagcgaggccatcattcgcaccggccggcgagccttggtcatggtcgccgaagacggtggacgctaccggccggtggaagtccggctcgggccggagagcgccggcaagacggtggtgacccaagggctcaccgaaggccagcaggtggtcgcctcggggcagttcctgctcgattccgaagccagcctcaaaggcctgaccgctgccgccgtggaggccccgatggccgaagcgccagtgccactgcatgaagccgaagggcaggtcatggccatcgacaacgccggggtgaccctggcccacgggcccttcaagaccttgggcatgcccggcatgaccatgaccttcccgctcgccgacccagccctgatggtcggtatcaaggccggcgacaaggtccgcgtggcggtgcgccagaccgacgcgggcctgcgggtcgagcgcctggaaaaactcggaggccagccatga

SEQ ID NO: 362585 - DNA, 1257 bp, Pseudomonas aeruginosa
atgaaccccacacgttattgcaccggcgggcccgttgtggccgccctggtggcgtcgatgctggctctgccgagcctggcggccgacctgaccctcgatgaagccttgcgcctggccgaggacaatgccccgtcgctgacggcgcagacggccaaattgcaggccgccagcagtgacgccattcccgctggcgagctgcccgacccgaagctattgctgggggtacagaactaccccgtcggcggcccggatcgctggagcatcgaccaggacttcatgaccatgcagatggtcggggtcatgcaggaaatgcccaaccgcgataagcgccgggcccgcacggaggtggccgaagccgccgtcgagcgcgccgaggccgaacgccgcgtcgtacgtctgaaggtgcgccaggccgctgcgctggcctggatcaaccgccataccgtggagcgcaagcaagcgctgttcgaggcgtttttccgggagaaccgcctgctggctgccaccgtgcgggcgcagatcgccgggggacgggcaccggctgcggatgccgtcaccaccaagcaggaggcggccgacctgactgaacgccaagatgaattggccagccagcaaacccaagcccgcgccgccctgcgccgctggatcggcccggccgccgacgagccgctggccggcgacctgccaacctggccaatcgctgcctcgggttacgcccacaagctgcaagtacatcccgaattgacggccttcgcgcccatcacccgcgaggcggaggccaaggtgcgtgaggccgaagcggagaagcaatccgattggagttgggaagtcgactaccagcgccgtggccgcgagttcggcgacatggtgagcgtgcagttcaccttcgacttgccgctgtttcccggctcccggcagaaccccaagatcgctgcccgccacgccgagctgaaccaggtggaagccgagcgtgaagcgctcacccgtgagcatgccgagcaattggaagcggacctcgccgaataccagcgcctggaccgcgccgtccgccgcagccaggacagtttgctgcccttggcccaggaaaaggtcgacctgaccacggccagttaccgcgccggtaccggcgagctggcgtccgtcatcgccgcccgccgcgaacagatcgaagcgcgcctcaagcaggttgacctcgaaggccagcgggccctgaccagcgccaagctctacttcacttacggggagactcacccatga

SEQ ID NO: 362586 - DNA, 342 bp, Pseudomonas aeruginosa
atgaaacgctacctgcggctgtgtctgctcctgctgattagcttcacgcttccccttagcgggatggcgggggtgcagtcgccctcggagccttgcccgatgaagacagcaggcatggcgaagatggtcgacatggaccaggactgctgcgacgacatgggcgtaccgtccgaccatagcaagccctgcaagcctggcctggaatgcaagaccgtcagcgtcctgcaggtgacctacgtgaagcctgcaagcaatcttgcttcccctatcgcggcgaccgtcgccagcgacttcctgcctgaacccaccccttcgggggtttggcgaccaccccgcgcctga

SEQ ID NO: 362587 - DNA, 405 bp, Pseudomonas aeruginosa
atgcacattggcgaagcagcaaaagcaagcggcctgtccacacggatgatccgctactacgaacgcattgacctgatttcatcctcgggtcgctcgccgactggctatcgcgtttaccaggagagcgacgtgcaggtcatgcgcgttattcaccatgcccgcgacctggggttctccttggaacaggtccgcaccctgctggccttgtggcgggatcggacgcaacccgatcggcaggtgcgggcaatcgctcaaggctaccttgaagcactgcaggcacgcattgcggtgctacaggatacccgggatgccttgatgtacctggctgagcattacgacgaccctgggcgtccccaaacgccagtggtggctgaccctgccgcctctgtgctcgtgcatagctga

SEQ ID NO: 362588 - DNA, 744 bp, Pseudomonas aeruginosa
atgagcctgggtggcatcggtatcctcagcgcgttcgcggcgggcatgatctcgttcctgtccccctgcgtgctgcccctggtacccggttacctgtcctatgtcgccggtcgctcagtcgacgagttgcaggagctggagggccggcgagagcggctggcggtgctgggcatgagcctaagtttcgtgctcggcttcgccacggtcttcatcgctctgggagccggcgccacagccatcagccggttgttattggcataccggcaggaagccaacctggtcggcggactggtcgtgattgcgttcggactgttcatcaccggcctgattcacccgcgctggttacagatggatgtgcgcttcgtccatcagctgaagtccacgggcggaccgctggcggcatatgtgctcggcgtcgcctttgccttcggctggacaccctgcatcggcccgatcctgggcagcatcctgaccctgagcgcctcccggggctcctccggtgccaacggcatcacccttctgtccatctactcgctgggcctgggcctgccgttcctgctgaccgcactgttcaccaaccatttcctcgcccacctgaaacgacttcggcagtggagtcggaccattcacctggcagccggcatcgttctgatcctcatgggcctggcgatggtcactggtcagctcacagccttcgcctactggctgctggaggtgttcccggcgctgggcggaattggctga

SEQ ID NO: 362589 - DNA, 612 bp, Pseudomonas aeruginosa
atggaaccacatggcgtcagcccatcccggcggacaacgcccattggtggggcgaagggcactatttgggtctggacccggggattggcgctcgcggggctcctcgcccttgcgatgccggccatcatccaggccgccgagactgatacccgcgccggattgacgatctggcccgagccgaggccggtggcggaggtccagttcgtcgatggcgcgggcaaatcgcataccttggccgacttcaagggcaagatcgtgctgctcaacctctgggcaacctggtgcgccccctgccgccaggaaatgccaaccctggatcgcttgcaggcacggctcggcggtcccgattttcaggtcctggcgctgtccatcgacctagatggggtccaggtagtacgcgacttctatcgcgaggtcggcatccggcacctgggcatctatatcgatgagaacgcagcggcgatttcacaacttggtgcgtttggcctgccggccaccctgctgctggaccgcgagggccaggaactggggcgcaaactcggcgaggccacctgggatagcccggaggtcgtcgcgtaccttcgggaagtgattgcgtcgagcaggaggtaa

SEQ ID NO: 362590 - DNA, 459 bp, Pseudomonas aeruginosa
atggagcgcgtgaagaagaaattctggcgagtcgatcgatgtcggctaggcggactcctcctgcttatcttttctacggcggttgcggcggccgaccttgaggtgaagggcgcgcgactgcggcttctgcctggcgacctgccggcggggggatatttcagcctgagtaatgtcagcaagcagtcggccgccttggtgggggctgaacgcgcagctttcgagcacgtgatgatgcatcggagcaccgagaaggatgggatggccggcatggagcctgtgctgcggctagaggtggcgcctggcgaaacgctcaacttcgcaccgggtggctatcacctcatgctcatgaagcgcctagtgccgctcgccattggtgaaaaggtgaacgtaacgctgctcttcgcggatggggcgcatttgcccgtgattttccaggtcgtttcgccagcgtcacagtag

SEQ ID NO: 362591 - DNA, 579 bp, Pseudomonas aeruginosa
atgcgcccttgggtcctgcttgtgctgactgcgttcttactcgccggctgcggtgaaccgggctggcactccaaggacatctctggctcgatgcccgcactggagttcaagcttaccgacgagaaggggcgccaggtgagcgccaaggaatacctcggcaagcccaccctgttgttcttcgggttcacgcactgccctgatgtttgtccatcgacgatggcctatctagcagcggtctccaagcaactcgacggtaaggcacgggatgacctgcaggtcttattcgtgtctgtcgatccggcacgcgatgatccgcagacgttgcgccgctataccgacgttttcggaccgcagtttattgggttgactggggataaggccgcgctcgatgcgctaactcgccgctacttcagtctctacgaatacggtggcaaggacgaagcgggcaactatgacgtgatgcactcctcggccgtgttcgcgttcaatcgcaagggagaggcccggttcctattccgtgatggcgaaccggtggaggcggtgattgcggatctgcgccaactttctgaagaccgctag

SEQ ID NO: 362592 - DNA, 1734 bp, Pseudomonas aeruginosa
atgagcaagcaaaaactagaactgacatggatcggaaaggagaaacggcccaagctggagccgcgtattctgctcgaagacccggacaagtcgtaccacgccaagcggcgcgtgacggagaacgacatcttcgacaaccggctgatcttcggggacaacctgttggcgttgaaggcgctggagtatgaattcactgggcgagtcaggtgcatttacatcgatccgccttacaacactggctccgcctttgctcagtatgaagatggccttgaacactcgatctggctgggcttgattcgtgagcgcttgacccttctgcgaaacttactgtcgaaagatggtagttgctggattcagcttgacgacaacgaagcccagtactgcaaagtgctcgcagatgaaatctttggacgagacaacttcatcgccaacgtggtttggaacaaatcctatgcggtgcggagcaacgcgcagttcttttcatcagcgcacgagcatattctggtttacgccaaagatcgtgcgcaccttcggttaaaccaatttggccgatcggcaaagcagacggagagatacagcaaccccgacaacgatcctagagggccttggcagtctgtcacgatgacaattagtctggttggtggagctcgcggtagacagtacgcgaaaaccggagtttcggagaacatctttgaggtgaagtcgccgagcggaaaggtgttcctccctccgccgaaccgttgctggagtcgtaatccaagtggtttcaagaagctagatgctgaggggcgcatctactggggaacaagtggagagaacgcccctcggctgaagatgtatctcagcgaagcagcggaaggcgtcatgcctacaacgctatgggccgatggcgcagagttcgggcacaaccaagatggcattcgagaattgcgtgccttagatgttggggacttcccgaccccaaaaccagagaagctaatttcgcaagtcatttcgctagcaagcgatcccggcgacatagtgctcgactcctttgccggttctggaacaaccggtgcggtagcccacaagatggggcgacggtggctcatggtcgagttgggtgagcactgccacacgcacatccttccgcgccttcggaaggttattgatggtgaggatggcggaggcgttacggaaagcgtcggctgggaaggtggtggtggcttccgttattacagcctcgcacccagtctgatcatcaacgaccgctggggcaacccggtcatcaaccccgaatacaacgccgcgcaactggccgaggcgctggccaagctggaaggcttcagctacgcgccttccgaggtgcagtggtggcagcatggtcactccagcgagcgtgacttcatctacgtcaccacgcagaacctgtctgccgaccagttgcaggcgctgtccgatgaagtgggttccgaccgcagcctgttggtctgctgcgctgctttccacggcgtgactgccgccaaagcaaacgaacgctggccgaacctgacgctgaagaagattccgaagatggtgctggcccgttgtgaatgggggcatgacgattacagcctgaatgtggcgaacctgccgatggcaaagcccgaccccgttgagacttcggcagccgccgaagcgaacaagaaagccaagagcaggaaagtgcccgctgcgaattcgaatcagggcggtttgtttggggagaacgaataa

SEQ ID NO: 362593 - DNA, 459 bp, Pseudomonas aeruginosa; identical to SEQ ID NO: 347599

SEQ ID NO: 362594 - DNA, 255 bp, Pseudomonas aeruginosa; identical to SEQ ID NO: 357186

SEQ ID NO: 362595 - DNA, 243 bp, Pseudomonas aeruginosa
atgtttggctcgttcgttgtcttgaaatcctcgaagtttaagctcccgctccaaagactccaaggcctgcttggcgagaccttttccctggtggacgggaagaatgtggaaatcatttataaatgccaagtgcagggacagatcctcttcgtaccacagatatcctatgacctcttcagggccatctgccggatcgtacaggcacagcaaagattgtccagccgtattgataccgtcaggtaa

SEQ ID NO: 362596 - DNA, 960 bp, Pseudomonas aeruginosa
atgatcctcgatagactctgccgcggcctcctggccggcatcgccctgaccttctccctgggcggcttcgccgccgaggaattccccgtcccgaatggcttcgaaagcgcctaccgggaagtcgacggcgtgaagctgcactacgtgaaaggcggccaggggccgctggtgatgctggtgcacggcttcggccagacctggtacgaatggcaccaactgatgccggaactggccaagcgcttcaccgtgatcgcgccggacctgcccggcctcggccagtccgagccgccgaagaccggctatagcggcgaacaggtcgccgtctacttgcacaagctggcccggcaattcagcccggatcgcccgttcgacctggtggcccacgacatcggtatctggaacacctacccgatggtggtgaagaaccaggccgacatcgcccgcctggtgtacatggaagcgccgatcccggacgcgcggatctaccgcttcccggccttcaccgcccagggcgagtcgctggtctggcacttcagtttcttcgccgccgacgaccgcctggcggaaaccctgatcgccggcaaggaacgcttcttcctcgagcacttcatcaagtcccatgccagcaacaccgaggtgttcagcgagcgcctgctggatctgtacgccaggtcgtacgccaagccgcacagcctgaacgcctcgttcgagtactaccgcgcgttgaacgagagcgtgcggcagaacgccgaactggcgaagacccgcctgcagatgccaaccatgaccctcgccggcggcggccacggcggcatgggcacgttccagctggagcagatgaaagcctatgcggaggacgtcgaaggccatgtcctgcccggctgcggccactggctgccggaagagtgcgcagcgccgatgaatcgcctggtgatcgacttcctcagccgcggtcgctga

SEQ ID NO: 362597 - DNA, 660 bp, Pseudomonas aeruginosa
atgaccgaaggtctggctgctcggattagaacctgcgccgccttggttggaagtggcgatgaactcgcgcgactaaccgctatccctaggcgtaccctggagtactacttgaccggcgacagtgaacccaagcttgcgcggtgtgtggacattgcaaaggctgcgggggtggacattggctggctagctaccggggagggggaaatgcacagcgctgccccggatgaagccgcagaggatgacacctacgcctacgtacccctctacgacgcgcgggtgagtgctggccacggttcctggatggagggcgcgcggaccttggccaagctggcgttcactcgctacagcttgcggaagcaaggtctggagatagcgaatatgtcagccgttcgcatcggcggtgactcaatggagccgctgttgagcgatggtgatacggtgatgattgaccacagctgcggcgaggtccgcgacgaggctatctacgtcattcggttggatgaccacctatacgccaagcgaatccagcggcaaatcaatggcggtctagcgatcattagcgctaattcggcctaccagacgatgtacgtgtccaagcaagacctagaggcaatcgacatcattggtcgcgtggtatgggcaggccgctggatgacttag

SEQ ID NO: 362598 - DNA, 246 bp, Pseudomonas aeruginosa
atgaccacgctttccgcactcagcgacgatctgctgacgaacgaagaagctgccgcactgctcggcatcaagcccaacaccctcgaaatctggcggggtaagggcaaaggccccaacttcatcaagatggggccagccaaacaagacccgattcggtatcacatcgacgagatcaaggcttggttggcttcacgcaccttcaccagtaccagcgcctacgcgccgaacgccaaacaagcagtttga

SEQ ID NO: 362599 - DNA, 852 bp, Pseudomonas aeruginosa
atgagcaaagttgtcgaactgttcggcaaagccgccgacgcgccgggtattgactggcagaatgaaatcgccgatcagcagtgcccgtttctcggcaagcgctgttacaaggttcggaagtctaaccccgagatttcgattggctcctgtaccgttctctatggacgcgaacccgagccgatcatcatttgccccacgcgccttatccagcgcgggcagatcttcaccgactgtttgcatctgctgaccagccatgaaccggggaacgagcttcatctagtgtccgaggtcaccgtgcccggtggaagcatcgactatgtccttgtctcgacgaaggaaggcaaggttcgggacttcgtgggtatcgaactgcaaacgctcgatacaactggcaccgtatggcctgaacggcagcgccttctcaaagagctgggagtcgcgcgcggggacaacggcgaggagtccaacaagccttttggcatgaactggaagatgaccgcgaagacgatcctcgtccagatgcatcacaaggtgcagacgttcgagcatgtcaatcggaagctcgttctcgtggtgcaagacaagttcctggcctacatgaccaaggaattcaagtttgaccacatgaaaaatccagcggcagtcggtgactcgatgcaccttcactcctaccggatggcacgtgccgatgacggaaacttccgcttgtcgatggcctctcggctcagtaccgatgctgacggcattgcaacctgccttggtctgcaagctgaggcacgtatcgagctagagcagatcatcgccacgctacaggccaagatttcgcccgctacattgttccgtccggtgtga

SEQ ID NO: 362600 - DNA, 1143 bp, Pseudomonas aeruginosa
gtgactgacgggagcatagaggtagtgagcggcaaaactcgccgtaagcagaccgtaagcgatagcgaccagacgtcaccacaaatcgtctctaaagactacgggcacgcattcgctacctaccagcgggaagcaacgctgcgcccactgctgctcaacggtgatgcgctcgccgttctcaaatccctgcctgacgagtccatcgactttgctatgacttccccgccgtattgggggaagcgcgagtacgagaacgggggtatcggtcttgaggccgactacagagacttcgtaaaggacttggccgccatcttcttggagctgaagcgaatccttaaacctacggggtcgttctggctcaatatcggtgacacctacagcggcaagagcttgctcgggattccgtggagggtcgcttttgagttgactgacgtccaaggctggacgatgcggaacagcgtcgtctggaacaagctaaagggcggcatggataacagcaaagatcgcttagccaatgtccatgagaatctctttcacttcgtgaagcagccgaagggctactactacaacgctgacgccattcgctcgaaaccgcgcgaggcgaaagtcgtcaatggcgcagttgtttctgcaacaggtgtctccggcgtccgctacaagaggcagcttgagctttccacggcactcgacgagaacgagaagaaggctgccttcgctgcccttgaccgtatgcttgccgacgtgggcgctggtaatgtctctgacttccgcatgattattcggggtcagcagcgcgccacgcattccgacagtgagaaggtttcaggtcgcgcaaaagagcttcgagacaagggcttctacttcctcaaataccatcccaacggaagcaagccgggtgacgtgtgggacatcattcctgaggatacgcaacgacgcgccgcgcacttcgccccgtatcctatagacctttgtcggcgaccgttgctggccacgtgcccgcccggtggcatagtgcttgatccattttgcgggactggcacaactctgctcgccgccggtaatcttggcctcaagtcagtgggcatcgacatatcgcgccactatctcgaactctcgcaagaaaggtgcgatggtcttctatga

SEQ ID NO: 362601 - DNA, 213 bp, Pseudomonas aeruginosa
atgcaactgagcaacatcaagcaagtgatcgaggtctccggcgaaatcgaagcgcaagaacggctcaacgatggatgggttcttctcgccgcagccggcggaactaaccaggacaaagagggctacatcatctactccctgggttccacagaagagcccaagccgatcaaggccggagcggtattcagcccccgcatggaacctcaaaagtaa

SEQ ID NO: 362602 - DNA, 1038 bp, Pseudomonas aeruginosa
atgagcgcgccccgggttcgcctcggcgacctctcggtcggcttcgtccaggcgctggccgacgccctgctcgccgccggcgtcgagcccgcaccactgctcgagcagtacggcctcgaccagcggcgtctggccgaacccggggcgcgcctgtcgatccctcgctacatgcgcctcggccatgccgccatacagctcagcggcgaccccgccctcggcctgcagatgggccgcctgagccgtctcggacagatgggcctggccggcgtcagcgtcgcccaggcgcccaacctgcgcgccgccgcgcgggcaatgatccacctggaaccgctttacgcgcagaactaccggggccagtcgagcctggtggaagacgccggcggcgcctggctgcgcttctattcgatcagtccttacaacgcctataaccgcttcgtcgtcgattcggtgctggcaggctggatcagccatctcggcgccctggcaaggcagccgttgaaagcggagcgggtggagatcgaatatccagcgccgccttgggccgagcgctacgaggcattcttcggctgcccggtggaattcggcgcgccgaccaaccagttgcgcctgagccaggccagcctggccctggcgaatgccgagcactgtccgagcacctggagccagatgctggaactctgcaaccgcgaactggagcagttgacccgcacccgcagttggcgcgagcgcgtcagccgcctgctggggccgatgctcaatggccgcgagccggacctcgaggaagtcgccgcgcgcctcaagttgccgacctggaccctgcggcgcaagctggccgaggaaggcacgcagttccgcagcatcctcaacgacacccgccgcgacctggcgatggtctacatccgcgagaccgacctggctttcggcgaaatcgcctacctgctcggcttcgcctcggcggaagccttccagcgcgccttcaagcgctggagcggacagacgcccggcgaattccgccgcgcccagcgacagagcgcctga

SEQ ID NO: 362603 - DNA, 1119 bp, Pseudomonas aeruginosa
atgcgcaagctgatcttcctgatcctcatcaccctcttcgccgcctacgccggctgggccgaacgccgcccggtaggccactacctgtccgacctgcgcagccaggtcagcgtggtccagggccagcccggcgagcgcggcaacctgctggcggtccagccggaactgttcacgccggactaccagagcgccgaacggttgcagctgaaattccacgcctacctggaaaatgcccgccgccagggcctgctcaacgagcgcacggtggtggtgttccccgagcatgtcggcacctggctggtggccagcggcgagaagcccgaggtctatgccgccgccgactggcccacggcgatggactggatggccgcgagcaacccgctgaaggtggcgcgcggctggatcaccgcgcgcggcgaacagcgtctcaccgacaccctgttccggatgaaggcggtggacatggcccacgactaccaaaccctgttcggcgggctcgcccatgatttcaaggtgacggtggtcgccggctccatcgtcctgcccgaccccgaggtcgaggacggcgagctgcgtcccggcaccggccagttgtacaacgtcagcctgaccttcggtcccgatggccggccgctcggccagccgcaacgcaaggtgttcccgacccgccacgaactgagctacctcaacaacggtcgcggcgagcgcctgcaggtgctggatacgccggcaggacgcctgggcgtgctgattggcaccgacagctggtacccggacacctacgccaccctggtcgaacagcgcgtcgaactgctggcgatccccgccgccctgaaccagagcggtcgctggcagcaaccctggcccggcttcgatgccgagctggttcccggcgacgtgcgcctggcgccgaacagcctgagcaacgccgaggcctggcagcgcctggcggtcggcgagcgcctgctggccagcggtgcgcgcggcgccgccgtggccttcgcccatagccgcctgtggaacgtcaccgaagacggccaaagcctgctcggttcgtcgcagggcatgcgccaggccaatcccggcggcggtgcgcaactggtcaatctctggctatga

SEQ ID NO: 362604 - DNA, 663 bp, Pseudomonas aeruginosa
atgctttttgaagagctgtctaatatgtcaccaagagacctcattttaagaacgcgggagtctcttcgagatacatatgaaagcctttttggaaatactcaatttgatgaattcatcctcgcggtcagggacgacataaaaaaaggtaagatcaccgagactgtgcttaataacaaatggctagagcacatagctgtagatcaaatatccccaagctaccctttcctttacgcctgtgttctgaatgagttggcgcagcaggctcttgacgctggaaaccacaatcagagctggcctttaatcgcccatgccagcgcgagtgcagaaggagcagccacccatacgttctataacactgtgattaacactacagaagctttaaatcataacagagcaatggcaggtgccaatgctcgaaatgaaaagttccaaatggtgaaagactacgctttaacactcatgacagagaagcgccccaaacacggctggaacgacttcatgcacgcagcggaatcgattaaaagtgaactagtaaattttattatcttggagaaagtcagcctaagccaagatcttattgtaaaaacccttcagagatggttaaagaaagatgagcactttcggagcgccgtcactgaaataatccccacgttcaagctgtag

SEQ ID NO: 362605 - DNA, 207 bp, Pseudomonas aeruginosa; identical to SEQ ID NO: 332728

SEQ ID NO: 362606 - DNA, 531 bp, Pseudomonas aeruginosa
atgtccatccgccgctattccccgtcacagatcgccctgcactggctcagcgccgtcgcggtcctgctgatcatcgccctgccctacggcgccgacttcttcgccggcctgctcggcggcaagggcaacgtcttcaccctgcacaagtcgctgggcgtggcagtactcctgctgaccctgacacgcctggcgctgcgccgcgtccagggtgtcccggataccctggaggggaacccggactggcagcgcgcggccgccaaggccgggcatttcctgctgtacgcggtgctgatcgtcatgccgctctccggcatgctcgccggcaagcgtccgctggacctgttctggctggtgcagatcggcccgttcgacctgccggaagccttcaaggcgttcgccggcggcacccacgtcaccgtccagtacctgcttttcgcgctgatcctcggccacgccgccgcggccatctggcaccaccgcgtgcagaaggacgacgtactgcgcgccatgctgccgcaacgcggcgcctga

SEQ ID NO: 362607 - DNA, 936 bp, Pseudomonas aeruginosa
atgcctcgggcatccaagcagcaagcgcgttacgccgtgggtcgatgtttgatgttatggagcagcaacgatgttacgcagcagggcagtcgccctaaaacaaagttatgccgcactcacccccatggagttttgatgttcaaacttttgagtaagttattggtctatttgaccgcgtctatcatggctattgcgagtccgctcgctttttccgtagattctagcggtgagtatccgacagtcagcgaaattccggtcggggaggtccggctttaccagattgccgatggtgtttggtcgcatatcgcaacgaagtcgtttgatggcgcagtctacccgtccaatggtctcattgtccgtgatggtgatgagttgcttttgattgatacagcgtggggtgcgaaaaacacagcggcacttctcgcggagattgagaagcaaattggacttcctgtaacgcgtgcagtctccacgcactttcatgacgaccgcgtcggcggcgttgatgtccttcgggcggctggggtggcaacgtacgcatcaccgtcgacacgccggctagccgaggtagaggggagcgagattcccacgcactctctagaaggactctcatcgagcggggacgcagtgcgcttcggtccagtagaactcttctatcctggtgctgcgcattcgaccgacaacttagttgtgtacgtcccgtctgcgagtgtgctctatggtggttgtgcgatttatgagttgtcacgcacgtctgcggggaacgtggccgatgccgatctggctgaatggcccacctccattgagcggattcaacaacactacccggaagcacagttcgtcattccggggcacggcctgccgggcggtctagacttgctcaagcacacaacgaatgttgtaaaagcgcacacaaatcgctcagtcgttgagtag

SEQ ID NO: 362608 - DNA, 552 bp, Pseudomonas aeruginosa
atgaccgaagaagaacatgatgccaagctgcgcgccgaggcccaggcgctcagggaggaagtcgcacgcgctgagcagcaccgcaacgatcaggctgacttgattgtgtcgctacgcaccgaagtcgcagcactgcgaatggcgagagatgatctcaaactcgaacgagaccttgctcgacaaaacttctgcgacgagcaggcagcgaattatcagttgcaagcgcacttgaaagcctgcctcggcgaactatcggaactgcgcgcaagggtggttgtgctccccagcgttgataacgtcatgaatatcgtcatgcgttaccagtggaacgagaagaccaacgtcaccggaactacgaactgggcggccaacctcggtatgagggttgtcgaagtggtcaagcgcctcaacggcaagacggtcagcgaggggctgttgcgcaggctgacggcagacccggactacgaagaggtatttacgatggatcgcggagaagcgttgaccgaactcctcgacctgctcaaccaggacaaggagaacggcaatggctga

SEQ ID NO: 362609 - DNA, 591 bp, Pseudomonas aeruginosa
atgaaaaacattctcctgctcaacggcggaaagcgtttcgcccattccgacggtcgcctcaaccaggccctgcacgaaaccgccctggcccatctggaccgccgtggcttcgacctgcgccagaccttcatcgacggtggctatgacatcccgacggaggtggacaagttcctctgggccgacgtggtgatctaccagatgcccggctggtggatgggcgccccgtggacggtgaagcgctacatcgacgaagtcttcacggccggtcatggcagcctctatgccaacgacggccgtacccgctccgacagcacgcagaaatatggcagcggcggtctggtgcagggcaagcgctacatgatctcggcgacctggaatgcgccgcagcaggcgttcgacgatccgagcgacttcttcgaagggaaaggcgtggatgcggtgtatttccccttccacaaggccaaccagttcctcggcatgtccggcttgccgacgttcctcgcggtggatgtgatgaagcgcccggacgtcccggctgccgtcgctgcctaccaggcgcacctggacagggtgttcgggcgcgccggctga

SEQ ID NO: 362610 - DNA, 960 bp, Pseudomonas aeruginosa; identical to SEQ ID NO: 362596

SEQ ID NO: 362611 - DNA, 804 bp, Pseudomonas aeruginosa
atgtcaattgagcgcgcggatattgcaattcgcctagtagaagagcgaggaaggacgggctacagcagggttgccttcgcacgtgagctgggagttagctccgaaacactgcgcctctacgagattggacagagcgctttgaatgccgaagttctggctaaagcagcctcgcttggggtggatgtgcaatatgtgctaacgggtgtctactcgttgaatctatcgaaagcagaacaagctgcctcgcctcaaccgcttgccccgaagtaccaggtgcaaagcggaacaatgaatgtcactgagaacggaaacgtcattcacacaacacgacataccacgacagtgaaagccgaggtgaagccaggggaacagcacatctctgaggctcaggccgccaagctgaccgagctggttcgagaagtagtcgagctggagggaaaacttcgaaaatcccctaaaggttaccgtgccgtgtggggtgcgctgaacgcacattgcgatgtcactcgctacctgctgattgccgctgcggactatgagaaggccgagaaatatttgcgtcaatggatagggcgactgaactcgatggattccgcaccagttgcagataatgatgcatggcgcaagcgccgttactcatacatcaagatcaacaccaaaggcgacagtgactggttgacggcgtacctcaagaaaacatttaaggctgtaagccttacggatctatcggacgatcaactggatcgtacctaccgagcagtggctactcgcaagaggaagccgcactcatctaaaggcgtttag

SEQ ID NO: 362612 - DNA, 543 bp, Pseudomonas aeruginosa
atgaatagcaaggtgctgatggccctggccggcctgctgctgctcggtgcggtgctgctcggatacctcggcgtatccatcggccgcgcgccatcgaacgcgcatgctccatccgtggcgccggcttcggcggcggtggacgcttcgctggaaaagctcgaacgcaagccggtgctggtggccagtcgcgatctcccggcgctggcggtgatcggcaaggacgacctgagcgtcgagctgttgcggaccgcaccggtcggtagctacgacaggcccgaggcgttgctcggcaagcgggtctgggtcgcggtgccggccggcagcattctttccgccgcgaccctagaacccggcggtccgctggcccggaccatccgtccggacgagcgggcgatggcgatcgctgtggacgaagtggtcggcggcggcggcttcgtcctgcccggcgactatgtcgacgtgatgctcttcgtgcgtgacgagcgggacggcgaatcgaccccgctggcgcacaactggtgttgcccggagtccgggtactga

SEQ ID NO: 362613 - DNA, 876 bp, Pseudomonas aeruginosa
atggatgaatttataaaactaatcccagaacttgtagttgagcaacgagaaatacaaaaagagcgcgatgagcaaaatagcgcactcgacgcgatggaaagacacgatcgagataccgatctagacaaccagcccgacatattagccaacataaacaaatcctttaaaggaatggaaatcgccggacagataataagaaatcgccatgcgaccatgactagggaggcattgtatgatcttgctgctagcggtacggcaacgggacttagattcttagactatttcataaaaatatctgacagctctaaaacggagctaataaaattcatttcccaagtattagcagagcatccgaatctctccaaccgagaggtccaggagcatgctgaaagtgcctacctgcaccttactttcggggtcattagcggggtcgtaaaaaaaatctcatcatcaatcggttcaaaagaagctcacgaaatatacgaagcccttgaagaatcggaaaaaacccccgcccacacgcttataaaccaagcagtcgagttgcaatttaagcgaatccttaacatggactctctgcaaaagactacagataaactcaaaaacagtcccgtgtgtttaagaatcctgaaagaaatggttgttcagcacatatacatgttccctgttgaatataaagaaaaacaacagctttctaatcttctaggaatcacagtgcagggacagcgcttcatggatcagaaaaagccagagttggtgcatgcgctgaggttagatcggacacagtatgtgcctatacgagatgggtataatgtcagacatcagagaatgattgcccaaatgtgtgcacagccgtttaagcttcgggaactatga

SEQ ID NO: 362614 - DNA, 369 bp, Pseudomonas aeruginosa
gtgatctcggtccgtgttgtctcgattgtgctgggctgcatgctgctgatcggcgtgggagccgtcggcggtatctggatcggcgcgcggcactaccggccgcagatcgatgctgcgcaggcggatctgatcgcctgccgtgccgccaggggaagcctggagggcgcagtggcggagcaggtccggcaggttgccgcgctgcgccaagccggggaacagcgggccagggaggcagcccaggcggtggagcaagcgcgtaaacgcgccgacggcgactatgccgcggcacagcgcctactcctagagcgtacggccggagagcagtgtatggcagccgatgcggtgatcgatcaggagttgggtctatga

SEQ ID NO: 362615 - DNA, 519 bp, Pseudomonas aeruginosa
atggctgagcagctactggccggcgttgcacgcgcaacctctggcctgcctgaagatcaccccgccctggttttcggcgatagaagaactagcttcaccgagctggactcaagagcgaacaaggtcgcgaatggcctgttgtctcttggcgcaacggaccaggagcgagttgtgactctcgatcacagcagtgatcagttctatgaagtctggattggtgccgctcgtgccaatctggctctaacccccctgaacatccgtctttccgccccggaaatcgcccacatactcgcggactgccgtcctcgcgttctgtttgttggccctgctttcgaaaagctggtcgacgagatcaagaccgagctggacttcatcgatcactacatcctgatgggagaggagttctccgcctggcgcgaccagcaggtagacagcatctttgagtctaccatgactgggcacgacgactgcctgcaaatctacaccagcggcaccaccggcttgcccaagggtgtttga

SEQ ID NO: 362616 - DNA, 693 bp, Pseudomonas aeruginosa
atgagcggcttcaattggatcgcggatctcagcccggagacccgaagcaccctcctagggaaatccagaactaaggttcttcctgatggcatcacgatctaccggcaaggagatccagtaaccgaggtcttccaaattgtgtccggtgaaatccgccaatgcattttcacggaggatggccaggaggttctgatctatatctaccagccaggtgacttggtcggcgacagctccgtttcggatggagacccttcctctgtcacattcatcacgcgaggctcggttgagctacgtgcatggtctgttagggatttttcaacatttctcgctacctacccggaagcagctgcagctgtcagcgctcaacttagtcgacgcctgcgcggtgcattgaggctgttggaggaaatgctgacgcaaccagtgcctgcgagaatcgcctctcgattcttctggctttctgatgcgcagggtggccctgaaagcgaagcgaacatagccctatctcaagcggatatcggtcttatggtgggctctacgcgacaaagcgttaaccgtgtcgtcaccgagttacggaagctgaaactgatcgaaaccgactatggaaaggtgatggttaaggaccccgcgggtcttcgtcgtttcatcagcgcacaccagcgccatggtcgaggagaaccagagggtcactga

SEQ ID NO: 362617 - DNA, 597 bp, Pseudomonas aeruginosa
gtgcggcatcagaaaatttcccgtggcgagcttctcgagcgatgtgccgaagtattcaagcgcagcggatatcacggaaccaccatggactccttggcaagcgcttgcggccttacaaaggcttcgttctatcaccactattcgaacaaagaagcccttgcggctgacgccatgtcatgggcgcagtcacgtatagaggagtcgctgttcaagctggcctacgacgatgcatcgccggctgcggaccgcttccaagaaatgacgaataagactcggcgactgttcgaagatggagctgtagggtgcttgatggccgtaatctccatcgatgccgcctattccatgccacaactgatggctcatgtccgctcgttcatggattcctgggcgcaagctctaacgcatttgttttctggtcacctgcctgccactacagctcggcagcttggcatgcagaccgtagcggactacgagggagcgatactgatttcgcggatctacaacgacttcagttgcttcgatcgtgtaggcaagcgcgtccttagcgtgctgaccggtaccaatgagccagacagctgccgctaccaagtcgggtag

SEQ ID NO: 362618 - DNA, 387 bp, Pseudomonas aeruginosa
atgggcgctgacttcgcttatgtgggatcagcctttattgccaccgatgaggcgcgtgcagacgaaaactacaagcagatgatcaccgagtgcgacagctctgacatcatttactcgaactccttctccggtgtgcaaggtaactacctgcgcccatctgttgtgcgcgccggacttgatccggagaacctgactgtaagtgacccttcgaaaatggatttcagtcagaaggccaccggcaacgcgaaagtctggaaggacatttggggctgcggtcatagcatcagctctgtgcgttcggtcgtaccgattgcggatctggttggacgcctaaaggatgagtatctgacggccctggtcgagctgaatcagcgggctatcaggtaa

SEQ ID NO: 362619 - DNA, 615 bp, Pseudomonas aeruginosa
atgagcaagcaagttcaattcttctttgattttggcagccccactacatatcttgcgtggacacaattgccagatatatgcgaagccaccgaaagcacgctggtctatcggccgatgctgctcgggggtatattccaagctactggtaatagctcgcctgtgaccgtccccgccaaaggccagtacacaataattgaccttaagcgtcatgctgacatgtacggcgttgagtttgtgcccaatcggttctttccgatcaacacacttactctgatgcgggcggcagttgctatccagctctatcatccggagcgttttgacgacttcctcaaagcgatattcacagcgctttgggttaagggaaaaaacctgggagacatccaaattctgcaggaaaccctggctgctgccgagtttgatgcggcagaaatccaagagtgggttggtcagaaggaagttaaggatcttctgattcgcaacaccgaggaagccataaagcgcggtgcatttggtgcgccgaccttttatgtgggtgacgagatgttctttgatcaggatcggcttcaatttgtggccagggcgctcaatcccgatgtgcgagtctcctgggattaa

SEQ ID NO: 362620 - DNA, 732 bp, Pseudomonas aeruginosa
atgtctgatcgtgagaaggtggcgctgattatcggtgcgggtgatgcgactggcggtgcgattgccaagcgctttgcgaagggcggttatacggtgtgtgccacgcgccggaatgcggacaagctgcaggtattggtcgatgagatcaaagggcttggtggcaaggcctatggcttcggctctgatgctcgcaaagaggacgacgtagctgtcctgttcaaggaaatcgagtcgaacatcggtgagatcgacgtcttggtctttaacatcggcgcgaacgttccgtgctccatcctggaagaaacgccgcgcaagtatttcaagatctgggagatggcctgcttcgcaggtttcctaaccggccaggctgccgcgaaacgtatggttcagcgtaagcggggaaccattctcttcaccggagcgactgccggtctgcgcgggtctgccaacttcgcagcattctctggcgccaaacacggcatccgggctctgtctcagagcatggcccgtgagttggggcccaaaggaatacacgttgcccacattgtcatcgatggtggcattgatacggaattcatccgggagaatttccccgctctgtatgagctcaagagcgaagatgggattctcaacccggatcacattgccgaaaacttttggcatatccatacgcaacctcgagatgcgtggacatatgagttggatattcgtccgtggattgagcgctggtag

SEQ ID NO: 362621 - DNA, 576 bp, Pseudomonas aeruginosa
atgaggtattccgcagatcacaaggcagaggtcctgcagcgcctgctgtctagcagtggcgagctggcgaagagcggagggttcgccacgacgggcgttgatggcttgatgaaagccattgggctctcaggtggggccttctattcgcacttctcgtccaagcaggagctgttcgccgcggtcatccagaatgagttggagtccagcccgatagctcgcgcaatcgacgacggtcaaactgatctgccgaggctgcagcagtgcctggaccagtatttgtcgttatctcatgctcagcaccctaaagctggctgcgtgctcccagccctaggcgcagagatcgccagagcagatagcaacgtccgcacgaaggtagaaacttccctttcggactgccagaaggcatgggcgggagcaaccggcgacggtcaactggcctgggggctgatggctcagtgcgtcggtgcgcttgtgcttgcccgcatgatgcagaacgaagaaacccagaaagaagttctggaggccagccgggctttgtcgaagtcgcagctggactcaataccgacccatagttaa

SEQ ID NO: 362622 - DNA, 123 bp, Pseudomonas aeruginosa
atgctgctgcattgtgatttcgtggtgatggcggaggaccgcctagccagtgctgaagcaaaagaagcattcgctgccttcgcccagaaacgtaaaccgaatttctcggtgactactgactga

SEQ ID NO: 362623 - DNA, 267 bp, Pseudomonas aeruginosa
atgaaggctggctgtatcgacctgatctttcgtcaagtcattggcgggtcaatcaagcctcgtacggtcagtgttctggttatcgacgtgttgttgatggcggtgtggcgccacaagccgaagcaggaagtgatgatccactccgaccagagcagccagttcagcagctcgcattggcagagctttctgcagaccaacaacctggtcagcagcatgagccgcggaggtaactgccatgacaatgcagttgccgagagtttcttctag

SEQ ID NO: 362624 - DNA, 768 bp, Pseudomonas aeruginosa
atggctgaaccgagcgccgagcactggtatccgaccgcagcctatctctacacgctgcacctcgacggccccgcgctggcatgggagtacctgcgccgccatcccgactaccgccgcgactggttgcgccgtcgtcgccggccggaagcggcgcctcgctggggcctgcgtctgttggaagatccggacctggacgcgcgcgacgcgcatccggtctggtttcctgaccatgacggcgtgatccaactctacccggacgccgacccgccaccagataccgatgccttcgagttctggcgcatccctggcgacaagcacctgacccacgatggcaggcgcctggtgctggtgtcgcgctggcctggctgctgcgtgcggctcgcgctcgcgccagaactggaagatggcatggcctacctctatgcaatccgcgcctgcaccacgccttgcgcacgctaccgtgcgctggctgcagggctggatgtgttgtccgccgcggccggggacatgccagcagcggtcgcccgttcccggcccacgcccgccgcgctgcaggagttgcacaccttgcaggcgctcgacgcgaccctggcgggcgcgtccttgcgcgaggtggccgaagggctgttcggtgccgatgccgtcgttgccgactggcacgccgacagcgctttgcgcgcccgcgtgcgccggctggtgcgccggggtaatgcgttgatgcgcggcggctaccgccgcttggcacagctgccgccgccatcgtactag

SEQ ID NO: 362625 - DNA, 351 bp, Pseudomonas aeruginosa
atgacccagccgctgaccaccgccgacgagcgcgcgcaactgcttgccaacggcgcggagcgtgccgccggccagagcatcgacccgctgccggtggtgaggctgttcacgccggacgcgcacgcgacctggctgctggccgcgctcgacccggccgatggcgataccgcgtggggactgatcgacctcggcatcgggatgccggcgctgggaacggtgaaactgtccgatctggcgtccatcgtcggaccgcgccagcagccggtgatgcgcgatcactacttcctggcggtgcacccgttgtcgcaatacgtcttgctggcgcaggagaacggctcgatcacggactga

SEQ ID NO: 362626 - DNA, 588 bp, Pseudomonas aeruginosa
gtgagcgcaatcttcctttcagccagtgtcccgctagtcggccgcggctcgtatcacgagactgccaatccattcctcatccagtgcgctgtgagggagttggtcatagccgtcatccgtcagcacaagatcgtgtggggaggccatcccgctatcacgcccatgatctggagcatttgtgaggatttgggggttgattattccggggccgtagttctgtatcagagcagattcttcaaggatcgttacccggaagaaaacgaccgttttcacaatgtggtcttcaccaacgaagttgccggtgacagagatgcgagcctgctgctaatgcgggaagaaatgctatcgcgcgatgatctcgttgcagctgttttcatcggtggcatggaaggagtggaagccgagcatgaactcttcaggcaattccatccagccgccaaagttctgcccgtaccgtcgcccggtggggcggccttgaacctagccaaagatcaaggttatttcgccgacgcggatcttggcgatgtggactttgcacaactttttcacacgcacctcgcattgaacattcaaggcgcagcgggctga

SEQ ID NO: 362627 - DNA, 861 bp, Pseudomonas aeruginosa
atgtacgattcaatcgcatcaattctcagaatgtggcctcatagtgcagggaaggctgaagtttttgtcaatgcttttctttctagtctaggtgtctaccctgtcttggaaaacgttgcaccgcttggtgggagagatggagggcgtgacttgcaaagccacgatggctccctaagagttgcatgctattttcctgttaaagaattcaagccctacgaggatgtcgaggcaaaatttttgagtgacatggtcaaggcgcagcggggcggcgccgagcgttttatcttcgtcactggccagatgttgcaactcgcagataaagagaggcttaaagcccagagctttacttcacatactgtcatttacgactgcaatgatatcgtcagcgtggtcagcgcacctggggcgggcttcctgcgtgctgagcttggctttcctgaaagagaaaactcgtatgatcatgactttttcaagtcactattcgccacggtgagcttcagtaacctcatccatctgttcaacgagtcattggagcccaagatttatccaagtggtttttttgaactttttgacaccttggatattttcaatcgaacagctcagcccagtctgctgaggcaagacttcaacgaggtatatgtaaactgggtcaatgctgtttacagttttcacgatcaactgcttgggcgcgatcaatttgaatatgttacggaaaatcggacgtttgtgatgaagcgattaccgttcgctcagtatcaagtcgtctacgaagaggtcggtgctgcgttctctgctctgacgcagcggacgatgcaactcgccaattttgttgctgaaaagttacagatccccatccgatag

SEQ ID NO: 362628 - DNA, 1191 bp, Pseudomonas aeruginosa
  misc_feature (540)..(549): n is a, c, g, or t
  misc_feature (1159)..(1168): n is a, c, g, or t
atggataaggccaggctcctattctcccgcaagggggagcttaaggagacgatcagttgtttcgatatcaccagtcgcgagcactaccgcaatctctggccgttggtcagcgctgatgacccgccacgccaggtctgttgggtcagcccggtgttcgaaggtggtgagcttaagcggcgatcttactttcgggagtactctggaaagcgaaaaatcactgcgaagacagtatttgacaccgaagaggaacagcgtggtcggcagattaccgagagcgctgagcatcttcaggctaaacgacttatcgctgcggagttacgagatcggatcgcgagaggcaaggcattaccctggtctttcaaggatccatccctaacagatttccacctagagggagatcttcttctggcggcaacctcagttgagacggaataccccataaaagcaccaccaccgctttcctctgcattccggctggacgttgcggtccttggtccggttctacagaaaaatcgaattatccttgcagggatagagatnnnnnnnnnngaatacgggcacgctttcgatggccgcaaagcgattgctggtcgggcgacgggatacccactgatctccatcgatatctctgacatgacactccaagaaattacccccgaatgggctaagcgtgctctgacagacaccacgacctctggggtagatgggaggcgaaagacgttcgtctacctcaacccgttgctttacccactgtacatcagacttccccatgaattgttcaagcgagagagacggcatcaattcgtgatcttcgcgcaagacgacgagttgcagaaaattaaagagcgaatcgaaacggtgcgggcaaggctcaaattgaccgagaaagatgtcgtactgcaactccctactggaagtagcgaacaggcaaagaaaatggtggccaacctgggagccattgttggtgatggttggacaggcatgaattcataccgatgcctcacggtatcactggatcgacccttgtcccgaggcgatcagcctcgccatctgatgcacttgttcttggcaatctatctagccggatggtgcagctccttggtcggctacaaatggcgcatgggcgtcaccaacgattatctcgaagaagacctgtggnnnnnnnnnngacctgtggaagacttggtatga

SEQ ID NO: 362629 - DNA, 1101 bp, Pseudomonas aeruginosa
gtgagcattgatgaccggataccagagctgcaggcagcaatttggaagcgcctagggaaaggaatgtacttgaggccaaccggcctgctggaaaagctgggcaaggacctgggtattcaccatagcgatgtccggcgtggattcatcaggcttaaggaacagggctggctggataacgtggccgccaatggcgagcctctcggtcaagtcagggtcctggctaccaaaccatcggccgccgagccggagtcattgttggtttggcgttcggcattgcagcgcggcgcgttggatggggaatcgcaagtactgcttgagtccctgcacctagcaacagacggattgtctccagagatgctcgaacggctcgtggcggggctctgtcgcctgcgagaggaactcagtcagcctaccgatgaatcggtcttcgttgtcagcaccaggtacctgctgggatcatcgaaagtcatcggcaagctaccggctgctccgatgcgccagttctgtcccgcgctattcgctcagcctgatcgcatcccctatgtggtgactgctgggccggcgttgcccgagagggttgtgctcattgaaaacccttgggcgtttgaacgtgccattgaagctgggttggcagagcgctgtggattgatagcgacattcggctatgggctatccaggaagggtgaggcgtatggaaagcagctgcagagcctcctgagcggtagttgggcggacctgatccaattgcggagaaatcccgaagtagctgaactcagcagcttgctcacacacccggttatcgagttctggggagacttcgacatagaggcgtttcggatctaccgaagccttctccagcgcattccccagttggtgctcagctctctttacgcaaatctgcgggattacctgctggcgggcgaagggcacgcataccatcagattactggtaaagaggggcaggccccgctggaggctggtgagtttgcggatctgccagaggttcgagcactagctgagttatgtgctcaccgtggcctagatcaggagtatctctcgttgcaggaaattgcgactcttggtgggcctgggggaggttag

SEQ ID NO: 362630 - DNA, 5772 bp, Pseudomonas aeruginosa
atgcccctgattcacgcgattgaggtctcaaacttcctgaaccaccggcgtaaagctccctggacgcccgactggcgctgcaatcgctttttgctgggtggctaccatgccgcgctcaacatccccaacggacgtggcaagagcacgatgatgttgatgcttctggcgatgcttgccggcaagaccaaaaaactcaatgagctgatgcgaaagcacgccgcgccagaatccaccggctcgttcacgcacctgcgcattgagatcacgcatcgcaatccagaccacgaggacttgctacaggagcttgtaggcccaggcgacggcgaaagaatggttttcggtctgtacggtaatgtcagggatggcagtaccttcgatttctatgcgtaccggggaacgtttgatgactgccccttaagtacacaaacaggtccgatcatcgacctggttactcgtgaagagtttctggaatgcctgaggaagcgccctggcctgtatccatccaaccagaaagagcggcaagtcgaggagtggcgtcgtttcatcgctgagcactttgactctgcatcgattctgcagcagtacgcctatcaggcggcgaatgccgcggaaggcgcaagcacctacttcgaggtggagtcgaaggcgggtaactacagcgctcagctgttctacaagcatttggctcctgagcttctcgcagatgtaatgggcggccacggcgaggaggatgagcgtggaatcgaagacactatccatgaaaaggccagcagcgtggtccgggcgcgcaagcgaaccaaagagaccgcgcgcgagctggatgaggccgaacgaatccttgagcgccttagggatctcgacgaagaggtgcggcaaattgaggctgcgcaagcggatttgcacgccacacggcagccattgatcgaggagctttgcgtccttgaagacgctgtgctcaaaaatcctatcccaggctccccccgtccgcctttggcggaagatcccgatctgttccactacatgcttctgcagcgcgaggagtggtggatcaccgaccaggggctcgcatccttgttgaatgagccggtaaaggctcttaatcagcgagtgatacgggccttgaaggcacgaccggatacgactgcgcagaaatcgcaagctattgatttatcttgtgaccttgctcgttttgtcccggctcgtggcggccatcctgcgaaactttacaacctgcccgatgcgaccacgctttgcttcgacgcgatgagtgatgaagccgcgtctaatcgcgaggtagtgatcgcacagttgaatgcagccttcgcttgggcaagggatcatgctgacactaaccctgcccgtcgtgaaatccgaaacagcaaatttcagctggcggctatcgctgcgcagaaccgtaccttggatgaagaagccgggtcgctacaagagcagtctgctgaactacggcgtgaggaagaggggctcagaagcggcggtatggcgtgggagacgctccagaaaagcggctacttcagcgaacaggaactgtccaaccccgcaagtacggaggcggcggtaggggaagagtcgttgcgcgcgaaccgggccttcgatcaccacaacagggtcacgtcagagcaccaatcaaccttcttgcagtggcaaacgttccaggccgagcacggtgaagatgtctcgccaggcacgttggcagccgacttggagcgcgagacggtcgaggctaggcaacaagccgaggaggcagaccgtaagcaaacggcccaaaggagcctcgtggccgaactggaccagcagcacaagcaagccaggtctgatgtcgagcggcttcgagagagccactccacggttacccactacctccccggcactagacttttccatgaaatttttgccggcgagtccgcgacggggctggagcagcaagttctcagtgagcatgatgaggcaaaagcgaaactggatcgctgttctggtgacttgagttcgctcgccggagccatcaacgcgctggaaacgttcagtcaaacgtatccaaacagcgaaccagcccaatggcttcgtgcgcgagcagacgagagaaaacagctaggcgagcaagaaaccaccattcgccttgcattggggcgtggacaggaattgctggagcgcgcggaagaacattggcaggcggcgacatcgtttgagctgcgctttgagggtcttccgaccgagggtttggaggcgcaggttcaacgggagttcgagagtgcgcaagcatcactccgccaggatgaacaagtcttggcagcccttcagcccgacctggcggcgatcgagcaatttcagcaacgcttccccggcgtgcaccctggggagtggctggcgtaccgatctaaacaggcagttcacgctggcgaggtgatttccgctagcaggccgcgtttggactctctgctagctcagcagcacgtcgtcgtggagcatcgtgccggggcagaggcctatgacgcctacttcctgaatgaagatccgtacgggctgactggcaaggttgacgcggagctcgcatccgcgaagcttcggcgaggagatgccctgctttctttgacacacatccagacagatcttgatgctgtggaggtgtttagagctgaggtggttggcctggagccggggctctggcttgagcaatggcacacatctcgctccgccgcagagcaggtgttggctgagacgcgcgaggaatatgaacgcgttggtgagcggcggcgcatcctcgacaaagatccggtggtaccgggctcgaccgctcgtgctgcgatggatgttgcgggagtaactgcgcagccgctttacgcctttatcgattcgctcgagctcggcgaagcgcgcaaggaagcggttctatcactgttctccgctttgatttttgccccggtgcttcccagtgtcgaagcggcggccgaagtcgcggcgcgtttggctcaggcagatatcgacgtccccgttcttgtgtctggcccgctcggtgagttttgccgaagcggctcgatatcctatcgcgatggggtggccgatagctggatcgtcggtgtcaaaacctggccggtggcctgtttgcttgacccgggtctgctgcagcaagagcgtgctcgactagatgagttgcttagtgagttgctggcccagattggcgagtttcaggcgcgctctgatcgattcgttgccgaggtgcctttcgctcacgtagcagagcaggcgcgagatgcgattgcacgtcgaattcccgagcgcggggctgagcttaaagccttcattcagggactggatgaggatcttcccaggctcgaacggcgcgcgtcggcggaagctcaacgggctattgagtcgcggctgatcacgactgaaacgctcggtctcacgtccaatgctggctgggattccattctgcattctgtggctgagttggatcgtcttatcgaggggcttcaagtcagcctcgatgaagcgcaggccgtgctcgtcgaacttaagcgggacgctgatcaggaggccaatgccgtagtcgctgcgaaggcgatcgaggaagataagccctctctggccgaacagctgcgtggatccgtttcccgactccgctctgaattgcccggtctggaagatagggcgtcgaaagaggcccggctttccattcgcgccatggcgagtcttcaaggcttgctccgactttctcctgacgactcctggcaagttgttgtggagacgcgcgccagggtcgaggaagatttagctgtccaggatgtgacgctgcagggcgttctccaatccattgagcgatggggccaggcttcgtcgattgagcccgtcgcgcgtgaagcagcggcggctatcgaaaacggggttcgtgagcggcatattgcgctgctctcgctcgcccaggagcttgaccagatcatgccccggctggcgacgcgagcatcgtttgacgccattacttccattcgggcgatgtgcgccgttgaacaggaattgcagggcagatcgcttgatgagctgagcttggcgatcgaggaggccggtaccaagctcaatggccttgccgttgatctctctggccacgaggcagcgctcgagacgctggtgcaatttagggaaagaagccaggaacggcttgttcaggtccttgagcagtctcgtcagattgatggcctgaggcgccttcagtgctttgtcgatcacccagaacatggcccggatttcatggcgagggctgatgaagtaaggggccaacttgagcgcgcccgtgagaaggcccagcgcagagccgcatttgacttcgagggtgtggcacagttcgtggaaagtggtgggaacgtccgactgaccgctatccaggcggagcttggggctgcggaaacgcgccttcaggcgattgcagaacttctgaaagagaaccagaagaaggatgagcaactgcgcgccgaacaggagcccttgcgaagggcggagcgcctcatcgacgagtcgatcatacgagtgcggcgtggctacttggagcgcaagaaagtaatacctgagccggcctcaatcagccctgagcagctgcgcaaccatgaactctatcggatgctccaccccgcgggtgacttctcacatatggatcttgctcgaagcatggatcaggcctgtgagtcgctgtcgtccggagaggctgatcagttgcggcaacgcttcagcgacgctgaaaaagcacttcaacgtcacacggaaagtttcatcaggcttaccgacaaggtactgggcgacactcacctcaagttgcctgaagtggcgcgtactcagctaaggcaagcgcgcgagaacccctcgctggtcaccgtgatgcttcaggccagccagttgtcattcgatgaaaatgtgaaggtcaacaggattgctgatgagcaccttgccgaggaacgtgccggactcagtagctggctgacaaacttcacactacgactacccgacaacctcaagacactgcgcgccgttctcgcgcctaaggtcgatcaaacatcgaagactgtgctcagggccggcttcgttgtcgaggccaaggtcatcgattcagagggtgtccagacactaatcgagtcgatcatccaggatgtagagaattacgaggataatgagcaggccaaggaatcctccgttcgcgaccacctgaggaaaagcctgcgggaggacatccgcagaaacttctatcagaaagtgatcgtgaatcctcgcatccacctcgttctgcccgctatgagcgcgacccctctcgagatggagcgtgacatggcgagctctggccagggaatcgcgattaccttcctttggatcctgcgactttcagagttcatcactgagcgggagatccgtcggcaaactgttggacgcgcgcagcgccaacggctgcgagatcggtccacgagcttcactatcctggatggcgcattctcccacctgtcctcgaaaagcctgattgacgaaactttgaaaggaattgaggacacgacggggcgattccagttgatcgttaccgtccatgatccagcttaccagaatgatttcaatcgattccccgctttggtagtggccagagagatgcaggggcactacatgcgcgcatggtctcacctgaatgaagtcggtgagagagatgctttagggcaagacagtctcgccacctttcaggccatacgggtggctcgcccagtcaaagcagcggaggatagccggtga

SEQ ID NO: 362631 - DNA, 849 bp, Pseudomonas aeruginosa
atgtccccagctgagcaaggcttcgtgttctcaatgttgctcaagcacagggaaatctccacacgtcccatagggcgctcggcatatccagatgagatgcgcgctgcccgaatcttgttcgatagcaggcagtcggtactcgatgacttcgatgagtttctttccggccagggtttgggattgcgtgtcctcgatggcatcgcagatctgaccgtccctgaccagggtgggcgcccgatcgtttactacatcctctgtcgccgatttggtgaggagtctccgtcctacgttgacgcaaaggccttcttttcagatttccgcgatcgtcgtcgagagcggaatgctgatgatgaggcggtggagctgaacaagaattcttcggtcttctggatcgcaaggctttggctgacccttcagtacttcttctacgaccgcatcgatcgaccggttggcaatctctacaactggcgcaacgccttggtgaaagagaccgacttcattagccagctcaagagcgatatcgagacgatggggaacacaggccgcccagaaggcgaagcgggcttgctctgggatgactactggcagaagcgagggagcatcccccagatcgctcgccgattcttcaagctcatgaagcaataccgaatgatcgagcagaccgaccaggacggtatctggcgtcaatcattagtggccgctgtcgacatgtccggtattgctgaccggtccttgcgctacctgatgccggttgtagatcaagcgtttctgactcgagcccaatcgctgatcaatggctacgaagagctttccgtaggagaagaagatgcccctgattcacgcgattga

SEQ ID NO: 362632 - DNA, 1464 bp, Pseudomonas aeruginosa
atggatctattccaggatggcgtgccggtggtggcgcggaatacctatttgagccagcttggcccgtcctccgaggcgtcatccgacctgcctgcggaggtacgacttgtcgcggccgtctcgcggcttctcgacttccaccaggcccgaagctctggcggcaatgtctcgatccccgaagtacctgagacagcggcgcacaatctgcatctcgccatctctctgatcaccgctcttgggcagtgggaactggagcaaggccaggcactggtctcgctcaagctgctgcggcagctcgcgatcgaggatgtgcgatctgtcgatgacgtagccctggaacactgcgtcctgtcgctttcccgcccgcgagaaatccgcttcggcgtgaagactacggagggcgtcggtgtcgccagtacgagcgataccactccacttctcatctttgacggcagcctaaggcaagttggactgaccgataacgctcggatgttcatccgcgtcgctgagctcaaggacagctggctttacagcgatcttgatgcccaccgattgctggccgccctcgaacggcgccaatttgcggatattcctcgattctgtcgggagatgctccgggatcttgcgaccaaagcccgacagatagcggacgtgtccgagcggccagcgtataccgatctgcgagcggggttgatccgagaaggcgccatcattagcagctctcttcgggatgctgcggatctcgtgcacaaggccatgcggtatctgttttctccgcccgtggtagacgcttttgacctgtggaaggcctctagcggcatctcttacgaattgagcaacctccaggcggagatggaaagggttctccaggtaacggagagtctttccaggaggttcgtgcgctttctgactgacgcgcagaaggcacaaacagttcgtagcccatcaatcggtttcctggacctggtcaactcactgcattcgcgaccagatgggttcctcgagcaactcgagtctgcgacagccgattttgtcccttgggcccccgatctagccttcttcagtcctgaccttatcgccggtgaggtcaatctatcgaggctctatgcccaaagcctccccactcctcccaaactctcgttccgccagaccgaccaggtggatgaccacgctgagcaagtgcacgagtttctgctgcgcaacgccgagctgatagtcagttcgttgaaggctggccccaagccgctcgaggagctgctgcggcttgagggactggtctatgagggggtggaggggattgccgacttcacgggggcctactcctaccccgaggtctttgaagtgggtgagcaaagtattcgcgtcgtgtatcaggacgagcttatcgaagtctcttcggacagctccgttctggtcaccagcaatccgattctgtttctggaggtagctgatgtccccagctga

SEQ ID NO: 362633 - DNA, 765 bp, Pseudomonas aeruginosa
atggaatatttcaaggacctggagtttgatctgccttccgcgcttttagcgcaattagtggacttgttcgagcgcatgacgccggggccgctcaatgaggaaacggttctggaggttccggaggagcagggggtctaccagctgtttttcaatggcgaactggtctatgtgggaaaaaccgatgcggacgccggcctgaggcaacgattgctgcgtcatgcgaagaaaatccgctctcgccggaacctgcatcagagccaggtgaccttcaaggccgtgcgggtctacgtgtttaccgcgatggatctcgaggatctactcatcaagcattaccggggctccggtatctcgctcgcgtggaacctcagtggttttggttccaatgaccctgggcgaaagcgtgacaagtcgcatattaagcaggggcacttcgacaggctatttcctattgacctcaacttcgaggttcgcgttgttcagccgatggatgaccacagcgtggcggaggtgttgagacagttgaaggctcaattagcctacacggtcagattccaaaacaagggcgccaactccaagaagccccattccgacctcgaggggacgatggtgcgattgcgttccgagaaggacagtgtcttgaatgctctgcgtcaggtcaaagccgctctgggcggagcttggcagatcaccgccttaccggggtatgtgattatctacagagagcgggagcgctatcctcagggagaggtcattcaggcaggatag

SEQ ID NO: 362634 - DNA, 2211 bp, Pseudomonas aeruginosa
atgcacatagaatcattgaggattcggaactttcgccgcctgcgcgatgtgaaaatcgacctggcgcgcgagatatccatctttgttggggccaacaatagcggtaagacctccgcctcacacgcgctgcagcttttcaccgccgcctcgaaggatcgcttctcgatacatgacttcagcgttgcctgctgggaggggatcaacgcgttcggagaaagagccgacggcgccacgctgcccaccatctccctcgacatctggttccacgtcaacgaggtggatttgcaccgtgtcgtcgacctgttgccaagtttggactgggagggctcactggtcggcctgcgcgttgagttcgcggcaaaggatccggaggcgcttgtcgctggcttccaagaggcccgggagcaggcgcgggccggcgcaggcgaggggcgggcccaaggttacgagccggtgccccggaccttgcgtgattatctcgaggacaacctgaaccgggagttcgagctccgctattacgtgctggatcacacccagtttgacgcggatctacaaccaacgccggactatgagccccagctactcacaccagataagggacggacgggacgggacatcctgggatcgctcctgcgggtggacgtgttacacgcgcaaaggcatctctcggacagcgccggaggaagtcgcgctgaggatctctctcgctgtttgagtcgcttttatgagcgcaatcttgagaaacgcggccacgaccacagcgccatacaggccttgtccaactccgaggcgctactgaacgaccacctaagtcgcgtttttgaaccgaccctggcacggctttccgatcttggctatcccggcgtcgcaaatccgcgcctgctcattaagacggccctcaaccccatcactatcatgagcagtcacgatgcccgtgttcattacgcgctgggagagccgcgagagggagtggatccgcccaccctgcccgatcaatacaacgggctcgggttcaagaacctcatctacatggttgtcgagattctggatctgcatgcgcgctggatggatatcgaggagaatcgcccgccgctgcatctggtctttatcgaggagccggaggcgcatcttcacgcccagttgcagcaagtgttcattcgcaagatccaggacatcctggagatcgacgaggagaaccgtccgtttcacgccactcagctagtggtcaccacacattcgtctcacatcctctacgaacatggcttccagcccatccgctatttccgaagggtttccgcgccggaagggcaatcgtccgaggtgctcagcctctcgaagttctatcagaacaccgaaaattcaactcgcgacttcctggaacgctacctcaggctgacccattgcgatctatttttcgcggacgccgccgtcctggtggagggcaacgtcgagcgattgctacttccgggaatgattcgtcaagtcgcgccacgcctacagtcgacttatctcagcgtcctggaaatcggcggagcctttggccatcgcttcaagacgctcattgagttcctcggcatcaccgccttgatcattaccgatatcgacagtatccgtggaccaaacaacgaggccgcgatcgatcaggtggacgccgaagcggtggatgacgaggatgacgatgaccccgagcggacgggaaccgcctgcccggttcacaccgagggcgccacaacatcgaatcagacattgaggcagtggctgcctcgcagaacctcgatcgccgagctcttggaggcgacaccggagcaacgcacgcagcctcgcgccaacgccggcgacgcgctggtgcgcgtcacctaccaaacacgggtcatggcccaatggcgagatgagacgaacgtgatcgcgggccgaactctggaagaggctttcgccctgcagaacctgcgccactgtcagcacatcgacaacgcggatctgaaattaagggtgcgcggcgccgacaatctctccctggaacagattgccgagcggcttcacaacaagatcaagtcatccaacttcaaaaagaccgacttcgcgctcgcccttttaggaaaagatccggcgacttggcaggttccctcttacatcgccgaaggactaggttggctcgaagaggaggtggctccacctccccccgctcccgccaacgcgggtgccatgccatga

SEQ ID NO: 362635 - DNA, 1884 bp, Pseudomonas aeruginosa
atgaccagcaggattaggcaacccgacaccgaggcggacctggctctccggcgctgcctggatgaatcccctgtgcgcagtttcatcatggtggcgggcgcgggctcgggaaaaacaacctcgctggtcaaggcactcagccatctcgcgtcggccaaggggaatggcctccgtcgccgtggacaacagatcgcgtgcatcacttacacagaggtcgcggtcggcgaaatccgcaacgacattggagcgacctcgctgttccatgtgtccaccattcatagcttcttgtggacgatagtgagcccgttccaaaacgacctgcggatgtgggttcgcgagcggatcgagcaaaagatccaggaagcgaatgagaaggtggccaggccaagaacgcaggcccgcacgcgagagaaactcgctctcgacatcgagcggtatgctcaacaactcgcgtcactggagcggacgacacgtttcacctatggcacgggcagcgactatgccaatggaattcttggtcatgatgacgtcctgagagcggggccggagctgatcgagcaacggccattactccgctcgctggtcgccaagctctttccctatgtcttcgtcgatgagagtcaggatacgaaccccaaatttgtcgcggcgttgcgccagatcgaggagtccgttggcgacgagttctgccttggcttcttcggcgatcccatgcaaaagatctacctcgccggaattggcggcatcgccgccggacagggatggactaacatctccaagcccgagaactttcgctgcccccaacgagtgcttcaggtggtcaaccgtattcgagccgaggctgatgggctggaacagatacgcggccgaaccaccattcgagagggcgtcatggagccggtgcagggaaccgcgcgcctgttcatactcccctccgatgaacatcgcaccgagcacctggcgttggtcagacggtggttggcgcgggtaaacgaggatccactttggcttgaggatgggagcgacgcggatgttcggatgttggttttggtgcatcgaatggccgctcgccggctggggttcccgaatatctacgccgcgctcaatgatggcgcccccagcagcctcaaggatggcctcctcgacgggacggcctgggtgttacggcccttcctgacctttgttcttcctctcatcatggcctcgcgcgcgggaaaaagctttgatgtgatagcgctgctccgcgcccactcccccctcttctcgagcaacctgcttgagaaccaggatgccgcgccacttttgcttcatctccgagagtcgctcacccatctaaagacaatgttcgaaggtggcacggcgtcaacaatcagagaggtgctgaccttcatcaatgagcgaaacctggcataccttgatgagcgctttgtggaacaccttgtcgatccggaagcccctgagaccgaggacgattcggagtggacatcggtcgccgcgtttctggacagccatgcgaacgagctgtggggataccgtgactatatcgagggcaattcacccttcgccactcagcaaggcgtgaagggcgccgaattcaaaagggttctcgcggtgttggacgatgaggagagcgactacaaccttttctcctatggcaagtatttgggcatcactcccctctccgacagagacatggagaatctacggcaaggcgaagactccgttgtcgacagaacccgacgactcttttacgtctgctgctccagagcggttcaagaccttgccgtcgtcttgttcgcccccaatgtcgccgccgccaagcaggtcagccaggaaaaaggactcttcgcgaatgatgacatcttatgcatggaggacttgtag

SEQ ID NO: 362636 - DNA, 2385 bp, Pseudomonas aeruginosa
atgccaagcaaacgggcaactattgaagaaacagaagccgacctggaagcgcgcgtccgatcggcgattaaaatggcatttccttggctcccagacggtgccatcaagcaccagatcaaattcaccttcaagttcggaaggcagaccttgaaggtcgatgcagagaaatcccgtgccgaggcgcgactagacatcctgctggagaaggacggcaagcccctagctatcatggagctgaagagacccggtctcacgctgaccgatgacgatggcgctcaaggcctttcgtatgcacggctggtgcagcccccggcaccgctcgtagtcctcacgaacggcaccgatgtcaggctcctggaaacctctacaggaaatccttggcaaccgacgactacgacagaagaagcattcaaagacctcatcgcgcaagcaagccgcgtcgctggcgcggacattcggcatgccatcgataccctgatgggcgcaacaccgaatgcgtggatgcaagccgttcgcttcgtgtcagcagatacgatcgaagagctaacagcgtcctgggacgaaccagcacttccgttcgccgccgactttctcgcgccgcgcgctgcaacccatcagctgtggcgaaacctggttgcgggggagaagttcctggtggtggaaggccctcctctggctggcaagagcaatgtgcttcgcgaaatctgtgcacgcacggagcagagcgatactctcgccatcctatacatcgaggcaggcgttggcggtggcgtgcttcaaacggtggccgacgcaatctcgcgatcgctgagctggcccgtatcacctcaagaggcgcgtgactggctgatccgtgtctcacatcacgatggcgtgcgactcgtcctggcatttgacggtctgcatgcagcagacactgcatcagtgcgggagatcgaagatctctcttccagtgcgttcggtccctccttggcagtggtggtggcgatggatgacgctgtagcgcagagcgcactccgaacgccaaaccagcgctctctgtcgccattggggcgcagatgcaagttggtgcgcgttgaacatctgcgcgatagcgaatttaagcttgctcaaacccttttaggaaagcgccgcctgtacttgatgaacggcgccgacatggcgcccgagtatcgagagccgtgggtgctgcgagcgatcagcggctctggccattccgcgctcaagggcaagccggagacgcaggcactttctttgccttcgctgctcgggctgcggttactggagctcgttcgcgagcgtttcgcacacgaccacgagcttcgacgaatgttcaggggtctggcgcgctcaatgattgccgatgcacaggacacaacacggccacccgagatcgtgcttcaacaatcggagatgggtatcatccgccgcgctgcggttagcgcggagcttgatcccggtgacctgcaatggcttatcgatcatggattcgttcgccctggcatgcacgacgtcgcgggtgcgacgatcctggttcggctgccagagttactggccagcgagatggcgcacgcgttggcagatgaacttgtgaagcgctccaaggaagatctgcatgaggctgcggcctggactgccggcgcggcaagcaatcttccccttggcgaggtggtggcagcgcaagccattgtggatgccgccaagcgtccgaatggcctgcccgttggcctaatcagcgccctggtggaaatgccccccgaacgcgaggtgctggatgccggtggtcattacgcaatggtgcttcccaatggcgctatgatggacatcaaattccagcccgatggcaaaggcatcgtcatcatcgatggggaacagcacgagattgacctcggtgatgaggagcaggtcacctacaagaacatccacccctggctgatcttgtctcacgtggcatccacgcctttcgaggtgatgggagaacatgggacaacgagagaggacccaaacctgctgctgcagattgggacgtgccctgtacctctgcgcggcaatcgggggccgcaatcactacggatatttccgacgcttgacatgcccgatggcgcatcaattgtgcattcggacgcagggattatagagcctgtcacgctcgggatcctcgactatctttccaccgcagaagaccaagcggacaactgggtcgcgactgcggccaagtcgggctcagttgccttactctctcgggtacatatagcactgggagttctggccggcttcgagactcatgcgagaagcgaatgggcgaaggctcaactcaaggccgcgattcttccaaaactgcaggaggccataagtgatgcagaagcaccttcaccacaggcctga

SEQ ID NO: 362637 - DNA, 336 bp, Pseudomonas aeruginosa
atggaaaatcacagcggcttcgtcagcgacgctattcttctgtcgatcggacgcgccattttgcgcaagcaagagcgcgaggatcgcaatatcaacgatgcagaagcgcagggtcatgcgttggtcttgcaaggccgctatggctttgtcgagaatgcgaaccaagaactgttctgccgagaggtcgttcgctcatttcgctacgttgagcagcgcgagttgcaggcagtttcgaaggtcgcgtatgcgaagttccgcctcgacgagctcactggcaattcggttttggatgaccagcttgtgggtgatctggcgtccttgggctactcggcttga

SEQ ID NO: 362638 - DNA, 237 bp, Pseudomonas aeruginosa
atgaacacgacacgcaaattgcgccttgggccgctgcccaaaaccgagagcgtcaagctgaccttcacatgcccggccagcctgagggtcgacctcgaccgctacgccgcaatgcacgagcaggcgtatggcgaggcggttgatgccctgacgctaattccgcacatgctggacgcgttcatggctggagaccggggattcaggaggggaaggaggagcaaggtcgctccgccgtag

SEQ ID NO: 362639 - DNA, 330 bp, Pseudomonas aeruginosa
atgcgcagtcttcttgtgctctcggtcgtcttgttggcagcctgcgatcggccaacctgcggggatctggccgaaacgctggccaccaatccggcgcggctcaaggcgctgctcaccgagtgcgtggccgactggcgggcggtgggcgaggacacctgccggaccgtcgtcgaggcgtaccggcgccgcttcttcgccggccactccggcccggacgagtatgtcgtcctggaggagttaccgccgatttcaccgacctttgatgagcctggcgacgaggtggccgaaagcggtgcgcggcgggttgtcgtcaaggaggacgcaccatga

SEQ ID NO: 362640 - DNA, 282 bp, Pseudomonas aeruginosa
atgctcaaggcggacctgctgcgctccccattcgccgctctgcaatgcgcacgtgaattcctttggctggtagggcacggcgtcatggccaccctgtggttgcgggctctttccaccctggacggcgctggtctgcccatcgacaaggtcgcgaagcgctcgcaaggccagttctatttctcttacgtgctcccggatgccgagctgcgcatcagccgccttgaggcggctagcggcatcgagcaggccctcaaggcctatcccgtaagcctcaacttttga

SEQ ID NO: 362641 - DNA, 177 bp, Pseudomonas aeruginosa
atggtcatccaggatggctggttccataccggtgatatgggctacgtcgacgaccgtagcttcctctacatctacgaccgcaagcgggacatgatcatcaccggtgggagaacgtttaccccgccgaggtcgagaacatcctctatagccatcccgccatcgccgatgtggcggtga

SEQ ID NO: 362642 - DNA, 2607 bp, Pseudomonas aeruginosa
atggcgtcgattgctggcgttgaggttgccgtcaagcttcatatcgctaggggcgatgacctaaacgcccgggacaacgccggcgccactcctctgatgcttgccgccgcaagaagaaaaaagggtgttgtgcggcttcttttgactgctggagcaaatccggaactgctcgactctcaaggggtgagcaccctggcctacgcggagaagggtggatgttctgaatgtatcgatctgctgcgaaatgctctggatattctggactcaataaaagcgaacgaggtgcttggagaggcttcacccctgtcgagtgggtcgacccaagccaatgctacaaaggcagatacttctcaggcctccctctctagagagcttgattcctgcaaggcggaggatgaaccggtctgtatggaaactcagctcaaaaaagtggctgaggttgatggccgtttcattcctagaccctctacctctggtgaagggccttttcttaaggtggaggagtcgttcaccgttaaacaagctttacccgtcgttatgggaaggctgtcaaacctcatcgatattgacgaagaacctcttgagtctggatttgaaagcgactggttagcggagccggaggcggttgccccgaagggtgacgataccgttgccaagggaaccagtgcacttcaggaggtgatcggtcggcacaaagctatcgatactgatgtggaatgggacgacattgacctgttcctccccgtcagggcgcttccgttggcgcatgacgagggcgaaggcgttcgtggtttgctactccgggcgttgcgtgagggggctgtatccgaagccgatcttatcgaggtctgtcgaggggctgacgactgtcgcaacgaagagtctgagcgcttgctggcctttgttttgggcgatctgggtgtagtgatcgacgaatccggggcgtgggcttatcagttggatctgactcagccaacggccgaagaggagctgttattagttgaggccctggagtttgcggaggatctggcgtccggtcgcaacgaccctttgcgatactacgtcaaagggctcaaaactgaactgcttcgggccgaagaagaaatttctttgggacgtgagatggaggaggccggtgctcaggcgctggacgctctttctggctggcccgcaggcctttctatggttttcgaggctgctgatagggttgcgcgcggagaaactgattatggaacatttagttccgagattgcgcccggtgagggagatgaggagagcattgggtcagcggcaattgaggtcgatgctgaaaaagatgaagaagtagcctctgatcctaggggggcagctttcctctctgcaatctcaacggcaagatctgcgggcggagatcaagtccgagtgcgttcagcacttgcagctgcgtgcctttcaagaggcttcctgttagagcttgcacgtaaagcggccgatccggcgagcgagactttcgtatccgcagttcggcgccaggtgggtgcgagggagcggatgatcctcgctaacctgcgcttggtgtactccactgctaggaaatatatgtggtctgagcttcccttcgatgacctggtgcaggaggggaatatcggtctgatcaaggccgttgagcgctatgactggcgaaagggatttagattttccacttatgcaatgtggtggatccgtcagcagatatctcgcgcaatagacaacaaggctagaaccattcgcgttccggtgcacgttcacaaagaagccttgcctatcctgcgccagagggcgctatatgaaaacaggactggtcgccctgaaaccgaaatcgagacgtcgcgtcggatggggatacccatcgataaagtcagatttttcctggcagcttttgatgatgtcgtctccttggatgaggtcagcagggatactggacttcctcgtatcgacaccttggtggagtttgagacttcggatcctgcttctgcagttgaggaggactctcttcgggagctccttctcaagattattggtagccttgatgagcgtgccgctgaggtaatcaagcttcgctttggtcttgggggcgaggaacccatgactttggaggaggtggggcttcgattcaatgttactcgcgaacgaattcgacaaatagaatccaaagccttggggaaattatccacccctgcaaggaaagaaaaacttgccctgtacatgggcgatcaatttgagtggacgcgtccccccgcacccccttcctcctcagcggaaatgccacaatcgaccgaagataagcgtgctcgagaggtgacgtgtgatcaacagtccgctgatccgttgaaggatgttttccaatcgggcgagcagcccgtgtcggcgagaagccctgaggcagtatccgagcgtcaatatgagctgctttccgagcttctcgaagaggctcgaatgttagggcttgcggtagaggacgctcgtccccatggcggacagatccgcgtgtcgttttcggcacggccagatgccgctattcgcagtattgcccggaaactcatgaatgctggatttacccttcatttaggaaatacctacgtcaaatga

SEQ ID NO: 362643 - DNA, 1494 bp, Pseudomonas aeruginosa
atgctggaagccctgcgtggcctcggttattcgacagcagcggctttggcagatgtgattgataacagcgtgtcagccggggcaacagtggttcgtgtgaattttgaatgggatgggcaggaaagccgtatatccatcctggacaacggccgtggaatggacgacgccgatctggagactgccatgactcttggtgccaagagtcctcttgacgagcgcgcccccactgatctcggtcgtttcgggatgggcttgaaaactgcctccttctctcagtgccgctgtctcaccgtcgcatccagaaggatggatggccccgtttcctgtttgcgttgggatcttgatgccattgcggcatcgcaggacggtggttggaagatgtttgaggggccggcctttggttccgatgcgttcgttgagccaatcgagaccctctgccatggaacgatcgtcctctgggaacgattggatcgcattgtcacacccggctatgacctcgaccactttgcgggcttggtcgacgacgtagagctacgtttggcaatggtcttccatcgtttgcttgaagggccaaatccgatttttcggctgttcatcaacgacagattggtgagcccttgggatcctttcatgacaggccaccctgcgaaaccgtggcaatcaccggtcgctcaggttgtcactccgtccggtctggttgaggctcaatgccatgttctgccacacaaagatcggatctccgaggacgagtaccgtaaagcaggcgggccagaggggtggacatcccagcagggcttttacgtataccggaaccgccgtttgcttctggcaggagggtggcttgggcttgggcaggggcgctcgtggaatcgggaggagcctcagcggctcgccagaatcaggttggatatccccaacactgctgactccacctggaaaattgatgtcaagaagtcaaccgcacggccacctgtaacagtgcgcccttggcttaccaagttggctgaggatactcgagaaagagctagaagggtctttgcctttcgtggcgcgccgatgcccgggccgggtggcctcaaggtcgagcaacaagcatggcgtgtcgataggctcagaggcggtgtgcgttaccgcattgatgaggggcatccggcggtagcggcagtcatagagtcggttggtgacaaagctgacctcgtccgggcgatgctccgggttgtggaggagaccgtccctgttcagcggatatggctcgacactgccgagaacaaggacactccgagaaccggcttttcgggagaggccgagacggcccccgacggcgtcaagaccgtgcttctgactctgttccgggacatgatcgggcggcgcggcatgagtccggaggcggccgtcagagccctgtcatctacggagccttttcagatctacccaaatctcgtcgcgagcctcccggatatcgcggcaacgcctgacgaagggaacgcaggatga

SEQ ID NO: 362644 - DNA, 2877 bp, Pseudomonas aeruginosa
atgacggaagagcagagcaaggtgtttcagcgggtcgtaagcgtcgcccagacgttcttggccgaggccatggagaagggcgcggtcacgccgaccctgatcgccgagaaggtcgacttcgtggcgactcacatggcgccgggcgagaacgtcgacaggaaggaggtggtcgcggagctcattcgtcgattcagcctgtggatcggaggggcttccacgctctccgacaagaccggccacaaggactggctcactgccgcccgcagaaaagattggcgctactggcagcgctaccgcgacttcttggagggcaagatgtccgtcaaggccgtggacgccttggatgacgcgaccaacaaagtattggagctgctcgaagatcctctgcgtgagggatgctgggatcggcgcgggctcgttgtcgggcatgtccagtcaggcaagacgggcaactacacggggctgatatgcaaggcagccgacgcgggctacaagatcgtcatcgtcctcgccggtttgcacaataacctgcgctcgcagactcagattcgtttggaggagggcttcctcggctacgagacctcggcgaagaatgacgtagtccgctacatcggcgtcggcgagaacggtcgcgacgctgagattcgcccaaactgcgcgacgaatcgttccgacaacggggatttcaacaccaaggtcgcgaagcacctggccatctccccggagcagcgtccctggctcttcgtggtgaagaagaacaagaccgtgctggaccgcctcctcaaatggattcgcaaccacgtcgcggattccaaggatgccgacggccgtccgctcgtttcaggtttccctctgcttctgatcgacgacgaggcggaccatgcgtcggtcgacacaggggatcaagtcgtgaacaaggacggcacggtagacgacgagtatcagccgaaggccatcaacagccgaatccggaaaatccttcactccttttcccgaaaggcctacgtcggatacaccgccacgccgttcgcaaatatcttcattgatcgacgcaaggcgaccaaggaggagggacccgacctgtttccgcaatccttcatcatcaacatctctgccccctcgaactacgttggccccgcccgtgtcttcggactgcgctcgactgagggcagagacggtggcctgccgctgacccgggaggtgaatgatcagactgacgctcggggcgaggacggctggatgccgccccgacacgacaagagccatgtgcccatgttcgagggacgcgacgaggtccctccgtccctcagggaggcggtatccgtctttgtcctagcctgcgctgtccgcgttctacgtggtgagggccgcaggcactgttcaatgctgattcacgtgacgcgctacaccgctgttcaggaagaggtgcgacgccaggtcgacgagctcgtgaaacgcttccgcaaccgggtgagagggttcggtcaagcggagaaggataagttgatggccgagtggcgcgagctctgggagtccgacttcgtcccaacgtcggccgctgtggcgacggctatgggagaggcgggagccgagttcgaccttccccagtgggaggacgtcgaggcagtgcttcccgaagttctcgaagatcttgcgaacagcgtcagggctattaacggctcggccggggacgtccttgactacgccgagcgcgaggagaccggcttaaaggtcatcgccgtcggcggcgacaagctcgcccgggggctgactcttgaagggctctgcgtcagctacttcgtgcgctccacaaagatgtacgacaccctgatgcagatggggcgctggttcggctaccgtcccggataccttgatctgtgccgactttataccacctccgatctcgtcgagtggttcggtcacatcgccgacgcagccgaggagcttcgccaagagttcgataccatggcagcggtcaaggcgacccccgaaagctacggcatgaaagtccagtcccaccccgttctgatggtcacctcgccgatcaagatgcgcagcgcgaagagtcttcaactgtcgttcagcggcgaggtgctggagaccgtggcctttcatcgagacagagccaccctcgataagaatctgaccgtggctgagcgtctcttggaggcggccggagccccctgctgcgacggtgtcatctcccgaaggcgtggcgaaggtcgtcaggaatggaaggggttcctctgggggagcgtcccggccgactatgtagtggacttcttcaccagctatctcactcacccggcagcccggaaagtaaacagcgcagtgctggctgacttcgtcaaagtgatggctgcgggcggcgagctcacctcctggacggtcgttcttctgggcggcggcgatggcgcctcgcacgttttctgcggtaaatacgccatcgagaacatggtcgtccggaagccgaaggagggcggtgagcactactccatcgggcgacttctgtcgccgagagatgagtcgatcgaccttgaagaggatgcctggcaggcagctctcgaactcactgtctcagcttggactaaggatcccgccaggggaaccgaggacaccggtaaggagcccccgaagtcgcctagcggcccgtgtatcagaagggtgcgcgggctgggcgccgatggcgttccggggaatcccaagcgaggtctcctgctgatttatcctctcgatcccgccgccgcgaacctgcccgccggcggcccacctgttatcgccttcggggccagcttccccgccagtcgctcgaccacgacagtgaagtacgaagtggatcatcttctctgggagaccgaatatgccccggccgattga

SEQ ID NO: 362645 - DNA, 1017 bp, Pseudomonas aeruginosa
atgccccggccgattgacgagttcgtctctgcctgggaggcgctctccgggagcggagaggaggagagcggctggcgtggtatcgctgtgactcccgttggtgagtgcgagcttttggcagctcggcgcttccccggtaacgaggaggctcttctggctcgctttccgacggcccgtctcggttcgtccgagcggctgcccgagggccgggggttcgaggtcgttcgggcggatccccgcggcgatggcaagacttggatagcgctgtcccggaaggagtcgggaagtcccgagctgttcgtggaaatggtcgttgatgtcgccggtgccatggacggctgcgtggcggagggcgaggccgccgttctgcggaccatgctgcgccgggtgcgcatgtggcagcagttcatgtcgcgcggcgcgggacctctcagccctgaggcggaactcggtctggcgggagagctcttcttcatgggcgttcttttcgacgcggggatttctccggagacgatcctccagggttgggtcgggcccgacgacgcccctcaggatttccttttgggagacggggctatagaagtcaaggcgacgatgtcttcgtccggctttccggtgaagataggctcgttggagcagttggacgatgcagttgcctcgccgctgttccttatggctgtccggttcgccaggggagagggtggtgcgacccttcctgagatggttggtgaggtcgaacgacgtctgggcggtgagcttgagttgatcgacttcctgcacgagaggctcatggtcgctggctactcagacgcccacgcgggccaatactcccgaagattcgagccgaaggagaggcggactctctccgtgtctgcgggctttccacggctgacggtgggagccgttccagctggtgtcacacgagccatttacgaaaccaatcttgatcacgccggggattttctcgtggacctcgacgtggctttaaagctgctaggagtaacggatgacgcttga

SEQ ID NO: 362646 - DNA, 1785 bp, Pseudomonas aeruginosa
atgacgcttgacgaattcttcgctgagaccaggggcgagataacggctcagatgagcgacggatccccctttgctgagctcgttttctctgaagtagtgatgcagcacctcgttgatgccggaatgacgttcgagccggtcgtctgtcactttcaagggaaggtcggcaatgcgaatctgcgtctgagcggctacgccatgtctgaagaggccgatcagcttgacctgtttgtcagcctctacgagggtttcgagggcctgaagccgataccagagcaagacgtgaagacggcggcggctcagtgtgttcgcttcttggagctctgtgcagcagggcgcatcgccgataagctggatccgtcaagcgacgtccactccctggcgctgacgattcgggaaatttacgacgggcttgagcaggtccgtgtctacgtacttacggacggtatcgccaagtcgaagagcttcaaagctcgagacgttggtggaaagtacgtgaagcttgaagtcatggacatcgaacggttatttcggcatcgctctgaaggtaagccacgtgatgagcttgtcgttgacttcaatgaggtatccggttccccgctaccctgtgtctttgttccaggtgacaccggggactatgactatgcactgactgcaattccgggtgaggcgcttcggtttgtctatgagaagttcggctctcgtctacttgaggccaatgtccgctcattcttgagcgtgaaggcccggggcgtgaatgcagggcttcagaataccctccggaatgccccggaaaggttcatggcatacaacaacggaattgtattggtcgctgatgaaatgcggcttgaccgtgctgcagatggttcgcccggcatagtttggttgcgggggatgcaaatcgttaatggcgggcagactactgcgtcaattttctttgccaagaaaaaatatgcagatacggatctgagtagggttcgcgtgccagccaagatcatcgtcatgaaagaggaggatccttcaaaagaggagtctcttgtttccgatatttcgcgatatgcaaatagtcaaaactctgtgcgtcaatcagacctgtctgccaataaaccgtttcatgtcgatattgagcggttgtcgctctcggtctactgccctgacggtactgggcgctggttctatgagagggcggcaggcagttataacactcttcttgcccgagagggggtaacccctgccaaacttcgagcgctgaaggaatccgtaccaacctcgaggaaaattacaaaaaccgagctggcaaaatatctcatggcgtgggatggtcaagctgacgttgtcagccttggcgcacagaagtgctttgatcgattcatgtccggcatggctgaagtggaagctgaagggaaggctttcgctcctgatgttgcctatttcaaggctgttgtctcgaaagcattacttttcaaggcagtccataaggcggcgcggccattggtaccagcctttctcgccaacgttactgcttacactgttgcgttggtttcaaaaacctatggcgagtcttttgatctcgagcggatctggaatagacaaggtgtatctcctcagcttgttgagcagattgaaatctgggttcgggaggtcaatgatcggcttcatgagaccgccaacggcagaatgatctctgaatgggcgaagcgtccagagtgtcgagaggccatgttctcccgcccattctctgccccttccattgatattccggaggcgcgtcggggaggattgtga

SEQ ID NO: 362647 - DNA, 1629 bp, Pseudomonas aeruginosa
atggcgctcttttattttccccttggcgtgttggctagctcaatgaatcataaggattcaatcccggtcatcgacctctttgcggggccgggtggactcggagagggattctcttccatcggcggtcatgaaaagggaacacgcaagttcaagcttcgtgtctcgatcgagaaggatccagtcgctcacgcgacactctccctacgcgcgctgttccgcgcctttccgaaaggcgaagtgcctgaagcttactaccagtacactcggggcgagattacacgcgaagagctattcaagcatccggacgtcccggcggaagctgtggaggcctcgcaagaggcaaagctcgcagagcttggcaaggattcacatgaggacatcgaccgttggatcagtaaagccctgagtggcgcaaatgaatgggttctcatcggcggtccgccctgccaggcatactcggtagccggccgcgcccgtcggacccgcgagaccctggaggaatttgagagcgacgagaagcactttctatacaaggaatacctgcggattattcgcgagttcagaccaacgatcttcgtcatggagaacgtaaaaggcatcctgtcctcgcaacacagtggatcgcacatcttccagcagattctcgaagacctttcgagtcccgcaggagatctttcgtaccgcatccgctcctttgtcgtcgctgacgaagcggaaaaccttgatccgcacgacttcatcatccaagccgagcgctacggtctcccacaagcacgacacagagtcatcttgttcggtattcgctccgatgtcgcatcgaactgtcccgcattgctggagcgttctcacaacttggtgctggaacccagtcaaacggcctttaccgttggccaagccttatcgggactccccccactgcgtagcaagatttcaaggggaggagactcccttgaatcttggcttgcggcattgaatgaggccagctctatccttttgcgcccttatgtagccggtcgaggtgatctaatagataccatgcgaactgcagcggccaacgcacagcgattaaactcaaacggcagtcggttcataccttggaacgtagcgccaaagatgagccccaaacaacgggagtggttcctcgaccccaggcttgggggagtcctgcagcatgaggcaaggagtcacatgcgctctgacctgcacaggtacatttttgctgcaaccttcgcaaagctgtacggaacctcaccgaaaatacaccaatttcccgagcaactcctgccagctcatgagaacgtttcttccgcctcagtccccttcagtgaccgtttcagggttcaaatggcggatggcccatctacgactgttgttgcccacatagccaaagatggccattactacatacaccccgatccgagtcagtgccggagcttgactgttcgcgaagctgcacgactgcagaccttccctgataattacttctttgaaggtaacagaacacagcagtacacacaggtcggaaacgccgtgccgccacttctagcgcggaaaatcgcagctatcgttgcagcggtcatcgactcttatcgggcagggaaaactcgccaaaaattgcagggcctctga

SEQ ID NO: 362648 - DNA, 309 bp, Pseudomonas aeruginosa
atgcgctaccccaactccgagatgatcagcacctacgcaggctacacggagggggagcgccgtcgctgtgaggtgctgttacgtgacgatgcaatcgtcgtggagtacctggacgacaacgtccgggtcacttaccacggccacaagactgccgatggccactactcagtgcaacaggatgaggacggctattgctacagggccattctgaggcgcatcgcagaggatctgctagaaggggagtggcaaactgaccgccccggtgcaagttacagcaacggcacctggagcattgagctggtggagtaa

SEQ ID NO: 362649 - DNA, 192 bp, Pseudomonas aeruginosa
atggccaacagtgatgtcgttcgtgcccggatcgacgggcacatcaaggatgaagctagccatgtgctggctggtatgggactgtctgtttcagatgcgattcggatgctgctcgttcgcatcgcggcggacaaggctctcccctttgatatcaatcgagcacagccccaatccgaaatcaaaaagccttga

SEQ ID NO: 362650 - DNA, 252 bp, Pseudomonas aeruginosa
atgaacgagctgacgcacgaacaaatcaagaccgtgtatcggtcggcaatcgatcccaacgcccgggattccgagggcatggactggtgggaggctgtaggggctgaagttcgagccgtaatatcggcgccgacggctaaggaggccagcatggtcatcgcctggtggcatcatgactggagcactgttgcagataccccgttcaaggcagcgcaacgcatcagatcctcggcccggaaattggcagactga

SEQ ID NO: 362651 - DNA, 1026 bp, Pseudomonas aeruginosa
atgggttctactgtatcgactggcaaactggccgctgctttcaaagctaccagcggcaaagtcatgtacgtcctcttcgaggaaacctacgaatcgaactgctacccacgtaccccacgctggagcagctacatgattggcgaactgccttccgccatgcgccatattttccgcgccgcagccagttgtgaaggtggaatgctcaaaggtgctggaggtcgcgacattaccccggaaggttacatcgctggctggatgaaagaattggagaacccggtcgaaattgctgaccgaaagttcgatctgtatgcagtgaacaactacatggcaccgatcccgaccgagaacttcgcatgggccagggctgccatggtggccgtcgggcgcgaagctgacgcagtgaagctggagagcggggaacacctgatcgtttcactgtacgacgacgcggagctgctgggcgcgatctacgacggcattcggttcggcgctagtcgaatcatgaagtccgcaaccagcgcattgctcgcacctcgcaatccaagcctcggctattgcccgggcaagtcgaaggtggtgagcatgaacacccctcgcttcatgcgcgttcgcgatggccacttccaccacgcaacacaggacgccaacggtgactggcggggcgatgcttcgcacagcttcatgaattcttacatcaccaacctatggaaggaggaactggccgagcctctgacctaccgcggtaagatcaaggcctatcgtgatgcaatcaagaatgccccggtcatgcctagcagcacgaagctagtcatcgacaccaacgccgtaaccgaccgctgccaccaggagtcggtggattgggtgctgtccaataccccgcacaccaaacatggcgatgagatccacgtcgaactacccaacgactacaccgccttgcaccgcgtggcgaacctcagcgagaagttctcccgctacgtcttcaccgacaacgcaccggccgggcaactggatcttctggcctgctaa

SEQ ID NO: 362652 - DNA, 942 bp, Pseudomonas aeruginosa
atgaaatccaattttttgattgcgacatgcctgctgatcagcgcttgcggtggtggtggggaggttgaaaacaatgcttctcaagtcatctccagcggccaagtggatggccatcctgactggatgatgccgagtgattatgtctacgaggtcgtcaacagccctaacaaaaaagccatgtatggctatgaattccgggcgaaacgcacaaaggactgggaatccgatggttggactgtctgggtcgtatcgaacacctactccgatgagaaggcccagttgaacaacgcgggtcaggcagagcagagctatgttcgtgcccgacgagaaggtcgggcgatgtgggatctgaagaacctgctcaaaaatgcagggctgcaggtgtcaattaactatctttcttacggtcctatgccggcatcaacagcacgaaccgcatcgcgagatcatggtgtgtctatgactttcgttggcgatgagtgcggcacgggattcagggaatgtgtcgaccattacttctactctcccgctctccggctcaaagagcgcggaaagctgtcctataaagagtggcttgccccttatagctatttccctgacacggagtgggggcaaatgaacaaacgaaccatggccgcaaaaggattcggcgaagacgagtcttcagcattctatgactggtggccaaccatggtctttttggtcaacccagacaacgaagtcgtccgcgcatggctgccacagacgggtaacgaagcctcaccacacacagtcattcgcgctatagcagaagaaatggatcttgatccgaaaaccatctcactgagtggtgcccgccctcctcaatacaacacgttcccgtcgcaagcattttatgggacaagcacccaggaaaaagcgatccagaacatcgtcaagatccttgaggaaatctccggatga

SEQ ID NO: 362653 - DNA, 939 bp, Pseudomonas aeruginosa
  misc_feature (864)..(873): n is a, c, g, or t
atggctaagactgacgtagacaacagcatcaaggactacgacttactaaagctggtcgatgacaattttgctgacctggtcggttattacctcagtatgtggcaggactaccacgcacttttggttaactcagcgggggcggtggtaggtggcctagggcttgtatggacctctattctgatgttaaagagccctgaggataaattgaggtcggcgttcaccggcctcactggcactttgttaatgtatctactactttcggtaacctcattcacattccctggaaccggccacaacatccaaatggcacggggcggagggtggtcaattgcaattgttggaaacatttatgcagtttttaagtccgcattagataaggtcaatgaaggcaaagtcacgcaagatgcttttagcagggcgtaccatataacaaatcaaaacactctaaagcgttttatacaaagcccagtatatccaatgtatgcagattacttggataaatgtgagcctgcattcattgccgctaacggaaactccgccgaggctctcgacgctggcagatacgtaggtttttttggctctacaggaataggggctaatgaaatcgagtttgaggacagcagaagctttttggatcagattaggggtaaaggtgacgccaactacgacaatccaactaacgcaacatggttgaagcgagatggtggcaacgctgttgttgaagggaccaaaaatggaatggcgatgctcgacaaaatcaaaggtgacagcaacccttatgatggagccaaccccccacaagggttcgagattccgacagaagcatactgggcaacaaagatcttcaaagtacaaccttcagannnnnnnnnncttcagaactcgctgaccaacctctcgctttggatgcgggagacccaaaatataagaagtatctga

SEQ ID NO: 362654 - DNA, 897 bp, Pseudomonas aeruginosa
ttgaccatttctaaccgtttcccctccggcgcatccctcgaccaggtgaagaaggatgccaaaaagctagccaagtcaacggggctcagcctccatgaagctctggaccaagctgccgcagagcatggcgcacaggttccctggaatcgcatccaggagttcctcgctggcgatgatgacgagactttgttggcgagggtttctctcccactgcacgcgggtggcatattcacagtttccctcacagaggcgcgccccctgatttcagtaacggggcggcctggcggaggaaagtcgaccacagcgttgctcattgctgatcgatacctgacttcctcccggggtagagtgcacctggtaagccctcttcacctccaaccggcatcagttgtcgaagatgtatcagaagggtgttggacggatgtctgggatcggatcgcgttgaaatatcctggacgttgcgtccgtgtcgtttgccctgaacgtacggctgaaatgtatatggtgggacctcttgatttgactccttcgcaacctgaaaggggagacctagtcgtgctcgatgagcgttaccactgcgctaaagggcaaagtctggtcgacgtagcagagattgctcgcatgtggcgagttggccttatcctgtgcaaacagccgaggccatgggaggacgagaccattcccaatgaatcagttggcgatccattttccctgcacatcaaatgcaggcgcgaacggcgttcggatgaatgccgactgcagctggaagaaatggtgaatggacgtcggggcgaatgcctgatcgtgccaggcgctccctacggatcttcgaaacggaagttcaggttccaacgaagtgcgctgggagccctcaagagccattttgctcgtaagtga

SEQ ID NO: 362655 - DNA, 492 bp, Pseudomonas aeruginosa
atgccccactttcaaccgttccgcgccgctttcgctgccgcgattctgaccctgccgctactggcccaggctggcggcgctgttgctgttacagtgaccgcagctgcggcggccgccgcttccgactcaggcctcccaaatgccggtaattcatacggagcaaccgggtacttgttcgtggacggggtgggctattccgggggcaaaatggtgtactgcccggcttcagtcgggttcgttaaagcagcatcctggttacgttcgaagaacacgatagtcaaaggggattgtcaatataaggacggaaccctacctgccgtatcgtcccaagactttattgacgaggtcctgggcaagggtgtggcgactgtggtcagcgtggctcctgtattcgtccaatacggacgtcctctcggcgtgatctattacagagacaacggcaatggcacggatgtggattcgcgaccgaggcaaacagaaatctatgagtga

SEQ ID NO: 362656 - DNA, 264 bp, Pseudomonas aeruginosa
atgccgagtaaaaagcgcctcaccgaaaaggagattcggaaccttgaaggcgagattcctgcagtcgctgcaggtgcgactcgtactgcctatctgcgagcgctcgcagccgggcataccgtcatgaaggtgcagggcagctacctcgttgagtccaaggccgatgggtccgcgaccgtcgtaggggaggccaggcctcgccgcaaggtgagcgtcggccagactatccaggtccaacgagtaagctccagtgccaacgcctag

SEQ ID NO: 362657 - DNA, 741 bp, Pseudomonas aeruginosa
gtgccaacgcctaggctccgcgtctttgcggggccaaatggctcgggcaagagcaccatcaaagagcaggtcccgcccaatctgatcaacacctacgtgaacgcagacgagatcgagaagtcagcgaaagctgacggctttgtcgatctcactcagtttaatgtccaggctaccggcgacgaacttcgtaccttctttgccagtcatgccttgatccagaaagagcaccttcaagatcaagcatccctgttcgacatgaacggccttcgcatcgacgttcggcgtctcgacttcaattcttaccatgcctcggtaattgctgacttcattaggcagaagctcctggaaaaccgcgtgagcttcacgtttgagaccgtgatgtcgtcgggagataaggtcgcgttcatgcgccgtgcccaggaactgggttaccgcacctacctctactttgtggccactgacaatccaaacatcaacatcaaccgggttgccaaccgtgtggacgatggcggccacaacgtgccggccgacaagatcgttcagcgctaccatcggtcacttaagctactgccggaagcagtcgcagcatccaaccgggcctacatctttgataactcgggggaaggctctgtctggcttgctgagatcacagacggtacaagtcttgagtacaagtccgaggagcagcctgattggtttatggaggcctacgtagacaaggtcatgaatgtcgccagctag

SEQ ID NO: 362658 - DNA, 1362 bp, Pseudomonas aeruginosa
atggcaaccgaacagactcgccctaccacccttgcaggtattaaacgtctggccaagttcatcaaaactgcgcgaggcattccgcatcatgcagccctagatgaagctgcacagaaagctggatttcagaacctgcgccatgcccagtcagttttgggcgaatccgagtacaaactacaacagacatttgtgacgttctactgggcagaacgtgaagacgtcccaagttctgttgatcgcggctctatcctgcgatcggggcgaaccaccgtcaaattcctgttgcctgtccccttgaaggagatcctacccggtagggccctatatcggactccgtatatagactactttcgactggaatcacctgatcatctcgaacgtaggggtgactattacaacgagctcgacggcgtgaggatggcaaaaaaggtggctctcgctcttaattttatggctgtgacaggcctgcgcgccccccttgctaatgagatgcctcggtcgagattgaaactttctgacaatgcagaccactgctcttactggtacgacaatgagtcgcaatgcattgtcatcctagatgaaccatatcgacctctgtttcacgacgagatcgcttgggctaatgatcacgggtttcatactgtaggcgtcccatggagaggtatttatgaggcaggctatacaccacgccttcatgccacatctgaggcggcactatcgcgtttgatcgtgaaactcaaagccttggaaaacaggttgaacggtgagaaatggacgtacgactcccaggggtatgaaacccaattcatcagcccggccaggcatctcagcggcaagagaaagaaaccaagagtcatgcctacacctcaaggggttgagcgcgcgggcgcagtcccgtgtggccccgatctgcctgggtatccatcaagttggcgacccgctcgccgattggacttggatagacatttacacatcggtccgatcatgagtagcctgatggcttcagtaatcatggcctggtcaggagctggcttaggtcgcgtcggcggcaccctgtccgcttggttccgttctgagtacaaagatgaagagcttcccaacgagcattcgcggcaaatctacgacttgccaaaaccaactatcatccggggaatagataaacaactggctgcacttgccgaagttaagcagacaattgtagagggctatcaggaatgcaagcccaagagggagctactggagcgcattgatcgcgcggacaggtggattcgacggaacttagcccatcttgaagcgatggaagcggatatttcagcgcacagactcgcagagtcacgtcgtggggatggagtagcacagtaa

SEQ ID NO: 362659 - DNA, 1716 bp, Pseudomonas aeruginosa
atgccggtcggttttctgactcaagagcaacgcgacggttttggccgctatgttgattcgcccagccgtgaagagctggaacgttacttccacctgagcgatgaagaccgtgaagccatccaggtgctgcggggtaaccataaccgtctgggttatgccgttctgctgaccaccgtccgcttcgttggcgttctgccggacaagcccgccgccgtgccggtggaagtcctgcaggtgctttgccgacaactggcgattccagaccccgactgcctccagcgctatagcgatcatcgccgctggatacatgccaccgatattcagaaccgctttggctatcgtcatttcaccgatccgggcatcggctttcgcttgagccgctggctgtatgccctctgctggacgggcaccgaccggccgggagtgctgtttgagcgagccacctcgtggctgttcacacagaaagtcctcctgcctggtgtgtctcaactagagcgctttatcgcccagttgcgcagtcgggtcgaagaacgcctctggtttacgctgggccgcagcgtgactgaggaacagcgattgcaactgcaagacttgctgacggtggccgaaggcaaccgcagctcccggctggatcaattgcgctccggcccggtcatggtcagtggccccgcgttgattcgggcactgcgccggctcgatgacgtgcgcggcatcggcatcaccttgccggcggcggcgcacatccctcccagccgtatcgccgccctggcccgcttcgccaacacggccaaggtcaccgcgattaatcggctgccggcgtcgcggcggatggcgacactggtggccttcgcactctgcctggaggcgactgcgcacgacgacgcactggaagtcctggaggccttgctgcgcgacctgttcagcaacgcggagaaggccgacaagaaagcccgcatgcgcagcctgaaagacctggatcggtcggccgcgacgctcgccgccgcgtgcaaggtcgtgctggacagctcgatcagcgatgacaacgtgcgcgcccggctgttcaacgacctgccgaggaccaccctggaaaaggccctggaagaggtcaacgcgctgatccgcccggtagatgacgtctattttcttgcattggaagcgcgctaccgcagcgtgcgccgcttcctgcccgacctgctcaagcacatccgcttcggcttcagcccggccggcaagggcgtggcggctagtctggagtggctgcaactgaacctgccgcgccggaagccagaggatgacgcgccgcaggagatcgtggccaaggcttggcagaagcacatcacccgcgaagatggctccctcgacatgggtgcctatgtgttctgcacgctcgatgcgctgcgcacggccctgcgccgccgcgatgtcttcgtctcgcccagttggcgctatgccgacccgcgccttggcctgctcgacggtgccgaatggctggcggcgcgaccgatcatctgccggtcactgggcctgaccatcgacgccaaaaccaccctggacgccttgtccgtcgagctggatgcaacctggctggcgcctgcccgacaacccggcgattcaactgagcgagaacaccgagggcaagaccgaactgtcgctcggggcgctggacaagctggacgagccctgctcgttgctgcaactgcgggcggccgtgtctga

SEQ ID NO: 362660 - DNA, 387 bp, Pseudomonas aeruginosa
gtgagcgtctttgccctggtcgattgcagtttttactgctcatgtgagcggatcttccgtccggacttggcacagaagccagtcgtggtcctttcgaacaacgacggctgcatcatcgctcgaagtcgggaggctaaagcgttgggcctaaagatgggcgacccgtacttcaaagtgaagcggtttctcgaccagaggggagtgacagccttttcgagcaactatgcgctatacgccgacgtgtcgaatcgtgtgatgcgaaccattagcactctggtcgccagcatcgaggtctactcgacgaatgttggtgtgaccttactggaatgcccggcgacctggagcagttgggccgggatattcaggcacgagttcgacagtgggtga

SEQ ID NO: 362661 - DNA, 345 bp, Pseudomonas aeruginosa
atggtagctgacagtttcatgggtatgtccgcagccctgcagaacacctccgcgttgactgtgctcctcaagcatttggcagaatctggctggcttccgcatgaggtcctgcgaggaagcgagtggctttacacccccgacgtaacgaaggtccaagaaaagattctttgctgcgacccaccggtgattcggctgttgcagaacggtagcaacactgcgctgattcgcctggattggggcgaatcgccttcaaggatggtcgtggattacaccaagtcttggggatttgagcccgtgatccagcaggccctggcgagcatgaatgaagttgatgccagccagtag

SEQ ID NO: 362662 - DNA, 639 bp, Pseudomonas aeruginosa
atgtgcagtcactatgaggcgccggaaactgagcggttgatcgctggttatggtgtggccccagaggggcaattcaagatcgatctctggccctgctacgaaggcccatttattcgcctgcgtaacgatgaatctgctgaagaggaagtgcctgaattggaggcggtagtcggccaatttggactcttacctttttgggccaaagcacgatcgttagggcgtaacacctacaacgctcgcaccgagactgtggcgaccaagcctacctatcgaattgcttggcgagaggcgaagcattgcatcatcccggccgcggcgatttatgaacctgattggcgaacagggaaatcggtccctacacgcatcagtagaacggatggcggaatcatgtcgatcgccgggttatgggaacggtggaagacgcctgatggcgagctgcactcctacacgatgctgacggtcaatgcggacgaccacgcactaatgcaaaattttcataagccaggttcagaaaaacgcatggtcgtcatcctgccaaacgggctgatccaggattggctgcgcgcgccggcggagcgaagtatggatttcatgcggccgtaccctgctgaccgactccaagccgaagctagggcatga

SEQ ID NO: 362663 - DNA, 246 bp, Pseudomonas aeruginosa
atgccgaggctacacgtctatctcaatggtttgcgcctggataacgccaatcagttggtgaaggcgattagccaggtcacgacgcccatcagaagtgacaattcgaccatcgccgtatatgccctgcatgatggattgaaggcagcggagctgctcaccttcgagaaagaaccccttcatgctttcaaagctcggtggaaagaggtctcgccagtgagtgatctgctcggttacatcccaagctga

SEQ ID NO: 362664 - DNA, 462 bp, Pseudomonas aeruginosa
atgatcgaacgtaataccaagcgtgtgcgccagaagggcttcaccctgatcgagctggccatcgtgctgggggtcatcgcgatcctgactgctttcttcctgccgggcatgctcaaggcgcgtgaagactccaagctgagcactgcgatcactcagctgcagaaagacttccccggtgcaatcgcccgtcaggtgagccgcaccaacacctgcagcacgaccactatcactgcagccaagctgaaggaacgcggcctgcccgatctgactgtctggaacacagcctggaccgttgatgctgtcaccagcaaccaggtgaccatcagctacaccatcgacagcactgacaccaatgctgctgcggacctcgcaacagcattgaaccaaagcaacaacatcgtgaagaactccgcaacagcgacgggcaacaccaaggtgacagtggcataccgctgcaactaa

SEQ ID NO: 362665 - DNA, 303 bp, Pseudomonas aeruginosa; identical to SEQ ID NO: 332030

SEQ ID NO: 362666 - DNA, 237 bp, Pseudomonas aeruginosa; identical to SEQ ID NO: 350660

SEQ ID NO: 362667 - DNA, 4077 bp, Pseudomonas aeruginosa
atgaaaccccgtgatatccacgatgaatggctgtcgctgatcgaggtctccggccccttcctagctacgcccgtgctcgagcgggtgttctccaccggcctgccggcggtcgaaccgcgcatccgccagtacctgcgccaggcgcatgacgaatggtgcgaggccggagataacgaggacccacgcttcgccgaactgcatcgcgcctggatccacgaagtgctcgcacgcggactggaatacgacgaggacgatagcggcgaactgctgcggcgaggcgagcgactgccttactccgtgcgcgtcaccctgcccgagcatggcgtcacgctggcgcccgactacgcgttggtatccaacgacaagccgctgctgctggtgcagagctacccggccggaaccgatcccaccgcgactgcgaagatcgatggttggatcgccagccccgccgagcgcatggagcgcctatgccgggccagcggctgccgacttgggctggtcaccgatggtgagcgctggatgctggtcgatgcgcccgtgggcgcggtggtgacctacgccagttggtacgcacgcctgtgggggcaggaacgccagaccctgcaagccttcatcgcactgctgggcatcgcccgcttcttcggccccgaggacgaaacgctgccggcgctgctcgacgaatcccagcaacaccaggaggcggtgaccgacgccctaggcgagcaggtgcgtcgggccgtggaggtgctgatccaggcactggacaaggaggatcgcgaccgctcccgcaccttgctgcaaggcgtcgaaccagccgaactctacgaggcgggcctgacgatcatgatgcgtctggtgttcctgctctcggccgaggagcgcggcttgctgctgatgggcgatgagatttacgagagcgactacgccatttccaccctgcgcatgcagttgcgccaggagaccgaggaggtgctggagcatcgccacgatgcctgggctcgcctgctggccacttttcgcgcggtctacggcggtatcgagcatgagaccctgcgcctgcctgccttgggtggctcgctgttcgatccggatcgtttccccttcctggaaggccgagccaagggttccgactggaaggtcgatatcgctcgaccgctgcccatcgacaaccgcactgtgctgctcctgctggaagccatccagcagtaccaaggtcgaaccctgtcctaccgtgcactggacgtggagcagatcggctacgtctacgagggcctgctggagcgcaccgtcgctcgcaccacgcgggtggcagtggagcttagcgccggcaaggacgccaagaagtccctgtacggtctagacgacctcgaagcgctgcactgcagcggtgaagatgtcttggccgatgaactctccggtgccgacgccattaagcgtagtgccagtgccattcgccgggaccttgggcgtgccgtcgatgccgcggaagccaatcgtctgctgaccgcctgcggtggggacgaagctctccgcgagcgcacgctgccgttcttccatctgctgcgcaccgatccttggggctatccgctgatctatcccgagggtgccttcatcgtaaccacgggcagcgaccgccgggagacgggaacccactacacgccgaaatcgctcaccgaaaccatcgtcaccgagacactcacgccggtcgtctacgtcggccccgcccaagggctgccgcgtgcggagtggacgctcaagtcgcccgccgaactgctcgacctgaagatctgcgatccggccatgggctcgggtgccttcctcgtgcaagcctgccgctggctggccgagcgactggtggaagcatggacgctggccgaagatcgaggcgagacgatcgacgccgatggccgagtgactgacgctgctgcctgtcaagaaccgctacctagcgatatcgaggcacgcaccaccatcgctcgccgccttatcgctgagcgctgcctctatggcgtcgaccttaatcctctggcagtagaattggccaagctgtccatctggctggttacgatggccaaggataggccgttcggcttcctcgaccacaacctgcgttgtggcgatagcctgttgggcatccatcgactggagcagctcaccgaactttcaatgacgcccggcggtaaagggcagcagcgtctgtttggaaagaacatcgaaaaggccgtccaagcagcgatcgaactacgccagcggctgcgcgagattccgatactcgacattcatgatgtcgaagcgatggaacgacttgatgctgacgcgcgtagagagctggaagtagcggaaaacatcgccaacgcattcatcggtgaggttcttgactctgaaggcagcgtatctgcactagcgagcgcactggcatctcttgccgttcaggccggagaagccgttgaaggagataccgaggcaacccgctccatcgcgacgcgtgcgggaatcacccttgcctctggtttatcgattggaatggcagcccgccgcccgttccactggccattggaattccctgaagtgttcatgattggacggccaggttttgatgctttcgtggggaaccctccgtttttgggtaaccgcctatggaagtcatctatgggcgagaagctgcagtggcagtgccagatgattcttggtacatcgcctggaaagatcgacctgagcatcgtcttccataggcgagtcgtcgatctgctctgcccgaatggctgctatggcctacttgcaacgagcaacatcgctgaaggaagtgcggtcgccgttggactcggggccatcgttcagagcggtgacatctatttctccagaaaaggcatgccttggcccggtacggcctcagtcgttgtcgcagtagtctgttttttcaaagggcgttgggccgctccatgcgattcagaggggcatgcttgcaaacgcattggtgcacgtttggagcctgaggctacggatgcgtggatacccaaagagcttcctgatccgctattcagcttccagggagtggacaatagcaagggaatggcgtttgttctcacggctgactccccatggttcgagcgcctcaaaaatgagccaaatagccttctccgcccttacatcactggggacgacataaccagttatgcgcttcggataaccgaccgatgggcgttggatgtagctgatagaaagctggaggagatcgaagagaactggccaattgctttccagtttctgattcaggaggttcagccgacccggacgccagaggcgttgaagagctataagggactctatggccggtggtggcaattctggaaccatcgagctgacctcatgcgtaagctgcgcaaacaggggagcttcattgcatttgccaaggtcaccaaatacccattttgcttgatggcacctgctgaatggatctacacaaacaaaatcctgcttatgggtgctgatagagatgacctttttgccatttgcttgagctcatttttccgaaattggctctatgcattctctgttcgtagcctgggggcagataccaatacgctcacgctttctattcgagaggctgtatcgactttcgctctaccgactgaaacggtatcgaatgtcggtcgcaaccatgcaactcgttttcaagacgttctcgtcgcgtggagcgatcagaatcagtgtggtttgaccgacgcactgaacgctgtgaacacgcccagctgcaacgatccagctatctgtgaactacgccagatcatggctgcaatagacgccgaagttgcgcaggcttatagctgggatgatcttgatatttcctacgatttccgggagttcagtggcggttctgcaagggattcgtggcgctgggcgctttcggaagagctaacgacggagttgatgcatcggctcacagaactgaaccgacatcgctttgatgagctctcgcaagtaccagcgaatgctctcaacccagccaaacgagggcgtcgttcgaaagctgtttcatccttgcgcctggatgatttgttcgccggagacaacgtatga

SEQ ID NO: 362668 - DNA, 1965 bp, Pseudomonas aeruginosa
atggtgaatgaagtcgcaccaacgttcgagatgaccgtcgacctcaatgtcctcgaacatcttggaatcaatctttatagcaacatcgccgccgtcctgaccgaagcggtggccaatgcatgggacgcggatgcatcaagcgtgcagattcgcgtcgctcctaacaatgagtggatcgagatcgaagatgatggcatcggcatgtctgtcgatgacctgaatggtaagtacctgcgcgtcggctatcgccgccgcgatgaggatacggagcatggatgcaagacggcgaagggccggcctgtgatggggcgtaagggactaggtaaattgtctttgttctctatcgccaacgtcatcgaagtgcagtctgccaaggatgggaatgcgcatggcttccgcatgagcgtgccaggtatccagcaggctgtgcaggaaaagcgcgcatatcaccctgagcgcctggagcgcggcacgctcacggcgacgcgaggtacgaaaatcgtgttgcgcgacatcaagcgtcagcggctcggcaaaggcgtcactgcgttgcgcaagcgtcttgcccggcgtttttcgatcattgggcaagcccatggcttcgagatcaagatcgacggccagcccatcacggctgctgatcgaggcgacctgcccaaggttcagttcctttggacgttcgagggttacgagccggaagccagcacggtttcccatgtattagagcgcgaatcgctaccagctcggttcgaggcatggaattcatcgtggcgcgtgagcggctggcttggtactgcatgtaagcccaaagacctcgacgacgaagaggcagggaacctgaatggtatcgtggtcttcgcacgaggtcgcttgatccaggaaaacgtcatcgatcgactgaatgacgggaggctttatacgaagtacctcaccggtcagatcgaggcggattttctcgatgcagatgatcgccccgacatcgccaccagcgaccgacagcgcatacaggaagatgatgagcggtacatccagttgatcgcttttctcaagtcccgcttgggacagctcgagaagcgctggggcgaatggcgccgcaagcacgaggtcgagaaagccaaggagacctcgcccaaactggctgagtggctcgatggactcaaccctggcctcaagaagagcgccgaaacgctcatctccaaactcagcgccctgccggtcgacgacgaggaagaccggaaagttctttatcgtcacggcatcctggctttcgagcggatgcagttgcgtggctcgacggaggagctggctcggcatgtcgacagcgtcgagaagctcctgaccatactcgccgatcgtgactctctggaggcctcattgtatcgagacatcgtcaagtcgagactcgaggcgattagcgaattccagagtctggtcgatgaggacgccaaggaaaaggtgctccagaaatatctgttcgatcatctctggctactggatccaggttgggagcgcgctacggacagcaccatcatggagtctcgcctcatcgaggaagggatcttcaccgacgacatgaccaagaaagaagagcttggtcgggtcgacatcgcctaccgaacgaacgctggcaagcacatcatcgtcgagctcaagaaggctggccggaagatgaagcttctggagttgcaggagcaagggcagacttacgtcgataagctccgcaagatcctcgcgcagatgggaagaacatcccccgatatcgaagtcgtgttcgtcttgggcaaaaccgttgatgaagagacctcgaacccggagcggctgaaatcatcaatggcagcgatctctccaggtagccgcatcagacactacgacgagctgatccagggggctcaggaggcttactccgcgtacatcgagaaaaccaagaaactcgacaagctggaagatatcgtcaacgggatttga

SEQ ID NO: 362669 - DNA, 258 bp, Pseudomonas aeruginosa
atgggtgagttctacctagtagtcatcgcggagccacctgcggatcagcaatacaatgatgagcagatcatttactccaacctcgatgacccacggtctcatgcccaggagcttgcctatttcaagggggtggcgcgcgaactgggctgcgcggtcccggagtgtatgtggcgtgctgcataccaagatagagagtttaatgtcgtcaacaaaaccgtattttactcaccggttggggatgtagttgagcacctctag

SEQ ID NO: 362670 - DNA, 450 bp, Pseudomonas aeruginosa
atgactgatacgcccacaggaaaattcactctcagcgactcgataccattcagtggaaaggggaaaacccccattgcttacgcatatgcggaagcagaaaggatgttggccgagtatcgtcacgccctcaacgatggtgtcggcgctgacagtgagctttatgagttgatctgttatcccagcttcatgggccaacagaatgttggcgttgcttacagcaccgagcttcagcgggtgtatatgctatgtgtcggcgcagatcgccctgaaccagattatgaaccagtgtggctgctcgaccaggcaagggagctcactctgcttgcgcgcacactggtggtaccggatcagacctcgaatacaatcactatttgggaaggcattaaacgcggggcaatcatgtccttccgcttcaaactggcggatgagcctagttccataaagttctaa

SEQ ID NO: 362671 - DNA, 888 bp, Pseudomonas aeruginosa
atgatttcggctgagggcggaaagcacgcctggatgaagcccctgctcgacctgcggaactacatgctggcgcgacacttcgatccgtctgcgcgctgctggctggcgcgcacgatcaacgaagaaaccgggaccatcaaaatcgttcccaacgcctacgccccggaatataccctggagctgctgcgcctgattctgacgatccaagtccgggagcagatcgctgcacgcaagctgggtattgctccgcgcttccacctgctcgaccaccgccagctgatcgctctggactgcctctggggccggtaccagtaccaacgcagcttcatggccctgcgcacctggaaagagatctacgagcaaggcaagcgttacgacattcccgatcttgcctcgattccgaagtacaccgagaaggacgtttccttccgtgcagaggttccctttgcggatgaggaatatttcgccgcctggcgcggattccgcaacgtggacgctgctgccgtggattgggaagacaccaccgttctcccgaacggcaagatcgttcagaacgcgaacgtcggtgacgagttcgagatcgacgaggaaggtgcggcattgttctgggagttcgacctcgactatgccctgaaccgaatctcggtgctggataacccctcgggcgttgtccattacctggtcggtctcggaactgtaaccctctacaagggcagcctgggagagtgggatcggatgatgcgcgtgggcaaccaggcgtggttccacggcctgatgccgatcatcaatgacccgcatgcgctggtcgaaaccctgcaagcaaagttccagaaaaaggaagaagacaagcgaaatgccctgatcgggcagctggcgctgtttctttaa

SEQ ID NO: 362672 - DNA, 378 bp, Pseudomonas aeruginosa
atgcgcagcatattctcaaacccaatcttcgagcttgtcattgccggcatcgtcattgctgcgcttgcctcaggcagcatgtacatctgcgccaacctgttcgaagagttctatctcctcgccctcaaaaagggagatacggcattggttgaacgaaaccagctccagatggtgttcggtgcagttttcaatctggtcgttgtctattttctgcacaaactctactcagccttattcctcagtggggccaggctcaacgggatgcctgccaccagggagccggccatccaatcagctctcaacaaggtgacgttcgcctcctgcaccgttggcatggcctctgtactggtggtctttactctgatgctctcgaggtga

SEQ ID NO: 362673 - DNA, 816 bp, Pseudomonas aeruginosa
atgggcctcgacgttgccgacccgcggccgcgcccggttgaaaccggcggcaccgccgcccaggccgcagcagaagtggaagtggtagagggtgcgctttatcatttcgaaaattccagaggaatgaaggttatgagcaggctacttgccctactaggtattggattaacaatcgcgtacgcagtatttatgtactttatatttggtaatccgctcccggctttaaaagaaatggagttgaatagtgttggtgattttttggcgggagtattcgggcctgtggccatactttggttaattctcgggttctttcagcaaggacttgagcttcgtcaaaataatgaagcgctaagactgcaagccgaggagctaaaaaattcagtggagcagcaaaaggagttggtcgaggttactaggagtcaggttgcggccgaattggacagcttaaggctcgcaagggaggaggcacggcgtgctatacagccgatgtttgttgttgagcgcgctggaggttctcactacggtgataaacatgaattaagtgtttcgattgtgaatatgggggctcctgtcactggagtgacttttcgttttagcggcgattttaaaaatttttccagcggccctcgggtcatggataagggagctgcttttacaataacaattcaaattgttgggagtggggacgggcttagggatgagctatctattgtctacttggatgcttctaatgctgctggcatggttagatacttggttgaagtggacacattttccgccaatcccgctttaaaagttagtcgcctggaagattaa

SEQ ID NO: 362674 - DNA, 468 bp, Pseudomonas aeruginosa
atggagcagctgttcgagcaggtcgccagccagctgagcatggagatgcaccagcggatcagcaggagcttcatcggcctcgaagaccccgcggaacgactagccaacggcattcgcttcttcgttcggcgcacccacgaagaaccccattggggcgcctttctcaaccgctttgcgttgagcgatgcttcgatgcgcgagatgttctatagccaggccaccgccgatgtcctcaaaggcttcggggctggccgctaccgtttcccccagacgcacctggccagcgtcatttcgctgatcgccagtgccacgctgggggccatgttcctcgtgatcgaaggcatcaagacctggcgcgaagcgggcagtgaaactgccgagctggtcctacgcgcgctcggcgtccccgaagaggaagcgcgagaactggcgaccaccgagctgccccccctacccgctctggactga

SEQ ID NO: 362675 - DNA, 132 bp, Pseudomonas aeruginosa
atgagctggaagcggagcctgaaggtcggcgatctcgacgacggccagaaactggaaatgacctgcgtgcgctgctgccatgtccactacctgacgccggtgatggtgatggcctcgccggagcgggaatag

SEQ ID NO: 362676 - DNA, 1005 bp, Pseudomonas aeruginosa
ttggccgagctggtcaaccaccagtatcgccacgcctttgccgcccactggggcgacggcacgacctcatcctccgatggccagcgcttccgcgcgggtggccggggcgagagcaccgggcacgtcaacccgaagtacggtagcgagccgggacggctgttctatacccatatctccgaccagtacgcgccgttcagcacccgcgtggtgaatgtcggcgtccgcgattccacctatgtgctcgacggcctgctgtaccacgagtccgacctgcggatcgaggagcactacaccgacacggccggcttcaccgatcacgtctttgccctgatgcacctgctaggcttccgcttcgcgccgcgcatccgcgacctcggcgaaaccaagctgtacgtgccgcagggcgtgcaagcctacccgacgttgcgcccgctgatcggcggcaccctgaacatcaagcacgtgcgtgcccactgggacgacatcctgcgcctggccagctcgatcaagcagggcaccgtcaccgcctcgctgatgctgcgcaagctcggcagctacccgcgccagaacggactggccgtggccctgcgcgagctgggccggatcgagcgcacgctgttcatcctggactggctgcaaagtgttgaactgcgccgccgcgtgcatgccggcctgaacaaaggtgaggcgcgcaactcgctggccagggcggtgttcttcaaccgccttggggaaatcagggatcggagcttcgagcagcagcgctaccgggccagcggcctcaacctggtgacggcggctatcgtgctgtggaacacggtgtacctggaacgcgccacccaggggttggtcgaggccggcaagccggtggacggcgagctgctgcaattcctgtcgccgctgggctgggagcacatcaacctaaccggcgattacgtctggcggcagagccgcagactggaagacgggaagtttcggcccttacggatgcccggaaaaccttag

SEQ ID NO: 362677 - DNA, 258 bp, Pseudomonas aeruginosa
atgcctggcatcaaaattggagacggtgccgtgataggtagtcgctcgttggtgacaaaagatgtagagccttattccatcatcgggggaaatcccgcaaagcaaattaagaagcgcttctccgatgaggaaatctcattgttcatggagatggagtggtggaactggccactagataaaattaagacagcaatgcctctgctgtgctcgtcaaatatttttggtctgcataagtattggcgcgagtttgccgtctaa

SEQ ID NO: 362678 - DNA, 816 bp, Pseudomonas aeruginosa; identical to SEQ ID NO: 46213

SEQ ID NO: 362679 - DNA, 864 bp, Pseudomonas aeruginosa
gtgggcgtcggcatcggcacttccaaaaccttggcgaagctggccaaccacggcgcgaagaaatggcaggcgcagaccggcggcgtcctcgatgtccgtgatccggcgcgccgggaccggttgcttagggcctgcaaagtcagcgacgtgtggggtatcggccgcaggatgactgagcacctcaatgcccaaggcatcaagaccgcctgggatcttgcccaggctgacgcctggacgctgcgcaagcagttcaacgtggttatcgagaagacggcgcgagagctacgtggcatcgcctgcctggagcttgaggaggccgcaccgcccaagcaggagatctgctgtagcaggatgttcggcaagcggctgcacaaacttccgccgatccgtgaagcggtggccacctatgcggccagggcctgcgagaagctgagagcgcagggctcctactgcaagcgcgtccaggtcagcatccggacggggatgttcaacccggatgaacccaagttcgcgaagggcgttggcgtggagctgccataccctactgatgacactaggttgataacgaaggctgccatcgacggcctggatctggtattccgcgaaggcttcgccttcagcaaagcagaggtgctgctgctcgatttacggcagccaggcgaattcaccggtgacctgttcgcgccggtgcagccggagcgtgccacgaaggcgatggccgtcatggatgcgatcaatgcgaggtggggcaggggaacggttcggccgggtggggtacctgccgagccagactgggggatgcggcgggaactgatgagtcgaagttacacaacaaatttgaggcacctttggagtgtttcgtga

SEQ ID NO: 362680 - DNA, 300 bp, Pseudomonas aeruginosa
atgaagaaaccggcccaggccaaggagtacttcgagaaatccctgcgtctgaaccgtaaccagcccagcgtcgcgctggagatggccgacctgctctacaaggagcgcgagtacgtgccggctcgccagtactatgatctctttgcccagggcggcgggcagaacgcccgcagcctgttgctgggcattcgtctcgcgaaggtcttcgaggaccgcgacacggccgccagctatggcctgcagttgaaacgcctgtacccaggctctcccgaatatcaggaattccaggcggaaaaatga

SEQ ID NO: 362681 - DNA, 192 bp, Pseudomonas aeruginosa
atgaccgatgtgaaagtggcgatcggcaaggttgagactcgcctggaaaacatcgagaggaacatggttaccaaggggcagcttgcggtttatgccttgcttggtctaatgacgatggtaggcgcaggttggtgggtggtgcagcaatacctggcccccatactggcggccataggaaagattccagcctga

SEQ ID NO: 362682 - DNA, 228 bp, Pseudomonas aeruginosa
atgtccatgaacccgagcgaagcgaatagcgatccctttgcgggcgtactgagcatcatcgatcagcagatcaagaaagaaatggatggcgtgcgggccaagctctgctggaaaaacattctgcagggtattccgcccgaaaccttggcgcaggcactggccgtgggcctgtccagtcagcgctaccaggaggtcccgccatgccgttgccgtcggcatagaggataa

SEQ ID NO: 362683 - DNA, 300 bp, Pseudomonas aeruginosa
atggagcaagcaatgagagacgagtttgaagcgaacgcgaaagtgcgttggtctactgattacgacgactttggcgatggcctgttctccatacaggctgatggccggtacgagtacgagcacattcaatgggattgggagacttggcaagccagccgcgcggctctgagggtggagttgccggagaagatggagcccacaagaaacatctacggaaacctgatcatcggcagctacaacgcagtgcttgatgccgtgaaagaagccctccagcaagccggaatcgaggtgaagcaatga

SEQ ID NO: 362684 - DNA, 3066 bp, Pseudomonas aeruginosa
atgagccaggtcgttgacctgcgatttgatacagtccccagcggctacacgccggacagcagccgacaggtagaccttggcggaggcccgcctggcggcttgcccgccggcacgattggcgtatggagcgtccgcccgccacttcttccgcgtgagttgacgctgaagcggatgctgctacctgatccgcaggtagtgctggacttggacttctcgacagtagatcgcggctacaccgtcccgccatccagcaacgtcccgctgctgttcttcaaaccataccgcccgcccgttgggagccaggccggtctggagttcggcacgccatatgcgccgcctgccggcaacctggtcgggctggagttcgagcacggcgaagaccatccgatcgagtcgcaatggttgttccctggcggcatcagcaatggagaggtgacgctcccgcaggtccgcctccagttccgccatgtgcaggcgcagggagcggcgcatcaggcgttcggccagtcaacggtatggaacttcacttcccgcttgtcaccaaagggcgtgtcgcctggcgcggtgggtgggcacgccatccagaataagcaccggacggtccagccgaccggagttgtcgcctaccaaagcgggcaggcgcacatcatcaaccgaaaccgttatgtggcggccggcaacattgcgccgccgccgtggagcgcgaatcccacggtttggctgtacacccgctacctgaagcctggcggcctactggccaccgcgatcccggatgtccaccgcatcagccacgaacgccagttcgtgcagctcaatgctggtgttccagcgccaggcatggggacggcctgggtcagtcaaggaacgcgcgttctggaacccattggcacgtttctggatgccgtggccagacctatggtcggaggcacgcgcttcttggagccgccaggctgggattcctcggcattcggcacgcggatcattcccgagtcgcagacggtcgcgcctcaaggcttcgccgagttgtgggggcagcaggcgatcaacaactggctcacctttgccgagccggccggattccagagcaccgtccaggaggaataccgctggggccgcgcagacgtgtggaacctgcgccagtacgtgctccaggagtacgacccggacagcgagttgaacccgccaccctggtcgcagtggacgctggtggagaaccgaaaccgtcaagtgggcaccatcggcatgtcttcgccgccggccggcttcccgcagatcgacaacaatgccaggccgatcctgccaggcggcgtggcgccgccgcagatcaccaccgcagccatgattgcctacggccgccgttacctgccgctggaaggcatcgaaccgccgccgatcctgaattggcatgccgtctacaacggcgcgagggtgttggtgccgactgggaatgcgcaaagcgctttcggtgttgcgagactggagaacacgcggcgttacttcgaccgcatcggcggcttcgactcggcggatatcggcatcgcgttcatcgatttcgccattcgcggtatcagcatcgagccgcgctacagcatcgagccgccggatatcaagttgcccgaggtcaagctgtacacgcgctatgtcgatccggcaagcaacgacatgctgaacatgggcctggcggctctatcgatccacttcaacgcgatcgggccgaggtgggcgcacaaagacctgttcggcgatccgcgcatccacaacgtgacgccggaggtcgcgaccttcggggcgaacgccgaggaattcggttcggccttcgtgcgcctgcaatggcgtccggtggcgccggacggcagcaacatgcagttgttcggccaggcaaagatcgccgaccgcaagcagaccatcacggttccaggcaccaacctgctcaggatgggcgacaagctggtggtgatcaagaccggcgcgccgccgtactcgccgcagaacatcatggttgatcagacggttaacaccggagcggtgctcggaaagcccggtctgaatcagtacgtcctgtacgcgacaggcatccgggcgccggacatcgaggagccgacggtgcgcatcatgggcgtgaacatcgacgccggcatcaaggtggacggctacggcctgccagccgtgagcttgaagctgcgcaagctgacagtggacgaatggcccgacgccgaagtgttccagccatccaagccgcgtctcacgccgcacaccatctgggcggtgaaggaggcacccgagcaggccaagcagaaccatccagccggtaacctgcactatgtaggggaaacgctggtttatccgccgggtgagcgattcggctcggcgcgcatcagcacctacctgggcatcctcaagcctttcccgctgggcgacgtgtcgaagatgggtgagcatgcgatctacctgaagcgtcgctacctggagccgcggggtctgctggcgtatcgcatgggttgggcgatcgtgggtgatggcactcagttcgtgacacagttcgccggtgctgattcgatgttactcggggtgcctgccgtagaccgtggcccctattacggcccgcaaacagttcggcctgctggtctgccggctcctggcccgggtggggctacatgggtatcgctgctggatcgtcgactccagatgaccggattcccgtcgcaggctatgggatattcgcgtggagaaggtccgtaccagtggcagtcgctgcatgttggaccgccgatgccgaccattccaagcggtaccgacacatcagcattcggtacagtctgggtttcgctgcgggtgcgaggggttgagccggacggttgggagtcgttcatctgcgaatacgacccgtcgcatttcgcggatcgcatgcgagtccgcaacgtcttcaccccaccgggtccaaatgcccagtccgtggcacctgtagggttggattcagtggatgtgggcgtgcccaatgtgcggccaggtgtccactacatccgccctgacggcaacgccgatcagtaccgcaaaggagctttctga

SEQ ID NO: 362685 - DNA, 852 bp, Pseudomonas aeruginosa
atgacgacggtagttgacctggatgcaagcaagttcatcgcggtcagcatggaggcgaccgccaagacccttgacgaactacaggccgaatgggtgtccggttttgaggggactacgacgggatatcctgccgcgtccggagacgacggcgctacgctcatcaacgtaccgcccatctggcccaatggtgcgacgcaagcggtctattcctgggaatgcggcgtcgaactggtgccgtacccgttcggcggaacccccgctttctattcggccgggattccgggagtcagccgctactactccatgaacgttggcctgcgcgtggcgatcatctaccacccgaccggggttgactctggtctgacatcgttcgtcggtagctatgatgctggtttgtcagtgttccgtgcgaaacacaaccgaacaggcgagaacgtcgaggtcgtggcgcgccttgtgcgtggtaggcaactcgaaatagccattaagaacagcgtgcaggcagcgggcttgccaattaaggtcgccgtcctgaatggaaccacggtggcttcggtcgtggacatagcgagtattgcgctgggcgcggtggggttggtgacgtgctcgatctatggcggcacggtatcaggaaccgtggtggaccaggccggcgagccggcgacgcgcattgtccgggcgcatgaacgcagtaccggcgccgtactgggcgagacgcgcagtaatgcatccggtcagtatgagcttcccgtgatcgccaaggttggaacgacgatgtacttgattgccctggacgacgaaacgccgcctctaattaacgctgtcgtcgcagatcgcatcgtgctggagtag

SEQ ID NO: 362686 - DNA, 357 bp, Pseudomonas aeruginosa
atggcactttatgaggtagtcgcgccgcacagcatgttcgttcagccgccaggaaatcctgtcacgctgaccagagggcgcgacttgccaccgggcggaaatggctacctggccggtgagtttccgagcggtctcaccactgtcggcggcgctccagtggctgcaacggttcgagtcttgtatcgctcggcgggcggtgcgctcggtgatggcgtactggttgccgaagtacagtcggtggccgatggtacctggcgggtggacgggcttaacccttcgctgcgctatgacgtggtgggacggaagagcggcttcaacgacaccatcatggcgaacgtcgccccggcagtggagtag

SEQ ID NO: 362687 - DNA, 963 bp, Pseudomonas aeruginosa
atgaccaaggtggcattcaacactccagccttgaccagtagcaccgtagcgctgcctgacttcaagcgcgtgtgccaagaactgcatgaccagctcctgaccgctggaatggtcgcggcatcggattccgggcaactggacttcgacagcatcaccactctgacgacgagcacatcctatggctttcgcatctaccagcttgatgacggaatctcgctgcccgtcttcttgaaaatcaggttcacgtcgagcagttcttttgcctcttccaaccggattccttggtcgttctatctctccctgggcatcggcacggatggcgccggcaacctggtgaatggctcgccggaatacctcgtcggatgctcgaccgcttcctacttgtcacatcggggaactgcgatcgggcagaacctgcagtccttcatttgtgtgctgccgggcttcctcggcgtgtcgttcaagcaactctgcgttgagccttccgccaactacggcccgtctaccgccattgcagatgcgccagggttgatggagttcttcgtctgccgcgactgcaacgatgccggcgagccgactgccgatggcgtcactctggtggttatcgccagaggtggacggactggatctagctttggggaggccccttactgcgctcacatcaatgccgccggcgtcctagtcgtaaacgaccgagctgccttggcgcttggcgcggcgcagatcagcaccgttgatggcaaggtgcctctctacaacatctacaccatgacgcctaggccgaaacggctttcgcaaattctgtgcgctgcgcgagccattggtgcatccggcaacgacgacacgatggcggcagcagttggcaccgtagaacgcaatttcctggtgatgaaccctgtatggccggctgacgtgtatacgggaaacagtagccgagcatgtattgccatgctgtgggagtga

SEQ ID NO: 362688 - DNA, 351 bp, Pseudomonas aeruginosa
atgctgcgctcgatcaagatcatctcgacctaccctgatctaccggcgcggatcctcgagcttcgctcactgacccttgacaatgagctggacgcgacgatcaccctgaccaccgcacataaggccaaagggctggaatgggatttcgtttgcctgtacgacgacttcaacgcggatccgctggcacccgacaccgacccgggcaagcgcgacgatgagctgaacctgatctacgtcgcagtgacccgcgcgatgaagatcctcgccatcaatagcctggtgctatcgatcatgcagcggtacgtggacgacagaaagctgaaggagcagatagctagctgtgaaaaatga

SEQ ID NO: 362689 - DNA, 654 bp, Pseudomonas aeruginosa
atgggcgctgtcgaaagcgatggctttgatttcgcgggtggtacctatgactttaatccggctcttacggctacctactattacgccagactcgaaggtaactattcccaacactacgcaagcatgattcacaaactcccgctaacagatacgttcacactggtgtcgcagttccgttatttcgatagccgtgacgaaggaaataccaacgtcgataacaagaatgctgccggaatggtgacgctttcacgtggatcccatgccctgagcgcggtgtaccagaagctacacggcaatacggggatgccttttgtcgccggcggtacggatccgtacacctataacacttcgacctataccaatttcctgatggcgaaggagcgttcatggcagatcaagtacgagtatgacttcgccggtgttggagttcctggtctaatgctgctggggcggtatgtgcatggagacaattttgaagttgcagggcagcccgcaagcgagtgggagcgagatatcgacctgacctatatcgtgcagagcaacgtactgaaagggttatgtctccaactccgcaatgtcatgtaccgcggcagcgacacagtggatgtcgatgagaatcgagtgatcctcagctactcctatgcgttttggtag

SEQ ID NO: 362690 - DNA, 504 bp, Pseudomonas aeruginosa
atgagcgaaaaagaatggcgtgatcgcttctatgaggacttctctgtcggtgatgtgtgtaaacaccgcaatgcgcgtacggtcaccactaacgacaacatgatgtttacgctactaacccagaatcccgcgccgctgcatctcaaccatgagtatgcgagggccgctggccatgagcggatgccgttcaattcgaccttcacgatggctctcgtaactggtcaatccgtggcagatctgacaccgaacgtcatgaccaatttaggttggactgacgtgaagctgccggcacccgcatatgaaggcgacaccctctatagcgaatccgaagtggtgtcgttgcgaacgtcctccaggcacccgcaggccggaatcatgtcgttgaagaccatcgggtacaaccaacatgggacgatcgtgatcgagttcatccgtaccgtgatgatctacaagcgaggctgctccccctcgatgtctcggcctgaaccgcttaggaaaccctga

SEQ ID NO: 362691 - DNA, 768 bp, Pseudomonas aeruginosa
atgagtaatttacctgcgagcggcatcgttacaggtgctgccggtggcatcgggcgtgaactggttttgaccttggcaggggctgggatagacgtgattgcaactgatctggatcggagccgcttggatgacctggttcgtgccgcttatttactgcctggccgagtcattggcatagcgggagacatactcgatccagagcttccggtcaggctgtgtcaacgcgcaattgaggatttcggtggcatagagcttttggtgaactgttctggaatgcttcaggacgcccggattcagaaaatgccagtggagctttttaggaggttgatcaacatcaatttgcttggcccactccgattgattgaggccgttacccctttcatgaagaaggctggcaaggggcgcatcatttctattgcatcccgagcttggctgggaaatttcggctcatcgggttacagctctgcaaagggcgggatcgttggggcaagtcgtgcgttgtccctagcgcttgccccccatggcattactgtcaattgtattgcccccggtttcatcgagaccccaatggcccggtcactgcctgcgcacatccttgatcgtgtgcttgaggcaattcctgttgggcgttcaggaaccgtcgaggacattgctggcttggttgtttacctggccagctccaccagcggttacatcactggtcagacaatggtcgcgtgcggcggacgcagcatcagttcaccgattgctaaatccggagagaaatga

SEQ ID NO: 362692 - DNA, 615 bp, Pseudomonas aeruginosa
atgaaaaaggtgcttctactcagtaatggtttagataccgatgagttggctatcgccctaaatgcgcgtcgtatcgaattgtgccaaatcgaacccaatctgcgtgtaggggcggttgtcgatgaggctatcgcagcggacttgtttgccaatcactctggattcgtcgggctgatatttgctccggcatttcccatggacagcgatgggcagacatctttggatgagatgtccgacttgctcgtgaccaactttacctacctcaaggcagcgcttacatccttcgaggagcgcaacattccaggtcgattgatatcgctcctcccaggtgatgcggcgatgggagatcccgctcagttcgtgaattcgacgctggctggggcaatgctcagcctgttcagaactgtggcgttggagcttcgcaagaaaccaatcacggccaacacgctgatgtattcgacggcgagtgaggcggcctcgtccagcgctgttctcgcggacccggcagctatcgcagcgcttattgaggcgttgctcgcgagcagtactggatgcgttaacggtcaagagatctatgcgcagggtgcagcggacgtagggaggttgcacccatga

SEQ ID NO: 362693 - DNA, 1149 bp, Pseudomonas aeruginosa
atgagtagcagtttcgttgctggtgttggcatggtccgcttcggaaagtacgacccctccgtcactttcgagcggttggctgtcgaggctgcgaatggcgcgttgcgcgatgcgggcgccagtcgcaagcagatagaggcggtcttcgtcggccatgtgttcggtggtcctgtcgcgggtcagcgtgtcgctgtggatctgggagttggtggcttaccggtaagtaatcacgagaactactgtgccagtggcgcgacggcccttcgcgaagcgtgtctggcgattcgtgcggggctttatgacgtcgtcttagtgattggcgccgagaagatgaccgaccgtatcaagggtggggttaccccggatgccaacgatctggacgccatgcaggggtacgtgatgaccgccggtcacgcgctgagcgcgcgccgctatatggctgactatggcgcgtctcgcgatcagatcgcgatggtcgcggtgaagaaccatgctcactctcagtacaacccatatgcccaatatcaacgtccggtcagcctggacgaagtaatcaacgcgcgcttgatcgctgacccgttgggccttcttgattgcagtccaatcagcgatggcgcggccgctgcggttgtatgcagcgctaagggtctcgcacggcttgggatcagttcagctcgcccggaagtgcgcgcaattggtctggttagcggcaccttgcgcactggccactacgacctcaatgaggaagacatttccaggcgggctggtctgcaagcctatgaggcagccggtatctctcccgaggacatcgatctggtcgaaatgcatgactgtttcaccattgccgaaatagtgcgcctggagggactggggctgattccaaaaggggagggggcaatgtggactgcaaatggcaagacctccattgggggagcccttcctgtgaaccccagcgggggtcttctctcgcgaggccatccggtaggcgctaccggaatggcacaggtgtgcgagctgtactggcagcttaccgggcaggcaggtcagcggcaggttgagaacgcacgccttgggcttgcgtactgcaagggcggaactgtcagtggcacggacggtgggtcggtcactaccgtggtgatgacgtcatga

SEQ ID NO: 362694 - DNA, 426 bp, Pseudomonas aeruginosa
atggccgctactcattcgatcgcttctacggtatcgcgtccgttacgggaagggttgttccgtatggacccgccaagtttgctcggttcagtctgtacccagtgcggtactcggatgtttccggcaagaccattctgtccagcatgcgactgcaccgacattgagtcggatgttgagctggcctctcggggaagagtctacagctatacggtaatccaccaggccccgggaggtcgcaagaccccttacaccttggcatacgtggatctcaatgatggtgtgcgggtcatggcgcaggtggatgcgccacaagacatgctctgcatcgacatgcccgttcgcctggatattcgacctgtagctgagctggacggctgtgagctgatcggctacgtgttcgtgcctgctcaggaggatgtgcaatga

SEQ ID NO: 362695 - DNA, 1161 bp, Pseudomonas aeruginosa
atgaatcaacatcatgacccctaccaagacattcgggacgccattcgcggcctcttcgccagctttccggaagactactttcttcgcgtcgatgaggctcggagttaccccaaggagttcgttgacgcgctgacggaggccggctggctcgccgcattgattcccgaggaatacggtggctccggcctgggcctagcggaagcatcggtcatcatggaagagatcaatcgcaatggcggcaactccggtgcgtgccatggccagatgtacaacatggggacgctgcttcggcatggatctgtggagcaaaagacgcgttacctaccgaaaatcgctacgggtgagctgcgcctgcaaagcatggctgttacggaaccgactacgggtaccgacaccactcaattgaaaactaccgcggtgaagaaaggcgaccgctatgtagtcaacggacagaaggtttggatctctcgggttcagcactccgatctgatgatcctgctcgcacgcactacgcctttggcggaggttcgccgcaagtccgaaggtatgtcgatctttgtcgttgatctggccgaatccattggtcaaggtctcaccgttcagcccatcgcgaacatggtcaaccatgagactaatgagctgttcttcgacaatctggaaattcctgaagagaacctcatcggcgaagagggaaaaggcttcaagtacatccttgacggccttaatgccgagcgcacgctgatcgccgccgagtgtctgggggacggttactggttcattgagagggctcggcgttacgcaagcgagcgggaggtttttggccggccgatcggtgccaaccagggcgtgcagtttcccattgccgatgcctacatggagattgaagccgcgaatctgatgcgatggaaagcatgccagttgttcgatgcgcacaagaactgtggcgcggaggcgaacatggctaagtacctggctgctaaagcctcttgggaagccgcgaacgtgtgcatgcaaacccacggcggattcgggttcgcgaacgagtaccacatcgagcgcaagttcagggaaacccgtctgtaccaagtggcgccgatctccacgaacctcatctacgcatacatcgccgagcatgtacttggcatgcccaaatcctactga

SEQ ID NO: 362696 - DNA, 843 bp, Pseudomonas aeruginosa
atgacccagacaacgaacggcgatctcgccgcttggatcggctccactgaaactcgcacagacatcttgactgctgcgcctttggtgttgcttgacgcatttctcgatcgtaagacagatcggttgctgttgccatggcattggctgtacttcctacccaacgcgcccacggctgatttgggcgtggacggtcatcctattcaccaaggtttccttccgcccatcgccgctccgcgacgcatgtgggctggcagtcgcattgaagtcggcaatctggaagtcggtgttggcgaaagcctgagtaggactacttgcatccgctcgatagaaacaaaacagggggcttcaggggaactagtcttccttggcctgcggcacgaaatcaggggtagttccggcatcctgattcgagaagatcaggacctcgtctatcgcgatgcacctgcccctggtgccgcactgcctgcgggcaaagccgcgcgcaccgatgagaagtggtgccgcgaggtgcagcctacctcgactttgttaatgcgcttctctgcgctgactttcaatgcgcaccgtattcactacgacagggagtacgcaacgcatgtcgaggggtatccgggccttgtcgtacacggccccttgatcgccacccttctgcttgacctggcatatgagcgcctgcctggcatccgagtcgtcgagtttagcttccgcgcgatccgtccgttgtttgacggcgcgcctttttatctctgtgcatgcctggccgagcaacccaacagattggatctgtgggctcgtgacgccgatggcttcgttaccactcaagcccacttggcttacgcgtga

SEQ ID NO: 362697 - DNA, 1593 bp, Pseudomonas aeruginosa
atgagcaagatccccagcagcaggactattccgcttctgctgcgagaactgatcgccaaccatgcagctcgcgaagtgcttgttggaggggggcagcgttatacctacgctgagcttggcgatgaggtgatgaaggtgtcccgccggcttttccagctaggggtacgcgctggcgacaaggtcggaatactgatgggaaaccgcccggagtgggtcatcagcgcactggccatcaccaacattggcggcacgatggtcgcgatgaactcttggtccactgctcgagagttggagcacttgatcagtcattcggacagcaagttcgtcatagcttcaagccgattcttgaagcacgactatgcggccatgcttcgagagatggagcctctagcagagcgttttccactgctgaagggcattctgaccttcgacagtgatgttcctactggttggctggctgtatgcgatgccgatcatgagtgcaatacggtgttcgacgagaagatccaactggctggtgatcaggtctgcccgacagattgtgccttcctcctctacacctccggatctacctcggcacccaagggcgtgcaactgattcatggctcactgatcgctaatccttggcaaattggggagcggcagcatgttgttgcgggggaccgggtttggctggctgtgtctctgttctgggggttgggcagcgtcaacgcactgatgaatctcctcactcatggcggttgcattgttctgcaggagtcattcgatgctggagaagctttgaagctgatcgagcaagagaaatgcacgatcttttatggcactccgaacatggcgcaggctattcatgagcatcccgcgcgtggccaattcgacctcagttccctacgagggggcgcctcgctaggtagtccggaacagatgactcgggtcatcgaattgggcgctagcaaaatatgcaacatctacgggttgaccgagacctatggcaattcccacgtcacggacgccgatgatgatatcgacaagcgcctacgttcatgtggtcggcctcttcctggagtggagcagagaattgtttctgacgaaggcgtcgatttgcctcccggaagcatcggtgaactccgcattaaggggcatgtgacgcagggctactacaaggacgaagcccagacgctccaagccttcgatgatcagggctatttccgcaccggtgacctcggctacatcgatgaggagggctacctgttcttctgcggtcgtctcaaagagatgatcaagaccggtggaatcaatgtctcgccagccgaggtcgagtctgtcctgatgactcatccaggcatctatctcgcctatgtggtcggcgtgcccgatgactgccgagatgaagttcttggtgcggtgatcatcagaaattccgaggtcaccttgagtgaggaagaggtcattggattcagcaagaagcaccttgccgcatacaaggtccccaagctggtccgtttcgtcaacgagcacgaactgcctctgaccaccacggggaagattcaaaagaacaagatagccagcgtgttcttcgcaccggttatcgcttga

SEQ ID NO: 362698 - DNA, 1386 bp, Pseudomonas aeruginosa
ttgagcgcttccccagaagtgaaggtgaaagcaatgagccagacgcaagaaatagatgtgcgtgaagtgatcaatagccggcctgttggcctttttcagaagtggattgtcttcttaggcttcgtgatcatcgttctcgatggcttcgacgcagtgatcatgggattcatcgccccacagctgaagatggactggagcctgggtaatcaagagcttggcgcggttctcagtgcgggcctcatcggtcaggcaatcggagcgatgcttgccggccctctggcagaccgctacgggcgcaagattgtcctggtagtcagcgtgctctcattcgggatctggactcttgccacggcttttgccacggatatcaccatgatggtggtcctgcgcatattgaccgggttggggttgggggctgctcttcccaacaccagtacattggtcgccgagtacgcccccgagcgtgctcgctcgttccttgtcacgctgaccctgtgcggcttcacctgtggagcggcgagtggcgggtttatctctgcctggatgattccagccttcggctgggagagcgtacttatcctaggaggctgtctgcctctgctgctgtccttagttctgtgcttcaagatgccggagtcgattagtttcctagtcagcaagcagatacgcctcgaccgggttcgccgcatcgtcacgcgtttagctcccgatgtagcatccggcagcgcattctcccagggacgaacggtcgaggagaatcggacctccattgacatcgtgctgtcacgtcaatatcgccagggaacctacacgctctgggccggatacttcctcatcctattcttgatctacctgctcagcagctggcttccgacgtttatcaaggaaggtggtggctacagcgtttccgatgccgccatcgcaacggcaatattccaaatcggtggccaaggcggttccttgactgtcggttgggccatggaccgttggcgcaaagcatgcgtcctgatggcgacctttctccttggaggggtagcaattttcgccatcggtcaggttacccagcatttcgtgcttctctgctcaatcgcgttctgcgtcggcttctgcattatcggcgggagcgttggcatgaacgcgctggctgccgacttctaccccaccgcggcccgctcgacgggtacctgttggatgatcagttttggccgggtgggcgcgatcctcagcgccttcgctggcgctcagatccttgccctgggctggtcgctttcgcaggtgttcgcggggctgattatccctgcgcttctttcggccctggcgatgtacatccatgggctcaagtccacttcgccccatcgcaaccttcgatgggcgccatctgaatag

SEQ ID NO: 362699 - DNA, 876 bp, Pseudomonas aeruginosa
atgcaaatccaagttacctgcgtggttgactgctcgaatgagcttggcgagtgcccactgtggagcccgaccgaaaacgtgttgtggtggattgatgttgccaatccagccctttggcgattcaacccctcgacaaaccggagcgacaactggccactgccaaagcctcccactgtaatagccctgcgggagaacggggggctactaattgtgttccgcagaggctatgccctgatcgactcgctagagcccggtgccgtcattgatcaacagcaccaactcgagcttggcgatgagcgattcaacgacggtaaggtggatcggatggggcgcatgtgggtaggtacgatggatcgcaaactgactcgcccgatcggacagttgtatcgcttcaatataggccatgacatggaggcggtagaccagggcttcgttctatccaacgggattggttggagcccagacgcaacgaccatgtacttcgcagagacccattccaaaagcgtgtatgcattcgactacgcccttcacacgggtgctgtcactaaccgccgggtgtttgctcgaattgaaaatgaaggtgggccggatggattgacggtcgactccgctggcaatgtctgggtggcggtcttcggcggcggtgcaatatacaaattctcaccatgcggccgcctgctcgatcgtctcatcactccaatcgcgcaccccacaagctgcaccttcggcggcaccgatctgcaaaccctctacatcaccagctcgcgcatgagcttggagggtcaagagtcgacagactcgaaatactccggaggcgtctgggcggttcggatcaatgaccaccgtggacagcccgaaaacctcctctcggtttga

SEQ ID NO: 362700 - DNA, 1179 bp, Pseudomonas aeruginosa
atgagtagcaccaggcatgaatcgctcaatctgaaaggtaaagccgcagttgttggcgtcggcacatcccggtacgggaaattaccggggtacaacgcctatgacctcggcctgtgggcactacgcgaggccctgaatgattgcggcctcgagtatggcgacatagacggcttgataaccaatcgaatccccagctatggccgcttcgcggaactgtgcggcatcaaccctcgctacaccttgtccacccccggacatggtcgattctcggggatatgcattcagaccgccgccttgctggttgcaagcggcatcatcaataccgtggctctggtatacgccaatgatggtgcatccgccggtacccagtacggcggaaaccctagcaagtacggcgccgccgcgggagcctacggtgcaaccgacgggcattgggcaccctacggtatgacctctccgggtgcctttcacgcattgatgatgcaacgccatatgcacctttacggaacgacggagcaacacctcggacaggtcgcggtgacgttccgcaaacacgcacgactcaatccagatgcggtgatgcgaaccccattcagcatggatgagtacttggcgacgaagtacatctgcgaacctcttcggctgctcgattactgccttataaacgatggcgctgtagcaatgatcattacccgcgcagacttggccgaaggcttgcgcaagccgcctgtatacatccgcggggcatctcaagcctcacaattctcggactcgagtttcccaccggaggatttctgggctgctcccatgaggaaggtcgcttcagatgtctatgcaatggccggcgtgtgtcagaaggacgtcgatggcttgatgatctatgacaacttcacgcccactgtgctttttacgctcgaaggctttggattttgtgagcccggtcagagtggcccatgggtagcggaaggcctccttggcctggatggccaatacccttccaataccaatggaggccatctatccgagtcgtacctgcaaggttgggggctcaacgtggaggccgttcgacagcttcggggcgaatgtggcgagcgacagatgcgcgcccccgagctcgtgcagtacatggcggcagcaccggttgtcacgtcgattatctatgggagggaaaggaaatga

SEQ ID NO: 362701 - DNA, 405 bp, Pseudomonas aeruginosa
atgagcgcactgccaatgtcgcccgatgatccgagaactcgaccccactgggaaggagctaaacgaggtgtattgctattacaacgttgcgacacctgcggtcatcatgccttcccagcaaccacccaatgcgtgaaatgccatcagcagggcgcgacctgggttgaggcctccggcagcggcactgtttcctcgtactgcacatttcacaaggcctactggccggagctcaaagccagtacaccctataccgtggtccaaattgagcttgatgagggcgtcagtttcatcagcaatattgtcgacaccaccggcagcaacaaaccacggatcggcatgcgcgtaaaagcgtacttcgacaaagtatcggcggatcagaccctggtccgcttcatacccgcctaa

SEQ ID NO: 362702 - DNA, 852 bp, Pseudomonas aeruginosa
atgccggtagcaaagtctggccggctcccttcgggagattacaccttgaaagctcatcgctcctacttgttcgtaccaggcgatcggccagaacgtttcgataaagcctgcagcacggatgccgaagtcgtaatcctcgatctagaggatgccgtagcgcctgaaaacaagggttccgcaaggcagatggtcgccaagtggctagcacagccccgttcggcacccataatggtcaggctcaatggggtggataccgagtggctggacgaggatttggcctcgctgcggcatgcgcaactggtcggcgtaatgctacccaagacgtcgagccccaaggatatcgagtacgttgcccagcgacttgggcaagccccggtgattgcgctgatcgaaaccgccgaaggcctgatgcgagcctatgatatcgcccgccatgagcgagtccttcgccttgcgttcggctcaatcgactttcagctggagactgggatccaagatgatcgtgaggcgctgctatatgcccgctcccaactcgtcattcactctcgcgccgccggtgtgctgcctccggttgacggtgtgtgtaccagtacgaatgactccgccttggtactcgatgagagccgctacgccagagccttgggctttaccgcgaaactctgcattcacccaagtcagatagcgcctgttcatcagggatttgcgcccacgatggaagaactggaatgggcacaagaaatactcaaggctgcgcaaatcgcaggaacaggcgctatcagataccagggcaagatggtcgatctgccagttatagagcgggcccggcagatcgtcgaacagagaagccgttaa

SEQ ID NO: 362703 - DNA, 807 bp, Pseudomonas aeruginosa
atggctaagtcagcactgcgggtactggaaatcatggaatttgtggccgactgcaacagtggtggcgccacgcacacggaaatttccattgcgctgggcatcccgaaaagtagtcttactgccctgctacgggaccttcagcgtcctggctaccttcagttggacaagcaaactggtaagttctcgattggctcccaggtaatgttcctggccaatgcttacattcgaaatttaaacatcgtccgtgtcggctctccgttcgttcacgagttgttcctgaacatcaatgagtacacgactatggccatccccaaagtggatagctgtgtcgtggtgtgctcggagaccctgccttccccgctttcccattcattgaatctcggcgaacacctgcctctggccggtagcgccttggggcgtgcaatcctggccttcttggagccggaggaggtggaggggcacctcaagcagtacaagccgattgcctataccgaatatacaaagacttccactgagcagattcgtgctgagctgaaggcagtgagagagacgggaattgcctatgtcaaagacgaatatcgactcggaatcattggtctggccgcacctatctttaatgtcaacgggcgtcctattgcttcaatcggtgtggcccttccctccgggcagaagaaccaggagcatgaggagcgggtacgtacactgctgttgcaaagcgccgatgccttgtctaagcggcttggcgcgaagctgacagcctctcctgccgagtttttcaaggaagaagaggctgagacggaggtttaa

SEQ ID NO: 362704 - DNA, 477 bp, Pseudomonas aeruginosa
gtgttgctggtctacgacgggcgcggcggcgaacggcggcaggcgcccctggcgaccgacgcgcgccatttctattgcatcgccgccgcgccggaccgcttgccgacgctgctggcgacccgccgggcggatggcgcggcccggatactggccggcggcgagcggccgctggccgaggtcgagctgtcgcggggtgaggccttccattacccggtgggcgccgacgagtgcggctacggattcttctacccgccgcgccggcccgaggtgccggacggcccaccgccgctgctggtgttcctccacggcgggccgacctcggccggctacccggtgttcgacgagcgcatccggttctggacccggcgcggcttcgccgtggccgaaattaccgcggcagcagccgctacggccgcgcctaccagggcctgctggccggctgatggcctgaccaaggtcgcattgcaatcagcgtag

SEQ ID NO: 362705 - DNA, 414 bp, Pseudomonas aeruginosa
gtggaggaggagggtggcagccaccgtatcgtccgcctggatgtcgatggccgccgccgggtgatcgtcgagggtgcggacttctatgcttcgccggtcgcggacggcaacgctgagcgcatcgcctgggtggagtgggatcaccccgagcaaccctggatgcgcatccgcctgtgcgaaatccgtgccggcgagaaacgctgcctcgccgggcagaccagccacgaatccatccagcaaccgcgctttgccgaggacggtcgactgcactggctgagcgacctgggcggctattggcagccgtaccgcgaagagaccggcgtcctgccgtcggcggcagcggagcacgccggagcgccctggcaactgggcgggcggaccttcctgccgctcgccgacggcgacccgctatga

SEQ ID NO: 362706 - DNA, 354 bp, Pseudomonas aeruginosa
atgctgcgcagcgactgtcgcgccgaacgcgcggtggccgccgggcgcgacttcgccgagctgcatgtcgcccacggcgggctgctgtggctggacttcgatccggcgagcgccgcccgttgccggctgtatctgtggcgcgatggcgcgctgcaggagctgaccccgccgggcgcctcggcgcgcagccgggtctacgaatacggcggcgcctgctgcgccaccgccgacggcgtggcctgggtggaagagggcgaccagcaggtgcgctggctgtgcctgggcggcgagccacgttcgatcaccttccgtaacgattgccgctacggcgatctccactacgtccccacctag

SEQ ID NO: 362707 - DNA, 1146 bp, Pseudomonas aeruginosa
atgcgcaattctggatcgagctgcactgacggcgccggcccgccgctgtggctgttggccgagctgacctaccgttgcccgttgcagtgcccgtactgctccaacccgctggatttcgccaggcagggcggcgagttgagcaccgccgagtggatcgaggtgttccgccaggcccgcgaactgggcgccgcgcaactgggcttttccggcggcgagccgctgctgcgccaggacctcgccgagctgatcggcgcggcccgcgggctgggcttctacactaacctgatcacctccggcatcggcctgagcgaggcgcgcctgacgcagttcgccgaggccgggctggaccacatccagatcagcttccaggccgccgacgaggaggtgaacaacctgctcgccggctcgcgcaaggccttcgcccagaagctggccatggcccgcgcggtgaaggcccacggctacccgatggtgctcaacttcgtcacccaccggcacaacatcgacaacatcgggcgcatcatcgagttttgcatcgaactggaggcggacttcgtcgaactcgccacctgccagttctacggctgggccgaactcaaccgcgccggcctgctgcccacccgtgcacagctggagcgcgccgagcgcatcacccacgagtaccgcgagcgcctggccgccgaaggcaacccctgcaagctgatcttcgtcaccccggactactacgaggagcggcccaaggcctgcatgggcggctgggccagcgtcttcctcgacgtcacccccgacggcaccgcgctgccgtgccacagcgcgcggcagttgccggtgcagttccccaacgtgcgcgagcacagcctcaaacacatctggtacgaatccttcggcttcaacctctaccgtggcgacgcctggatgtccgagccgtgtcgctcctgttcggagaaggagcgcgaccacggcggctgccgctgccaggcctacttgctgaccggcgacgccgacgccaccgatccggtgtgcgcgaagtcggcccaccacgggaagatcctcgacgcccgccgccaggccgaggaagcgccgctgtccctggaccagctcacctggcgcaacacgcgcgcctcgcagctgatctgcaaggcctga

SEQ ID NO: 362708 - DNA, 279 bp, Pseudomonas aeruginosa
atgagcctgcccgcgctggacagcgtgccgcgcatccgccgcggcttccgcctgcaattcgaaccggcccagggctgccacgtgctgctctaccccgaaggcatggtcaagctcaacgacagcgccggggaaatcctccagcgcatcgatggccagcgcgacgtggcggccatcatcgccgagctgagcaagagcttccccggcgtgccgggcatcgacgaagacatcctggcgttcctcgaggtggcccatgcgcaattctggatcgagctgcactga

SEQ ID NO: 362709 - DNA, 750 bp, Pseudomonas aeruginosa
atgagccgtgccgccatggaccgcgccgagttcgaacgggcgctgcgcgccaagggcgcctgctatcacatccaccatccgttccatgtcgccatgtacgaagggcgcgccagccgcgagcagatccagggctgggtggccaaccgcttctactatcagatgaacatcccgctgaaggacgccgccatcctcgccaactgcccggatcgcgacacccgccgcgagtgggtgcagcgcatcctcgaccacgacggccgtcccggcgagcccggcggcatcgaggcctggctgcgcctggccgaggcggtggggctggagcgcgaacaggtgctgtcgcaggaactggtgctgcccggcgtgcgcttcgccgtggacgcctacgtcaacttcgcccgccgcgccagctggcaggaagcggccagcagctcgctgaccgagctgttcgccccgcagatccaccagtcgcggctggacgcctggccgcagcactacccctggatagacgcggccggctacgactacttccgcagccgcctgtcccaggcccgccgcgacgtcgagcacggcctgcgcatcaccctggagcactaccgcacccgcgaggcccaggcgcgcatgctggacatcctgcagttcaagctcgacgtgctctggagcatgctcgacgccatgagcatggcctacgagctgggccgcccgccgtaccacacggtgacccgcgagcgcatctggcacagggggctgctgtga

SEQ ID NO: 362710 - DNA, 915 bp, Pseudomonas aeruginosa
atgcacatccgaattctcggggcggccgccggcggcggctttccccagtggaactgcaattgccgcaactgccgcggcgtgcgcgatggtagcgtgatcgcgcagccgcgcacccagtcgtcgatcgcgctgtccgacgacggcgtgaactggatcctctgcaacgcttcgcccgacatccgcgcccagttggcgtcgttcccggcgctgcaaccggcgcggcgggtgcgcgattcggcgatcgccgcgatcgtcctgctggacagccagatcgaccacaccaccggcctgctcagcctgcgcgagggctgcccgcacgacgtctggtgcacgcagatggtccaccaggacctgaccagcggcttcccgctattcaacatgctgcagcactggaacggcggcctgcgccaccacctgatcgagctggacggcgcgcccttcaccgtgcccgcctgcccgggcctgcgcctcaccgccatcgctctgcgcagcagcgcgccgccgtactcgtcgcaccgcggcaacccgcatccgggcgacaacatcggcctgttcgtcgaggacctgagcactgacggcaagctgttctacgcccccggcctgggccaggtggacgacggcctgctggcttggatgcgccgcgccgattgcctgctggtggacggcacgttgtggcgcgatgacgagatgcgcgtctgcgaggtgggcgacaagctcggcagcgagatgggccacctgccgcagagcgggcccgggggcatgctcgaggtgctcgacggcatcgacgggccgcgcaaggtgctcatccacatcaacaacaccaatcccatcctcgacactgcttcggccgagcgcgccgaactggacgcccgcggcgtcgaagtggcctgggatggcatgcatatccagctgtag

SEQ ID NO: 362711 - DNA, 771 bp, Pseudomonas aeruginosa
gtgaagcctaatgctctgatagacgtcggttcgggacctgccgttcttttctgccacggcgcgctgatggatagcagtatgttcgtgcgtcagatagatcacctcaaggctcgatatcgctgtattgcctatgaccttcggccttttcagcttgcttcgtacagcctctccgatctggttgacgattgcctttctcgtatggaagaactgggcattcggcgcttcgtcctggcagggttgtcaatggggggattcctcggtatcgagctggcgcgacggagtcccgagcgccttgcagggctggttctgatggacacgatggcaacggattacaacacggaagagcgggcggttttcactgagatgttcgagccactggatgccgatggaatgcttcccgcgtccttcatcaacagcttcgtacccgtcatttttagtcagaaagcagaggacgagcagccggagttggtggctcgttggacccacaagtgggcctcattgcctgcgcgttcgattctgaatgagcatcgggcctgggtggcaaaggaggattatgtcccctggcttccggaaatcgaaatcccaactttgatccttcatggcctgcaggatcgcggaatcctttttcatcacgcagaggtcctgcgatcaggcatacccggcgcgactctggttgccttccaggactcgggtcacgcgattaccgaagaggtcccagaacaggtgaaccaggcactgctcgacttcttgagcggcttaccggagtggtaa

SEQ ID NO: 362712 - DNA, 1488 bp, Pseudomonas aeruginosa
atgagtctggattctcgtattcttcccgaggtagtcgattttctggggcgtcctgggcaactactaatcgacggtgattttgtcgaagctgccagcggcaaacgtctagaagtaataaaccctgccaatgaaaagatcatcgcgaccgttgccgaggcggatgcggtggataccgatcgcgcggttcaggctgctcgccgcgcattcgatggggtatggtcttgcaccagtgcagcggagcgcgggcgcctgatgtggaagcttgcggaccttgttgagcagcacgccgaagagtttgcccagctcgactcgctggataacggcaaacctgtagtggccgcgagaaatggcgacgttccaattgcggtcagcgtgtttcgttactacgcaggttggtccacgaagatctctgggcagaccaatgccatctcttggcctggcgactggctaggctacacgctgcgtgagccgatcggtgtcgtcggtcagattattccttggaacttcccattggttagcgcggcctggaagattgcccccgctctcgctacggggaacaccgtggtgctgaagtctgccgagcagacaccgctatcggccatccttctcgggcaactgatccttgaggctggtttccctcccggagtcgtgaacatcatcaccgggcttggggaaaatgtgggcgcggctctcgcagcccatccgagcgtcgacaagatctcgtttaccggatcgacaactgtcggacgtctgattctgcaagccgccgctggcaatctgaagaaggtctctctggagttgggaggcaaatcgccggtggtggtgttcgatgacgccgatctggagttgacgattccaggcgttgcccaggctattttcgccaaccaaggagaagtctgtactgcgggttcacggctctacgtccatgagtgcgtttacgatcgagtagtagaaggtgtcgcgaaaatcgcacgtgacatccgacttggcgacggcctggatgagactactgaaatggggccgttggtatcgcgtcaacaactggatcgagtcgccggatatgtgggtatcgggcaagccgagggggcggagttggtcgtcggaggcgcacgtattggcgaccgtggtttcttcatgcaacccactgttttcgccagtggcaatcgctctatgcgaattgttcaggaagaaattttcggtccggtggtctgcgccatgccgttcaaggatggagatatcgacgcagtcgtacaagaagccaatgactccccctatggtctggccgctagcgtctggacgcagaacctgggattggcacacaaagtcgcacgccgattccacgctggcagcgtttggatcaactgccataccgtgatcgatcctgctcaaccctttggaggctacaagcagtctggttgggggcgtgagctgggggaagaagcgttgcactcctacaccgaagtgaaggccattaccgccaaactctag

SEQ ID NO: 362713 - DNA, 1836 bp, Pseudomonas aeruginosa
atggcggtggatgccgctaccggaaaagtgctgtggaagttcgatcctcaggtttttaaaggaaaagctatcgatgcctgctgtgattcgatcaaccgcggtgtcgcactctgggaaggaaaggttttcgtcggcacgttggacggtcgattgattgcccttgatgcgaaaactggacagcgcctttgggaggtccagaccactgatacgacgaagccctacaccatcaccggtgcgcctcgtgtggtgaagggtaaggtgatcattggaaacagcggcgctgattatggagtgcgtggcttcttctccgcatacgacgccaacactggaaagatgatctggcgtttctacacggtgcctggcgatccggcgaaaccctacgaacaaccggagttggctgaagcggccaagacatggaacggtgacgtctactggaagtacggtggcggcggcactgtttgggacggtttggcctacgatcctgacttggatctgctgtatgtaggtaccggaaacggtgggccatggaatcgcgaagtgcgtagccccggtggcggggacaacctcttcgtgtcgtccatcctcgccgtccggcccgataccggaaagctggtctggtactaccaggagacgcctggcgactcctgggatttcacttccactcagcaaatcacgcttactgagctgaacataaaaggaaagcagcgcaaggtccttcttcacgctccgaagaacggcttcttctacgtgctcgatcgtgccacgggtgagctgctttccgctgagaagttcgggaaggttacctgggccgagcgtgtcgatatgaagaccggtcggccagtggaatctccagaggccagatacatggatgagagcaagaccgttgtgcagtggcccagcggctttggtgcgcacaactggcatccaatgtcgtacagcccgcttaccggtctggtgtacatcccttatcaggaagttccgggcggcttgcggaaccagagtaaagagtttgtctttaggcctcatcgtttcaacactggcaacggattctccgatgccagggtggtgccgaaagacgccgtcagcggcgcccttctagcgtgggaccctgtggcacaaaaagctcgctggaaagtgccatacccctctcactacaacggcggcacgctggctactgctgggaatctggtatttcagggcaccgcggcagggcgtttcgttgcgtattccgcagaccggggtgaaaagctttgggacttcgatgcccagacgggaatcgtagccggttcgatcagttatgagttgaacggcgagcagtatgtcgccgtgatggctggttgggggggcgcgatggcgacggtgggcggcgacgctgctcaaacgcaggggcgctggaacaacagccgcctgctcattttcaagctggggggtacggctgcattgcctccaatgcagaaacgcaccatccgaccttatgtcgccccagagcagatgtccatgaacatcccctcaaacactgatccgaaggtaatcgaggaaggtgccgttgtttacgcaaataactgcctggcgtgccatggcgtcggtgccgtaagtggggggctcactcccgacctgcgtaaatctgacccagcggtctatggcgcgttggagaccatcgtgttgaaaggcgcgctggagcctctcggaatgccgaacttcggcaagtatctgacgcatgacgatctcgagaagatcaaggcttatctcgtgcaacgtcgcaaggaaagcttcgctggcgcagcagcgggggcggctacagcagtcagcaatcgtggtgaagctccgcagcagtaa

SEQ ID NO: 362714 - DNA, 576 bp, Pseudomonas aeruginosa
atgaacggccaggaggatgcttcgggcataggtgatccgttcgtgtcgtttcctatcttctttccgttagatcgctcaaagcgcgagtactttgtcttcgcgccgtttctctatctcccgctcggtgagtacgatcacaacgaccctctgaacattggggagaaccgctggaaaggcgtgttccagtttggctaccagcggggcttgagtgaccatttcaacgtggagcttttggccgaggcgacggtgtatggggaaaatgatgagtacggcccggcaaagcagactctcaaacaaaaacctttgtacgagggaagggctgcactctcttaccagttcaataacccaggcaactccctgattggcggcggcctgcagaagaacatcggcggggagaatgaactggacggagttgatcagagggatcgcatcgacagcacagccttctatgttcaggccagcactttcatcactccgagcgatcagatcctctttggattcagccgagatatcgatactgaaaacggcttcaagatggataagcaattcaagctccgctacctccacgtcttctag

SEQ ID NO: 362715 - DNA, 825 bp, Pseudomonas aeruginosa
atgggagaaggtgtcgtcgtctacagcagcagctgttgcggctggatgccttttccggagagaaagatgacggttgatacacgtggtgaattcgaaggtcgggtggttctggtgaccggtgcagcgagtgggattggccgggctgtcgccctgatgctgcatgagcgcggggctaaagtggtagctgaagacaaaagtccgacagtcgagcaactcgcacggcccggcctagttccactgattgcggatatcactgaagatggcgctgccgaaacagcagtggcgacagcgatagcacactttggccgtctggatatattggtcaataacgccgggattatcataaacaaattggtcgttgacatgactcgtgatgattgggagcgtattcaggccgtcaatgtcacggcggcatttttacatgctcgggaagcgataaaggcgatgatcccgaatcgaacgggtgccattgtcaacatcgcgtcctatgcggcttaccaggcgttccctacaattgcagcttataccgcttcaaaaggtgcgctggcccagctgactcgcacgttggctcttgaggtcattgactacggtatacgcgtcaacgcagtcggttccggggatgttgtgaccaatatcctgaacgacgttgttgacgacggccctaggttccttgcccagcatggtgaaaagacgccgatcaaacgtgccgctcagcccgaagaaatcgctgaagtcgtcgcgtttctagcctcagagcgggcatcttatattttgggcgccgtcgtcatggcggatggagggatgagtgtccccgctggcgcctga

SEQ ID NO: 362716 - DNA, 933 bp, Pseudomonas aeruginosa
atggaaacgcttagccaaccatcccgctcggatcatcatgagcggattcccgcccataaaatgccggactacctacccgctacggcccatcagccttttggccaaagtttgaactcgcatgtgcagatacagatattcaggcatcgcaccacccagcagagcctgatgattcctgctgtcgcagaacctctgcttgttctgatcgtttcaggtgctgccgtcatagaggagcgcatagggaacgaagaatggacggccacccctgtcgttgctggcgacttttttctgacaacgtcgcccctcccttatgaaatgcgatggcaaacagaaagcgatgggggctttgaagtgatgcatgtctatctcagccagcatctgctggatcttgccgcgcgggatattgtttcgtgtcgcgacggagtccagcggctacgagaggtatccggcgaacgagatcctgaaattacggggctgatgagatccctctatcaagaagtgacttcaaactcgcaagctagctctctgtacctacaaggcataggccaggcgcttgctgtgaatttggcccgacgctatggcgccggtagcgaaccgtccaaacgtatgaacgtcttgccagcctataaactccatagggccattgcgaccctgcaagcagggatcggcagtgcgttcagcctggacagaatggcatccgaagcgggcatgagcgtttcgcacttcagtcgcctgttcaagaaagcaacaggacggagcccatcccagtactttattcatctgcggatggagacggcgcgggagctacttctagaatccgacctcagcatcctgaacgtcgcccttgaggttggctatgccagcccaagctatttcgctcagttgttcagacgccataccggcataacgccgcgtgaataccgtcatcggagttaa

SEQ ID NO: 362717 - DNA, 606 bp, Pseudomonas aeruginosa
atgatcgaattgctctctgaatcgctggaagggctttccgccgccatgatcgccgagctgggacgctaccggcatcaggtcttcatcgagaagctgggctgggacgtggtctccacctccagggtccgcgaccaggaattcgaccagttcgaccatccgcaaacccgctacatcgtcgccatgagccgccagggtatctgcggttgcgcccgcctgttgccgacgaccgacgcctacctgctcaaggaagtcttcgcctacctgtgcagcgaaaccccgcccagcgatccgtcggtatgggagctttcgcgctacgccgccagcgcggcggacgatccgcaactggcgatgaagatattctggtccagcctgcaatgcgcctggtacctgggcgccagttcggtggtggcggtgaccaccacggccatggagcgctatttcgttcgcaacggcgtgatcctccagcgcctcggcccgccgcagaaggtcaagggcgagacgctggtcgcgatcagcttcccggcctaccaggagcgcggcctggagatgctgctgcgctaccacccggaatggctgcagggcgtaccgctgtcgatggcggtgtga

SEQ ID NO: 362718 - DNA, 807 bp, Pseudomonas aeruginosa
atgccgaagtcattccgccatctcgtccaggccctggcctgccttgcgctgctggccagcgccagcctccaggcgcaggagagccgcctcgaccgcatcctcgagagcggcgtgctgcgcgtcgccaccactggcgactacaagcccttcagttaccgcacggaagagggcggctatgctggcttcgatgtggacatggcgcagcgcctggccgagagcctggggaccaagctggtagtggtgccgaccagttggccgaacctgatgcgcgatttcgccgacgaccgcttcgacatcgccatgagcggcatctcgatcaacctggagcgccagcgccaggcgtatttctcgattccctacctgcgcgacggcaagacgccgatcaccctctgtagcgaagaagcgcgtttccagaccctggagcagatcgaccagccgggcgtgacggccatcgtcaaccccggcggcaccaacgagaagttcgcccgggcgaacctgaagaaggcccggatcctggtgcatccggacaacgtgacgatcttccagcagatcgtcgacggcaaggccgacctgatgatgaccgacgccatcgaggcccgcctgcagtcgcgtctgcacccggaactctgcgccgtgcatccgcagcaacccttcgacttcgccgagaaggcctacctgctgccgcgcgacgaggccttcaagcgctacgtcgaccagtggctgcacatcgccgagcagagcggcttgttgcgccagcgcatggagcactggctcgaataccgctggcccaccgcgcacggcaagtaa

SEQ ID NO: 362719 - DNA, 861 bp, Pseudomonas aeruginosa
atgcgttatctactgttcgtcaccgtcctctgggcgttctccttcaacctgatcggcgagtacctcgccggccaggtcgacagctacttcgccgtgcttacccgggtccttctcgctggcctggtgtttctcccgctgacccgctggcgcggcgtcgaaccgcgtttcgtcggtggggtgatgctggtcggcgcgctgcagttcggcatcacctacgtctgcctgtacctgagcttcaacgtgctgacggtgcccgaggtgctgctgttcaccgtgctgacgccggtccacgtggccctgttcgacgacctgctcaaccgccgcttcaacttctgggccctggccgccgcgctggtggcggtgctgggcgcggcgatcatccgctacgacgggatcactggcgagttcctccagggcttcctgctgctgcaactggccaacgccaccttcgccgccggccaggtgctgtacaagcgcctggtgcgcaagtacccgtccgagctgccgcagcgccagcgcttcggttatttcttcgttggcgcgctgctggtggcgttgcctgcctggctgctgttcggcgatccgcagcgcctgccggccggcgagctgcaatggggcgtactggtatggatggggctgctggccaccgccctcggccagttctggtggaacaagggcgccaccgaggtggacgccggtaccctggcggtgatgaacaacctgcacgtgccggtcgggttgctgctcaacctgctgatctggaaccagcacgccgacctgccgcgcctggccctgggcggcgcggtgatcgtcgcttcgctgtgggtcaaccggctcggccggcgcgaggtgcgtgcatga

SEQ ID NO: 362720 - DNA, 900 bp, Pseudomonas aeruginosa
atgaggatttccggacagggcgtgctgctgtcgctggccgcctcggtgctgttcgttaccctgccgggctacgtccacctgctggagccgctggacagcctgcaggtggtggcgcatcgggtggtctggtcgatcccgatggtattcctgctggtcgtcgccacccgccagtggccgaccctgcgcgccgcctggcgccggctgttcgccgagccctggctgctggcctgcttcccgctgaccgcggcgatgatgctgctgcaatggggcatcttcatctgggcgccgttggccgggaaaacccttgaactgtcgctgggctacttcctcctgccgctggcgatggtgctggtggggcgggtgttctacggcgagcgcctgacgccgctgcaggctatcgccgtggcctgcgcgctggccggggtgctccacgagttctggctgacccgcgcgttctcctgggtctccctggtcaccgcgctgggctatcccccatacttcatgctgcggcgcaggatgggcgtggacgcgctgtccgggttcgtcttcgagatgctcttcctgctgccgctggcgttggccgcgctgtactggctgggcgacgagagccaggccttccgcgaggcgccgcgcctgtggctgctgctgccgatgctggggctgatcagcgccctggccttcggcgcgatgatggcttccagccggctgctgccgatggggctgttcgggattctcagctacgtcgaaccggtgctgctgttcctggtggcggtactgttcctcggcgaggcgttccgtcccgagcagctatggacctacgcgccgatctggctggcggtgctgttgaccggctgggacagcgcgcgcctgctgaggaaacaggcgcggcggggcatctga

SEQ ID NO: 362721 - DNA, 597 bp, Pseudomonas aeruginosa
atgcgttcaccctttttgacatgcctgtctgtaggcttcgcggcccttctggccgccctctcgacgcccagcctggcttccaaccaggtcacccacaccttcaagccgtcgaagaattccaccctgtcgcccagccgggtcgtcagcacccgccagtccgccaaccgctcggtggtcgcggccgccgcttccgaagtcaccgaccgcgccttcagcatgatcggcaccccctaccgctggggcggcaccacgccgaagaaaggcttcgattgcagcggcctggtcaactatgtgttccaggacgtcgatgacgtcgacctgccgcggaccgcccgcgccatctacaacatggacaacaacaaggtctcccgcggcaagctgcaaccgggcgacctggtgttcttccggatccgcagccgcagcgtcgaccacgtcggcatctacgtcggcaacgaccgcttcgtgcatgcgccgcggcgcggcaagaaggtccgcgtctccgacctcaacagcagctactggaaacgccactacctggccggcaagcgcatcctgccgaccaccctcgcccaggtcgaaagcacccgcaagcgctga

SEQ ID NO: 362722 - DNA, 1695 bp, Pseudomonas aeruginosa
atgaccgaaacagccaagcgtcccttgtacgttccccatgccggcccatcgctgctggagatgccgctgctgaacaaaggcagcgcgttcagtacccaggaacgcatcgatttcaacctgcagggcctgctgccgcacaacatcgagaccatcgaggagcagaccgagcgcgcctacagccagtacaacctgtgcaacaccgatctggaccgccacatcttcctgcgctcgatccaggacaacaacgagaccctgttcttccgcctgctcgaggagcacctggaagaaatgatgccgatcatctacacccccacggtcggccaggcctgccaggagttctcgaagatctaccggacccaccgcggcctgttcatctcctacccggaccgcgagcggatcgacgacatcctgcgcagcgccaccaagaacaacgtgaagatcgtggtggtcaccgacagcgagcggatcctcggcctgggcgaccagggcatcggcgggatgggcatcccgatcggcaagctgtccctgtacaccgcctgcggcggtatcagcccggcctacaccctgccggtggtgctggacgtcggcaccaacaacccggacctgctcaacgacccgatgtacatgggctggcgccacgagcgggtgagcggggcgcagtacgaggagttcgtcgacctgttcatccaggcgatcaagcgccgctggcccaacgtcctgctgcaattcgaggacttcgcccagaccaatgccatgccgttgctggagcgctacaaggacgagctgtgctgcttcaacgacgacatccagggcaccgccgcggtggccgtgggcaccctgctggcggcttgcaaggccaagggcgagaagctcagcgagcagaccgtgaccttcgtcggcgccggctccgccggttgcggcatcgccgaacagatcatcgccgccatgcaactggagggcctggacgaggcccaggcgcgtcggcgcatcttcatggtcgaccgctggggcctgctcaccgacgacatgagcaacctgctcgacttccagcaccgcctggcgcagaagcgcgccgatctcggtgcctggggcggccagcagggcgacgacctggcgttgctggaagtgatccgcaatgcccggccgacggtgctgatcggcgtctccgggcagcgcgggctgttttccgaagaggtcatccgtgagctgcacagccattgcaagcagccgctggtgatgccgctgtccaacccgacctcgcgggtcgaggcgactccgcaggaaatcctcaactggaccgacggccaggcgctggtcgccaccggtagcccgttccaaccggtgcaggtgggcgacaagcggattcccatcgcccagtgcaacaacgcctatatcttccccggcatcggcctgggggtgatcgccgcacgggccaaccgggtcaccgaaggcatgctgatggccgcggccaacgccctggccaactgctcgccgatcgttatccagggcgagggcgccgtgttgccggcgctgggcgacatccgcgaggtcagcaagcgcatcgccgtcgccgtggccaagcaggcccaggccgagggcaaggccctgcataccagcgacgaggtactgaacgacgccatcgaggcgaacttctggttcccgcgctaccgtgcctaccgccggacttcgttctga

SEQ ID NO: 362723 - DNA, 459 bp, Pseudomonas aeruginosa; identical to SEQ ID NO: 321915

SEQ ID NO: 362724 - DNA, 543 bp, Pseudomonas aeruginosa; identical to SEQ ID NO: 321916

SEQ ID NO: 362725 - DNA, 1329 bp, Pseudomonas aeruginosa
atggactccacatcccttctcgaccagctctccgggtactggtcggcgctcgaccaacaccctatcctgcacgccggcctggccttcggcctgctgctggtgggcgccctgatcctcggccgggtggcccgctacatcgtcctctacgccgccaacctgctcgcccgccagcccgcgctgcactggctcggcgacctgatccgcaacaaggtgttccagcgcctggcgcagaccacgccctcgctgctggtgcaattcggcctgccatggatcccggagatgccggacaaggccgcgcacttcctcggcaacctggcactggccttcaccgtgctgttcctgatcctcgccctcacagcgctgctgaatgccctgctggacatctacgcgcgtaccgagcacgcccgcacccgctcgatcaagggctacgtgcaactggcgaagatcgccgtgttcgtgttcggcgcgatcatcatcgtctcgatcatcatcgaccgctcgccgctcctgctgctgtccggcctcggcgcgatgtcggcggtcctcctgctggtctacaaggacaccctgatgtccttcgtcgccagcgtgcagctcaccagcaacgacatgctgcgagtcggcgactggatcgagatgccgcaggtcggcgccgacggcgacgtggtggacatcaccctgtacaccgtgaaggtgcagaacttcgacaagaccatcgtctcggtgccgacctggcgcctgatgtcggagtcgttcaagaactggcgcggcatgcagcagtccggcggacggcggatcaagcgggcgatctacgtcgactccagccaggtgcgtttcctcgacgagaaggaagagcggcgcctgagccaggtgcgcctgctcaccgaatacatggcccgcaagcagaccgagttgcaggagtggaatgccgccaacggcggggtcgccccgctggccgccaaccgccgccggctgaccaacatcggtacgttccgcgcctacgccctcgcctacctgcagaaccatccggacatccatccgcacatgacctgcatggtccgccagttgcagccgaccgcccagggcatcccgctggagatatactgcttcacccgcaccaccgcctgggtcgactacgagcgcatccagggcgacgtgttcgactacctgctggcggtgatgccggagttcggcctcggcgcctaccagcagcccagcggccaggacctgcgccaggggctgcagggcatgctcgaagggcgtgacgccgaggcccgttcgttcgaggcgttggccgcaccgagccgcagcgacgaagccactgtctga

SEQ ID NO: 362726 - DNA, 606 bp, Pseudomonas aeruginosa; identical to SEQ ID NO: 362717

SEQ ID NO: 362727 - DNA, 807 bp, Pseudomonas aeruginosa; identical to SEQ ID NO: 362718

SEQ ID NO: 362728 - DNA, 861 bp, Pseudomonas aeruginosa; identical to SEQ ID NO: 362719

SEQ ID NO: 362729 - DNA, 900 bp, Pseudomonas aeruginosa; identical to SEQ ID NO: 362720

SEQ ID NO: 362730 - DNA, 597 bp, Pseudomonas aeruginosa; identical to SEQ ID NO: 362721

SEQ ID NO: 362731 - DNA, 1695 bp, Pseudomonas aeruginosa; identical to SEQ ID NO: 362722

SEQ ID NO: 362732 - DNA, 459 bp, Pseudomonas aeruginosa; identical to SEQ ID NO: 321915

SEQ ID NO: 362733 - DNA, 543 bp, Pseudomonas aeruginosa; identical to SEQ ID NO: 321916

SEQ ID NO: 362734 - DNA, 1329 bp, Pseudomonas aeruginosa; identical to SEQ ID NO: 362725

SEQ ID NO: 362735 - DNA, 408 bp, Pseudomonas aeruginosa
atgaaaacaacacgcaagacatccgacagtcgtgaacgagatctgcgacttgcgttagctcgcattcaacgtggccgagcccatacgggggagtccaaagtcactattgccgcagtagctcgtgaggccggagtctcaacggcgttgatccataaccactacccgaatgtggccgaggcagtccgcgaagctcagggccgttctagtcgcgcccaacgcgacgtaaagcatcaggatctcatagcggaacgcgagaaaaataaactgctccgccaagagctcgaagagctacgcctgaaaaccgctgacctggcctcgattaatgaagttctgatggcagaactgcgagccctaaaagcaaggagcggtgaccttaaaatagtagccctgccctcccataaaacgtga

SEQ ID NO: 362736 - DNA, 303 bp, Pseudomonas aeruginosa
atgatcatcactctttctccgtatttaccgcttcctgaaagcgacgagcgcctgtcgctgagcagggctggcgatgtgctcaccgtgaacggacaggtgttcgacttcacaccgctcccggagggcggcgagttgccggccgaggctaccggatcggaatggttcgctggccctgtagtgcgccgggatgggctgctggaattgagcctacggttcccgcttgccgatgacgccagtgccgccgctcgcttccctgaaccgttgctgatcgaggctgatggcccggtggagttgccgcgatga

SEQ ID NO: 362737 - DNA, 324 bp, Pseudomonas aeruginosa
atgagcatcacagagaacgtatccagcgccatcgagcccgaggatctgcaccgcgtccgcgccattgccgcggccatcctcgagcaccaaggcttccaggcaagcgagctgctcgacctggtagtgagagagcagccggtggcgcacaagaccaccatcgcccgcgctggcgggctggtgagcaccaacagcggcagcattgcgcgggccaccgcggccgtcgaccttgcggcggtgatcgtcaactacctgcgcgaggagttcgagatcccaggcgtcgaccacgagctcctgcaggcactgcagcgggaggccggtctatga

SEQ ID NO: 362738 - DNA, 153 bp, Pseudomonas aeruginosa
atgagccgccacacgtccagccccgccgagcagctgctcggcctgctgttcggcgctggcgcggccctggtggccggcctggcgctgctgtaccgcatgacctgcgccgccctgcaggatcccgagaccaacgaagaccaggagcagccatga

SEQ ID NO: 362739 - DNA, 186 bp, Pseudomonas aeruginosa
atgagcagccgcacccctagacaaatcgccgccggccagcgccgcagcctgcaggccatcgagaagaagatccgcgccatgtccgccgaatggatggacgaggacgcattcaacgaaaaccagctgggcgacctggccgacaaggtcaaagaagtttcccgcgacctggtcgccgaggaggagtaa

SEQ ID NO: 362740 - DNA, 738 bp, Pseudomonas aeruginosa
atgaccaacaccaacacccgtaacgccctctatcgcggcgactcgctgcagatcctcgccggcctggagaccggcactttcgacgcccttatcaccgacccgccctactcgagcggcggcttgcacatgggcgcgcgccagcaggtgacctcgagcaagtaccagcagggcggcttcgagcacctgcacgccgagttcctgggcgaccatcgcgaccagcggtcgcacgccttctggatgacgctctggctcgccgagtgcttccgcctgctcaaggatggcgcgccggtctgcctgttcaccgactggcgccagctgccgatcaccaccgacgccctgcaggccgccggctttacctggcgcggcgtggccgtgtgggacaagaccgagggtgtgcggccccagctgggccgcttccgcgcccaggccgagtacgtcgtgtggggcagcaagggcggcatgccgctgcagcgcaaggccccggtgctgccgggcgtgatgcgcgagccggtgcgcaaggccgacaagcaccacatgaccggcaagccgaccgagctgatgcgccaggtggtgaagatctgcgagcctggcggccggatcctcgacccgttcgcgggatccggcaccaccctggtggcggccgagctcgagggctacggctgggccggctgcgagctgaccgagcactatcaccaggtggccgccggccgcctgcaggcgctcggcgctgagttctga

SEQ ID NO: 362741 - DNA, 351 bp, Pseudomonas aeruginosa
atgtttttttcaccttcaacaggcggcttctacagccttgagtttcatggggctgacggcatcccgagcgacgcagtcgaaatatcggatgatgaatatgccgccttgaaaggccgcctgatcgaggtaggccccggcggtcgcccgcgcctggttgtcgacctagcgccgcttccgcttacggttgggcaggttcaggcgctgcgacagtctgcctacgcggctgagtctgatccgctgaaaattgaggcggaatttgacgcccagctagccggcggtgcccctgattactcggcgtggattgccaaggtcgaggaaatcaaagcccgctatccgctgccggcggagtag

SEQ ID NO: 362742 - DNA, 1626 bp, Pseudomonas aeruginosa
atgaccccacaagatccgatctattccctgccgacaaacgtcggcgcggccaagctggcctacgccatggccaaccagttgaccgtggatatttcgcacatggccatcggtgacggcaacggcgtggccgtcaacccgaccgccgtatggccatctctggcgcgcgaggtgcatcgggcgcagcttaaccagctgtaccagcacccgaccaaccccaactggctggtggccgagctcgtgctgccggcggaggtggggggctggacgattcgagagatcgcgctctatgacgttgacggcgacctgatttttatcggcaaccatgccgagcagtacaagccggtgcagagccaggggagcgacgagaccaagaccattcgcatggtgatcgtggtctcgaatacctcggcggtcacgctgaaaactgatccgaccaccgtcatggcaacggtcgactacgtgcagcgcgagctcgccaagctcgatcacaagcagtcggttcgctacaccacgacggcggcggtcgtgctttccggtctgggcgtacaggctggtggagattgggccgccgccttgaccgctggcgatcgcgtgctggtgaagaaccaggccctggcaaaggataacggggtctatgtcgctgcaggtggcgaatgggtacgcgcgactgatgccgacattagtgccgaggtgacgtctggcatggtcgtggcggtcgagcagggcacggcgctcgcggatacgcgctggcagctggtgactgatggcgccattatcctgggcaccacggcgctggtctttcaggacgtgaccaagggctacgcgccgatcgcctcgcctgcttttacggggaacccgagtgcgccaacgccgccgcaatttgaaattagcgaaaatgtcgccactacgcggtttgtgcagagggcattaggtaattatcaaaaacagctccagttcaatagctcacaagtcctgacggccgctcagtgcggatctgtagttatcgggtttggtacttccactattggttttactctgcctgcatgggctaattgtcctgatggcgctgcctttgacttttggtcgaataacacctcggctggaggcgtaaccattgcatgcgccggtgctgattttttccaaatgaatgccggcacttcgggcgctattgcgcttggcgctggtgattcattttttgtagtgaaaggttcggcgaatgggcaatggattgctctaggggggacaaagtcgctgcaaaattcgccaggcttcgccgcgtctcttagcaatcctggatggcgcaagttgccgtcaggcgagatcgagcaatgggcaactcagacccttggcgctgtgggtgcttataaccagcagtcaataggcggcacgaccttctatacaaactactacaacgtaacgtacccgctcgcctttcctaatgtggtgcatgaggccgaggtgacgctggcgtgctctacgtttgctgctcagatcagtatggcaggcaatggggcctcgcttaatttgtcgggcacgggcaacagtctgacggggatgggggtcgcgattacgacgccgatccttggttatgtgccgacaatccattggcgctcgcgcggtaagtaa

SEQ ID NO: 362743 - DNA, 630 bp, Pseudomonas aeruginosa
atgagcgacgaatcccaggccctgagcctattgccgcccaatcgctcgttgctcgaggcgggcctggatctggctttcgcgaaactgctcgagcgtatcgagccgcctttccccgagcttatggatcccgcggcaacgccggtcgagttcctgccatatctggcggccgaccggggcgtcagcgagtgggatccggcggcggcggaggaggagaagcgctcaaccgtcgcaagcatttgggccatccgccgccttggcggaacccgcaaggcgctggagctggcggtcgagtcgctgggccttctgcccgaggtgatcgcctggcacaagcagcagccagccggcagcccttacagcatccgcgtggtggcccgtgccttgggcgccttcgatgccgaatcgaatcgccgcctcggcatccgcttggctgacgccaaggccgagcgcgacgagctatcgctcgacattgtcagcgaggtgcaggggctcctgtactacggcgcagccgtgagcactggcagcctgaccaccgtttatccctattcagagaaagagagcgaggtgcaggggctcctgtactacggcgccggcctcgttgagatctcgaccaccacggtgtatccgcaatga

SEQ ID NO: 362744 - DNA, 999 bp, Pseudomonas aeruginosa
gtgagcacgatgcttattcccgggctcaaccagctggccgagccggaaatcgtcaaggtcgagcagttcgagacgctgctggccgagttcaaggccgacttgctggcctatgtcgccgcgcgggatcccgagaaggccgcgcgcctggccgagtcgctggaaaacgacagcgagctgctggccatggccctgcaggccatgacgctgcgcctgcagatgcacgagcgcaagtacaacgcccgcatcaagcagatgctggcctggtgggccgagggctcgaacctcgacgcccgcgccgcggatctcggcctcgagcgccgagtcatcgacgagggcgacccgaacgccttcccgccggtcgatccggtgctcgaggaggacgccgacctgcgcctgcgctactacctggcgccgcacgccccggccgctgggtctcgcctgcagtaccgccgcgaagccctgaccctgggagagcgcgccacggtcgcggtggaagcgcccagcgccggccagctggtggtgacttacaccttcgccgaggatggtttcgccgcgcagatgaaggacgccaatgggcgccgcacggcacccggcgaggtcgccgtcaccgtgctgtcgcgagagggtgacggcacgccaggccccgagctgctggccgcggtcgaggcgcacttcgcccgcgatgacgtgaggccggagaccgacctggtcaccgtgcaggcggcgaccatcgtcggctaccagatcaacgcggtggtctacatcagccccggcccagatgcccagctgaccaaggccgccgccgagcaggccctggcggactatgcggcccagcgtcaccgcctgggcagctatgtggatccgagccggatcgactacgtgctgcacgcggccggtgccgagcgcctcgagctgctcgccccgacggtgccaattgaatgccaggcgcaccaggcgccctactgcaccgggataaacgtcgaggtcaggacgctatga

SEQ ID NO: 362745 - DNA, 294 bp, Pseudomonas aeruginosa
atgaagcggcgcacttaccggcccgccgagctgcgcgccgggcacacgttcttcgtcgcctggctcgacatgatgacgctgacgccgcgcccggtggttcaagagtacctggtcaccagccgcgccgccggtcactggccggccgagggtgagtggtacccgtaccgcctgcgccctgagctggtcgagcatatcgccaagcactgcccgctctaccgcacgcgccgcgccgccaagcgcgccgcgctcgccgagctggatcaattcaaccgaaagcagaaggcccgcccatga

SEQ ID NO: 362746 - DNA, 2151 bp, Pseudomonas aeruginosa
ttgaccgtatcgaccactgatagcgttatcgaatacgtatccggcggcccggcttttccaatcccctatcggttcttactgaattccgacattcaggcagtcctggtaaagcaagacggtacttcggagacccttgcgttgggaacccagtacacactttccggggccgggtcgcagggtggaggaacactgacctcggcttatgcatcctcaattctgagcatgcctggcgcgactctgacaatttccagggtcatgaatgcagttcaaccaaccgacctgcgcaatcaggggcgttattttgcagagacccatgagaatgtttttgaccgactaacgatgttgatccagcaaggattttctgggctttctcgtgcacttcttcgcccgataggaaagaattactatgacgctgaggggaggaacatttctaatattgcgaaccccatcaataatcaggacgcggctactaaggcatccgttgccgcagatgttgcagccgctatcggtggtgcccagggcgacttcaatctttcgtccaacgtgttctatagctacgggtctcccggagctgtttcgcgcaatgtgagcaatcggctgcgggagcgcgtcagcgttaaagactttggcgctgtcggagatggcatcgtagatgactcagctgcgtttttggcagcgcataccaacgttgccgcgggcgtagagatttatgtgccgccagggacatatcgattcgcctcgaatgtcacggtcactcggcgcaactttttcttcaatggatcgtcgattactgggccgggccgacttgtcggcgctttgaccagaatgatcgacccagtgacgggtggagtttcgtatggggtcggcgagccgtatcagtacggcagctattataaattcggatcaaacgttgccggcccaattggccttgttgttggcggagccgatccacgattcggggtggatggcaatgctctatttgctgacagctatggcggctggtctgcattctcgcctacgcgctatctgtcctcctgtgaatttgctgtgcagcctgcatcttctgctggctcctgcacgaccctagttggcggaaacgttgtaactcgaactggcggcggtgagttccttgccgagtttgttgggcggagaatctacatcgatcagggcaggtaccgcgttgcctctgtgaacgtccccgctcagactcttacggtcaccgagctcaatggcactccggtggttttctctgtgccagggccattcacgtttgtgtttgttggcgtcaagggctccggcacatgcaatgtttccggcacagcggtaactcgagtgactggcgacccttttgtcccattcggcaacaccgagtatctcttctacttgaatggggtttcaaaccaggcaactgcagtatccgactacaacaacctcaccctgttgaatccagcagtttccgggacaaatgttccttatgagttctggacatcgatcgatgatttgtcatcggctgttcgagtgcatcgagttgcaggtgcggggtttgaagaaaatttaaccctcggtgcctatgctgccggctatttccacgtccattctgctggtggtggaggaaggcagtacccgatgtatctgggtactggttatgacggggcatccctaaagagacggcaagttggattgcaaaccaatggccgaattactttagggggggatgctgataaatgctctcttgtcattgaagatggcgggggttctgccacgaactatcttgtggtgtccggctctgctgtgtccggatctggaacgccatcactttcagcgcagggcgcaagtacaaatatcgggattgcagtctccacaaaagggaacctgagcactaagtttagctctggcaactttagttctattgaatttgaaatctcgtctaatactgctggcacatcttggctcgctgttaggagtgatgcctataaccagccaaggctatatgcagatggcgcatctgcaaatatcgatattcggttgattccaaaaggaactggccgcgttatgattggaccgtatacagcgggaagcggaacgatcaatggatggattgaggttaaggactcaacaggctcattaagaaaggttgcgatattgacatga

SEQ ID NO: 362747 - DNA, 2088 bp, Pseudomonas aeruginosa
atgcgctacaacactggcaaccctgtgggtaccgatggatcgagctcgcctttcgatcttcacgacaactctggaaatatcgatgtttgggccaacgaccggtccaggacctcgtggacggaccgcctgggcgttccgcgcaagaccgtttggggcatggagcagcaggtcactgacttcttgattgcccaaggctatgagtcggtgtatctgacctatggggccggggtgatagttgcgcggcaaacccaacttgtacaacgcgccggcgaactgtatcgggtcatgaatgcctcggacattcctctgacgctgactggaacatgggcgactgacgctcccaagctgcaagcggtcggagatgcggagcttcgccaggctctggctgctccagacgggacaacaaaaatcgggcgaggcgccggaacgcttgaggatgcgctgggggccgcaatttccggggcatcttcctttgagccgatcgccccccaaagaattgcattgcattacggcgcatgtcgcggcaccggatttgttgcaggtgttgagccgggcgggacaacgtcaacactgacaactgcgtctgcggcgcttggcgcgaatcgcctgtatgttgccaataccgcgagcttcttccctagccagctaatcgtttacctgggcgctgatggcgattactacaccgcgattgttctgagcaaggacgccaccagtattttgctgcgcactgatatcgaggtggcggttgcgtctggcgcgctggtgtccaacttctacgcgaacgaatcgcacccgaacacgtacggctattacgcgattgcggactatgccctccgaaccatgcttactcagcgtcaggtaatgctcacttggcgggcgaccgacggcgcgcttgccgtaggcggcgcaatcctttcttccctggctgccgtaacttatgagaactcaggctcttccacggttccggcaataaagtcggtcgccacggggatggccactgggcttgtgacgccgttttacgacttgcctgccggcaattacgtcgcaaagttctatttgacgccgaacatggagggcagtagtgacatttctgttccagctagcctttcggtagttgaaagaactgccgtagctgacaccactattcaagtcgcaagaccgcgaggccagaccgctctggtcgtagagctggcgttcgccaagaaacacgactcgacggtgtcgttcaggatgttgaaccagacagcggggacgctgtggtccaacatcgcaaagattgaagtaatccgcgtaaccagcgctctccgcacccttgataagggcaagcatgttctgctcggtgactcctggtttgcagttggcgacatccaggcccgcctgagttcaaaacttcctaacgcgaccattgtgggcaaaggcgtaggcggaaacagagcggatcagctggttgcaagattctctgctgatgtggttccagaagatccggacgtggtgtgggtcatgtgcggcaccaacgacgtgtctcaatcgatcccgctgaacaccttcgggtacaacattggcctgctgaagtcgcggattgcggcgctaggcgcccggtcgattttcttcgattgctcggtgggctcaacagcgcatagcacgcggggggatctgctgaccaactcgcgaaactttgcgctgggcacggactacctggacgacagtgatatacgccgcagcctggaaagaaggactgaggtctttcaagaaaacttccttgtgaccattccggcatcgtcgacccgccgcgtgtgcgtgttccctgggacaacatcgctggcggcaacgcttgaaaggctttatgtggcagggcaaaccgcaagcatcgtgggcaaggggaatgttcgctacgggttcggagtctccgcaacgacaaccatctccgaggatctggtttccacgccatttactgcgtctgtcctcacggcactcgctgttgcaaagagcaacgcaaatatccggttcctgctaatcgagatacaaaacacagatgtggcggcaattgacgttatcgggttcgtgtcaggtacatggacgccggcataa

SEQ ID NO: 362748 - DNA, 402 bp, Pseudomonas aeruginosa
atgagcgtgaaatcattcaccatcggcggcgtgcagtacaacgccgccatggccagcgctgtcgaccaagaccgcctgatgtccctgctgtctgccgccgtgctggagcgattcgccacggcggcgggcgccggactggaagtggacgatcaggtgctttgcgccatgttcatgtcgatgcgccaggacgtaaaagcccaggtcgcgcaaatgatcatggctcgcgtgctgatcaacggcaccgagcgcccggtcaccgtcgccgacttcggcggaaagatggtgcagtacaaccagctgctggccgagcttctgcgctggaacctgtccgattttttcgactggctgccaagcggcgcaaaaggcgctcggcaggaaggggcggcaagcgcagcgcagtaa

SEQ ID NO: 362749 - DNA, 369 bp, Pseudomonas aeruginosa
atgagcctttccatgcaggggcatatcgacggcgtgttcgtcagcgtgccagccacgcgaaccgttactggcggcgactgggtggatggaatctgggttccgggcgtgccggtgacctcaccatacgtcgtgaacatccagccggccactgaccgcgaggtggatttcatccgccagggtggcgagcggatcgtggatgccaggcgcatctacatcaacgaaggcgacatgcaactgatcgaccagaccgggacctgggaattcctggggcagcagtggaaggccgtcaaggtggataaccgctactggcgcaactactgcaaggtcatcgtcagccgtatcgatgatcaaagtggtggtccggcatga

SEQ ID NO: 362750 - DNA, 600 bp, Pseudomonas aeruginosa
atgctcaatctcgacctgatcggctttcaggagctggaagaccagctttcgaaagagctggccacgctgcgctcgaacaagatcgtcaccgttggcatccatgaggaggctggcgatgtcgagtcgggcgatatcaccatggccggcctgggtgccacacatgagttcggggccgaggtgaagcaccccggcggcacgtcctacggctatgccaccaaggccgccgccgaccgcgatgaggtgagattcctcaagaccggcaccggctacatgcagctcggggtgacccagccgcacaacatcacgatcccggccaggccatggcttgagccaggggtccagcaggctaccccgctgatccttgagactatcgaggccggcataaacgctgatcagccaatggaccagattctggaaacggttggcgtggtcgcagctggcgaggtgaaggtgtacatgacccagttacgcacgccgcccaatgccgcgtccacgatccgcaagaaaggcagcgataacccgctgatcgataacggccatatgcgggcatcggtaacccacaaagtgtcagcagagcctatgtcggagggcctggaatga

SEQ ID NO: 362751 - DNA, 414 bp, Pseudomonas aeruginosa
atggacatcaccccggaaatcatcgcagcgttccgggagttcatgcccgcgttcgccgataccacgaaatggcctgacagtctgatcaccacctcgctctgcgaggccgacaccgagaccggttcatgccggtggggcgcgttcgagctggcctgcggcaacttcaagtggcgcggcatggcctacttcgccgctcactggctggccaccaactacggcacgcttggagctacttcgcccccgtcgtccgatgccaggctcaacgtggcccagaagtcggtaggcgatgagtccatcgggtaccgcgtcgcggccatgatggacgctggtaacgactggctcacctacaccaactatggccagcagttctaccggctcaagaagcgcgccgggatgggcgccaaggcggtctga

SEQ ID NO: 362752 - DNA, 816 bp, Pseudomonas aeruginosa
atggacatgatcggcatccagtacaacgccaagctgcagcgcctggtgaagcaggtaaaggccgacatctccaaggaaatcatgccgctggttcgccagctggccccggagtacacgcaggacgcggtggccaccactgacgcctggtccgacctgatcaccaacgctatgagcttcctgttcgccaagtggcagaacgagcgggtcagcgcgggcgcccagcgcatcgccagcgagttcgttcaggcctctgtgaagaagtccgagagggacatgaagaagtcggtcggtatcgacgtcttcagcggctccaagacgatgcaggactacctgtacgcctcggcccagcagaatgcccagctcatcaagtccatcccggccaagtacctcgaggaggtgcagacgctggtcatgggaaacatgcgctccggcatgcggcctggctacatcgagaaggcgctacaggagcagttcggggtgactcagcgccgggcccgagtgatcgcccgagaccagactggaaagattcaaggggagctggcagagaagcagcagaagggcgccggcttagagtacttccagtggatcgactccgacgaccagcgcgtccggcaccgccaccacgagatcgccaacaaggtcaccgcctacgggaaagggatctaccgctgggacgacctgccgctgagcgacaagggcgttccgatcaagccaggatctgactattcatgccgttgcatcgcgcgcccagtgagcgcgcgcgaggtcaaggccaaccaagacgcagggaagaccaatccaggcgtgtatcgataa

SEQ ID NO: 362753 - DNA, 1344 bp, Pseudomonas aeruginosa
atgtaccagcttaacccgaaccttcgtgagttctggcggatcaggaagccgtacaagcttctgaagggtgggcggttttcatcgaagacccaagacgcgggcggcatggctgccttcctggctcgcaattacacggtgaagtttctctgcattcgccaatttcagaaccgtattgccgactcggtgtatacggtcatcaaggaaaagatcaatcaggctggctggacggatgagtttgatatcggcgtttcgtcgatcaagcaccgcaagaccggatccgagttcctgttctacggtatcgcccgcaacctgaacgacatcaagggtactgagggcgttgacatctgctggattgaggagggcgaaggccttaccgaagatcagtggaaagtcatcgaccccacaatccgtaagcagggttcggagatctggattctttggaacccggacctgatgaccgactttgtccaggccaagctgccgaagctgctgggtgatgactgcatcatcaagcacatcaactaccacgataacccgttcctctccgagacggcgcgctccaaggctgagcgcctcaaggaggctgacgaggagtcgtatcggcatatctacctcggccagccgcgcaccaacgatgatgctgcggtgatcaagttctcctgggtggaagcatgcgttgatgcgcacctgaagctgggcatgagcttgtccggcgcaaaggctgttgggtatgacgtggcagacagcggcgacgacagcaacgcctgcgccatgttcgatggcgcgatctgctttgacatggacgactggaaggctggtgaagacgagctgaacgagtcagccatgcgtgcgtggtctcacgtgcgcggcgggagactgatctacgacagcatcggcaacggtgctcacgtgggttccaccctgaaagctgcgcgtatccatggtgggtacttcaagttcaacgccgccggggctatcgtcaatcctgagaaggaatacgcgcccaagatcaagaacaaggacaagttcgagaacctgaaggcccaggcctggcaggacgtggccgaccgcatgcgcaacaccttcaacgcagtaacgaagggccacaagttcaagccatccgacctgatcagtatttcgggcgacctgcgcaaaatagagcaaatcaagcttgagctatccacgccccgcaaacgctacagcaagcgaggcctggatatggtcgagaccaaagaagagctggcaaagcgcggggttgcgtcgccaaacctggcagatgcattcgtaatgggcgcatgcccgcacctggtggcgaacggcaggcctatccgagaactcctctga

SEQ ID NO: 362754 - DNA, 561 bp, Pseudomonas aeruginosa
atggcattgactccgaaacaggaggccttctgcctggcctacctgaagacgggtaacgccagtgaggcctacaggcaggcatacgctgccaaggacatgaaggcggcgacgattaaccggaaggcaaaggatcttctggataacggcaagatcgcggcaaggcttgctgagctcaaccaatcggctgtcactgactccgttatgacccgtcagcgcgccctcgagcgcctcagtctgattgccgagacatccattaccgatatccttgagttcgaccagcgcgagattgatgggcctgagggtcctgtcactgaaaccatctggcgcatgaaggacagcgtcgagatccctgacgtggctgcggccaccatcaaatcggtgaccatgaccaagttcgggccgaagatcgagatgtatgaccggcttggcgcgattcagcagcttgcccggatgcagggctgggagtcggcgcagaagcacgaccacaccagcagcgatggcagcatgagccccaaagggaagtcgctggacgacttctacgccggcgatgtaccagcttaa

SEQ ID NO: 362755 - DNA, 324 bp, Pseudomonas aeruginosa
atggcagaaccaacgagcactgccgccagcgtgttgctggtgaagtacggcgtggtcatggctgctttcatcggttcgatcctgtcccttggttttctgaaagaccttactcggggccaggcggcaaccgctgtagccaccggcttcggattttcggtttacctgacgcaaccagtgacgttatggcttgcccccaagatcgaccttgctgtgaatgatgatctgctgtgtggcgtggcattcgtgctcggcctgacagcgatgaacatcatcccagccatgaaggcagcaatgggcgcgttcgtaacggcgcgaggtgcctga

SEQ ID NO: 362756 - DNA, 234 bp, Pseudomonas aeruginosa
atgaagacaactcttgagtgtaccaagcacggtctgcgcttcgaacagttcgacgattggcacgaagtgaagggtggcccagtccctgactgctacatctgcgcccatgagaaggccttggacctgcggcagaaactcgcggaagtaactcgccagcgggacatcctactcagcgccattgaggtgaagctggcggtgccagtgaacaaggaaaggagccttagcaatgagtga

SEQ ID NO: 362757 - DNA, 681 bp, Pseudomonas aeruginosa; identical to SEQ ID NO: 336068

SEQ ID NO: 362758 - DNA, 1287 bp, Pseudomonas aeruginosa
atggccgccccaaccgaggccgatctgcgggccatcttcgccctgcggccagccgccgctatcgagtacctggagcgcaagggattcgccactacttggaactggcacgatgttgacgcggccacccacgcccgtgctctgaccgttgccagagcagcacgcctggacgtgctccaggacattcgcaacgccctggtcgagaacctggagcgcggcgagacgctacgagatttcaagcgcaacctgcggccgaccctggaggcgaagggctggtggggtcgccaggtggtagtcgcgccggatggaggcgccgaggtcgctcaactgggcagcccgcgccgcctggataccatttaccagaccaacatgcagtcggcgtatatggcagggcgttacgcggctgcctacgaggccagggaaacccacccttactggatgtatgtagcggtgatggacggcgttacccgacccagccatgccgccctgcatgggaaggtcttccgctgggacgatccaatctggcagcacatcaccccgcccaatggctacaactgccggtgccggatcgttgccttgacggaggccgctgtccgccgtcgcggcctgaccgtcgaatccagtcagggcaagaccggccaggtcaccgtcgaaaccggcgtggaccggcgcacaggggagattcgcgaacagaccctgaccaccctggagacgaccgaccgggccgggcggaagatccaatttcgtcccgacgccggtttcgacggcagtcccatacagagtcacctgatggaccaggtgctatacgacaaggccgagcgtaccctgggggcacccgccgccctcgaagaggtccagagcgtgctgctggaccctgtccgccagcgcgcctgggaggccttcgtagatcgcgccgcgtccccccaggggcagaccatgtccatcggcgtgctcgatccgaccgacgtcacctacgccgtcgcccagggcgcccaactgcgcgctggcgtagtcgccaccagcgataccgcgattcgtaacagcgccgtcactcgcgagcagctcgccaacttgccgcagcgcttcgcccagcctgacctggtgctgtgggagcgtggtagcgagtcgttggtctacgtcgtccaggccgatggtgccgccctggctatccgtctgcgcggcgagatatacggacccggccaactggaaaatgtcggccaggttatggagatcaccatggatagcatccaggatggcctggcgacgggccgctacaggagagtgcgctaa

SEQ ID NO: 362759 - DNA, 1065 bp, Pseudomonas aeruginosa; identical to SEQ ID NO: 335210

SEQ ID NO: 362760 - DNA, 501 bp, Pseudomonas aeruginosa
gtgaatcctcgcggccagccggccgactcggcgcccgacgacagcctgggcgttctgttccccgaccgtcaactggcggtcgggggcgtcgaggtaaccgtgcgcgaactgaccttcagtgagcaactgcgccacaaccatctgctcgctccgctggccgatgccctggcggcagttcccccggagcagctcgacggaccggaatcgatcaacgtcatcttcgacgccctggctcggcacgctgacgcgctgcgcgagctgctcgccatcagttgcggccagtccgtggactgggtggacgcgctgccggcagatgacggcgaagctctggtactgacctggtggacggtgaacaacggttttttcgtgcgacggctctggcggccacgcctgctggccatggcactggccagctcgccacctggggccgaatcttcgccgacctcgtccgcgccgggcactgtcgcgagtccctcggccactacaccgggcggcagttga

SEQ ID NO: 362761 - DNA, 771 bp, Pseudomonas aeruginosa
atggcacaggaaacgtatttctacgggcaaggcgagattgacgccgcgcctatcgtcaacggcgttctcggcaaatggcgctggattcaagatgtctcggccatgagcatccagctcgcagtcgagaaggtcgagcacaaggaaagctacagcggccagaaagccctggtccgaagcttccccatcggcaagaccgccaccgtcagcatgaccttgcacagcatcgacccggataacctggcgctcaccctctatggcaaggtcgtgaccaaggcggccggctctgtgacgggtgagtcgctccccgccgacctggtggctggtgatgtaatccgcctggccaatccgggcgtcagcgagctggtcatcaccgacagcgcgagcactccggtgcccctcgacccgcagtattacgccctgcgagccgatggcgcctacggtgaggtccaactgctgggtctgccgacgccggccccgacccagccgttcaaggcggcctacgagtatgccgcgacccgccaggtaggcatgtttaccgcgccgcagccgaccatcgccctgcgctacaagggcatcaacctggccgaaggcggcgcgccggttatcgtcgagctgttcaaagtcgcaaccgatccgcttcaggagctggcattgatcagcgacggcaacactgtcgccggtatgcagatcagtggcggaatcctactggacaccagcaagccggataccggcgacctggggcgcttcggccgcattatccagttgggctaa

SEQ ID NO: 362762 - DNA, 219 bp, Pseudomonas aeruginosa
atgcttggcaaagttaagcacctgaatcagcttgaccccggcagcctcatagcgatggatgaacccagccttggccaggttatccagcatcaggtcggcgtctacgttgtcgtagggaagcgcctcggccttgatccgtttcgggcgatcctcaaggcgcccttcccgatcagccaacatccagaggtagatgaacagcaggcgagcgagaggatctag

SEQ ID NO: 362763 - DNA, 168 bp, Pseudomonas aeruginosa; identical to SEQ ID NO: 350166

SEQ ID NO: 362764 - DNA, 345 bp, Pseudomonas aeruginosa
atgctcgctcttatcggcctgtgccagggctattactccgatactcgcaacgtcaataccgccaacggtccttcgcagattgttgaacactcggtgcttgtccaagttgagcaaaccaataagttcggtatgccggaaaccaaggttattcaagttcgcatttcgaagcggcacatggatggcgggcttaataatgtctggaagatggagaagggcaaaactgtgtccgtcccggtatttatccaggcctgggcaagtaaatccggcaatgccggatttgattattggctgtcgggcgacggcatgccgttgaaacttcaaaccgttcaggagaaagccgcttaa

SEQ ID NO: 362765 - DNA, 1140 bp, Pseudomonas aeruginosa
atggcggctttggagagaacggcatatccacgactagcaactaccctcagtgcgaaggacttacaccgcaactattcgctttcctcaggagagcttgactggatttccaggacagctcgtagcccagccctttcccttgggctggcagtccagctcaaggtattccaagagctccattactttcctcccctagacgagatacctccagaaatcactgaccacatcaggaatacactcggttttggccctcgtatcacttcccgctataccaactcgcgtactttttataggcatcaggcggccattcgtgagtacctccagatcaaggctttctatggtagtgaagcgctcaccatagctctccaccttgcgcacgaatctgccgaggtactcgaccagcgggcggatatcatcaatgtgctgatcggcgagttgctgcagcgcagctacgaactcccagcctattccaccctcaatgacgctgctgaggatgccttagttgcaatgcaggagcggctattcaatctcgttgtgaccagggcgccaattgaggtggtctacaaactgaaagaactgctcgaaacggatttcgggcgacgccaaagtgacttcaacgccctcaagcaggcacccaagaagccatcccgcaaacacttggaagtgctgatagatcacatggcttggctcgagagctttgggaatctagatgccatttttgatggaatcgtcgataccaaaatccgccacttcgctgcccaagctgcggcgtcggacgtcgccgagcttaaggactgttcgctgccgaagcgttacacgctgatgcttgccttgatctatcggatgcgcgtgcggactcgggatcacctagccgagatgttcatccggcgaatctctacgattcacaaacgtgccaaggaagaactagagcaaatccaagcacggcaacgtcagaagctggagcagctggcggccaccctggacggtgtggtgcagattttggttcaggaaccggatgaccaagaggcaggtagcctgattcgggaatacctctcccccgacggcaacctggaacggttacgcgaaacctgtgccgaagtccgtaagcgtccgccctgcacccactgccgaccgaagctttga

SEQ ID NO: 362766 - DNA, 309 bp, Pseudomonas aeruginosa; identical to SEQ ID NO: 327654

SEQ ID NO: 362767 - DNA, 270 bp, Pseudomonas aeruginosa; identical to SEQ ID NO: 329557

SEQ ID NO: 362768 - DNA, 459 bp, Pseudomonas aeruginosa
atgatcgacccaaccgacaagcaaacccaaccccttcccctggagcagccaaagcgcgggcgcggtcggccagccaccggcaaagctctgtcagacgcagagcgggcgcggcgctaccgggcgaacaagaaaaagcgtgacgatcaaccgtcacgaaaaggtgccccatcgatccccaccgatggcgtaaaggaaatcctcgacggctggcagcgcacccaggaagaactcgacaaggcgctgcaacgaatcgccgagctggaagccgaattagcgttacgcatcacgaaaaatgaagaggccgaggcgaagacctgggcaattcaagagcgcaagggcaaggcgcgctggcagaccatcagcaagggcctgacccggaaagccggagaacgccagttcgacaagctgctgtcgggcctgaacgacccgcgttacagctaccgcatggttgaagaataa

SEQ ID NO: 362769 - DNA, 375 bp, Pseudomonas aeruginosa
atgagcgccctgctggcgaagcctctggcccttgtgctcgccgcgctgctgctggtcgccgccggcgccggcctgggtgtgtggctggccgccgggcactaccggccccagctcgaccaggccgcccaggacctggccaactgccgcgccgcccggggcaacctcgaggcactggtgggcgaccagaacacggccatcgctggcctggccaaccaggcccagcagcgccaggcgaaggccgcccgggcggtggccgatgcccagcagcaggccggcgagcacttcgccgccgcgcagcggctgcagcaggagcatgccgagggcgatccggcccaggtggcggccgacatcatcgataaggagctggggctatga

SEQ ID NO: 362770 - DNA, 189 bp, Pseudomonas aeruginosa; identical to SEQ ID NO: 328998

SEQ ID NO: 362771 - DNA, 366 bp, Pseudomonas aeruginosa
atgatgagcgacaaggaccacgacacccgaattacggctgagcgccaactgctttccatactcgccgacgtgcccggcaactcggtgccgcaggcatggatcgacgtgcaggcagagcgccgccggcagatcaccgccgagggctggacgccggagcacgacgacctctattgcgccgccgaacttccgcgcgccgcagcggcatacatcctcaacggagccaatgacgaagcgcccgccatctggccgttcgtgacgaagtggtggaagccgagagacgcgcgttccaactacgtgcgtgccggcgccttgatcctggccgagatcgagcgcctggaccgcgcccggcaaggaggtagatcatga

SEQ ID NO: 362772 - DNA, 219 bp, Pseudomonas aeruginosa
atgcttggcaaagttaagaacctgaatcagcttgaccccggcagcctcatagcgatggatgaaccctgccttggccagatcatccagcatcaagtcagcgtctacgttgtcgtagggaagtgcctcggccttgatccgtttcgggcgatcctcaaggcgcccttcccgatcggccaacatccagaggtagatgaacagcaggcgagcgagaggatctag

SEQ ID NO: 362773 - DNA, 585 bp, Pseudomonas aeruginosa
atgccgcgacaacttgccggcctgctgtgcgtcctcctcggcctcgccggcgcccctgccctcgcctgcccattccgggccacggacgccgagacaccggcagcctctgccggcgccgcgcaggtcctggccctgggcggcaccggcagactgcaactcgacctgcaacgggcccccgccaccctgctgcacagcggcgacctgctgatcgcccgctacgccgagggtcattacctcgcccatcgcctgctcgaaggcaacgagatgggcgcggacgagggcgaacggctcgaccttccgcgacaggttcgcctgctcttcggagccctgccgctggacggcctgcccgacgccgagcgcgagcgtctccaggcgcagcgccaggccctcggcttgtgcgaccggcgcgccagcgccagccgctaccgcgtggccggcaccgaggtctatcgcctgcgcggcagccaggccggcaagccctaccacgcgctctacctgctcgacggtccccaggtgcactacctcgacagctccggcagcgacgccttcatcgagcagttgctcgccagcctgcgacgccgctga

SEQ ID NO: 362774 - DNA, 1506 bp, Pseudomonas aeruginosa
gtggcggcgcgtcctctcctgctctcgctgcacggtggcgccggcgcgctgttcggcgtgctgctgttcgtggtgctgttcagtggcgcctggagtcttggccacgacgacctgcgcgagtggctgcgggccccggcgcaggcgggaggagaagcccttgcgctggagcgcctgctcgaacgggcgggcgaggaaggcgtcgacatcggcgatgcgaccctgctgctgcccgctcccggccatgccgccttcagcgtctgcgatgcgcgcctggactgccggctggacctcgacccggccagcggccgggtgctgccaccgacgccggcgctggacctcctgctgaacctgcacaagagcctgttcgtcggcttccccgggcgggtgctggtcagcctgttcggcgtatcgctgttgctgctgtgcctggccggcgtgctgctgcacagccgccgctggcgcgacctgcggcgttggcggcgggatcgcgggctgcgcctggcgctgttcgacctgcatggcctgatcggcatctggggactgccctggctgctgttgttcggtttcaccggcgcgctcagcgggctgggcgctctcgggaccctgctgctggcgccggtggcctacccgcaggaaccgaaccgggtgtttgtcgagttgatgggaccgccgccgcccgccgccgaggggcggccattggcgtcccgcatcgatctcgaccgcctgcttgccggcgatgccgtgcgggcgcccggcttcgttgcccagcgtttgagcctcagccatgccggggatgtcgccggcagcgtggagatcgccggtatccagcgtggcctgccgagtaccgcgaacttcgagcggcaccgctatcggctggccgacggcgccctgctcggcgagcgcagctcggcgcagcgcgggttctggctgcgcgccttcatcgccgtgcagccgttgcatttcgcccagtaccagtggctcgggccgggctggtccgccgcgttgcgcggcctgcacctggcgatgggcctcggcgcctgcctgctctgcgccagcggcctgtacctgtggctgcaacgacgcgcctcggcgccggacgcccgcgtacggctcttgcagcgcctgagcgagggtttctgtgccggcctggtggcggcggccgcgttgctcctgctggggctgcaactcgccccctcggagctactcgccggaccctggccggggcggctgttccttgtcctgtgggccgccgctggcctggcggcgttgctgctgccgggcgactggccgctggcgcgcgggttgctcggcgtcgccgggttggcctgcctggcggccgccgtcgcgcacctggcgccctggctcatgcgcggccggctgccggccctgggctccgacctcaccttgatcctctgcggcgcgctgctcatccggcacgcctggatgcaggcgcgcgccgccgcgccacccgcccacccccgtgtcaccggagaccaccatgcttga

SEQ ID NO: 362775 - DNA, 1233 bp, Pseudomonas aeruginosa
gtgaaggatcgcactattaattttcggctgaccgattgcgctgggcatgtaacgaattttctaagcttgcgttcctttctgacgttctgtgaggcagaagcaagcttttggaaggagcgtaaacagatagtccagaccgatagaaatagcgctaaccatacacatctgaatgcaggcgatgtattcacccgagcggcagatacgattcagggttggaaggacaacatagaggtttggagcgacgatgatctaagccgtcagctacagcagcttcagcaaagctattttcagcgattacagcgagactggctttggcgtggtcatccttttgttgaaccattcgtccagtgcctcaaagaacatggcgataatacagctaatgcattcttggacttttcgattcgaaaatccgtacagaatattagcaatatcgagcatttcaaaggctacatgtatgcttatgaatttgccaatcaggactctcaaatagtaaagcgccgccatggtgagaaattgtctcttgggcatctgcgcacgcagttcgccgacgcccaagacaaactattcactgagtttggcgagctgaaatctgaaattacagattgggatacacagaatagggcttctagcagcagacttgctaaagtacaaaaagcattaggccgccgaaagataaagtcgcaatccaatgcatttgaacgacaattagccgaatggactgagaaagtcacgacccttgaaagcacttatgaagaaaagctgaaactgaaaaaacctgccgaatattgggcaaaatcggcgcgtaagtatggaatacaaggcgggctttggacgctagctattgttgctttggttatcgtcgcagcgataaattttcaagaaatctttgtcacgtggctgcaaggccgcgagactcccgttcagctcaacacgatacaaggggttatccttttcggttcccttgcgggtgtgtatgcgttcttgctgagggtattgtcgaggctggcgtttagttcgttccaccttatgcgcgatgccgaagagcgtgagcagctaacctacctatatttgtcactcactaacgaagcagagatcgacaaggaatcgagagatattgtcttgcaggccctattcagccgcagcgaaaccggcttactggcgcaggagcatggaccgaccatgcccggagcatcagagatgctgcgctcaacgctaagaggtagaggccaataa

SEQ ID NO: 362776 - DNA, 1263 bp, Pseudomonas aeruginosa
  misc_feature (33)..(42): n is a, c, g, or t
ttggagagattcgctatcgagccgtgggcgaannnnnnnnnnctcaaagccttagacaatatgccagcgggccttaagaatacaagtcgtgtatttcgtcaccatagcgccatctcacgtcggcgtattgcgaagtttgacgaaaaagcaaatcttgtcactccgaacgaacgaaagtcgttgctcaatgcggccatcgtagatatccgctacgcattagaatttattcaatttgaatcaggatctgagcctgacattaatctttataactctttagcaaacgcttacttagattttgccaagattgaagctgcgcaaggtgcatctagagatatagttcttgagtatatgcaagcggcaagccaggcaactcgaaaggcatacgaacaaaatccgagcagtccctttgttatggaaacttatgttaagcacttgctggaggaaacatcattagaagctccagataaagcaatcgctcactgcatcgaagtgttgggggtcatattttccgcgctcacatctaatgcgcacactgctcgaaacatgcaatggcaaggccttgccgatgaagcaataaaaaaattatttaacctcacacctctagactccctttcggctgatcccgtaaacagtacagacttactaataaatgcatggaaactcttggccggcggaagcgaaagcggccaattggacttggcgaatgcgagtaccacccaacaaaatgccgcgcttaaaatgttggaccatcctataggaagaggtaacattcaagttttacgattaaagtacgagcttgtatgcattacatctccgtttgatttcaaaaaacaactagagctagttgaggaggtggtcttatctacatatcaagagcctttgcagataaggctagagtatgccattcttttatttcaagagaatagacctgtcgaagctgataaaatattccgtggcttacggcaactttggagaactactgagcattatgtccaagtgccatcgagactcaggtggctccgtgtaccaggaactgaaaatcttcaagtggtccatgccgtcgcaggatccgattacgagcgtcgcgggctagctactgttaaggaatttgtcaatataggcgtgccttttagggttgaggagttcggatatcggcagctccgccccgggatgcagtttgttgctcaggtatcgtttggacataatggtccgtttttacgtcctgttttggtagcaaactctcaagaagagctcgggatatga

SEQ ID NO: 362777 - DNA, 756 bp, Pseudomonas aeruginosa
atgagcgaaagcgactaccgtgtgccggcgctggaacgcggcctcaacctgctcggcctgttcaacgcccgcgagcgcagcctgggcatgaacgagatggccgagcgcctgggagtcagcccctcggcgctttaccgcatcgtccagaccctgcaggacatgggctacctgaaacgactcgagcgcaaccagtacgaactgggcgcgcgagtgatctccgacggcttcgcctacctgtgcagccgggacatcgtcgaaatcgccttgccacacctcaacgctctgcgcgacaggacctcgctgtcttgccacctcagcatccgcgagcagaccgagagcctctatatctaccgcgccttcgccccgcagcggttgacggtgaacatcccggtgggcacccgcctaccctgccacgtgaccgccctgggccgcgtgctgctcaccgaactggacgccgacggcctcgcgcagctctaccagcaggttcgtctggacgactacccagccccggcaccgcgcactctgctggaactgcaacacaccatcgccgaagaccgcgagcgcggctgggtgctgcaccgctcggactactcgacggcgattgccaccggcatccgtgatcgctccgggaaagtggtagcggccatcaacctgtccggccccgaagccgtactcgccaccagcggtgctgagcaacgctacctggagctgctgctgaacaccgctgacggcatttctagtgagcttgtgacctga

SEQ ID NO: 362778 - DNA, 684 bp, Pseudomonas aeruginosa
atgtccagcctgaaagccgaagacttcatcgaacgcagcccgctctacccgctgcaccacggcgcccgactggccgccctgggcagcagcgccatcgtcgcccgctacggcgaacaggaagaacacgcgcagctgcagagctgcgcgctgatcgacctgagcaatctgccccgcgcgggcttccgtggcctcgacgccgccgcctacctccaagcgcgcggatacgtcctgccgggcgcgcccaaccaggcgctgcgccaggacgacggctccctggtcgctcgcctgtcgcagaccgagtacctgctgctcggcagcctgcacgacatgggctcgcgcatcgccgccgaggaagccgcctggcaactcgatgacagcgccaactacctgttgccgcgccaggacagccacgcctggctgcagctcagcggcgcgcactacgcccaggtgatggccaagctctgcggcgtcgacctgcgtccgcaggccttcggccccggcgcggtggcgcagacctcggcggcgcggatcaacgtcatcgtcatcaactccggcaatgccgagctacccagcctgcaggtcctctgcgaccgcgcctcggtggagtacttctggacagcgatgctggacgccatggatgaattcggcggccgcccggtgggcatcgacgccctgatcgactga

SEQ ID NO: 362779 - DNA, 2904 bp, Pseudomonas aeruginosa
atgagcgctctcacccgtctccccgctcccatgggcctattgatcgaccgcgacaagccgctgcgcttctccttcgacggcagcgactaccagggctacgagggcgacagcgtcgccagcgccctgctcggcaatggccgctggctgctctcgcgctcgttcaagtatcaccgtccgcgcggcccgctgaccctcgccgggcaggacgccaacaccctggtgcaactgcccgacgagcccaacgtgctggccgacatgcaccccgcccgcgacggcctggccgttcaaggccagaactacgctggcagcctcgaccacgaccgcgacgcctacctgggcaagttctcgcgcttcatgccggtcggtttctactaccgctccttctacaagcccaagggcatgtggaaggtctgggagccgctgatccgcaagaaggccgggctcggcgtgctcgacctcaacttcaagccgcagtactacgacaaggcctacctgttcgttgacctcgccgtcatcggcgcaggtcccgcgggcctgcgagctgcgctggacgctgccaatgccggcgccaaggtcctgctggtggaacaactgccggtgctcggcggttcgctgaactacgcccgcttcgacctctccggcaagcgcgccgccgaagtgcgcgacgtgctggtcagtgccgtgcaggatcaccccaacatccaggtactgacccaggccacctgcaacgcatggttcaccgacaactacctgccggtcatccagcacaagcgcatgtacaaggtccgtgcgacccgctgcctggtggctgccgggtccttcgaccaaccggtggtattccgcaacaacgacctgcccggcgtgctgctgaccagcgccgtccaacggctgatgaagctgtacgcggtgaaaccgggcaaccgcgccgtggtgctgaccggcaacgacgacggctacctggccgccctcgacctgcaggaacagggagtcagcgtggccgccgtggtggacatgcgcgccgctcccgccgacgtccgcctcgccgatgaactgaagtaccgccagatccctctgcacaacgccagcaccgtctacgaagccctgcacgaacccggcctgcgccacgtcagcggcgtggacatccgccgcatcaccggccagggccaggtcgccgagcacggcaagcgcctggactgcgacctgctgtgcatgtccgccggctacatgccggtctaccaattgctctgccaggccggcggcaagctggcctacgaggaggaccgcgacgaattcaccatcagtggtctccccgccgggctggatatcgccggctcggtcaacggtcaccacagcctggtcaacaccctggccgacggcgcccgcgcagccagtgtcgccctcgaagcattgggtctggaagcaccggccccgcgcacctacatcgacgagccgcgggtcaacttcgactggccgatcttcccccatcccaagggcaaggacttcgtcgacttcgacgaggacctgcaggtgcgcgacatcgttaacgccacccgcagcggctaccgcgacgtacaactggtgaagcgtttctccactgtcggcatgggcccgtcccagggccgtcattcggcgctgcccacggcgcgcctggtggcccagtccaccggccgaagcatcagtgaaaccggcgtgaccaccgcgcgcccgcccttcgaggcagagaagctcgcccatgtcgccggccgcgccttcgatccgtatcggcagacgcccatgcaccgtcgccacctcgaagccggtgcgaagatgatgcccgccggcatctggcagcgcccggcctactacggcaagccggaagagcgcgagcgctgcatgcaggaagaggcgcgccacgtgcgcgaaaaagtcggcctgatcgacgtctccaccctcggcggcctggacgtgcgcggcccggatgcggccgagctgctggagcgtctttacaccttcggcttcgccaagctgcccatcggccgcacccgctatgcgctgatgaccaacgagcacggcgtggtgatcgacgacggcgtctgcgcgcgcctgggcgaacggcacttctacgtcaccgccaccaccagcggcgtggaccgcatctaccagcagatgctcaagtggaatgcccagtggcggctcaacgtcgatatcaccaacgtcaccgccgccctggccgcggtgaacctcgccggcccgctgtcacgccaggtgctggcgaaggtctgcgagggcatcgatctgtccgccgaagccttcccctacctgggcgtgcgcaccggcaaggtcgccggcatcccggcccgcgtgctgcgcgtgggcttcgtcggcgaactgggctatgaaatccacgtgccggcgcgcttcgccgaacgcctgtgggacgtgctgatggaagccggcagcgaccacggcatccgccccttcggcgtggagacccagcgtctgctgcgcctggagaaaggccacgtgatcatcagccaggacaccgacggcatgacccacccgggcgagatcgacatgcagtgggccatcggtcgcaagaagccgttcttcgtcggcaagcgctccatcgagatcctcgaggcgcagccgctcaagcgcaagctggtgggcttcaccctgccccgtggcagcgcccagccgctggaggggcacctggtgctcgacggcgccgatatcagcggcaacgtcacctcctgcgagtactcgcagaccctcggcctgatcgtcggcctggcctacgccggcgcccaccaggcgataccgggcatgcagatcccgatccgcgtggaaggcggtcaggtggtacgcgccaacgtcgtccagttgcccttctacgatccgcagaacctgcgccaggagctctga

SEQ ID NO: 362780 - DNA, 315 bp, Pseudomonas aeruginosa
atgaagatcctgacctgcccgctcaacgggccgcgcaacatcagcgagttcacctacggcggcgagttcaagcacatgcccgatcccgccacctgcagcgacatcgagtgggccgactacgtgttcaacagcgaaaacgccgccggcatcgtccgcgaatggtggctgcacaacgcgtccagctactggttcctcgcggagcgccacacggtcaccgaccaggtgatccgcaccttcgaccccagggaactcttcgaccgacgcatcgacttcgccgtcgctcaacccgccacagcgcaggagtccacccaatga

SEQ ID NO: 362781 - DNA, 888 bp, Pseudomonas aeruginosa
atgaatgccatccccagcgtcaaactcatcgacggcaaggccacctcggcacgggtgctcgccgaggttcgcgaggaagtcctggtgctgcgccaggacggcatccagccagccctggccgtggtgctggtgggcagcgacccggccagccaggtctacgtgcgcaataaagtgctgcgtgccgaagaagtcggcattcgctcgctggagcacaagctgccggtggacaccgccgaaagcattctgctcgacctgattgcggagttgaacgacgacccgacagtgaacggcatcctcgtgcaactgcccctgccccggcacatcgacgaaaaccgtgtgctgcaggcgatcgatccgctcaaggatgtcgacggcttccacagcgaaaacgtcggcgggctgagccagggtcgcgacgtgctcacgccctgcaccccggccggctgcatgcgcctgctgcacgacacctgcggcgatatcgccggcaagcatgcggtggtgatcggccgctccaacatcgtcggcaagcccatggctgccctgctgctcaaggcgcattgcacggtgaccgtggtgcattcgcgcagcgccaacctgcgcgagctgtgccgccaggccgacatcgtcgtcgccgccgtcggcaagccgcggctggtcgacgccagctggctgaagcccggcgccgtggtgatcgatgtgggcatcaaccgcatcgacgaagacggccgcagcaagctggtcggcgacgtcgatttcgacagcgctctgtcccaggccgcggccatcaccccggtgcccggcggcgtcggcccgatgaccatcgcctacctgatgaagaacaccctggtcgccgcgcgcctgcagcacgccagcgccactgcggagtaa

SEQ ID NO: 362782 - DNA, 867 bp, Pseudomonas aeruginosa
atgcaacacgcccccagccacttcatcatccgcatcagttgcccggccgtgtccgggatcgttgcggcggtgaccacctacctggccgagcaaggttgctacatcagcgaaatggcgcagttcgacgacgagggcagcggccgcttcttcatgcgcgccgtgttccgcttcaacgaaggtctggccggcgacatcggcgcgatcgaaaccggtttcgccgacgtggccggccgcttcgacatggactggagcctgcacagcagcgcccggccgatgcgcgtgctgctgatggtcagcaagttcgaccactgcctgtccgacctgctctaccgccacgccaagggcgagctggacatgcagatcaccgccatcgtctccaaccacctcgacctgcgcccgatggccgagcgcgaaggcatccgcttcgtctacctgccggtgacgaaagacaccaaggccgagcaggaagccgcgctcatgcgcatcgtcgacgagaccgacaccgagctcgtggtgctcgcccgctacatgcagatcctctccgacgacctctgcaagcagctctccggccgggcgatcaacatccaccactccttcctccccggcttcaagggcgccaagccctatcaccaggcctacgagcgtggcgtgaagctgatcggcgccaccgcgcactacgtcacctccgacctcgacgaaggcccgatcatcgagcaggaagtgcagcgcgtggaccacgcctacgcccccgacgacctggtcgccatcggccgagacaccgagaccatcgcgctgtcccgcgcagtgaagtaccacctcgagcaccgcgtcttcctcaaccacgaccgcacggtgatcttcaaatga

SEQ ID NO: 362783 - DNA, 906 bp, Pseudomonas aeruginosa
atgtgtggaatcgtaggcctctacctgaagaaacccgagctcgaagcccagttgggcaagctcttcgagcccatgctgcaagccatgaccgatcgcggcccggacagcgccggcttcgccatctatggtgacgaagtggccgacggctgggtcaagctgaccttgcaggcgaccgacgctggctacccctgggccgagctgatgggcgccctggaagcccgcctgggctgctcgctggactggttccagaacgccagcgccgcggtgctgaagatccattgcgacgagtccgccgtgcgtgacgccttggccgaactggcgccggcggtgcgcatcatgagtgccgggcagagcatcgagatcctcaagggcatgggcctgccggaggaaatatcccagcgcttcggcctcgccggcatgaagggcagccacatcatcggccacacccgcatggccaccgagagcgcggtgaccatggagggcagccacccgttctccaccggcgccgacctctgcctggtacacaacggctcgctctccaaccacttccgcctgcgccaggaactcaagcgcgaaggtatcgccttcgagaccgacaacgacagcgaggtggccgccggctacctgacctggcgcctgcgccagggcgacagcctggcccaggccctggacggcgcgctgaacgacctggacggcttcttcaccttcgccatcggcactcgcaacggcttcgccgtgatccgcgacccggtcgcctgcaagccggcggtactggccgagaccgacgactacgtggccatggcctcggagtaccaggcccttgccagcctgccgggcatcgacaaggcgcgcgtctgggagccggagccggccaccctgtatgtctgggagcgcgagagcgcctga

SEQ ID NO: 362784 - DNA, 1320 bp, Pseudomonas aeruginosa
atgatccggttttcacctatgagccgcagtatgttgggcctttccctgctgttgggtagcgtcgccgccatggcggatgaagcgccgccggcgatcaatagtggcgacaccgccttcgtcgcgctctgttcgctggtggtgctgctgatgaccctgccgggcctggcgctgttctatggcggcatggcgcggaccaagaacgtgctgtcgatcctcatgcaggtgttctgcaccgcctcgctgatgtcggtgctgttcgccgtctacggctacagcctggctttcaccgacggcggctcgctgcaatcggtgattggcgggctggagaagctgttcctgctcggcatcaccaaggattcggtggtgggcaccattcccgaatacctgtacttcctgttcatgctgctgttcgccgcgatcaccccggcgatcatcgtcggcgctttcgccgagcgcatgaagttcgccgcggtcatggtgttcatggcggtctggctgaccatcaactacatccccatggcgcacatggcgtggggcggcggctgggtgttcaacctcggcgtgcaggacttcgctggcggcaacgtggtgcacctcaacgtcggcatcgccgcgctggtgggcgcctggctgctgggtcgccgtcgcggcttcggcaccccgaccctggccccgcacaacatgaccatgaccctcaccggcggttcgctgctgtgggtcggctggctgggcttctgtggcggctgcgccctggcggccaacggcttcgccatgctggtgatggtcaacaccatgctcgccagctgtgccggcgcgctggcgtggatgcttgtcgagtggcagcaccgtggacggccgagcctgttcggcgcggtttccggcgccattgccgggctggtggcaatcaccccggcgtgcggttatgtcggcccgatgggcgccatcctgctcggcctgatcgccggcccggtgtgcgtctggtcggtggacaagctcaagccgatgatcggcctggacgatgcctttgacgtgttcggcgtgcacggcgtcgccggcatactcggcggcctgctgaccccggtgttcgccctcgtggccatcggcggccagggctttgccgaaggccgcgacctgttcagccagttgctggtaaacggtggcgcgatcctcttcagcgtggcgttctccggcgttaccagcctaatcgccttcaaggtggcggcggcgctgtgcggcggcctgcgcgtggatgaggaggcggaagtcgacgggctggatctctctgcccacggcgaagtcggctacaagtactccaactga

SEQ ID NO: 362785 - DNA, 339 bp, Pseudomonas aeruginosa
atgaaactgattaccgcgatcatcaagccctttctgctcgacgacgtgcgccaggcgctgaccgaggccggggtgagtggcgtgaccgcaaccgaggtcaagggctatggccggcagaaggggcattcggagatctaccgtggcgccgagtacgtggtcgagctgctgcccaaggtgaagctggaaatcgtcatcggcgatgcgctctgccagaccgccatcgacaccatcctgaaggccgcgcacaccggcaagatcggtgacggcaaggtgttcgtccaggacctggaaagcgtcgtgcgcatccgcaccggcgagctgggcgaagacgccgtctga

SEQ ID NO: 362786 - DNA, 342 bp, Pseudomonas aeruginosa
atggcgtggttgaacggatggggttacctgatcctggcgggactctgcgaggtgctgtatgcctcgatcatcccgcgcaccgagggcttcacccggctctggccgagcctctactgcggggtgttcctggccctgagcatctacctgctgagcctgtcggtaagggagctgccgctgggcctggcgtatgccgtgtgggtgggtatcggcaccctgggaacggtggcctacggcacgctgtttcttggcgagccgctgggcgcgctgaaggcgctgtgcctggtgatgatcgtcgctggcatcgtcgggctgaagctggcggggagtgtgcaggtggcttag

SEQ ID NO: 362787 - DNA, 978 bp, Pseudomonas aeruginosa
atgtggttcagcaaggcttcccgcaacctggccgacgacctcggccagtggctcgaccagctttccagcagccccgacgcacccccaccgcgccactgcgacccacagttgctcggccgtcttgagcgcctgcagcgcgactggcatggcctggtggacttccgccggcacgccgagctgcagtcgccgccgccctgcaccgccgaggaacacgacgctctcacgcggcgtctcgacgatgcccgtgacgagggccgacgcctgcgcgaggagctcgaagaacaacagcgccagttgctcgaactggaagccgaacgccgccagtggcgggaggaccgcgatgtctgggtgctgacccagcgcactctcaccgagggttgctgggcgatgaacgtggtcaacggcgaccccgaccatccgcagaatctgatccgctggtccgagcagttccgcgacctgatcggctaccgtcgcgaggagttccccgacggctgggacagctacttcggcgtggttgacgcagaagacctcaagggcgtgatgcaggcgttcggcgctgcaatggcggacaagaacggcgacgggtcctacgtggtggagtaccgcatgcgccacaagagccgcggcccgctgtggttccgcgagcgcggtcgttgcctgcgtgatgagcgcggtcgcctgctgtacgtcaccggcgcggtgcgcgagatcagcgacgagaaggccgccgtcagcctgcacgagcgtgaacagcagaacatccagaccacctacgggcagatcgcccaggtcgccggggtcatccgtgccatcgccgagcagaccaacctgctggcactcaacgccgccatcgaggcggcacgcgccggcgaccaggggcgcggcttcgcggtggtcgccgacgaagtgcgcaacctcgcacggcgtacccaggagtcggtgcagcagatccagtcgatgctcaagcagcagggctga

SEQ ID NO: 362788 - DNA, 2346 bp, Pseudomonas aeruginosa
atgaacctgcccatcgtcagccggccgctggagccggcgctgttcgctcgtgctcctgcattggaacgtcatcgcgtcgcgcccggcggcctgacggtgatcgccctggaggccggtgaccggctgcaggtgatcgacctcgaaggcgatcaacccgccgagttgctggccttcgccagcggtggtcggccggcactcgccgagctcggcctgtcgcccagtccgggagcggcgttcatccaccagttgctccacgacggcagccgcgaggccgcccacgtctgcgcagggcttgccaggcgcggcgtcgattgccgccatctgcccagccccgcgcgtctctggccagcgggcacccccgccggattcagccgtaccctggaagtcggcgcgccgctgctggtgctggtcgccgcgcccggcgggcgcacgccggtcgatgcccagatgcgtgccagcgaactgcgcctgctggtgcatcgcgccaacccgcagcacctgctcgctccgccgctgcccgcgccgctgggcgaggtggtggacgagttcaccatccgtcccggtaccgccagcgcctacacggtcgccgccgggcagttcatccaggtactggatgtcgccggccggcaatgctcggactttgtcgccttcaaccgccggggcctggacagcggccgcgagatcgacctcgatcccaccgtcacccgcaccctgaacggcaacgcctaccccggtcccggcctcttcagccgcttctacgaccgccacctgcaacccatgctcgaggtggtacgcgacaccgttggccgccacgacaccttcgccctcgcctgcaccgcgcgctactacgaggcccagggctacttcggccacgacaactgcagcgacaacctcagccgcgtccttgcaggccatggcgtgcagggccgcgccggctggccggcgatcaacttcttcttcaacaccggggtcgatgcgcaccagcaactgaccctcgacgagccctggtcgcgccccggcgactacgtcctgctgcacgccctcaccgacctggtctgcgccagcagctcctgcccggacgacatcgacccggccaacggctggcaacccaccgatatccatatccgcgtgtacagcgaaaaggagcgtttcagcatcgccatggccaatcgcaagactcccgacgccgaccctcagctgacccgcgagagcggcttccacgccggcactgccgccctcacccgtcagttcgtcgactaccgcggcttctggacgcccacccacttcgacggctacggcagcatcgaggagtatcacggctgccgcgaaaaagtggcggtgatggacctctctgccctgcgcaagttcgaggtgctcgggccggatgccgaggcgttactggactactgcctgacccgcgacgtacgcaagctggcggtcggccaggtggtgtattcggcgatgtgctacgagcacggcggcatgctcgacgacggcaccctgctgcgcctgggggcggacgccttccgctggatcggcggcgaggactacgccggtgactggctgcgcgaacaggcgcagaagctgggcatgaaggcgtggatcaagagcgcctcggagcagattcacaacatcgccgtgcagggcccgctggcccgcacgctgctcaaggacatggtctggacgcccggcacccagccgcgcctggaggacctgggctggttccgcttcctcaccggccgcctcgacgactacaacggcccgccgctgatggtctcgcgcaccggctacaccggcgagctgggctatgaggtctggtgccatccggacgacgccccgcagatctggagccgcctctggcaactgggcgaaccgctgggcctagtgccgctcggcctgcaggcactggacaccctgcgcatcgaggccgggctgatcttcgccggctatgagttcgacgaccagacagacccgttcgaggccggcatcggcttctgcgtgccgctcaagaccaagcgggccgacttcatcggcaaggatgcactgctaaggcgcagcgccaacccgcagcgccacctggtgggcctgatcctggaaggcaacgagaccgccgcccatggcgattgcgtgcacgtcggccgcgcccaggtcggggtgatcaccagcgccacgcgttcgccactgctgggccgcaatatcgccctgtgccggctggacgtgggctattgcgagcccggcacccgggtggaagtcggcaagctcgacggccagcagaagcgcattcccgcgcaagtcgccgccggcaccgtggcctacgacccggacaagtcccgcgtgcgcggctga

SEQ ID NO: 362789 - DNA, 1371 bp, Pseudomonas aeruginosa
atgaagcaacgagtcgccatcatcggcgccggccccagcggcctggcccagctgcgagctttccagtcggcgcgggacaagggcgccgacatccctgaactggtctgtttcgaaaagcaggcggactggggcggcatgtggaactacacctggcgcaccggcctggacgagcatggcgaaccggtgcacggcagcatgtaccgctacctctggtccaacggtccgaaggaatgtctggagttcgccgactacagcttcgacgaacacttcggccggcccatgggctcctatcctccgcgcgaggtgctctgggactacatcaagggtcgcgtggtgaaggccggcgtccgcccctacatccgcttcaacactacggtacgtgacgtcacctgggatgcggcgagcaacaccttcgaggtgaccgcccacagttacgacgatgaccgcacctacaccgagcgcttcgactacgtggtggtcgccagcggccatttctccacgcccaacgtgcctcacttcgccggtttcgagagcttcgccgggcgcgtgctgcacgcccacgacttccgcgacgcactcgaattccgtggcaaggacgtgctgatcgttggcgccagctactcggccgaggacatcggctcgcagtgctacaagtacggcgcgcgctctatcaccagttgctaccgcagtgcgccgatgggctaccagtggccggaaaactgggaagagaaaccgctgctcacccatgtcaagggcagcaccgcgttcttcgccgatggcagcagcaagcacatcgacgcgatcatcctgtgcaccggctacaagcaccacttccccttcctgcccgaggagctccggctcaagaccggcaaccggctgtggccgctgaacctctacaagggcgtgttctgggagcgcaatccgcagctcatgtacctgggtatgcaggaccagtggtacagcttcaacatgttcgatgcccaggcctggtacgcccgcgacgtcatcctcgggcgcatcgccctgcctggactggccgccatgcaggccgaggacctggcctggcgccaggaagaagagaccctggaaagcgcccgcgaaatgttcgagttccagggcgagtacatccgccagctgatcgaagctaccgactaccccagcttcgacatcgcggaggtgaaccgcaccttcctgcagtggaagcacgacaagtacgaaaacatcatgggctaccgcgacaagtgccaccgctcgctgatcaccgggaccctcgccacaccgcatcacacgccctggctggatgctctggacgactcgctggaggcctacctggccgacgtcccggcgcccgcgctgaacaaggtgctttga

SEQ ID NO: 362790 - DNA, 858 bp, Pseudomonas aeruginosa
atggatacccactacatcctcaccatcgactgcccggcgcgttccgggatagtcgccgccgtcagcacctacctggtcgggcggcagtgctacatcagcgagctgtcgcagttcgacgacgaaatcaccggacgcttcttcatgcgcgccgtgttccgcttcgacaccggcgtccacggcgacatccaggccctgcgcgacggcttcgaggacatcgtcgtgcccttcgacatgcactggcagttgcacgatagcaaccagccgatgcgcgtgctgctgatggtcagcaagttcgaccactgcctgtccgacctgctctaccgccacgccaagggcgagctggacatgcagatcaccgccatcgtctccaaccacctcgacctgcgcccgatggccgagcgcgagggcatccgcttcgtctacctgccggtgacgaaagacaccaaggccgagcaggaagccgcgctcatgcgcatcgtcgacgagaccgacaccgagctcgtggtgctcgcccgctacatgcagatcctctccgacgacctctgcaagcagctctccggccgggcgatcaacatccaccactccttcctccccggcttcaagggcgccaagccctatcaccaggcctacgagcgtggcgtgaagctgatcggcgccaccgcgcactacgtcacctccgacctcgacgaaggcccgatcatcgagcaggaagtgcagcgcgtggaccacgcctacgcccccgacgacctggtcgcgatcggccgcgacaccgagaccgtggccctctcgcgagccctgaagttccacctggaacaccgcgtgttcatcaaccgcgacaagaccgtgatcttctcctga

SEQ ID NO: 362791 - DNA, 1131 bp, Pseudomonas aeruginosa
atggccaactcctggcgcaccagcgccctgcgcgaccgccacctggcgctcggctcgcaactcgaagactggaacggcatgggcaccgcctggacctatgccaccgacctcgccgaccaccacgaagcgatccgcacccgtgccgggctgatggacgtctctggcctgaagaaggtgcactacgtcggcccccatgccgaaagcctgctcgactgggccaccacccgtgacatctccaagctctatccgggcaagtcggtatacgcctgcatgctcgacgaggacggcaagttcgctgacgactgcatcgtctaccgcaccggccccaacgccttcatggtggtgcacggcgccggcatcggccacgagatgctcatccgctcggcccagggccggcaggtggcggtgctgttcgacgacgacctgcacgacctctcgctgcagggcccgcgcgccgtggactttctcgccgagcacgtgccgggcatccgcgatctgccctacttccaccacctgcagggcaagctgttcgaccgcccggtgatgatctcgcgcaccggctacaccggtgagcgcggctacgagatcttctgcaaggctgccgacgccccggtgatctgggacggcatcctggccaagggttcggacctgggcatcatcccctgtgccttcaccgccctggactggctgcgggtcgagagctacctgctgttctacccctacgacaactcgcagatgtaccccttcgccgacgagaaggccggcgacagcctctgggagctgggcctggacttcaccgtgtcgcccggcaaacaggacttccgtggcgccggcgagcactaccggctcaagggccaggagcgcttccgcatcttcggtgtgctgcttgaaggtgaacaggctgcccaggccggcgacaccctctggcacgccggccaggaggtcggcctgatcacctgcgccatgtactcgcgcctcaccggccgctccatggccatcgcccgcatgaccaccgactgcgccgaacagggggtgccgctgcaggtgcgcggcagcctgcaggtgaacgccctcgcccacaccctgcccttcgacgaccccgagaagaagaagcgcaccgccaagggttga

SEQ ID NO: 362792 - DNA, 1017 bp, Pseudomonas aeruginosa
atgcccacgacactcaagccggtggagcgttaccgcgaagccttcaccttcggcaacagcccggaggccattcgccgcttcccgttcccgttccccgaagaccagtaccagtactcggtgaacatcgagccggcgaagtcgcgcgatcccggctcggtgttcgagcacctgttcgacatcgacgaacactatcgctccgaagtgaccgagcgcggcctggtgctggagcgcgaccctgcgcgctgcctggtcatgccgcatatggaaccggccgcctgggacgccctggcgctgctgatggaaacccttgcggcagactatccgcagtacttccagctgcaccgcgagggcgatcagtgggagtggtgcaacctggtgctgggcatacgccagcgcttcacctacggcgacgcctccaccctgccctgcgagccactggagtacatcacccgccaggtacagggcgacttcgccctgctcgaccagcgcgatggcgacctgtacatggacgccggcatggttaccgggccggccgactggtcgctggccttcgatgccggcatgagcttcaagcaatggcattcgccggtaccaatggcacaccagatgggcgtgttcgaccgcgcgctgaagtacctgctgaacctccaggtcggccagccggtgcgccggctgaactggaccatgaccatcaacccgcgcctggacacctcgcccgagacctaccacgagtggggcgccgatcgcggcaaggtcaccgcgcagaacgccggcgaactggtgcacctgcgcgtcgaactgcagacgatggcgcgcctgccacgcagccacgccgtgatgttcagcatccgcacctacctgatcagcatggccgagctggccacccagccgcactgggcgcaacgcctgcaccgcgtactgcgcgacctgcccgacccgatcgccgactacaagggcctgacccgctaccgcgccgccctgctcgactggctgcggccctacgactcccaagcctga

SEQ ID NO: 362793 - DNA, 927 bp, Pseudomonas aeruginosa
atgagtatctggttcgatgtgcgggtgagcgccgtgcgcgccctcactccggtcatccgtgaattcaccttcgaggccgtggaaggctcgctgccgggcttttccgccggcagtcacgtgcaactgtgcctgcccaatggcgtgcgcaatgcctactcgctgctcggcgaccccgccgagaccggccactaccgcatcgccgtgcgccgccaggagcaatccaggggcggctcgcgctacctgcacgagcagttgcaggtcggcgaacagctgcgcctgggtaccccagccaacctgttcgccctgcatggcgaggcgcgccggcacatcctggtggccggcggcatcggcatcacgcccttccttgcccagtgccgcgaactgctgcgccgcggcgccgacttcgaactgcactacgcctaccgtgccggcatcagcgacgcctacctgggcgaactgcgcgagctgctcggtgagcgcctgcacgaatacgacggcgcacagcgcccgctggacctcaatcaggtcctgcgtcagcgcccgctgggcagccacgtctacgcctgcggcccgcagcgcctgctgctggccctgcgcgagcaggcagccgcgctgggctggagcgattcacgggtgcactgggaagccttcgccgcgcccgagcccggcctgccgttccgcatcgaactggcacgcagcggccggcagctggaggtcgcggccgagcagagcctgctcgaagccctcgaagcggccgacatcgacgtccccaacctgtgccgtggcggcgtctgcggccagtgccagacacgctacttgaagggcgaggtggagcaccgcgatcacttcctcgacgccgacgaacgcgccagcagcctgatgccctgcgtctcgcgcggctgcgggccgatcctgctcgacctctag

SEQ ID NO: 362794 - DNA, 531 bp, Pseudomonas aeruginosa
atgactgcgaccgcacttcccgacagcgctctgccgctacccagcctgccccgctacgacgcaccgccgcgcctgaccggcagccagatggtgctattgcagcaggtggacgaccccgtcggggccgcagccctcgccgaacgcctgggcctcggtcgtgacgccttgcaggtgctggtggcggacgcgcaacaggccgggcctgccttgctggaggttctggctggcgccagcgtgggtctgcagctcttcctcagcggcgacgaagcctacctctggcctctgcatgccctcgcccgccaggccggactgcgcccggaggaaatccacctgctgcaccagggcgaagcacgccgcgccatctactgcgtgcactgcaccgcgctgcagagcggcggccccgccgagcagcacgattgccagcagtgcggtgtgcgcctggaagtgcgccgccatttttcccgccgcctgggggcctacctgggcgtctgcgccgatgccgaccatccctacgcggagcgccgctcatga

SEQ ID NO: 362795 - DNA, 1119 bp, Pseudomonas aeruginosa
atggcgaaggcaggaggttggctggagcactggcggcgacgatggtggactggtgtcggggcgggcgcgccgcgacgggcggaggtcaccctgttgcaggggctgctagatgagcccggaagctgggcgccgcttgcgcgcctgctcgacgaactgacgcaggagcatccggctgcgctgccttgcctgctgctggacgaggccggactggtggcgccgctgcagcgcccagctgatttttgcgccggtgcggactgcccgctgcgccacctttcaaccctgcaagccgggatgtgcgggccgtgccgggaccgcggtgaacggcggcgcttctggccgttgcaggatgacagccaggccatcctggtgactcgggggcgcgacgcgcaggggctggccgactggctgccgctgctggaggtctgcgttcacggtgtagcccgccagcgtgcccggcagcggctgcaacagcacggccaggacaccctgctggctcgtgagctgcacgactcggtggcgcagcagctcggcttcctggcgttccaggcgaatcgcctgcagggtcagctgcgccagccgcaaaaggccgagccgctgctcgacgaactgcgccatggcctgcagggattgcagcgccaggttcgcgagctgatcggcaatgcccggctcagcctcgacggccgaagcctgcgtcagtcattgctggactcggtagaggagttcggccggcgcagcaacatcgtcttcgagctggacaatcgcctgcccgacgaactgctcgatgacgagcaggccctgcaggtgttgcagatcgtccgcgaggcgctggctaatatcgtccgccattctcatgcgcgcaccgcgcgtatcgatctgcgcctgctgcgtgatgagttgcaggtggcggtggaggacgatgggatcggcttgcagggcggctcggcccacgggcatttcggcctttcgatcatgcgcgaacgggccctggccatcggcggcagtctgagcgtgcagagcatccagccgcgtggaacgcaggtcgccctgcgtctgtgcggcctgaccattaccccggaggacaatgccgatgcacagcgccaccttgctgctgatcgatga

SEQ ID NO: 362796 - DNA, 642 bp, Pseudomonas aeruginosa
atgcacagcgccaccttgctgctgatcgatgaccatccgctgttccgccgcggcctggccgagctgttcggtgagtgcggcggcttcaccgtggtcggccaggcctccagcggccgcgagggcatcaacctggcctgccagttgagcccggagctgatcctcctcgatctgcacatgccgggcctcggtggcctgcaggtgctcgacgagctgcgccaactggaactggacagccaggtgatcgtgctgactgcccaggccgaccgcaccgaactggtcgccgcgctgcgcctgggtgccgagggctacctgctcaaggacaccgagcccgaggcgctgctcgattatgttcgcgcccgggttcgcgcctgcaaccgggggacggtgcaactggacgacagcctgatcgcgctgctggccgagccgacgctgccggtgccgggggccgacgatctgaccgagcgcgaagggcagaccctggcactgatcgccgatggcctgagcaacaagctgatcgcccgtgagctgggcatcagcgacggcacggtgaagatctacgtgaagaacctgctgcgcaagttcaacctgaactcgcgtctggagctggcggcgtgcgtccatcgcggcggccgccagtcgtga

SEQ ID NO: 362797 - DNA, 750 bp, Pseudomonas aeruginosa
atggacccgcatccgacagaaattgccgatctgaccgaccgctatccgatcgcattgctgcgactcgaccgccagggccgaatcgtccacgccaatgcagcctggatgcggcagatggggcggcccggcggcagccgggagctgctcgcccaactgcaccgtgaggacgccgcggcctggcgcgcggcgctgcgccaggccgccgaagggaaggggccggtcaactgctgcctgcgtttcatcgacccgaatggccgcttgcgctggttcgacctgcaagtaagcgccggcccgggggcgttctacctggctctcaacgacgccaccagccgccgtcgcgccgacgcccgtatcgaggccagccagcgtggcgcgctcagcctgcttgatggcttgccggggctgatctatcgagggcgcaacaaccgccagtggaccatggagttcgtcagcgctggctgcctgcaattgacgggttaccccgccgcttacctcaccgacacgtacgagcacagctacagcacgctgatcctcgacgagtgcagcgaatacgtgtggtccggcgtgcagcaggcccttctgcgccgcgaaccctacgagttggtgtatcgcatccgctgcgccgatgggaccatcaaggatgtctgggagaaaggggcgggcatttacgccgaaaccggggaagtgctgggcatcgaaggcgtcattctcgatgcggcgagtgggaagctgccgacggagtggagctag

SEQ ID NO: 362798 - DNA, 1263 bp, Pseudomonas aeruginosa
atgtcgattaccaacgacgcccctcgggcactacgagcatggctcctggtagcgctgggcttttgcaccctcgccctctcctattcatcacgttcggcgctatcgatggcgatgccgatctgggagcgcagcttcgaatggccgaggaccacgctgtcgctcgctgcagccttggcgatgctgatgatggcgctggtggcgcctctggtcggcagcgtcgtggatcgctatggcgcccgtgtggtgttgggtggcggcttggcctcgctggcctccggtatgttcatcgtcgcccggctggacagccctgaccaggtctggctgctcttcgtaggcttcagcctattgggtggcctggggttcggcagcatcgcgcagcatgtattcgccaccgtaatcgctcatcgcttcccacgaagagcgggacttcccaccggtatcagcctgtccggttccagcgcaggccaattgctggtcctaccgttgctttcactgctcatcgccggcggagtctggcaagccggcttctgggggctgggtgcagtggcactgctactgatcccactgacagtcgcaatactgtccgagggaaattcgaaagcgcccggttccaggccggatgtcccaacccccgcatcctcggtgcgtgcgcagctccttgccctggcgcgcagcgggacattccacgccctgttctggagctatctgatttgcgggttcaccaccagcggtgtcatcgagacccatttcctaccctatgcaaacctgtgcggcttcgcccctgttcccagcgcgacggctttcgggattctgtccggattcaacctgctgggcatgatcctggccggctggcttgccgaccgcatgcatcggccactgctgctctttgcgatctacctggcacgggccttgtgcttcctgttgttgctgcgcatcggcgacaactacgaacttctcttggcctttgccgttctgttcgggctgttcgactattcgaccgtcccggtcaccacagggctgctctcggctcataccgggataaggtcgctggggctcgccctggggctcttgtcggccggccatgccctgggaggagcgatgggagcctatctcggcggatggttctatgatcggaccggcctctacgacagcctgtggtgggtttccatcctgctagccgttgctgccgcactcatggtcgtcggcctcaggaacaatgccgcaaaagccactgccgatctgatgaatccagaaactgcctga

SEQ ID NO: 362799 - DNA, 909 bp, Pseudomonas aeruginosa
atgtcggctaacagcaaccgagcgatcctcgaactgactgtgggcgggttaatgctcagcctttcggccctgactgtggcctttgcccagatcggggccggcggcgcgggtttctacaggatgctgttcgcctcggtgctgttcttcctcctgctcaagatccgccatattccagttcggctcagaggtttcagggcgcgactctataccgccctggccggcgtgttcctggccatcgacctggcgctgtggcatcagagcatctacatcgtcggccccggcatcggctcgatcctgaccaactgccaagtgttcttcatgaccttcctgggcttttacctgctcaaggaaaagccctcggtgaacttcctcatttcgatcaccctggccttcatcgggctgtacctgttgctgatgccagaaatgacgagtgcactggggatcaagggagtggtttacggcgtgctctccgggctggcttacgcgatctgcgtgtacttcctcaagatcaacacccagttgccggacggcggtggcgacaagatcgcccagatgctcaatttgagcctgtgggcggcgctggtgctgctcggctatgcactggccaatggtgaaagcctggcaatccacgatgggtggaccttgctgatgctggtgatctacggggtgctggtgcagttcgtcggctggctgctggtcaaccgctccataggcgccatcagcctgggcctggccgggttgatcctgctactggagccggtgatcacctacttcatcgacattgcctttctcggcaagaccaactcgcccctgcaagtcggcggcgccctgctgaccatcctggcggtatacatcggctcgatccggccaccgaagaaagcggacccggcactgcccgaagcgacctga

SEQ ID NO: 362800 - DNA, 624 bp, Pseudomonas aeruginosa
atgtcggcgaaactggtgattggagacttcggcaaatcttcctggtcgttccgcgcctggctggtcctggtgagtgcgggcattcccttccagaccctgctgatcccactcgaacagccggacacccaccagcgcatcctcgcccactcgccctcgggcaaagtcccggcgctgctggtcgacaaccttgtcatcaacgatagcctggcgatctgcgagtacatcgcggaatcctgcccccaggccaacctctggcccgcggacgctcgcctgcgagccaaagcccgtgctgcttcggcggagatgcactccggcttcactcatctgcgcacccagctgtcgttcgggctgaacatcggcgatcaggtcgacgagctgcaggcacagacccgcgaagagatccagcgcatcttcgcgatctggagcgacctgctcgcggccagcggctcgcacagcttcctctgcggcggtttcggcatcgtcgatgccatgttcgtacccgtggtctttcgcttccgtcgctacggcatcgaagtgccggaccatctgcagccatacatcaacaacgtgctggcttaccccgccgtacagaagtggcaggagttggccgccgagcagctctga

SEQ ID NO: 362801 - DNA, 837 bp, Pseudomonas aeruginosa
gtgggcgaggggcaaatcgctttgaacgaggacttcgtcaggttccggcgcatacccgagggcgacagtgagctgctctcggcgcgtttcagcaaccagacgttcgggcggcattcccatgatcgctatgctgtcggggtcatcagcagcggcgtggagcgcatgtactaccgtggtcgctattccctgggcggcgcgggcagcgtggtcaccatcagcccgggcgagatccacgatggcttgcccgcccatgagcagggctggatgtaccgcatgctctacctggatccgcagtggctcaatcgcacgctgatgcccaggcagggaagtgaattcatccacctgttcaagacggcgttccgcgagatgccatcgctcgcgcggaccttccttgagcatcatcaggtgatcgaggcttctcagtgcgccctggaaagggaaagcttgctgctggagctgatcccgcagctcttcgagagcaatggcgtatatgactcgtcggttgatgcgctagaacggtgggcggttcagcaggtccgcagcaagctcgaagatgacttcaatcagcaagtatccctggagcaactggccaacctggtggggctggagccgctgtacctgatccgggtattcaagaagagcgtgggcgtgtcgccccacagttaccagatccaggtccgtatcgcccaggtccagcgcctgctgcgtgccggcatgagcattgctgatgcagccatcgcctgtggtttcttcgatcagagccacatgacccgcgcattcaagaagttggtcggaataactccaggcagttttcgtgcagggcgttcatcgaactag

SEQ ID NO: 362802 - DNA, 255 bp, Pseudomonas aeruginosa
atgaatccagtgacgatctataccacccagcactgcccttactgcgtgagtgccaagcacctgctggcgagcaaaggggtcacgcccgtcgaaatcaatgtcgaagagtcgcccgagcatctcgcggaaatgctgcagcgatcccggcgcaggaccgtcccgcagatttttgtgggcgatgtgcacgtcggaggattcgatgatctggccagcctcgatcacaagggcgggctcgaggcgttgcttcgtccctaa

SEQ ID NO: 362803 - DNA, 972 bp, Pseudomonas aeruginosa
atgtcccgccctcaagtaaccctcgctatcctgggcatgccaggggttcagcttctggacgcttgcggtcctttggatgtcttcgctgaagccaaccggcaagccggctacgaagcctatcggttacttctactcgcttgtgaacccggcccgctggtgagctcttcaggtacccggttgattccagatgcctggatcggagaggagatcgatcctattgataccctgctgatagccggaactcctcaagccgccgatcaatacctccgttctgggattctggactggctccgccagcgggctccgctgtgcaggcgtttcggttcggtgtgcactggcgcatttgcgctagcagctgcggggttacttgatggccgccgtgtcactacccactgggcagtggcgcaacctctctctgaaaagtacccacaagtgaccgtggaggcggatgctattcaggtccatgacggtaatttgaggacagccgcgggtgtgacggctgggctggatcttgcgctgacgttggttcaggaggatttgggcgatgagattgcgaaggacgtagcaggccacctggtcatgtacttcaaaagaaccggtgggcagatgcagttcagtcgtcaaggatcaacctcacccacagggcgctctgctctacaggcattgcagcgatacgtcgcagcaaatccggctctggatcatggggttgcgaatctggcagagcgtatgggcgtaagcccaagacatttcgcccggatctttcaaaatgatgtgggtatgacgccggcagcttgggtggaacagacgagggtgaatgctgctcgcgagcggctggaagcggggaatgacgcaccgaagcaggtagctgccatgtgtgggtttgccaatgcagacaccttgcgtcgagcttttgtccgtcatatgggcgttacccctgcagaataccgcaagcgctatgcgcgcccttgttga

SEQ ID NO: 362804 - DNA, 642 bp, Pseudomonas aeruginosa
atgactaacgctattgctggcattcacgtgcctgacagttcgatggccagagaaatcaccgagctagttcgggacaccgcttcgccccttcttttccatcattcgagccgcgtcttctatttcgcatcgcttgccggtaagcgactgaaccttaagtatgatgacgagcttctctacgcgggttgcatgttccatgacatgggcttaacccaccagcacagcagcgattgctgccgatttgaggtcgatggagcgaatgctgcgcgtgattttctacagggtcacggcatcaacgaacgcgatatcgagcgcgtgtggactgcaattgcccttcacaccactccagggattcccgagcatatgcaccctctcattgcattggtaaccgctggtgtagagaccgatgtcctcgggttgcaccatgaagagctcagcgctgatgaccgagatgccgtcgttcttgcacatccacgtggtgatcacttcaaagaagccatcatccagacgttctacaacggtatccgccacaagccgcaaacgacattcggcaacgtcaaggcagatgtaatagccgacaaggagcctggcttcttggctggtaacttctgcagcattattcgccaatcctgctggccaagctaa

SEQ ID NO: 362805 - DNA, 882 bp, Pseudomonas aeruginosa
atgacccagtccaagcacaccgatgtcgctttcaaattcgccgaagctgatggcgtccgagtcttctatcgagaggccggcgctcctgacgctcctgtcctccttcttttgcacggcttcccgagctcgtctcaccagttccgtgatctgatccctctactggcatcccgttatcggatcattgctccagatttgcctggcttcggcttcaccgaagtcccagtcgagcgggagtacgtgtataccttcgatgcgatcggtaagacgatcggtgatttcgtagagaagctgggcctcaagcgatacgcgatgtacttctttgactacggtgcgccgactggtttgcgcttggccctcgcccatccggagcgtgtcagtgcgatcatttcccagaacggcaatgcctacctggaaggtctgggtgaggcgtgggcgccgatccgtaagtactgggaagatggcctgccggaaagccgccaagtcatcaacgacgcaattctgcatctggaggggacccgctggcagtatgtggagggggtaagtgatcctagccagattgcccctgagtcttactacctcgatgcgcttctgcttgagcggccgggcaataaagagattcagctcgatttgttctatgactatcagaacaacctgaagctgtaccctgaattccagcagttcttccgaaacaccaaggtgccgaccttggctatctggggcaagggtgatcccttcttcatcccaccaggagctgaggccttcaagcgagacaacccgaatgctgtcgtagagctgttggataccgggcatttcgcactggagacgcatgtccagtacattgctgaccggatcgtcgaagtgctgggcgactcgatcaactga

SEQ ID NO: 362806 - DNA, 924 bp, Pseudomonas aeruginosa
atgaaacggcattttgacgatatgcagttgggaagcatcgagctgttttgtctttctgcagaagcgggcagctttactgccgctgctcagctcgctggcgtcacacctgctgctgtaagtaggtcgatactgcgcctggaggaaaggttgggttcgcgtttgttcgcaagaacaactcggagtattcgattaaccgaagctggaaggatttttttcgagcagtgcagccaggctctgacgcaactggttgaggcgcagcaagcagtcatgggagctcaagcaacgccttctgggcgactgcgtatcagcctgcccaccacttatggccaccaccgaattctgccgttgctccctaaatttcgcgatctataccccgatgtcactgtggatattcacttggggaatcgaaacatcgacttcgtggcagagggatacgatctggcgattcgagtacgagctcaaccagattccacgatgattgcgcggttattggaagatgcaaagctggttgtcgtagcgtcaccggcgtacttaaagaaggctggagccccgtcggcgctggaggatttggacaagcatgaatgcatccaatttgagcttcccagtagcggaaggcgtatctcgtggctgttccgagatgaaggccgtgagcgcgagattttcaccgctggaagctactcgtgttccgatgatgtactgggcggggtcaccctagcgaaaaatggtgccggcctgttccaaacctacaagttcatagtggaacaagagctggctgatgggcgactcgtcgaagtattgaagccgttcagcgggagatcgaggccgtacactttgttgtatccacacggtcgtcatgttccgcagagagttcgcgcatttgtggattttctgattcagtaccgtgaagaatgggcttcgctctaa

SEQ ID NO: 362807 - DNA, 621 bp, Pseudomonas aeruginosa
atgaaagcccccaggcgcgggcgccctcccaaaaacacgcgaagcgatcccgatacccgccgtgcattgatccgttgtggcgtggggctgcttaccgaacaagggttcaaaactactggtatcgaacaggttcttaagctggtttcggtcccgaaaggctccttctatcactatttcgacagcaaggacgcatttggccgggaagttctagctgagtatggaaagttctttgaacgccgcctgcgtcggatcctactcaaccccagtcgggaaccgttggcgcgcatccaagacctgctgcaggagtcgctcagcgggatggaaaagtacaactggcggcgaggctgcctagtgggcaatctcggccaggaagtgactttgctgcccgaagattttcgcgatcagatcgagaagatttttagagtttgggaggcattgctcagccaatgtctccaagaagcgcaggccaaccaatctatagaccagtcggttgagtgtgaacagctggcagcttttttctggattggatgggagggcgcgatcatgcgcgcacgtctctgcgaaagtggtcaccccctttcgatcttcgttagaggatttctcgccggcatcgcccggtga

SEQ ID NO: 362808 - DNA, 984 bp, Pseudomonas aeruginosa
atgttcaacgcagtcgttgtggagaaccatgaaggggttaaaaaacccagttttcgccaggtttccgaagaggacctacccgccggcaatgtcacagtggctgtgtctcacagcacgctgaactataaggatgctctctgtatcacgagccgaagcccaatcgcccgacattttccgatgattccggggattgattttgtaggggtggtggagcacagcgaggacaatcgctaccgcgaaggagactcggttttactcaatggctggggggttggagaaagtcattggggagggctcgcacagaaagctagggtgagtggagattggctgatacctcttccagagggaatggccccgcgcaatgccatggcgattggcactgcaggttatacatcaatgctcagtgtgatagccctagagcgtgccgggctcaaacctggtgcagggccagtattggtcacaggtgcaaatggtggcgtcggcagcattgccatagcgctgttggccgcccgcggatacgaggttatcgcctcgacgggccgtttagatgaggctgagcacttgattcagctgggcgcgacggaggtgatggatcggaccaccttatcctcagcagcgaagccattgggcaaggaacagtggatagcagcgattgattcggtaggcagtcacacacttgcaaacgtgtgtgctcagaccaaagccgacggctgggtggctgcctgtggcttggcacaaggtatggacttcccggctacggtagcccccttcattctccgaggcgtgagcctcctgggaattaacagcgtcacacgtccatattccgagcgggtcgaggcatgggctcggctaaacacggaacttgatttaacaattctggatcagttgacaagagagatcccgctttcaggggtaattccagttgcagatgacctgctagctggaaaagttcgaggtcgacttgtagtagataccagcgtctag

SEQ ID NO: 362809 - DNA, 1023 bp, Pseudomonas aeruginosa
atgaaggacgcccaaagtggtgcgttacatcctttcgataaagtgagactaatcgaagcggaaactccaattcaacgtttagaacatcttgaactgcgactgggtatcaagcgcgtcaatctgtatatcaagcgtgacgatcacatggcattcgcagggggtggcaacaagcttcgtaagcttgagcttctactaggtgaagcgattgcacgaggctgcgatacaatcctcaccacgggtgggctccaatccaatcacgcacgcttaaccgcagcagctgctgcgcgactgggcttagactgcgagctcgttctcggacgagtggttccgcggcaagattctgactacgaaaacaacggcaacgtgctgcttgatcaaatatacggcgcaagactgcatatacttcgcccaggagaaaaagcaagtgagttcgcaacgaagaggatccaacagttaagtgcagaggggaagaaagtctacctgatccctatgggaggatctgctcctcttggcgcattaggttacgccaagtgcagcgaagagatagtgcaatatgagaatgacaccggtattcgattcgaaaaaatttttctgccaaacggcagctcaggaactcatgccggtctagccgcaggtttcgccgctcttggacgctccgctaagataatccgctcttactcagtcttgggcgagcaggaacaggcgtggcagcaaacattgaagcttgcaaacgaagcgctggcgttaatagaactctcagaaattgcgcccgatgacatcgacgtaaatgggaatcaccggggggatggctatggggtcccgaccgaagaagctcttaaggcgacggctgtattagctcaggcagaagggattttgcttgacccagtgtattcagcaaaagcatttgcaggcatgcttcatgatattgctgccggggaatttgtcgacggagctaatctactcttcctgttcactggtggcggaccaggagtttatgcttatcgcagcgcattcgctttctag

SEQ ID NO: 362810 - DNA, 711 bp, Pseudomonas aeruginosa
atgagcaactctcaaaaagtagtgatcgtaactggcgcatctcaaggtatcggtgctggcgtagtaaaaggtttccgagcgctcggtcacaaagtcgtggcaacctcgcgctcaattcaaccgtcaactgacccggatatccttactgttgccggtgatatcgccgatccggccaccgctgagcgcgtgattcaggaggccgtggcccgcttcggacgcatcgataccctggtcaataacgccgggattttcgtggccaagccgttcacgagctataccaaagaagactacgcgcaaatcgtagctaccaacatgagcggtttcttctatatctcccaactcgctattgcggaaatggagaagaacggtagtgggcacgtggttagcgtcaccaccagcttggtagaccatgccatcgatggcgttccgtcggtaatggcatcgctcaccaaaggtggcatcaacgctgccaccaaatcgctcgccattgagtacgccaagcggggtatccgcgctaacgccgtgtcgcctggcatcatcaaaaccccgatgcatggcgcagaaactcacgaagccttgggtcaactgcatcccgtcggccacatgggtgagatcgatgacatcgttcaagcgatcctttacctggacagcgctgcattcgtcaccggcgagatcttgcacgttgatggcggtcagagcgcaggccactga

SEQ ID NO: 362811 - DNA, 657 bp, Pseudomonas aeruginosa
atgaggcggacggtcaaagtcgactttgtttctgatgtggtctgcccgtggtgcgctctcggttcaactgcgttggatcaagccattgccaacatagctaatgaagtagatgtcgagcttacttacaaaccgttcgagctcaatcccgatatgcccgcagagggagaggatgcgatcaaacacatgattcgcaaatacgggagaactcctgaacaggtagcggcacgcaaccagatgattattgaaagaggacgtgatatcggatttgagtttgatctcgaaaagcgaactcgcttcttcaatacgcatgatgcccatcgccttctgttctgggcagcaagcgaagggcttcaagccgagcttcaacgagcattgattgaggcttatttcgttaacgggcaagacatcagcagtcatgagaccttgagggtcttggcaaaaaaagtcggattggacgccaacaaagcacagagagtgcttgaaagcggacaattcgctgatgaagttcgcgagcttgagaagttttatatagagcgcggtatcaactcggtaccagcaatggtgcttaatcaacggcaagttgttgcaggttcacagtctgttgagcagtacgaacaagtgttaagacaggcggcacaggtcgcttcgtccaactga

SEQ ID NO: 362812 - DNA, 216 bp, Pseudomonas aeruginosa
atgccattcatcagcgtccgtatcactcgagatggcgtaacgcgggaacagaagtcccaagtaataaaagagattactgaaacaatggagcgtgtcctccataaagatccgaagttgacccatatcgtaatcgaagaagtggataccgataactgggggtactccggaatcaccaccaccgagtatagaaaaaaattggcggagtcaaagtcatga

SEQ ID NO: 362813 - DNA, 948 bp, Pseudomonas aeruginosa
atggatcgatttcaagccatgcaagttttcttgcgtgttgtcgaagcgcacagctttagcaaggctgcagagagcctggccattcctccctcttcggtcacgcgcgctgtcaaagagctagagtcttatctcggtgtacagctgctacaacggacgaccaggcatatcagtctcacctcggacggtagtctttactacgaccactgccgccacatgctcgcagagcttgaaatcgttgagtcttcctttgctgggagtgccggacgagctcggggcaggctgcgtgtcgacatgacgtcatcatttgctcgccttttcgttttacctgctatcaaaaactttcaggcggcatacccgagtgtcgaactgacgttaacactaggcgaccgaacaattgatctcgtccaggagggggtggattgcgtcatccgcgccggcgtcccacaggattcagccacgctcgtcgcgcggcggatcgctgggttcgagtgggtgacgtgcgcttcgcccggctatatcgagcaatacggagaaccaaagtcgctggatgatcttcgcagccacaacgcagtcggttttctttcgaatcagactggtcgaagcacgcactggagctttgtcgtcgatggagaggaggttgcagcgcaggtttcctccagcattatcgtcaacgatacagatgcctatgtcgcgagcggccttgaaggtctgggcctgattcgagccgccagctatatggtgatccctcatctaaacagcggtcagcttaggcaggtacttcctgacctcaaggctccaaccgttcctttatcgatcctttatcccaagagccgtcatctgtctccgacagtgcgcgccttcgctgactgggtcgccggtttgattcatgaagcagagccacaatggaaattagagagtcactctcacaaggcgccgacaagcatctga

SEQ ID NO: 362814 - DNA, 468 bp, Pseudomonas aeruginosa
atgccaatgcagaacaatgccgctgacagcgtgcaaaacgacatccagaccttaaacgccctggcccgacaatgggtcgaaattggttggcgtcacagtgctgaagagcctttcgacttccgacaccgtttgcaaaatttctacgattggtcgcctgacggaactcagttcttcgacgacttcgacccggagcggcgtatctgcactgaagccgcccaatacgctgcgatctgggataagcgcatccccgcatccctgcagacgctcacgaacgtcaccttatgtgacccgagcactctggtatccggcgacttggccgtaatgagtgtgcagttcatgacgtccttcaagacaacggagggcatcagtggtaagtcacacacgctatctagcctcgtgtggcgccgtttcccccaaggctggcgaatcatccgcgaacacggaagcgcgctagcagaccttgagtag

SEQ ID NO: 362815 - DNA, 930 bp, Pseudomonas aeruginosa
gtgaatacgtacaaggtggataccggtggcattctggtgcttggtgccggacagcttgggatggcggtgatcagggtacttgcaccgcgcctgcgagatctaaatgagaggcttacggtactaatagcgccgcaaaccgtgaataacccagcgggacaggaagccagtcacctcattgaactgcgcgaactcggggttgaggtcataggcgttgatctaggctcgggggagcagaacctgaccggcgtatttcagcgcttcagaaccatcgttaactgcacgggtttcgtgactggccccggcacccagttgaagatcacccgtgccgtgcttgccgcaggcgtaaatcggtacttcccatggcagttcggtgtcaattatgacgtcgtgggacgcggtagcgggcagcccgtcttcgacgagcagtacgacgtccgcgagttgctgcgcagccagagcggcactgagtgggtgatcgtttcgacagggatgtttaccagctttctgtttgagccggctttcgatgtcgtcaacctcgaccggcgcacggtcaacgcgcttggcagctgggatacgaaggtgacagtcacgacgccggaagacatcggagcactcaccacggagatcctgctcacagagccacgcgtagccgacgagattctttacctggcgggcgacactatttcttatgggcaactggcacggacagtagaacgggtcaccggcgtctcgttcaagaagaccgagtggactctcgacaagctcaatgcggatctcgtcgctgcgccaaacgacgtgatgacgcgttaccgcgctgcgttcgctaaaggagacggcatgtggtgggagaagtccgatacgtacaatgcgcgtaagggcttcgagacggtcgatgtggagggatatttgctgtctcgaatcaacgaatag

SEQ ID NO: 362816 - DNA, 438 bp, Pseudomonas aeruginosa
atgaccatcgagctaaacaccaaagccatcagatggctcacccggctcgcgcttcctgctgacgatggatacatctaccggctgggcgtcgcgctgtacggctttgcttccctcagcagcttcatggccgagctcgctcaccatatggatccgctcgtgaaccgcactgcgcttcaggcaagaacgggcggcgagatcctcagcgaattccgcaagtgcgtaaagaaaaccaaggcaaaaaaaccggcggtcgggcctattggccgcgccgccgctgacatgttccaggcgctgaacacccggcgttcggacatcatgcatgcctacccgattaccaatcaggccaggcagcaaattctgcaccgtcggctggacgagaaaaatcgctacttcgaggtcaccaacgagattctgagtgaatcgtccctggttgcgtag

SEQ ID NO: 362817 - DNA, 930 bp, Pseudomonas aeruginosa
atgcacgccaacaccctctacatcatcgggaacggctttgacctgaaccaccggttaccgaccggatatgggcatttcaaggcctacgttagatcccatgatcgcgaggtctatgactgggttgaagactatgtgcctgctggtgaaacctggggtgatctggaaatggctctcgcttacctggacaccgaccacatcgtcagcagccttgaacattttatggggtcatatgcagacgagaactggagcgactctggccaccatgacttccaatatgaagttgatcgggttgcaagaggattgggaggaacgcttcagaagatttttgccgaatgggtcagcaccattcagatccccgacacccggagcgctcaaaaccgcctggctgggctggacatcaatgccacctacttgaccttcaattacacctgcacgcttacccgcgtgtaccaggtgcccgctgaaaatatcttgcatattcacggcgagtcgacagggcccgactccgagctcgtactaggacatggctgggccccggaagagcggacatctctgttcgatagcgtgaatcatgaggactccgaccatcgcttgatggcagctatgcagtccttggacgattatttctcggaaaccttcaagccctcaaaagagatcatcgagcgcaacaccgatttctttgttggcctggagaaggtcgatcaaatagtggggcttggacactcgctcaaccccgtggatgccccctatctatcagccgtagtggcagcgttggagcgcaggccggtgtcgtggacagtcgctgtcctgccggatgacgaccttggagagaaaacagctctccttgaggcgattggcgttccgtctgagcaaatacgttatcagctgtggagcgagctccacgacgtcgcgccggacgagcatcgctaa

SEQ ID NO: 362818 - DNA, 678 bp, Pseudomonas aeruginosa
gtgtcgcttacaaacaaggatgtcatcaaggtctttatcgcagatttcagatcgatgcatcatgatgatcagcagcccgatgtgatttgtgatttcgacggtgatccggccccacttgcccaagtggcaaagattcttggcaagccaactctgcagttctcctatcgtttcgccgacagcgccgtgaacgatcacagtgatctgttttactgcttgatcatcgctggccatgagctcgctcactgggcgaatgcccataccaagcatctagataaagacgatctcgatagcaaagctatcgagatgtgggctgacttcttcggcaccaggctagtgttctccgcagtggctcgcggcacgaaggtcaaggagatcatcgctggccgattgcgtactcccgctttcgacgtggttggggaagatgccctgctaccggagtatggaagagcgttgcggcgcgtgtacgacaccgttttcgtacctgctggtgtatcgcccaagtacccatcgccgaaggagcgggtgtacatctgtgctgccggcgtcacgtccttcttctatagacacctgggtcaaatgcatcagaatagaaccatcctcgcgttgaaggaatgttcttctagagccgttcaaggatctcctcgaccttttccagcagggtgtcactgcggacgatag

SEQ ID NO: 362819 - DNA, 1035 bp, Pseudomonas aeruginosa
atgcccattgatctgtttacccctcaggtcgctaccgatgtccagcatccgatcttccagatgatgcaagctgacatctatgcccccgagcgtgctgtcctgtctcaatgggccaaaggtttcgaagatcgtgatggaaagtttgtaaaagaacttcaaaccaccttcgagtcttcattttgggagctatatctattcgcggcgctcaaggaatgggggctaccgattgatcctcgctaccatgcgcccgattttgtcgttgcaggtgacgccccattttgcctcgaagcgacgatcgcaaacccgccggctggtgggcagcccgcttacggcttttcaatggcacctccacccgaggatttcaccaacttcaacatcgagtctacgttgcggatctgtaacagcttcgatgccaaggtcaagaaatacaggcgcagctactcaaagctgcggcacgctcaagacaaacccttcgtcataggcatcgcatcattcgaccggcctcacgcgcatttcgcagccggccgaccgatcatggccgcgctctacgggctctatcatgatgaagccgcgaccaagcctggagatacgcacgtcacgtcttacaacgtcacagcagcacccaaaaatgcggacacgaacatcgaagtgggattattttgcgaagacacctgtgccgaggtctccgccgtcgtatatagcagtctcgcaacgtgggggaaattaagggccttggccgacaatcctgatgccctctccacgtactgcacacttcaccccaacccgggcagcctgcttccgatcctacgctccgcaatgaagcgcgactacagcgagcacctgatggacgggttgtatgtgctccacaatcccttcgcccggcatcccttgccaccgggactgctaagccaccctcgcttgtgtgaagttactgtcgcccctgatggcgagctcatcatgaatgcgccagacgattttttgctactgaggatgctgaaaacgatgaaaatcagtggtgctccgctgcaggcctaa

SEQ ID NO: 362820 - DNA, 828 bp, Pseudomonas aeruginosa
atgtctctgccattacctcgacattgcagcattggtcttatcggtgacgtggtgcgggagcgcgagaatggcgtaaattttgcctacttcacgaatattcaagcggagtgggaagacaggacgcggcagtaccttctgcatcaaggctcccccgagtatgtacctcaatggcttgggatgacatcggccagaaaaactacctttctgaatctttatctgaaccatagggagggtagctctcagcgggtggtcatcgaagatctaaacaaacatgccttaaattactgcccggcatgtggagagttcggcaggccgaatacattggatcattacctccccaagggaaaatacccccacttctgtataacccctgcaaaccttttcccaatgtgtgacaggtgccagaaggagaaaggcgagaagactggcacattagtcgaaccacgatttttccttcatccctactttgatgcatttttggccgatcaggttttactaatcattatcgaccccccctataacgctccttccttccgggttgcaatatcaggcgggcttaatgatgaacagacagctctggtggctagccatattagggagctgcaaattgaggcaaggtttgcgcacttcttcaaggatgagatcgttcgaacgtggaaacaggcggctaagatgcggtctaaaggagttccaatcgagcttgcgctccaaatgttcgacgatatgtatgagcccaatacttggcagcagctctaccatgcatcggtattaggcaacgcagagtttattgattatctgcagcatggagatcttccggaggacgtttag

SEQ ID NO: 362821 - DNA, 1707 bp, Pseudomonas aeruginosa
ttgaaaatcatttacaaagcccgtgagagtcgccgcaataaccctttgcctgacggagatgacgacacgttggaactcctctccaacaattggaacgactacgggtacgaaaccactttcatgacggcctgcaggatcggtggcgagaggatacagctgggtgcaataaagattctttttgagaagcctatctcccggcgctatttgaaagatctcttgcaaaatggatgggatgggacatttccaatcccaaacgagtcatatatctctacacctggcgaaattactttctacgagcagcttgtaggaaccctttcgcctaaggaggccgtcaaggcggctaaagctttgcgagatgcgagttacttaattcatgtcaaggatgatcccggcgcgcaagaaatgatacagggagcgggattcaaagactctttgcagcgcgaacgcggagccatcgatgcgttcaataatggatggaaagtcctggatcaaaagtccttggcggctcgcgacattgattttagctttaaagatatactgggtgagcggtctagcctaaaatttaaatttggcacagccgaaaccttacttccaagggatataaacgtattgattggtgcaaatggcaccggaaaatctcaacttctccaccagatggtgaaggcatggcttgcagatcctaggcaagttcgttctggggatttctctgtcccacctgatatcagtcgattgatcgtggtttcttacagcccctttgagcaatttccagttgatatggatgattcaaagctcaacgataaggacgcttataagtattttgggttgcgaggggtttcggagtcttcatctccaaaaaggaagcgagttggcctttcaagggatatccctcgtcaagacacagttgcttctctgatctcctgcgtcttggatgaccaacgctttcgcaatattcaaggatgggggcgcaagattgctaccgctgagcgtgtgctgcgagcagcaattaaatttgacgctatcgttttgaagttaaaaagcaacgtaaacctcaaagatcttttcgacgaccaagatgagcttgatgcagctgtcagtgttataagacagggagggaaagaggggagttttatcactatcagcccttccaatcttcgccacattgacgccaagacattggagaaatatgtcaaccctaagcaaggtgtgttgtttttgtctgatggcgctattcagcagttgagctcagggcaaaggctctttacctaccttgttgtgaatattcttggggcaattaaacgaaacacccttattctgatcgacgagccggagctttttctgcacccttcgcttgagatacaacttgtagatatgctcaagcagattcttaaaagtttcaactctcgagcggtactagccacgcattctgtctcgactgtgagggagatacctgccgattgtgttcacgtccttgaacgaacggatgatgccttgattatcaagcaacctcccttccagaccttcggaggagatttccagcgcatagcctcgtacgtatttggggacagagcggtgtccaagcctttcgagcgctggattgaggagcagttggagggcatgtccgctaaagagctgatcgagtgccttggcggtgatgtaaacgaagagttgataattcaaatcttggcgatggggcgcgaccaatggtga

SEQ ID NO: 362822 - DNA, 2754 bp, Pseudomonas aeruginosa
atggtttcgattcaggtgggtggcgaggacaagaccgcgaagattagcgactggtcgatttactggagcgacaagtacgaagccctgcaactgacctgttactacccctccaagaaagcttacacgcgcccgctcagcgactgccgcgtttctcctacccgtgagttgggtgaaatgctgctgactaagcccggcagtacgattgtcaagcccattgccaaagctacgatctacggcgagcgatatgccgttgtgcactatccagacaccgacaaaccctatgtctacaagatggatggcgttggctttgccgctccaacggcgctgaagaattcgccggtctttcactatctctcagccgtagcgaatgctcggcaggatcacgccgagtcgaagactgaccgtgagatcgccgccaatgtcgtgcgccaattggaaaaactgcctgccagtgccgacactgccttgcaggcctattgcacggggcgcaacggcacactgacgccgggcctggggctgatctatccgttcggcctgaacgagagtcagctcgcggccgtcgagcaagccttccgcgcccaagtcagcgtgatcgaaggcccacctgggaccggcaagacccagactatcctcaacatcctcgccaatatcctgctgcgcggtcagacggttgcggtactgtccaacaacaatgcggcagtggaaaacgtctacgagaagctggagaagtgcggcctgggccacctgatcgccaagctcggcaaccaggacaaccgcaaggacttcttcgctgacctgccgccttggccagcgagcgagcccgagcccgcaccgacgctggacgagattcaagccttgctggtccgcttgaagcagcacttgcacgaccacaatcgcgcggcgcaactgcaggtcgaactcgatgagctaactatcgagcgacgccatctggaacagtggcaggcagaccgcggcatacaggctgccgactcgctggataagtacaaactgtcgccgcgcaagacaacagacctgatggcctacctggctcatctcggtgagcagcgcatccgtttcaaggatcgcgtcgagatgctgttcaacttcaggattttccgcacaaagccatttgctcagggcgatgctcgcctgtccgtctttcatgccctgcagatgcactactacgacaaggcgttgcaagacacggaagcagagctgcaggtgtgccgcgaatcgctggcacgcggaaatttcacggccttgctggaggaattgaaaacggcatcgatgcgtcatctgaagcagcaattacaacgccagacgcctccgtcggatagcttcgatgccaacacgtaccgtcaacagttcgatgccttcgtacagcgcttcccgatcctgggcagcggtacgcattccatcatcaattcgatcgctccgggggcaatcctcgactacgtgatcatcgacgaagcctcgttgcaggacatcgtaccgggcattctagcgctgggctgcgcgaggaatctgatcgtcgtcggtgacagccgacagttggcgcatatccccgtgggattgggtctgcaggcgcctgctgaggcttacgattgtgagcgctacagcctgctcgattcgtgcatcggagtgttcaaggaggctcttcccagaaccctgctgaaagagcattaccgctgccaccccagaatcattcagttctgcaaccagcagttctatcacaacgcactggtgccgatgaccgaagacaagggtgaagcgccattgcgcttggttgtgaccgccaagggcaatcacacccgcaagaacgtcaacctgcgcgagctggactctctgctcaagctactcgaggacgaaggagagccggttgggcttgatggcgacggccgcggtttcatcgcgccgttccgggcacaagtgaccctatccggcacgcacctgccaccggatttcgtcagggacactgtgcacaagtttcagggccgagagtgcgacgagatcgttttctccaccgtgttggacaagaagcgctacaaccaagagcgtaaacgcctggatttcgtcgatgatccacgcatgatcaacgtggcggtgtctcgggccaagcaccgcttcaccctggtgacgggcgacgaggtgttcaccgacaacaacggccacatcgcggccctgatgcgctatatcacctattacgcgcaggacgagcagatcgtgcgcgcccccgtggtctcggccttcgacttgctatatcgggagtttgacctgtccctggcgcgcttggacgcccgcctgcggcctggcgattcacgctacaaatccgagcagatcgtggcgcaactgctgcgcgaggcgctgtccgcgctggcgtgccagtcattgatgtaccacacgcagatcaagctggatcagatcgcatcgccaagtaaccaggattggacagaccgcgagcgggccttcatggcgcgcgccagttgcgattttgtaatttatttcagggtaggcaagatcccggtgggggtaatcgaggtcgatggcggctcccacgaccgacccgaccaaatggcgcgggacgccttaaagaatggcgtcctagcgaaaagtggcattcccattctgcgcctgcgcacggtcgagagccgtatcgaggaaagaatcggtgatttcatcgcccagtggatcagcccaatgccagacatacaagggcggaccgccccgtccgggtcaagccagcgccgacggtga

SEQ ID NO: 362823 - DNA, 4527 bp, Pseudomonas aeruginosa
atggaggacaagttggggcagaaattggatttcagccgtatccgcactcaccgcggcacgcagatgggaggctttgaagagctctgctgccaactggcagccctcgaagatcccgcagagggcagtagcttcatccggaaagggtctggtgcagaccagggcctggagtgctacaggtcttattcggatgggcatgaagttggctggcaagcaaagtacttcatcaatggcttcgagcgcggccaagtttctgacttaaatgactccctcgagcgagccctcgtagcgcatcctcagttgcgcacgtttgtggtctgtgtacctatcgacctgagggacaaccggtctggaaaaaagaaaagcgagacccagcgctttgagacgtggcgggaaaaaagtgtcgcagctgcagcaactgccgggcgagagctaagcatcgagctttggagcgcatcgagcattgaagaacgcctcggtcgcgacaacccgatgtactccggacgagcttgctactggttcgacgccgtccgtttcagctcaacatggtttcgagagaagttcgacattgtccgttccaaccttggcgagcgatatagcccagagagtcacgttgacctacccatccagcagcagctgcattcaatttctcgcgctcctgagatgctgttggcaccacacgactgggccgcaaaggttatgtataacttggacggtgcagccacaagcctgaaacgagagggcctacagcaggttgccgaccaagttcgtgaggcttgtgcaccgcttctgcagagtcttaccgcgccgcctgcattgcctaacgaattggttgctattgagtcctggacagctctgtgcgctaccgcactcgtcgctatcgttgatgcgttggacgagctggcaaagaaggagctagagaaggacatacacatcgcccgcaaggatctgtttgacctttactcggctgtacagcgtatcagccgcgaactggagtccgaagcctggaagatcatcaacaagcacgagctgctgatttcaggaccggcaggcatcgggaagtcgcacctactggccgactttggtgaacggcaactggagcgcaagcggccatttgttctcgtgctcacgaacagtctgacggaaggggacccgtggcctcagatccgaggcttgttggatttgtctctggtcacgaccgacgagctccttggggcgctagacgcagcagcagaagctgccggttgccgcgctgtgattgcggtcgacgcgctgaatgaaaggcacggcatcgcgctttgggaaacacgacttcaaggttttgtggcgctcgtacgaaagttcccgcgcgtcacacttgctctgaccgtacgctcgacctacatccacttcttcccgttggagaacctaacgcggactgagcatactggtttctcaggccagtccaacgctgcggctaaggcataccttgatcgtcttggcatcgctcggccgagctctccacacttggcgcgagaatttgagaacccactttttctacgaacctgctgcacttacctcgacgccgaaaatctcaagcaacttccaaagggcttggatggactcagcaccatcttcgatttttacctgagcgccgtcgcacgaaaggttgaactcgacctcagactcgttcatcagcgcaatattccgcgcagagcgctgaatgcattcctccaagcctgctccgagcagggcgataccggcgcgctcactgtagagtcaaccttcgagttgttagaagacatacatccgtctggcggtctcaccgagaaaagccttttctcggcttttctctcggagggcgtcctgactcaagacgtagaatggcacgagggatctcctcaagagattattcgattcacgtttgagcggttctccgatcacctgcgggccaagcatcttcttaaacaagtagatcgaagcgatatccagggttcgtttagtaaggaaccgctggcaggctacctttcgttgcgcgaatcctggaagtttgccggtctagtcgaagcccttgcggttcagattccggagcagttcggcctcgagctcttcgatgtgcttccagccaacgctttgaggaacgatacccatggcgaggcgtttaggacgtcattagcctggcgcgctccgcaggcctttacggggcggaccgcggagtgggtgaagaagctctgtgacagcacgggtgaatcgccgtacggcttactactactagtaagcaccgagcccagcaatccctacaacgcagattggctccacaatgaactctggccactggcaatgccgcaacgggacgccacatggtctgtcttcctggccgaagacgacttgagtgatggaggagcggtcgaatctctcatcgattgggcttggcaagtggacagtgatgaggtcgacaaggaacggagaaggcttgcggtgcttagcctgacgtggtgtctgtccacgagcaatcgcgctgtgcgcgaccgagcaaccaaggccttggccaacttgctgtccagtaatctgattgacggcgcggagctgattcgtaagttcgccgacgtcaacgacgcatacatcgcggaacgtctgctggcagcttgctacggcgccgcgatgcaaggaaaggacggagacggttgcaaggctcttgcctccgcaacgtgggcaagccacttcgcagaggggcgacagccgcctttgaacctgcttgcccgggacttcgcactcggcattcttctctacgcacagcacgtcgggcagcttccctcagagatcgacctcgatgcatgtgaagccaaactcacttcagcatggccacttgaggtcatcactgctgaggatctcgaacggtatcgtgggaagggatatggagactccatttgttcgtcgacggatcagcatggagactttggcaactacaccctcggtgcgtgggtaaacgggattgtcggtgtgccgcgtgctctggcgggaaggcgtactcgggaactcttcacggactgggagcaggtattcgatgagagggcagatttaaggcaacatgagctctatttcgagctactcagggcatccatagcctatcgccagagcaagtttaacgagtgggattggatcaaagaaaagggtaagagcacaggagcagaagcgggcaagaaggagaagcaactgctatgggactcattccaaaaggcgaatgaggctttcagggcttctctcgactccgggctgctcgcggattacacggattttgcggaagagcaccttctcgaagcgactcgaatggatagtgatgacagacctccgccggaggttgaccgcgagccattgaggcgatggatttgcgagcgtgcccacaatctcggttggagcgaggagctatttgataggttcgagcgtggcagcatcatctcccatgaccgcatgggcaatcacaggggcgagcgcatcgggaagaagtatcaatatatcgcgttgtccgaagtcatcacgcgcttagtcgacaaccttaccgtctgctcgtattgggacgaaggcctattgagggcctttgaatacgggcctaagggacgagacatgaagagagacctggatccgtctcttcttttaaaaggcagtcttgagtccggttggagttcgacaccggtcacttggtggactccggtatctccgcaactaccctgcggagataccgaggtactacttgcttggttgagctccgaagacggtttttgtaacgacatagatcaaatcgatttgtgcagtccagatggccaaaaatggcttactacttacggttttcgccattggaacgttcctggccaaaagcggcgcaatcacgcagacgcttggtcacgcattacctgtctggtcaccaagcagggctcaggtgcgcagctggcgaaagagcttcttaagagtcatcgtggcgatgtaagccgattcggggagtgcgagcgcttggagtgtttcttgggtgagcacgggtggcgcgaccccatagaggtaaaacttgaagccaaccctcgcgaaggcatcaatacaccctactgcggcatagtggccatgttgcatgcagaggggaacgacaatgacaactcgattgatgagacatttagcctaaatctacctacctccggcctgatgagcgcaatcggattgcgcctgtgtaacgggaaaacccccgagtacaccgatgcccagggagttctcagatggcaagacccatcctcgaaagagcgcggctccggcgctgcagttgtctcgcgtgattacttcctaagcatgctggcgaaggccggcctcgagccggtctgggttctcgctggagagaagaatgtatatccaggccagagcttgggtagttcccgcggcttcggtggctgcgttggtcacaccagcgtctacacggtggaggcaggagtaataaaggtcgcgggaacgatgactgaacgctacaaaccgagtgcggagcaactgcaagcgctgcgtgatgctgatttgtga

SEQ ID NO: 362824 - DNA, 1269 bp, Pseudomonas aeruginosa
atggttaccctcgctactcctccgtccactgtcgacggtatcaagcgcctggcaaaggcgatcaaacgcgaatttggtatcactcatcacaaagccctcgaagaggctgcccgcaaggcaggcttccagaacttcctgcacgccaaacgtgctattgccaaagcggcggctcaaagctatgccgcctatgtgacggtgtactggaatgacctcaggtctgaggttccatcctctggccgttacaccgtagaagttcacctcaagcgcccgctttccgagttgcttgctgatggcctccagattggcggcgcgtatttgagtaaattcaggcttgaagcgccagatcacatcgagatgcggactgatgcagccagcccggtcagtgcaatgcaatatttagatcaggccagtttcaccctgctcttcatgaattcaaccgggctggtgaaagttttccggaaggggaacattgaggaaatgaatggtctaggtagggtgccaaaagccgatcacatgaccgagtgggaggatccacaatccggcgattggctgctgctggatgagccttacctatcgcctgtgccggggttcagaaaggaatggttgcaggagcacggactgtatcaggtggcaccaagatggccggggctctactacccgggcatggctgacccatatctgatttcacctagtcaggagctagtcgcgagggtgcagactcaggtcgagggaattccagatagcgcctatcccatgggaatgccccaggaaatggcttacaactctaagtttattagcccagcacgccttgcctcaggaaagccacgtaggcagcgcataatgccatctataggtttcaggaatggagcggtagcgtacggaggggcacctggggttcgttccaagtggcgcccggcacggggcatgtcactggagatgcacacaactattgggcccatcctgcataagctctgcaacagttctacgcgcaccgctggcgtaactgccaggatttacgcgagattgaaccaggtgcgatcgcgccttgaggactgggctttcatggagcatcccggcggtattacggcggaggtcgacgccaagctctactacggaccagcagttgatggatacaccactccgcaagacacgctcaaggccattgagactgtccgagacctgcttcttagaggttatgaggagtgcaagccaagagctcagatgctggctaagattgagtccgctgccgcggaccttcggaaaaggtaa

SEQ ID NO: 362825 - DNA, 384 bp, Pseudomonas aeruginosa
gtgacggacgcacctacccttcccactcggctggtcgacgtatcccagctcgcagaagcactcgagcattttgctgacgacagaaactgggctcagttccactctcccaaaaacctggcgatggccctgagtggggaggtgggcgaactcactgagatcttccagtggatgagcgaagacgcctcaaaagaggccgcccgaaatccagaaacagctcagtccgtaaaggacgagctggctgacgtactgatgtacctggtgcgattggcatcagttctgggcgtcgaccttaatgctgctgcccagcaaaagctgcagatcaacaacgagaagtacccggtcgagaaggccaggaacacaagcaagaagtacaaccagatctga

SEQ ID NO: 362826 - DNA, 1878 bp, Pseudomonas aeruginosa
ttgatcgtttacgaagcgaccaaaaagcaatttctccacgatagcgacaatgacgatatcgaggaggttatcctccagcgcttcacagctgccactggcaaaagggtcgcaacatcagagatcaactcttggaaaggctccctaggctacatggccaaggtgctgcgagacgaagaggtaccggagaacactggactagcaatcgaactgcacatacctcagacctccaagcgcattgacatcacccttaccgggcatgatgaggcgggggcgaagcatgcggtgcttgtagagttgaagcagtgggacaagatcattgccaccagcaaagacgctatcgtgaaaaccgcgctgggtaaggggctgcgcgaggtggtgcatccctcctatcaagcgtggtcctacgcatccttgctggaaggcttcaacgaagctgtttatgaggaaagcatttccgtccgcccctgtgcctacctgcacaactatgcacgggatggcgtgatcgactcatctcactaccaggggtacatggaaaaagctcccctcttcctcaaaggcaaggaggagttagagcggctgcgagctttcatcaagaagcacatcaaatttggcgactccaaggaagtgctctacgagctggcaaacggaagaatccgcccatccaaggcactggctgactcgctgaaagggcttctcgctgcccagcctgagttcgtgctgatcgatgaccagaaagagatctacgaatctgcaatcgcagccgccaactcggcatccgcagagcatcccaaagtactcatcatcgaaggtggccctggtaccggaaaaacggtattagccatcaatctactggttcgcctcacatcgctcggcctagtaggcaagtacgtttccaagaacgctgccccccgtaaggtgtatgagtcgaagctggttggctcaatcactcgcagtcgattctctaacatgttcacaggctccggcgcttttattgataccgagccgaatacgtttgacatgcttattgtcgacgaagcccatcgcctgaatgagaagagtggactctacggcaacctaggtgaaaaccagatcaaggagctgatcgtttcttccaagtgcgcaatcttcttcattgatgaagaccaacgcgtcacactgaacgatatcggcagcaagcaatctatccggcagttcgcaaagatcaaaggagcctcggttgaggaatacaaccttgcttcgcaatttcgctgcagcggctcagacggctacctcgcgtggctcgatgacgtcctagatatccgtcctactgccaacaagcagcttgacgccagcgaatacgagttcaaggtgttcgacacgcccgaagctctgcatgccgcagtagaagaaaagaacaacggcaacaaggcccgcgtcgtagcaggctattgctggccctggcgtagcaagaaagacccgacagcgcatgacatcatcatcggtgagagctaccgacgccagtggaacctcgatcaggatggcagtctctggatcattgctgagaactcgatcgagcaagtgggctgcattcatacctgccaaggactggaagtcgattacatcggcgtaatcatcggtcccgacctaatcgtcagaaacggccaagtcatcactgcaccagaccagagggataagcatgacaagtcgattcgtggctataagaaactgatgaaggagtatccggatctggcgaaacaggaaacggatctgatcatcaaaaacacctaccgcacactcatgacgcgaggcatgaaagggtgctatgtcttctgcgcggatagggaaacagcagagtatttacgagagcgcctggcaaaccctgttgtagacgctatgtga

SEQ ID NO: 362827 - DNA, 210 bp, Pseudomonas aeruginosa
atgaaaccgctacgggtctttgctgccgtgtttctgttcgccggcatcctcgcgggctgcgtggcccttctgctgctggtgatcctgatggtccgttttccacccctgctgctcgccgtgctgctggcgtgctggatgttctgccgcattgagaaggcgttggcacccgaaacagcagcggcagagtccgccactgcaccaccgaaataa

SEQ ID NO: 362828 - DNA, 306 bp, Pseudomonas aeruginosa
atgaacagacagtgtctgatctgcgactcaagtgccgtactgacgtgggacgccgccaaagggctgaccctgctgatcgggttgttcaacggcgcaatcaagggcgctcagcgcccacatgaggggagcggtcacgccgcgcttctcaacggactggcggcagtcactcccgcttacccggcggcgcggaaggcagcagaggatgttgtgcgatttcacttcgcccgcttcgactgcctgtgcttgcgttgcggtgcagggttcgatgagagctccttggttacggaaggtctcagtcccggctga

SEQ ID NO: 362829 - DNA, 570 bp, Pseudomonas aeruginosa
atgcccggcatccaggatgtagcaaccgaattcacagctttcactgcagccttacgcactgaaagacaggagctcatcgactccattgcgatccttaataacggcttcgaaggttggctgaagctggagttctatttctggttgatcaagaacagcaagctgcaggcagcattggacgtgggcatggaatacaaggttgccttggaccagcgctatggtgcgatggatcgacagactaaacagtgcgacctgtgggtacgagatcacctggaagcgggttaccactacatcgagctgaaagcgcccttcgccaacaccaaccaaggcaaagtcatgcaaagcgccgcagctgacttttggtacatgtcccgtctcaaggaaagcagcgagcgcgtcgtctcaggcagcgcgatcatccttggcgttggctttgaatcggaaggctgggaccgacatatcggcaatctcgtcgattactcgggcatgcctgtcgacagcgtctcgatcacgtccggatttctggatgatcgcgcccatgtccgctgggcggccctaaccacctggtactga

SEQ ID NO: 362830 - DNA, 975 bp, Pseudomonas aeruginosa
atgaccaaccgcaagacctatacccacctctcccaatctgatactgccctgcggatcgagtcactcgtccaggctatcgcgcgtcacgacactccagccttccgattcatccaggcacggtctgggtatgagcgaatcaaggtgaccaggctttcccggtatttcgatcacatccagcagatggtggacctgttcgatgaccgtgtggactacagctacagtgagcacctgcaagtgttcaaggcggcctgccaggatatcggcctggagctccatcctgatggccctgtctgtctgaatgaagaagggacgaagtggctagaccatttccgcagcatgaacgtcctcaccgcacggatccgtcagttgactggtgagcagtggtatcggcgtagggctagggatcgtcgtgatctggctgatcagcaggagatccgagtctgtgactacgcggaagcactctgcgagctgtactcgcgcatcaccattgtcagagtcgactttcactaccgacctgaggctcaagccaggctacgtgttgaacacgttttcgatgacttggatcggctgattgctgagcataggcgcaacccgattttcgaccacctcatcggccacatctgcgcggtggagcaagggaatcgggacgacggcaggggctaccacatccacgctgcctacttcttcaatggcaacgaggtacagaggtacctctacaaggccacccagctcgatgagctatgggaagacattacacgtggccagggctgcatatacagctgcaaccacgacaaggaaaagtacaaggataagtgtggtatcggccacatcctgcgaagcgatcgcgcgattcggccccatgtccgcgaggcggtgaagtatctcgtcaaagattctcagcacctgcgtttgagacccgagggggctcggtgcctgcggatgggacaactgaaacgagctcgccgcgggggctag

SEQ ID NO: 362831 - DNA, 1449 bp, Pseudomonas aeruginosa
atgctgctgaccatcgcagattccggtgaacgcaagaccgtcacccagaaatatttcttcgaggcgatcagcgcgctgaatgatgctgcgtatcgagcccacgaagatgccttggtggactaccggatccaacacgagctatggaagacgcataagcggcatgtggatcgcatgtacagcaaatgcgcagccaaagaagacgaagcagccacacaggcggccttggaagtagtggctaaacatgtcagagccgaaccgcaacccacccgctcggggaaatttctctacgaggacaccaccccgccagccctagtacagatgctttacgaaaacacgcccaacggctgtctgctgactagcgaagccaacagtattttcagcggaaaagccctgggggaactcgacaagctcaatacgctctgggatggcagcagcgtgatcgtcgaccgcatttcgagggaaggttttgttctccaaaacgcccgcctgactctgtcattaatggcacagccgagcgtgatcagccgcttcatgggcaagcgcggcgaagaggctcgtggcacaggctttctcgcccgctttctggtagccaaaccccgtccaatggccggtcaacgcagccaacccaatctatctgcgttgcaacgaaaacaggctttcaatgcccgcatccgtgagcgcctgggctccctcacttcccctgatcgtcaagtagtgcacttctcagaggcggccgcgaatctttggtaccagtacagtcggcaactagagaatcagatgcaagaaaatggcctataccactacctaaaagatcacgcatccaagttggtggaaaacgccagccgcctggcggctatcctgcatgtgttcgagcgctcctcagaaaccgacatcgagatcgactctctcaccttaggattctgctggaagttcgcccagaactgttcaaggcacttcatcgaacatctagctaacgagccgcagatcgtgacggatgcgaatcacctggcgcactacctcctgcaaatcgcttacaaaacaggttcttccggcgaccgcgacgagaacaagcgcggatacaatccaccactcggcacacgccagtctgatacagagctacctgatcatctgaggaccggggcccacaccattttctcgctgacccaactaaagcagctcggcccccacagcctaagaggacgagccaatagcgagcgcttggaggcagccattggactactgaccaaactggggcacatcaagaaggaaggcagccgctatcgattccaagagtcgatcctactccaagagggagagcccgaactgaagaacggcgaaatcatcaaaatcagggagcttccctcgttcagtgaacaagtgcattggaagcctggagtaacaaggggatatggacccaaacctggatacttcatcaaaaccagcggttag

SEQ ID NO: 362832 - DNA, 747 bp, Pseudomonas aeruginosa
atgaaccgatcagagcgccgtaggtatgacaaagagttttccaagatcctgaagaaggatggagacaattgtggagtgtgccgcaagccgcttcagcacaactctcgtaccttcggaggtgttctgcccggtgggcaagtggtcctgaccagtgagtgctgctatcgccagcttgaagtcgtcatggggtccggggttttcatttcccaaaacgctgatgccgtcagggatgtgctcaaccaggcgaaagggaaagctggtgggcagccggcctctgacccctttgaggcctcgaagcgccttcaatcggggattgaaaacctggataagctcgttgggcaagctaaggagcgggctggtatttcagggcctattcaaaatgtctcgttggtagacacaccatggaagacagatgatgcgcaatggttcgagagccaccctggaagatctcacaggatgcgggtcgcatatcctggtgagttgcaaaagctttcggctgacctgaaaagcacagtcattcctggcggccatcagtgggaaattctggtacggcaaatagaacaaggccggcgtgttcggacaattttttgccgcaatatcggaatagaaatcccggatgtggaggagatcatccacgcactcttcgaccatgtatcaaatcctaaagctgctggagtcgtaactgttgaagagattgccgctctagctcagcgctattacatatcaaaagactccactccaaactga

SEQ ID NO: 362833 - DNA, 1707 bp, Pseudomonas aeruginosa
atgagcactatcctgctggtcgacgaccagccggtgctccgcgacggagtgcgagccttggtcagccgcgccggacatcaggtgatcggcgaggcggacaacggccaagatgcgctggcgttatgccgcgagcgcagcccggaggtggtcatcatcgagctggcgattccgcgcctgggtggcctggatgtccttcgccgcctccgtgccgcgagcgaaggcgtgcgtctgctggtgttcagcgcacaagagcgcgaggtgtatgccaagcgcgccttgcaggccggggccgacgctttcgtgggcaaggacgaggcggcggcggagcttgagaaggcgttggctgccgtgctacgcgggcgcagctactttccgcgggcagccaccctgctgcccgccaccgctgacgtcgatggcaagagcgagctggagcgtctttccggccgcgagctgactgtgctgcagatgctcggcctgggcctctccaacaaggaaatctccgatcagttgagcctgagctacaagaccgtcagcacctacaagatgcgcctccaccagaagctcaatgtcagcagtgatgtgcagttgctgcaggtggcgcaaaagctcgggctgctggcctcggaggcctccaccctggcgctggccgatccgcagctcgaacacgagctggagctgttgcgcgcgttgctcgatgcctcgccccatcccatgttcgtccgcgacctcgacggtcgactggtgctgtgcaacctgccgtttcttcaccgcgtgggcaggactttcgacgaggtccgcggcgggcgcttcgaggatgcccactggctgtcaccgcagttgcgccaacgcacggcgcagcgctttcacgaagcggtgtttcgcgaagagccgattgccgaggaaatatcgctggacgattcgaccctggtcggcacctacttcgcgtggtgcgtgccccagcgctcccccgacggtcggatggtggccatggtcggtggcatgctgtccctcgatgagcgcgatgagtacttggcggagctgcgcagcgggctctatgaaagcaactatcgcagccatctgaaaaccaacctgctggcaaaaatcgtcgcggagttccgccagcagcttgccgtactcgataccggtctgctgcgattggacagcggcgagattaacgagctggggcaagcgcgcagcatcctgcagtcgatgctggcgagcctgagtcaagtcgataccctgcttgagctgaatcaccacgtggccgaacggatcagtgaagcacacgagctgagcgcactcaccgacgttattctgcaacccctggtgggtgagttgcaggcggccggctacacccttgacctcgggccggggttgctcagtctcaagaaggtctggatcgatgccgactactaccgccaattgctggaggcgctgctcgaggcggtgccgcgggacccggcggaacccaccatacacctgcatctgagcaactggcgttatctgaagggcttgctgcgcctgcgtatcgaggtatcgccctggcagtgcctggcacggctggtggatacggcgcaaccgtcgagctgggcgagggcgcgggtgcaaagaatggcactgatgttccatgccgagctgttgcagctggaaggtgaccggggcaagggactactgcgactggagttggacctgcccctggtcgtgtga

SEQ ID NO: 362834 - DNA, 4545 bp, Pseudomonas aeruginosa
atgaaagccaccgagaccttcctctccggtttcagtcaatcacgtctggcacaggccatcagcctgatactggccggaaccttcggcctgcgcgtgatccgcgccgaagccgaggacaatgtcgcggaaaccgacaccgaggatcttaaccagccctccgaggccggagtactcttcgacccgccgcatcccgactatttgaacatcgcgctgcaggccgcccaagaggcgccacgggccttctcgggagccgggctgctcggcgcgccgccgcccatcacggtgaccctgaccggcggcgccggcatagtcgcaggcgaccacagcgacaccaccgtgcaactggctgccgccgctagcagcgggatcagcaccagcggcagcggcaacgtcagcttcagcaacgggcgcatcgacagcagcgccaccaccgccgcgaccgccagaggccagagcggcgtcttggtagccagcgacgacacgctgcggatgagcgacagcagcatcgtcatcgacccgaagaccgccgccggcgcccccatcaccgccaacgagctgaccggagtgaagatctccgccaacggcgaagcccgcctgaccaatactcatgtgctggtcggcggcggcgccaagggcaacgacaaccgcggaatccgggtcgagcagggccagctggaaatgtccggcggctcggtcaccacccagtcctggggcgcgataggcgtgctggtggaaaaaggcggtgcggcagtcctccgtgatggcgtcagcgtcagtaccagcggcgcacgccagaccacttcgggcggtgcccacgcattgcagatcagcggaaacgggagttcgctgcagggcgatagcattagcgtttccaccagcggaggttcggcttacggcgtgcgcgcggacgatggcggcgaagtcaccctatcggacagcaccgtgagcaccaccggtggctacggccatggcctgctggtcgacggcgccggcactcgggccagtctggccggagtcgacatttccaccaccggcaaaggctcgacaggcgtctgggcgcgcggtggcgcggacgtcaacatcgaagccggctcgcggatcgccactagcggcgcagctgtgtcggccgccgctccgctggacggcgagaagcctctgagcctgagccacggcctgctggctagcggcgctggcacccgcatagcggccgacgatgtgcgcctggagatcgccgcgggcagcgccagtgccgcccgcgcggaagacggcgcgcggattaccctcgacaacgcggagatcactctcagcggcagtgccaccagcacgaccaccacggcagcgttgcatgccatcggcggcggccacatcgatgtcgctgcaagccatattctcagcaccgggaccaacgtcggcggtgcccgtgccgaaggtgctggcagtcgcgtcagcctgagcgaaggcagcctctcggtgcatggcgctggtagcgtggccaacccagcggccggggcacgtgccatgggcggcggctccgtgaacctcaccgacatcgcgttggacgtgcacggtctgacgtacggccatggtgtttccatcgaaggtgccggttccatcggcagcgtgcagagctccagcatcgccgtggacggtaaccgcgccattggcgtgaacatcagcggcggcggccgcgccatcctcgaccacagcagcgtctcggtcgaagcccagcccggcgccgccggcccgtggtcccccggcatactggtggaaggcgccggctcggcattgcagatgacggccagcgacgtaagcaccacgccgaagaccagctacggggtgcaggtgcgcgaaggtgctgacgctgtgatcgaacacggcagtgtaaccacctccggcaactattccgccgcactggccgctggcagttcctccaccatcgcgcctggctcgacattgactgtcaacgacgtgaccgtcacaacccacggcaacgataacgccatgggcatcgtcgccgacctgggcgccacagtgaccgtgcagggcggctcggtcaccaccaccggcaatggctcgccaacccccggtaacctcacctttccccatggcctggcggcgcgcaatcccggcgccctgctggtggccgatggtaccagtgtgcgcacgagcggctcccaagcctacggcgccgccgtggacgatggtggcagcatgcgcctggacaacctcagcgtgaaaaccgaaggacaatactccgtcggcctctatgccggcattggctcggccaaacctggcgcagtgaacctgacggcggaccacgtcactgtggaaaccctcggtgacgacgccagcggcgtgttggtcagccgccagtacaaggatgaaaccgcgactattgacctgagcaacaccagcgtggccacccacggcactcagtcccatggcctgcgtgccgagtccggtgctgagctgagcgcgctgaacagcaccgtcaccaccagcggcgaccaggcgcttggcgtgctggctagcaatacagcgagcgcccggctggacaacgtcagcgtcggcgccacaggtgcgctggggcatggcgtcgtggccaagaacgccggcagcgtcgatgccgaccgcctggtggtcagtgtcaccggcgatcagtccgctgctgtgtacgtccagggcaccgctgcacaaccggggacggttagcatcgagcacggctcgctgaccaaccgcgacggcgcaaccatcgccaccgccggcgccgccgacattgccctcagtcacagcctggtcggcggcagtggccaatggctgaacgtcgacagctcgctggccagcgacggcagcagcattccggatatgggcaccgggcaatggcagggggtcggcaagagcgaagacgccgtcggcaatgcccgaatcgcgctgtccacctccctggtcagtggctcggcgaaaactgccgcgggcagctactcggacgtaacccttcagaacagcagcctgtggcagctgactggcgactccaacctgagcaacctcgccaacagcgccagcctgatcgacttcagcgccgacggaggttacaagaaactcaccaccaatgattaccacggagccaacggcaccctggccctgaacacctacctgtataaggacgactcgccgtccgatcagttggtgatcgatggtggcaaggccgacggcgagagcaacctgctgatcaagaacgccggcggccccggcgccctgacccaaggcaacggcatcaaggtcgtggacgcggtcaacggcggcacgacgcagacggacgccttccgtctgctcaacagggtcaaggccggcccttacgaatacaccctgcaccgcgccagcgtggacgacagcaatgcccaagcctggtacctgcgctcgaaccaggacgcggtgccggtggaaccgatcgagccggtggaccccagcgacccggtagcgccggtcgatccagccaaccccgtgcctccggtcgtgccggccattcctgagcagccggcgcctgcgcccaggcccaactatcgcgcagaaacctcgctgtacagcgcccttccggccatggcgctgagctacagccgcgcactggtcgacaccctacacgaacgggtcggcgaagagcggcgcaatgtcaacgagccgctgccgagcgaggaggtggacagctatggtccgtcgctgggttggggccggctgatccaccagaagggctccgacaaactgggcaacggtgcggactacgactaccgcatccaggccttccaggttggcgcggacctctaccgaaacgaggacaccgatggcagcacggaccaggcagggctatcgctgcaggccggtcgcatcaagggcagcgtcgatcacaccaacgggaaggatgccggcgacgacacacttcgctcctacggcatcggcggctactggacgcacttcggtcctaagggctggtacctggacggtgttgttcagttcaaccgcttcgacctcaaggcccgcgccaatgatgccggatcgttgaagacccgcggccacggcgtcaccgcgtcgctggaggccggctatccgttcaagctcgactcggacaagaccctacacgtcgagccgcaggtccaactgattgtcagcaagttgaagctcgaagacagtcacgacgatgccgccgacgtgcgcttcgaggatgttgactcgctcaccggccgcctcggcgtgcgtgtcgacaaggactggttccgcgaggacgacaagggcaagcagcagcgcaccagcgtctgggtgcgccccagcctatggcacgagttcaagggcaaggccaagaccgagttctcctcggcggatggctacatccccttcggcaccgacatgaacggcagctggggcgaactcaatctgggtgtggactatcagcttaacgaccgtaccagcgtcactgggtccctggggtaccagcgcgccatggatgacgacggccgtagctacgagggcattcttggcatcaaggttaagttctga

SEQ ID NO: 362835 - DNA, 249 bp, Pseudomonas aeruginosa
atgagtacccgccccctggatcagatcgccgacgacgcggtggaagctgtgtgctatggccgggagcacgctcaatggctcgcagccctcgccatcgctacccggcttgacctgaagtacaacgagggccgcgcggcgatggagctggcagggctggcgcattacctgagctacgactgccacaactacctcgacgccgaggccgagcgcctgcgcaaagagatcaacggaacggagacgatgcaatga

SEQ ID NO: 362836 - DNA, 333 bp, Pseudomonas aeruginosa
atgagcattcaatggcgcgtcgtcgaaggccccgcagacctgatgcgttctgcggggtacgccctgggcgtgatcagccaattgctgcacgagaacgccgttcgcagaaccttggagggcgacatggagttcctaaacgactacacgtctggcggtctgctcgaagctgtcggcctgatcgcacggcatctggagttcgagggcgagggcctgggcgagatggtggagcgagaaagggagaaagagaaaacccttgccgagcgggcactcgacaagggcgatgacttgggaaggaaaagtcggagccagtgtggcagagccggaaacgactga

SEQ ID NO: 362837 - DNA, 279 bp, Pseudomonas aeruginosa
gtgctggctgccgggctggcgcggctgtatgccgatatcgagatgctgcaacagcagattgaccgggacggcatggtgatcgacggcaaagccaatccagcctgcgatctactggacaagatgacccgccgtgccctggcgatggggcggcaattgatggttgccaccattgccacggtgggcaaggcgcaggatatacacaagggggccgccctggagcgtagtgcgcgccagcagatcgatgatgacctgatccccaccttggagaccttgcagtga

SEQ ID NO: 362838 - DNA, 282 bp, Pseudomonas aeruginosa
atgagcgccgtcaccctggatgacgtgaagatccacctgcgcctcgaccatgacgatgaggacagctatctgaccggactggtaaaagccgcagaggggcatgtcagcgtgtttctcggtgacgacctgcccgaccccatgccttccccagtaaaggccgcagtgctgcttctggtgggcgatctgtacgagaatcgcgagcggatgaccgacagagacctgagcgaggtacccacctatgccatgctgctggctccataccgatcgttgagggtgctgtga

SEQ ID NO: 362839 - DNA, 159 bp, Pseudomonas aeruginosa
atgcataccggccagttggagggcattaacaaccatatcaaggtgatcaagcgcacgacctatggctaccgggtcagtgagttcttctttatgaagatcaaggccgcactcctagaatacgtgaagaaccaaaaggagaccataaatggttcgggctag

SEQ ID NO: 362840 - DNA, 216 bp, Pseudomonas aeruginosa
ttgccggcctccagtgaagcggtggtccgctatctggcggattatgccgataccctggccagctcgaccttgcgcgcgaacctcgctgcgctggccaaatggcatctcagccatagctacgtagatccgaccaaggccccgcacgtgcgcgaagtgctccgcggcatccaggccctgcacccgtggctcgagcggcaggcgcagccgctgcattaa

SEQ ID NO: 362841 - DNA, 888 bp, Pseudomonas aeruginosa
gtgacagattaccctcatgtggcccctgggtttcagcaccttcttggtttgtcagatgctgagcgccttgagttcctagagcagccgctgtggattgattatccaatcgccgacaaagtgatcacgtatctgcattcggtgcttaacaagccccgccggccgaggatgcccaatgtgatgcttgtgggcgagtcgaataatgggaaaaccacactgatcaatcgcttcatcaagatctgcgcccaggcctacgttaacgaagaagctgaaagcgtcattccagtgatcgcgatagagctctccaaaactgatgtacgccagctgtacgtaaaaattcttgagtcgttctgggctccattcaacgtcaccgcaccgatcgaaaagcttcggaatcaggccgagcacatgttccgctcctgcaagacccggatgctgatcattgacgaaatccaggtgctgcgaaaaggatctcccattaaggtgagggaggtgatggatgagattaagagcctggccaatgtgctccaaatttcggtggttggcgtcggggttcctcaggctgttcagctactgaatgctgacgcgcagtacgccagtcgctttgaggttttgacgcttcctccgtggtcgctgcgaggtgatttccagtcgttcttgaagtcctatgagcgggcgttgccgttgaagaaggcatctcgcctgtactcacccgagctgactccggtgatccactctataaccggtggaaacacgggctatgttgagtatctattggtcaactgtgcgaaggacgccatagtctcaggctccgaaatgatcgaccgacgcatgctggaaaagcaccaatggaagaagtcggagtctggcatcagggaggtcacgctttag

SEQ ID NO: 362842 - DNA, 1929 bp, Pseudomonas aeruginosa
atgacgaacgaggggcagccaaatgggatcgaggtgaatcggtctttggtttcgattgaagtcggttcgatggtggtgcatcagcgcgaggtctatcgcatcaaccaagtgctggattttcattcggttgtcgggctcaacgtcgaaagcggaagagccaagctcctgcgagttgcagagctcacgacagcaccaaaggagaaggtcaagggactctatgttgactttgacttggaacagatcggacaggacgattgggcaatggcccaaaaacgcttcgccatcatcagcccactgctaaatgggaacgcccaggttaggggggttgtggagaaacgggcccgggacgcaggcgttgcaaccgctacggtttatcgctggctaaatcgctacaaagagtttggggaagtcgctgcactgatccctttcaagaggggctgggcgaaaggaaagagtcgaatcagtgaggaggctgacaaggtgatcactgaggtgatcaacgattatttcctgactgatgagcgctgcacaaaaaaggcggcagtagatgaagtgaaacggcgctgcaaggaccgcaagatcaaagcgcctaatgacaccacggtcagagcaaggctgaagggactttccagtaaggttgtgcttcaccggcggggaatgaaagagctcgcggataatcgccacacccctcgccccgggacctacgaggctgactacccactgcacgtcgttcagatcgatcacacgccagtcaacgtgatgctcgtggacgacgtttaccgccgatccattggtcggccttgggtaactctggctatcgatatctactcccggatggttaccgggtactacttgtcgcttgatgctccctcagcagtttcggtagccatgtgcctcgtccactccatgctgccgaaggaaaattggctaatgcttcatggtgtggatgggagctggcctgtgtggggactaccgatcaagttacacagcgacaacggcccggacttcaaggctctcaacctcatccgagcctgcgcgaaccacaacattcagcgcgaatttcgcccagtcaagaagccgcattggggcggtcacattgaacggttgatgggcaccttctccgtgaccgcgaaccaggagcgaggaacaaccttcagcaaccctgccgatagaggagagtacgactcggaaggcagggccgtttacacctttgaggagtatgagacccgcctcgtcaggaacatcctcatgtacaacaacaagtatcacgaaggcatttatatggcccccatacgcaaatggaacaatgcgtttttggggactagcgagtcagggcctctaatgagtattccgccgcgccctgccgatccatgggcattccagctcgattttatgccttcagaacggcgcgttatccataactacggcgtggagatggacgcgatgtactacggggacgcgctgcgcccttgggtcggtgcggtggatagctcaacagggaaggctagaaaattccttttccgacgggacccacgagatgtcagtcggatctggttctacgacgattcgatcaatcagtacttcgaaatcccaatcgtcaaaaaggtatttgctggcgcatcagtggctgaatacgtgaaggcgaagcgtcgagcgatcaaggaaggccgtgatgctgaggatgtggagactatcgaacggctcatgcgagaaaacagggagcaggaggaagcatctgccctgaaaaccaagagcgcgcgcaggagccagcaaaagcgagcgatcaattccaagagtgttacgcctgcaacgcctgttgcgttgcgtccatcgaccaaagccacgagggcgccatcgactgtcgcgctccctacagagccgcagttgctggatgaagatgacgtcgaagagtttggaggtgtgtggtga

SEQ ID NO: 362843 - DNA, 390 bp, Pseudomonas aeruginosa
atgcttgttgaggtgaagccggaggaggattggcgagaaaactggcgcaactggcttcccaagtggaaggcggcctggcgctacgcccaagagcgaggatggagtttccgcatctttgatgagtcgcgaatccgcgatcaggtcctagaaaacatcgttttccttgagcgccacgtacacatggtcttcccacctgaggagaccacgctcgttcttagaacgatctccgaaatgggtgaggtcccgctccattacctgctcgcgctgcatttctcgggttttgagcgcgaaggaacttcgcacctctggcacctactcgccacgcgcaagatcgagtgcgacatctgtcgacctctagatgagttcactctgctttggagcccgacatga

SEQ ID NO: 362844 - DNA, 666 bp, Pseudomonas aeruginosa
atgttcgactacaccttccactggcgctcggcgttcaacgccctgccggagatgctcgccggcagcctggtgacgctccaggtcaccgcgctgtcgatgctcttcggcatcctcatcgccctgctcctggccttcgcccggctcggcggcaaccgcccgctgcgcgccgccgccggagcctggatctccatcgcgcggaataccccggcgctattccagatctacatcctctacttcggcctgggctccttcggcctgcacgtcagttcctggttcgccctgctcgccggggtcaccttcaacaacgccggctacctcgccgagaccttccgcggcggcctccaggcggtgcccgagacccagttgcgggcggcccgctcgctgggcatgagcgcgccgcaggcctatcgcctggtggtgatcccgcagctgctgcgggtggtgttctacccgctgaccaaccagttggtctgggccatgctgatgacctccctcggcgtggtggtgggcctgaccgacgacctcaccggcgtcacccaggcgctcaacgtcaagaccttccgcaccttcgaatacttcgccctggccgccgtcctctacttcgccatggccaagttgctggtgctggccgcccgcctgctgggctggcgcctgttccgttactga

SEQ ID NO: 362845 - DNA, 321 bp, Pseudomonas aeruginosa
atgaacgcttccgtgcaacgtattccgcgtattgaacctgaaggctctaacttcaccgccttgggtgatgacagtcagcattctcacaccgaggataaagccgtcctgttcattcgtgaggacctgcctgctgatgtgctttttgatgcggcagagcggcgccaatgggtagtgcgtagcatgctcaaggcgttggcatggaacgtaatgtccgacggtgtggatggtgaacacctggcggggctggcgcatgcggcaatgcttctcgtgagtgacgccgaaagtctttaccttgctgctcgtcgctcggcgaataagtag

SEQ ID NO: 362846 - DNA, 183 bp, Pseudomonas aeruginosa
atgacctgcacgctgctctgcaccaacctccagaagcagcagatcgagcatgatggcggtaaaattttgtctatccatatccgtatttttcaaataatgtttgtccggttcaaaaaatctttagccaggagcacagaatggagagcccgtttgtcggctatgcctttctcgtcgaaaccctga

SEQ ID NO: 362847 - DNA, 1194 bp, Pseudomonas aeruginosa
gtgagttggccgctggttaagatttctgatttttgcctaaccggcagtggtggtacgccatctcgcgaggttcctgagttttaccaaggagatattccctggataaagtcaggcgacttaagggagaacattgttacctctgcgactgaatttatttcgagcgaggccattcagaagagtagtgccaagatagtcgctagtggcgcaatattggttgcaatgtatggcgcgacggttgggcgaatggcgctgctagggattgatgcggcgactaatcaggctatctgcaatattgttcctgatgcgtccaaggcggacacgaaatatgtttactatgccctgttaagcaaggttcctgattttctcaggagtgcaattggtggggcgcagccaaatataagccaaggactaattagatccactgaaatccccctcccacccctgcccgaacaaaagcgcatcgccgccatcctcggcaaggccgacgccatccgccgcaaacgccagcaagccatccagctcgccgacgacttcctccgcgccgtatttctggatatgttcggcgacccggtgaccaatccgaaagggtgggacgtgaagccgctctctgccggtataaggtcaatctcctcggggtggagtgcgtctggtgaaaaccgtccttgcagcgatggtgagaaaggcgtccttaaaattagtgcagttacaagtggcgttttcaagccagaagaaaataaaaccgtcccccttgatcagatccctgaggggaaaaagcttttattccccaaaagaggggatcttttgtttagtcgggcaaatacaagggagttggtggctgcaagttgtattgttatggctgatgtagaggatgtttttctgccagacaagctgtggttggttgaaaccgatcaaaagaaacttctgccggaattccttaactacctactttggcagccaagatttaaagaaaggttgacatctcaggccactggtacgagtggttcgatgttgaatatttcaaagtcgaaattcgaagagacagatgcgttttttccgaatatggagcttcaggggaaattcaagcgtatttattgggctcttcaagaaactctcgacgcatctgcctcttcaagggaggcgggagacagtttatttgaatcgctaagccaaaaagctttttctggccagctgtag

SEQ ID NO: 362848 - DNA, 192 bp, Pseudomonas aeruginosa
atgccaatgccggctaaaatctcgaccaaatggcagctgaccaactgcgcgctggctgcgcagttgctgtcgcaagtcgacacgatgagcaagaagatccagcgcatcgaaacggtcaacgaacagttgacctacgagatcgctctgctcaacttaagcgtcacaagttcgccaaacgtagcgagcagttga

SEQ ID NO: 362849 - DNA, 156 bp, Pseudomonas aeruginosa
atggatatgcgatccgtctatgtcgaacaggccaccctgatcttgaaggtgctctttctggatcagagcgtggctgacgaagcaagcacgaagttcatcagcagtaacctggacgttgaacagggtgagatcgacaaagccatcagctttcgctga

SEQ ID NO: 362850 - DNA, 732 bp, Pseudomonas aeruginosa
atgattgggccacatggaagtcccgggaaattaatatcaaacagcacagggttcccagttagagtttcaccgaacgtattaaaagtagtcattcaggctctccagaaagcttgggcagaaatctgtgccgacccggaaaagcacttagcgcctgtcactccgggaaatccggaggaggatcgctatactgatgcgatttgcgagttgcttttgtgctatctgcacgactcatcgcttcctgtaagtgggttcacgtccgatgtttttgaatatgtcgaacgtggcgctaatctctcaaacttcaacttgagcgtcatcaacaagcagccagacttagtcattcgcatggctaatactccactaactaatgttcgccgttacgtcgggatctttgtcgaggctaaagtggtttcaaagtcaaaagccttgagtaactatactcgacaaggggtttctagattcgtgcggggagattacgcgtgggctatgcaggatgggctcatgattgcctaccggaaacagccacctaggcaagtttctgctttagacacgtcgctgaagagggatgcttctttgttaactcaacaagaaaactctaagcatatagttcagtcggggttgccaataccagcttgcggaaagagcacgcatgaccggcagtggacctatcaagctggtggcgcgcctggagagattcgcctatggcacctttgggctttcgatattccatag

SEQ ID NO: 362851 - DNA, 720 bp, Pseudomonas aeruginosa
gtggttcagatcaacatgactcgcgacgagaaagaagcagtaaatgagatcgacaggagccagttgcaaaggctaatcgacaagtgcatctacgaagagcgaactggggagattcacagccttgggctctctcgttgcgggttgtacgtagcctcagcacttcgcagtttcgaacgtgctctggctgactacagcaaagcgaaatcctccaaaaagcgtgaggacacaagaatcagcgtgttgcgagctggaagtgacctggtacatgccttccaaaccatgaaggatcgagcagaagccgagcagcgggatggccagttcttctacgttgaagaccagatattgcctcctgtgagtctgcgcgaccaactgacggttcgggttagctacaagtggcgacgatctgtcgacgagagctggacccacagcagcatcaccttttcctacactgcggtatctcgccctgattacagccaaccagcctccacacgaaaaccaagtgccgccaagatgcgccaggagcgagagactaggctctatggagaatgggagcacctgaggaatctggcgctctgctcagttcgagacttctttaagagcgggggcgacggaggctcgatcccaaccgcgtattccgttcagtccgatgctcgcagtggcaggctcaataactacagtgcagatttttggcgcgaaagcgccacagctaaggctgactga

SEQ ID NO: 362852 - DNA, 2202 bp, Pseudomonas aeruginosa
atgcgaacagatgtcggggcgtgcgaactgctgtcgattttgagtaacagtgtggtgtcgattttgagtgcgagtcggtgtcgatcaggcatgcgaattagtgtcggagccgatgcgaatactcactcagtaaatgaaactgagacttatgacataaaagccacctgcggggtaacgactgccggtgcgtgcaccaagtctatggaaaaaggccatcctgcaagctgggcaatgctgctcgttcttcgtaccatccggactgatccacgcgtctgcaatgggaatttcaagggaaggaggcggtttttgaccaagccggttgtccgggtggagccccggaggcaagtttccagcatattcactagcgatggagaggaggatcgattcgcagcagcgaaaggcgagctgatcgtctggtggtacggccatttcctgaacatgaggccgagtcagtccattcgctacgtggaagtgattttccggcagcttcgcggggacgttcccggagcgtttgtctcgtatccggttgcagtaggtcacctgggccaactgcgagtaggtagcatctggcgtgaaggccgctgcgtcgccgaagccaagacccagccctgggaattcagcaaggtcaatttctccgaaggcaaatggtccttcacctcacgtaaaagtgcaggcgcactagggctgccgctgcccttctctgatcaggactacgccctacctcgaacatatggtctgtccggcagctggatgctggatttgaagctatcaggaggaaggaatcttctgctgccctgtgtggaagtgttgagcagatgttacggccgtatatctgagattcctcgcatcctcaccactgagccctgggaaagcgcactcagccttttgtattcctccacagagcaggatccctacaaatgggttgtccgaccggccaagggaatcggcatcgacaatggcgtctatctcgcatggacgctttacgacgagtacgcccaaaagcagtccaaacgaatctacaactcgctcaacaccgctagagcaaatgatcggagccgatcggaaaacggtgtagcactgcaagtgccaatgtggttccagggcttgcactccatcgagtgcaaaggcttgtgggtcaacgatggaagaacatttctatgcttggaaatacttgggataggtgaaccaacatccccgccttttgtgtgggagcaggtcgcctatgacgagcacgacagcggaatcccctcctcagagctgatacctcgcagagaccgatttgaggctgaggaggagctcgatccatttcggatcacgggtacccaagagcctgatcggaacgcaagcaccgctcgcattacggacgcgcccttccgcattattgggcctcgctgtaagtacacccgcaccaaaatctcgaagccgtactcggaaaaatatctgcgctcaggcgagatgccacgacaccgtcagtactccacaggcgatccgttctcgaaggataaagacaccgggaaagcgatcttcaacagcgctgtagtcggttcgggtggcgtgcttaacgatctgtggttggcgttgaataaccttagaaacgaacatccatcggtcatccttggagtcgaatggttcaccgaagagcaaggctttcaaaccacctctcctcccgagctgcagcccttgcctccttgggatgaccgcgacagcaaggctacgattcgttggctgacacacccccggaacccctccggcactcggggcatgctaattctgcgcgtcaccacaaccacatcggaaatctacatgttggatgtgcaacgcaagaaaaaacgcgtaccgctgagagctgatgatcaagcggcttccgacggcacagccaacgtggtgatgcaaaccaatgaggagaaagctgccggaatcgccatcgagttcccatccgatggagtggccatggaggagatcgatgacatttgctcgcgcattgccttggtccgcggaaagtttcgagatctggccaggccgaggaagtaccaacattacgtcttcagccacaggtcatcgagagcaaatcgctttgcactcgaatctaccgtggtaaatgccctaatgcagatgggcgtacaaattccagtgcacgcaaaggatgaggtgtctagctccaccacagcctcggaattcccaggagaagcagagtcgagctag

SEQ ID NO: 362853 - DNA, 1461 bp, Pseudomonas aeruginosa
atgatcgttgacgtgagtgatacccgttgttgcgacgagtgccggcgagcaatgcagaaggctaagaaggtccacctcgggaagagcttttgcgaaacctgctattcccggctattcaaacgtcgaccctgcaacggctgcgggaatttcgcccgactgcctacgttttgccctgagagcgtttgccgccggtgtgaagcagccaagccttgcgttcggtgtggtcgtaccggacggcccgtagggaagctgacgccctatggccccgcgtgtaacacctgcgcggggtacttcaaagaacctgaagcgtgcgatatctgcgggaggccatcgacgcagctcgcgcgagtacttcgccgcgatgcaaccatcaggtgttgtccacgctgtcgccagagcgatgcagagacttgtcctgcttgtcggcgctacaggcatcttgttgacgatggttcggggcggcgggtgtgcaaggcctgtgcttcattaggatatgttgcgtgttcgacctgtgctcggcccatgcctggcgggcgaggcaaagaatgcgaggcctgctactggcatcgtacctacgagaagcgtgtcagtaacaaccttgcgggcttgatgcgccctgcaactagggttctcttcagacagtttgctgattggctcgccaagcgatgtggagagcacaaggcatcgctcacactgcgtcggtatgttgacctattcctgttcctggatgagtcaagcttcgagattcctagataccgtgacctacttgagcattacggcgccgaagggctccggcgaattcgtttgccgatggcgtggttggaagaggcgtacggggtggtcgtcgatgagcgaatgcgagaagagcattccgaattgcgccgcatagcggacattgaggaaagcttaccggctgggccagcagcgacagcgtggcatggttaccgatctgtcctgtatcggaaggcaagcagcggggtgatcggtatgaggtccgccaggctagcgctcgcctccgctgccaagttattactctctgcttcgccagacgggcagaggcttccaaaccagtatgcacttaatagtttcttgaaggaaaagcctggccagttagcgacgatccaaggttttgttcggtacctcattgattctcaccaagcggagctgagtgcacgcgttggtgagcgatggctgacaaacgcgaagcgtactcgggtggaagcgggcctattaaagctacttgaggaacagcccaggggcgctgactttgagttgcgctggcttatcaacggcctcgcctattttcatggtgtcagccgtcccagtaagaagaagctgaaatactcgaggtcaaggcaatcaggtaacgacggcttcagcgtcacctatggaggtgacgcatactggattccccatccagacagcaggagtgaagtactaggtcgctcaacatcgacctag

SEQ ID NO: 362854 - DNA, 912 bp, Pseudomonas aeruginosa
atgccagcaggttcggacctgagtttgttggcactgcattcaggcatttcacgcagcgcgctagcgttatcctcgttggaccaagctcagcacttgatcaacggcgaggctgaccgttacaacagcccacattggattctgagcctgggacacagaaataggagacgtgccggcgggttgcagttctgtccaatgtgctttgctgagggcgcatgtttctatcgcatccaaagtcggttggcttggcacaccgtttgccccaaacacctgtgcctcctcgcagatcgatgccatgcgtgcttttctgctctgtgcccgcaattgttgctgccgcaagcacgtgggctggctagctgccaccgatgtagtgagcctctaggaaatgcggttcccctgtatccgggttgtcgagcattgatcttccagcggaaggcggatgtgattgtgcaaaaggagtctgccttgtatggcgaagattggttgccgcgacgggactggttctatcttgctcgctggcttgtgggccttcttcgaacggcatcgatgcgaatgcccaaatccttagctctgttcctacaggcgctggaagtcgatcctagcgatgttgtcgcctcgcacagtggtcttcggtttgagctactcagccccctcgagcgaacgcgaatattggcgggttgccactcgattcttgaggcaggtccagagcagttcatacgtgctgcttgcgattcggggttaagatcctcctacgcgccactgcttgccacaactactccacggtgcgtggcaaccttggctcagtctctcctgtactcgcctcgagtctttgtcccccaggccatacaaaggcctcgttccccggataccgtcatgaagatgtggcatcgccttctcagaaagtctcttagatga

SEQ ID NO: 362855 - DNA, 279 bp, Pseudomonas aeruginosa; identical to SEQ ID NO: 357239

SEQ ID NO: 362856 - DNA, 357 bp, Pseudomonas aeruginosa
atgctcgcccatcggatgcgccaccgcatagagttccaagaaaaagtccaggcgcaagacccggacacgggcgagatcactatctcttggcaggccgtgaccttctcagggcgatccgacgtgcccgccgaagtactcaccgggccaggacgtgaactgatcgctgccgatgctcctcaggccgaaaccaccgcgcggatcaactgccgctggttcccggtggatcggctggtgctctacacctggcgcatcctctgggatggccgagtctacaacatcaccagcgcagagaccgatgtcaccgctcgccgcgagtggcgtctgcgctgttctgatggattgacggacggccggtaa

SEQ ID NO: 362857 - DNA, 312 bp, Pseudomonas aeruginosa
atgagcaagcacacaccgggaccgtgggagattgcacgaagcccacatggaataacgatcttcgagattggaccgtgtaagcccgatgagtatgcaggtgctgtttggctttcagtctctgaggctgacgcccgcctgatcgccgccgcgcccgagctgcttgaggcgtgccaagccttcaagcgtctgtacggtcgtttgtgggatgtcgtcgagccgagcggatcgggattcctctcgcctgaatcggttaaggagtacgacgccatccatgagctaatgactgccgcaatcgcaaaggccaccgcctaa

SEQ ID NO: 362858 - DNA, 390 bp, Pseudomonas aeruginosa
atgagcagaactcgaacctacgtggacaagctgctgggcgataccgagtacctcctcgagcagtgggggtggtggcgaatggatggaatgggggttcccggatatgtgtcgccggccgccgctatcatgagccaagccatgccaatgtcgagccccaaggcctaccacgtcactgatgatatggccttggccgtcgaccgggtcattgctcgactcatcgacagggcgccgcaggccggcgacttcgtgtggctctactacggcgcgaagtggccggccctgcgcatcgcgcgtgaacaccagatcggcgaggccaaggtgagggagacgttgaagctggctgtgggctgggtcgatagcgccctggagcggttccgcgagagcgcttga

SEQ ID NO: 362859 - DNA, 174 bp, Pseudomonas aeruginosa; identical to SEQ ID NO: 332595

SEQ ID NO: 362860 - DNA, 135 bp, Pseudomonas aeruginosa
atgatcgctctggccctggaagacggggagatcagcgccgatgaggcgaaggaaatcttggccctgcatgccaagcacatggctgcccggcatgaagaggttcgagccgtgctcgaactgcacagggcgaaatga

SEQ ID NO: 362861 - DNA, 135 bp, Pseudomonas aeruginosa
atgatcgctctggccctggaggacggggagatcagcgccgatgaggcgaaagagattttggccttgcatgccaagcacatggccgccaggcatgaagaggttcgggccgtgctcgaactgcacagggcgaagtga

SEQ ID NO: 362862 - DNA, 207 bp, Pseudomonas aeruginosa
atgaatgaaaaggccttactggctttacgtcagtctcttcgaatcattcgcagggagagcgacgtacaccgagcgcgcatcgagtactacgaaacggtcgggatgttgcgcggattgcactacggcggagtgatcgattcctggcagctgatagctctaaccgagctagcaggaagcgcatacatcaacgctggcaaaccctattaa

SEQ ID NO: 362863 - DNA, 405 bp, Pseudomonas aeruginosa
gtgccccagttcccggcggtggcggtgccccagttcccggcggtggcggtgccccagttcccggcggtggcggtgccccagttcccggcggtggcggtgccccagttcccggcggtggcggtgccccagttcccggcggtggcggtgccctcgtccccggcggtggcggtgccctcgtccccggcggtggcggtgccccagttcccggcggtggcggtgcccttgtacccggcggtggcggtgccccagttcccggcggtggcggtgccccagttcccggcggtggcggtgccctcgtccccggcggtggcggtgccctcgtccccggcggtggcggtgccccagttcccggcggtggcggtgcccttgtacccggcggtggcggtgccatatgcgcctacctga

SEQ ID NO: 362864 - DNA, 273 bp, Pseudomonas aeruginosa; identical to SEQ ID NO: 336099

SEQ ID NO: 362865 - DNA, 1074 bp, Pseudomonas aeruginosa
atgctgcaaggcggatatattaatttcttcaagataaacaaatgcggcctctatcgttggagtagtgatactccaaaagcactggaaactgcagacgccttctctaggttaaaggcgtggaaagatgaaagaaattttgaagctacaaacccctgggatccacgtaaacatcgcaacaagaccgcatgctatagtcataaaatctatcatgaccagagaacaggtgacttcctgttagtactctggaaaggggactcagaccgccatggccctctttatggcataagcgttaatccagatgggtctataggtaaggctattgagcaaacaaaagtagataaaggtaagcctactatatggggtcgaccttgttattattgggttgttccagaattaaatacggttgcctcaataaagtttgataattccagatgtgattcggcaatgtttcaggattggatcactggatgctttaactttagagtcccacttccaggctatagagtctcaaccaccgaaaatggctatatcagaatgcaaatgccagaagaagatggtgacgattttaagtactcgttccagtttgatatgtctatgaggtccctctcaacttcctcggcggagcttaatgagcttgctcgaaaagtcactcatatagtccggagagaaacagtatcgatcaagtctgtcgataagcgcagaggatttgcaaagtacttcaagaggtttgaagttccttacatatcggcagaaaataatgcaagcagaaaggttgagataaagatcgaggcaaaaccaacagtagacgaaattagagatatcgttgagacctacgctaatgaccatgcggcaggcacttgggaggacgtagggtttgttgtcgagaacagcgcaaaactagtatgggcaagcaggtaccgtcttactgaaaacatatcggtagaagatgagggggagccaatttttgatgcagaaaagctatatagaaaaatagctgaaaacaggaccagatacttaactccaattattaaagatatccagatacagcaagagcaggccgcagcaaatggttaa

SEQ ID NO: 362866 - DNA, 1185 bp, Pseudomonas aeruginosa
atgggcggccccccaatgccccctgagctggctcagaagacaatcagcatgtactgggactttttgaccaaaggtatcaacagcaaagactttattgttcgcaaggcagctaaagcgcttgggcggaacgcagttgaagacgttagtgcttcgacttacctggcaggcgttaatcactttctacatacaagccaagccaaattgaaggacatgcaatccttgctccgagttctgactcagagcgacgcattcctagacgtgtcttcacttccacaactggaagacaggagaagaagtaaagttgagcgagacaacatttccagtaactcactcacgttcggaaaccatccatcagatatccatcagtacacccgtggagggctacctggaggaaaagtaaaaccctctcaagttagtcgtcactttcccacggagcgagtgctagatctactaagtaatatcgaggaacctttgcatcgttgcgtcgccgcgatgattgcggctggtggtgtacgtcattccgaagcctggaggattaggaaatgtgatatcgacactgaaagccgaacaatcaaaattgaagacccaaatttccaccgcaacccagcggcagaaaaaaatgagaagtcactgcccttcaaaggccgaacgctagcgacaatcgtgatgtttgagccgttcaaaacaattttcttcgactcattagccgattatctggacgtgcgcccatctacggacagcgaatacctcttcatttctagcgcaaggccaacatacggggaagccttaattcatacagccccaatgaactctttgaacaagcaactcaacagagccttgaggaaggcacaggctgaccttggtacaaagtcgccagccactcagaatccatatacgtctcatagcctcagacacttctatggcgtatgggcacgtaactttgtttacctacctggccggaatacaatcggattatccctatctgagatcaaggtattgatgggccacaaagatattcgatcaacggaaaaatacgcccgcctcagtgaagagaatactattgcagagattgaagccgctgagcgcatgaaagcactgtggggcaagaagccgaacatcgaccaaattaggtcggctgtatacgccgatcttgcattcgaactttcgacaaggatggctgcgtga

SEQ ID NO: 362867 - DNA, 3357 bp, Pseudomonas aeruginosa
gtgattaatacatctgagaacatcatccttgcgccgggcgtcgatatcaatcaagaagtgcattcagcactcgaccatgtgtgcgccgcgtcgcgcataaaatctcaaaaccaagtcggcagtgcagtccacagccgaagcccgcaaattcgaaacagattcgcacttttcattattaaagagcggctcgatttattaatcgtcacccctcaaatactagacgacatctatgccctatccgtaactcgcgacgaccaaagctcaaggcttaaagaactctacaaatccatcacgggagataatcccgtgatgatcgaagatgccctagggcttcgcgttccatttagagctatgtttgtactcctatggtctaggggcaagctaacccttccttacacgtttacaacagacggcatttatgccaaatacccggaacttctcgctgcgaccgaaggattcgtgcactctcttgcaaacatctccacttcctgtatgagagcatcacgagtattccaatatcgcactgattggcacaaacccgaaaacattaagtttgatgaactgtgggcagcctgcccttacataagcgactgcaccaataaagacaattttgacttttgctacctttcatggctaacgatatttgccgctaagcaccaaaagatcctttcttcagatgaggtattttatctcgaaaaataccaacaattcctcaacgcaaagtcgagcttgtcgatctcagcccataaattttcaaccacattcgaaagcttcaaggcttactatactgtcacaccgcaagaagccttagcaatgactgccaaagaacgtgagaaggctcgcttccctaatacgaaagagtggagaaaagacagcagtctgatgaagaagaatgcaaaagacaagtctatagcagaggaacttatcaaatcggatgagttaagcgtagagcagaaagctatacaaacacccacccgaaatcgtagcagagataactttgagtggctaaccaacctattttacattggccgggaacatgtagacatagaatctctgagtgcgtactgggtagctgccgcaatgtactacatcgtattcctagggactcaaaattactcaaccaaatacttgcgcacaaaaattgatgcactttattttcttttcgactacctgttttgctatcttccctggtggtttgaacacaacccagatactacgctgcgcttccccaccaggcccgacgaatttgaacgggtgatctactggaaaactcttataacagaaagcgattttgaatttgacttatttggcgtaggccagagtcatcctattgctgacattagcctaccaatgaccctaacggattattatgagctttgtcactcgcgcaaaacgaaagccaagttcgtcaaagacacccatacctttttcgaactactttcaactgatcataaattcattaagcacattggtgagcaggtcgttgagggatggttccctaatcctgtgagtcttcatcttgaccgtgacggcagtggcgctcgcggccaatccgacaagattttactgcctctcgactcaaccgtaattgccaaatcctacgtagaggtattggatgcagtaggccaggccatccaaaaacaaatactttcagggcatctatacggcgagcgacttcagcaaattaaaaagtccgaatggatcaatctgtcagagattggaattgaacaaacaatacacatcaaaaatccagacgacgacacggatattcttagcattcctgtcaccaccgtagtgaatgcgtattcttggcattcgggaatctacggctgtgcaatgtctgaggtcacgatgccctggctaagtatagtcaggatgttgaacatcgctttgcacgcaggattgaggttgcagaactgtcaatggcttgatatccataccttcgataaactcctggccccgccagagttgcgggtcttcgactcctgcatcttgtacgtaaacaccgacaaagatggccaagaccgtccagttgtagttccacaaagcgtaatggactcacttatcgaagagagaaaatttcagctacaagtataccaaaccccaatatctccaaccttctacgaaaacgatgagaaagaccctaaagggtatggagaaattttccctctatttagaagtccacggaaccctcatggcctgcctttctcagacaaagcatactctgataaatggacactaatgctgtttggcattcaaaacctctacaatagtctagtacctactgctcggcagcatcagttcgtaacttacaattcagacgggaaaatgctctcggtacacaccccccatgccttgagggcaacatggattacgcaccagaggatttatggacacttgcatgtcagcattgctcaacgccaagtagcccataaaaacgcctacaccaccgactactacacgatacctagcatcgcggagtcaactcaagccatcgccgagtctaactaccatgtgatgcggagcgcttggtcaaaacttaaccatccactcaccagtgcttacgaactcaaaacctctattacaacgggttggtatgtagatcgcgaaaagctatcacaagatcaaagctttattagcgtaacctctgcaatgatcgaacagatcaaaactggcatgcaaatcattgcgaccgataaagatcctaatgtaggcttttattcaaattgtgtgtgcctgcgtaacggaagctgtccaaaagaactgatcgctttcaccggcaagagtcgagtatgcggcctttgtccaatcgcagccttcgggattgaccatctccccgccatcaactgcctgattcgcaagctagcgggagaatcagaaaatctcgtgattaaactcaaaggtctaaagactagcaaggcttgccgagcagaaattgaggcagtccatcatgaactcacggtcacgaagcttgaactctctagttactggcttataaaccagacacttaaagcgcgattggagcaggatgacaactccgggttcatcaccaggatgcgagaccttaaaaactaccaaacgcatgaagtagacatgaatgatccagcacaattggttatcgcccaacttctggacagccagatgttccctcagttttcgtcaccaaactatccatacatgatcgaaaagattgcaaaaaatcaagacttactcaaggtttctatcgcacaaggcgcagagcgtgacaaatatgctggacaagtagcatccatcatgaagaccatgaatctttcaattgctgacatcgcggagaaaatcaactcgaacactctgaatctagcaggagccatgcggtga

SEQ ID NO: 362868 - DNA, 582 bp, Pseudomonas aeruginosa
gtgaagaagaaatccaatgccgccatttataaagctgccgaacttgagaacactctttcaaacatcgagaactgcctggcggcactcgtagaagaaaggtgcgagcctttccagtcgcttaaccaattaaccatttatatcggacagcagattgacttagatccttcagtattcagaaaaaaggaagcaaagcatcgaaagcttctcaacaagtatgtacacctactggtctcccaaaacaacaagcccaagcatgacaacatcacagtagaagctttgcaaattaagaacctagaactcaaacgaaaggtttcaatccttgaaaatgaattaaaaacccctagtaacaaactgcatttactgcccaatcgcacaagtgaccaaccattgagcgctcagccatcaaacaaatacgagattgataatctttgcatgctaatcaacgacatccttgaatgccagcgcaacctgaaattcaaggacggaggactttacaactacgaaacattttcagaggacgaggagttagtctcagacgctaaaaagtgcggaatttatctggagtggaaaaatggacgctaa

SEQ ID NO: 362869 - DNA, 1830 bp, Pseudomonas aeruginosa
atggccacctaccttattaccagcgtaatctatcgccttgacggtcaggtagtaatcaaaggatcttcaacatggaacaagcgacgggagacgtttcgcgccgcagagacagcactaaacataccagtattggtcggtaggttttacagcatcaaccgagtagatggagcaatcctgttttcaccatcacttatgtcttacacacattggcctgttttggtaaaaaataacttctttattccttacctgaatctttcacagcgtgccagagtcaaacttttgcaactcacccaggaggatataacgcctattttgcaggtactggagcgcgacccatcctcggcttcatttatcattcccgaaccccattccgcttatatttgttattattttcaatctcaacctcaaactattgaagctttggcatttttaatgaaggctggacttcgccaatcagaggctttgtctatttgctccacccacagtccgtccgaggccgtatctctgctggacacggatgcacaggtagtaccctacctacgcccccctgagtcttatcctgagggctcaatcgcagaggggctggcgcggtctgcatgtgctgggctgatccactggatgcaaagcaaagccttgcggggagacaccttgctgagcatcgaggacatccctgttgagttcaaacctgctctctccaagtcgattgagcatcacatggtggtatgcacacctgaacactgccagttgctaggccagcacctcattcaaagctcgattcgatctgaccttcagaggctatccaacgatttcttccctacgtattcaggtcgggagatagacttcgctttcgtccgtttctcgaacatgtatggcgtcttggatggctccgatcattactcccaggtggtcacagcgatcaatgccagaatttcaattttcagccactccagtgacctcactgcttctgctttctgcgatgagctttcctcaatcctccagacccttggcgcagccgaacccacagtcctgcatcaaagcctgtcaggccactccgtgactgaggctcagacggcacattgggagtccatcagttcggaagagagatttcggacattcttcgtatgggattttcagtggtactccgctgtcgacttcagcctgctcctacagcgcttcaactctaccgaccggattgtaatcctacacaacgaatcaacagctatctcggatagcctgaatagcctcatcacaaagcagctccagagctactacccgtctgaaactctgaaaactgatctccatgatctctgccacgagaggcctaatggagaaggtttggacgccgccgttgcagccctcaatgcggatcccaacctagtcgccatctgtgacaacttgcagctgtccaggcagatcaatcaccgggtcaggagaaagcgagcagctacggcgttgatcacctcgactgacacctacttcaagggggatcgaatccttctgaaggaagcagcgccgaagaaagttacctatgcccggatcatctccacggatgaccgaggcctgatggtcgagactcaggggaaacattggaggcttgatgaggaagctgtgaggggaagcatgtgctcgctgggcgcagccatgaccttgaacgatgccatccatgcgcaagtcagcagggctgtactggttgccgccccatgcaaggtctcgagcattcgcgtggccatggccgaacagggtatacaggcagtgggcacgtatgaatgtgcccagagtatgcagacgctaggtctttccatgcagctgatcaccccagctgtggagtag

SEQ ID NO: 362870 - DNA, 2082 bp, Pseudomonas aeruginosa
atgggaataattaaatcggacgttactgctcaacatctttcggcgcaccctcaagaaaaagagttcttaaatccgtttctcagcggcttcgatattaactggggcaggcgagtaagagctttcaatactgagatctcagtctacttcctggaaccacttgagcatttcaaggagagctttggtttcgaaaacgaagtgttacttgtgtactctccatttaacagcatggagccgagaacattacaagcagtagagcaaactttttcatccgcccctgccaaagggagagtcgaaacgctgaactattttctagtttcggatgacgacaaagttagcgaatggctagatggttatttatcgtctcggcaagaagctaggatcatcgttccattctcttccaaggagctcaaagctgcaaagggagacgaatggtttatcagaaacacgttaaataagcatttcttcggcagagacctattcaactattctttaccactggttgaagacacatatttttttggtcgacaaaatacaaccctggagtattatgactccattaggacatgcgaaaacaaagcgatatttggccttcgcaaaacgggtaaaacctcactactattcaagcttaaaaggctttgcgagtctgaaaaaacagctacagttttctacatagactgcaagcaaccgcacgttaggaagtctcgctggttcgaactccttgaagatattgctggcgaaatatcagaaaaacttgaactcacacacgctgagccatacacagaaagaaaagcctccaaaagctttgtcaaactgataaaagagtgctttgataaacaacaccgagtatgcctcatgcttgacgagattgagttcatctcgttcatctcgtctaaagatcctcactggcataatgattacatcgagttctggcagactctatggtcatgccaaagtcaattcaagtgtttaagcttaataattgccggtgtaaaccctagcgttgttgaaacagacctagtcgatggcgtccaaaatccattattcggaattgttccccaccgatacctgaccggtttcaatggggatgagtgccgtatgatgctcagaaaacttggcaaacgcatggggatggcatttgactttgacgctagtgaccgaattcgcgactggtatggcggtcacccacttctgataagacaggcatgcagcactctaaattcgttcttgtccgcagataaatctcacccgttcaagatcgacacttgctcatttgagaaacaaaaaaccagaattgaccaagaacttacattttatagcaatcatgcaatatctgaaattcgagaattctaccctgccgagtatgaaatctttgagcttcttgccacaggacaagaactaacattcagggagcgctctgcaaatagcacttcaatcttacatctgtgcaactatcaactaattagaccaataaaaggcagcgccggattcgaaatcaacatccccgtcattgcccaaagagtggcgttggatgcccagcaaaatgatggaagagagctattatatccaatagtcgacgccccccttcgctctagctggcttaaaagacgaatcgaagaaatttctactgactttggagtccttgaacggctcgtcagtcaagtcgctaatagccataaactattcggcgccaactcattcccggagggagtcagactaagtgaatctcaaccagtaaatgatagagccgggttctcaaactttataaacacgctcaaccggtgctttgtagaatcgattgaacgctatggaaatgaaactcagagatcatcctatttttggaatgacattagagcctcttaccagttcctatggccgacattgcacaggataaaagtatacaggaacgacgtcgaccaccttcacttgaacaaagtaacaaccgacgcttatttcggctatcttgagtctgactttgaagggcgacagttttcgcaaatcagcgagccatattttgttctgcagcaacgtatccttgatagactgctacttgcattacaaagggaaatcgagattcgctcttaa

SEQ ID NO: 362871 - DNA, 135 bp, Pseudomonas aeruginosa
atgcaggtgatcagtgcaacccaggcaaggcggcgtttccggaggatcatgaagctcctgcagcaggggcactcattcgtgatcaccaagaacggtaagccggcctgcaagcttgtgccgcctgaggttccgtga

SEQ ID NO: 362872 - DNA, 1164 bp, Pseudomonas aeruginosa
atgctcgccgtctttggcgtgcgtgacttcaaggaagcgatccacgacaacgaagtgtactcccagctggataaagagctgggagatcagctgtccggtgcgattgcggagacaagcgcaagcgggttcacgatagacgcgttgacggtcgacaccattgaatacgccaattcaactggaatgctcctcctaggagtttcgcttccctacaagggccagcaagatcaagaacgagtgcatcaaagtgcggcgcgattctttactgccacggtcaaattgcttcgtcgcgaaggtaagtggttgcttgctgaggatggcgtgcccagaagctcaatttccttttccccatatcgtttcgaggattacaacatggcaagaccaaaagcgatcatgcgctacctgacattagataagttcaaatatctcctagaagataaaggcatctacgtaagtgctgcgtgcgatcaatcggacttgctagagggtgattatgatcacacgtttcttaccaaacacctgaatagccaagctaaccaagatcaagagctgatgtcgaaagttgatgagatgatgcttggaagcaaagaggtagggcgcaaaagcacctatttgagttgctggtacaactctggggaagagtctttcgaaatgtgggagaattatggcaaaggaggtgttgcgatatttagcagcgactttgctctggagttttctttgccacgtccactggatcaagccgccgaattctatacgctcacttatgacgaccagctcaaaccgcaagcgagccaacagccgttccgtgtaaaaaatgagagctataaacatgagaatgagtacagactggaattcaatctcttaaagtattcgattttgacggggtttgaggctcgtaacgaagtacgtgttggcggagttttgtctcacgagagcgacgagattacctcgtgcatgtccccagaatcactagctcgtagccacgacgtgattcgtcgcaagggtaaaggctatgttcttgcctatccactcgaaaaaatcattcatgaagtacgcctgcaccccagcgctacagatttagagttagaggaggttcgagccgccctaaaagcctgcggtatcaactgtactgtcaggcactcggcgctgcgtaagattgctcactag

SEQ ID NO: 362873 - DNA, 198 bp, Pseudomonas aeruginosa
atgcctagcaaacgcctatccctcaatcaggagcgcctgctttgggagattgccctcgaacactttggccctgagctactgctccagatcgtcgtggagctgtggggcacttttgattacccggagcacgccacggttgatcatctgtccacgggcacgttgggccaccaggtgttgaatatactgaaaattgcttaa

SEQ ID NO: 362874 - DNA, 303 bp, Pseudomonas aeruginosa
atgaggcccactgacgcgatacgaggaaaggaaggggacatccgacgcctgatcgaggcctatggcttcactgagcccaaactcttcggctctgtcgctcgaggcgatgatcacgaagggagtgacctcgatctgctcgccaccatccttccagcaatggccggcaagatttccttgttcgacatcgccgagctcgaggatgaactccaggccatggtgggggtgccagtcgacttccacgtctgcaacaacatgcccgagcacctcaggcaatccattgagcgtgagatggttacgctgtag

SEQ ID NO: 362875 - DNA, 306 bp, Pseudomonas aeruginosa
gtgtcggccctgagcctgcagttcgacatctacatccgcatgtttgtggagccaaatgactactggccaagagagtgcctcgtcctggctcggatcggcttcacgaaggaacgtgttgggcatggtcgaacgctggtgcagcgcctggtggaactggctccccaattcggctatcgctacctggccatcgagtccgccaataccaacgcatcagcgttcgccaaaaggctgggattcagcccacgcgacaagggccgtcactggatcggtgcggtcgacgacgtgcagaaagccttgaatagctga

SEQ ID NO: 362876 - DNA, 774 bp, Pseudomonas aeruginosa
atgagcattacggatagccgggccttcatccgggaagtcaaaaaggcgcctcaaaattttttcaccattcactattcttgccaaagcctatacgacgacaacgaggggctctcacctcggatcacttctatcgctatcactcactatgcgaccggtcaagcagtcagcttctctacgcactctatagctgaggagctgcgaatcgggcgagacgaggtgatggctagctttgatgcaattgagctggagcttctgaccggcttctaccgtttcgtgcgtgaccgtcgcgacaaaatctggatccactggaacatgcgaaacctgacctacggcttcgaacatctagagcacagataccgagctttgggcggcagagacgctccagtgatccccgttgagcgccggctgaatctgaacgaccttctagctgaccgttatggttccggctacgccagccaccccaaaatgaagtcgctgatggagctgaatggtgggcttcctcgacatttcctagaaggtaaagaggagattcaggcctttgagaacaaagagttcatccggatgcataactcgactttgtcgaaaattggcttcctgaactccacagttcgaaaaatggtaacaggaaagctccgaactgcgtccaaaggcatcggagtcgcccttgaccggctcttcgaagcccggttcgccaaaggagctgcacttgtcgccaccgttgtgggaatcggggttggtctctggcagacctacctttgggtgacgggaggatag

SEQ ID NO: 362877 - DNA, 819 bp, Pseudomonas aeruginosa
atgttcggcttcttgaaggatcgcagggagttctggttgttttgtggtgcttggattgcctttgccctgttgctcgtggtcaaaatcaagtttgacgtaccggagactatgaaagactggccccgcctcatcgccgcactcagatcagacgcttttgaggacattgttggggatttactaacaggcctcatagcagcctactttttctacctattgattgacctttggccgcgctataagaacgaacaaaaagctatgggtatactcaatttattgatcgcatctgttattcaggcttacgagaaaaggcattttttcgctcacacaatggtgattacgcaggcagatgtgaacgtgctgacgaagaaaaggatcgacgcattcttagaggaggtaaaggaacagcctgattacgccaaattgaaatgtgcattgttcaccgcacactctcgattcgcggacttccagcagaccctagctatcgcagctcctcttgggcccgataaagcacttcaatggcttgtcatcaccgacaaggtcaggctgtttgtggatgagtacgaaaaacatccagaaagtgaggtttacagaccttctcaagttttttatgacgacacagcagatctagaccaaggacacaagaattttatacgctatttcagcaatatgactgattatagggattcccttcgagactgcttctatgagttcctagaagaggcaaataaatggatatcccctgggagttttgaaacagctcagccagagtcgatagatgttgacgagatcactgagccgagcctgaaagcgcatgattaa

SEQ ID NO: 362878 - DNA, 1209 bp, Pseudomonas aeruginosa
atgcatgtggtcgaggatcgcctgttcattgaacggctcaacacgaaggcagaagtgatcaacatttcgtccttccttccccgctgcgccaccgccactggcgcccagtgggcccttgatgtccaccaggtcaatcatcgagctatcgatgtcgcctccatgaatggctccgggcgatatagatcaatcgtaaagggcactattcatcatggccagtcgactttgttgggcgcgcgtgatatagagttagctttattgttgataatgttggggagtgcaactttgagtggatcaagacatcatcattatctttcccaatgttacctaaggggtttcactcaaggcagtgccaaaaattctaagctcacagtgctggacttaaaaagcaatactaagtttgaaacaattccaagaaacgttggcggtatgcgcgatttcaatcgtgtagaaattgcaggcgttgaccctgaaattgttgagaaagcacaagccgattttgagggtgaagtagcaacggcactcaagaaacttgaggcgacctctgatttttctggtgagacgaaaaatgtcattctagagctgattggcatgttggcaatcaagtctccagagatgcgaaagcatctggccgagccgcaagtgaagattgcaaagctaatgatggccatgaatttggagtcgaaagaaaggtgggaagctcaggttgctgaattcataaaaagcacaggggaggatatttcagatggtgcaacttacgaagaggtgaaaagtgcattcgagcggggtgcacttgaagtgtccgtgtcgagagagcaccagatacagatggagctggctgggatgcgggaaataacagagcttctccaccggagaaactgggttttattaaagcctgacgatgaggctggtgaatttatcactactgacaatcctgtcagtttgactttcaataaaccagtggcctctgcttatgtctcgcccggctttggcttgccagatacaatggtttatttcccggtgtcaaaaaacttggctctagtaggtgagtttgggggaaggggtggtgtgcaggcagcgaataaatatttggtggcaatgttgaatagcaaggtaattgcgaatagctatcagcgagttatcgcgtcgaaatgtaattttaattacatagcaaagggcggtgcgatgcagcagggtaatgcgctgttataa

SEQ ID NO: 362879 - DNA, 690 bp, Pseudomonas aeruginosa
atgggcattttcgacgcaaccgacacgcgcctccttagcaaagccgaattgggccaggtaatcaggtatctccgagacctccgccagtggtctcaagaaacactggcggagcttgccaataccacaccgcgcacgatccagcgggtggaagctggcttgggagcgagcctcaacaccctacgctccttggccagtgcgtttgatatccaagacatcgacattttcaataagccgatgactattcccaccgatgaacagcttcaggccgcccgtgagcagttcgagaaggactacataacgagcaaagctctgaaggtcgagtctggaaggtttttggcgaagcttgccgccgaaagtgtaggcgactacatcgagccggcgtttgagctttcccgagagcaggccgcaattttcgcagaattgacggactatgtacgtgagtaccgcgactgcatggagctctacacaagcacgtcactcctagaggtctttgacgaacttcagaatctcctgacgcgcctgggcgaccaaggcgtcacgctccgttatgcgaatcggcaagtcctacagaaaacctcttaccctcaacaggaaccgcagcccttagggcaggtgctttacctggtcgggtttagtgaaggggacgcgccggatgaactcgccctgccaagaacaattagcttcttgtaa

SEQ ID NO: 362880 - DNA, 426 bp, Pseudomonas aeruginosa
atgaaacgaataggtgatccgcagtctgaagaagagctgcaggcgtttttgggtgcgctgtatacagctgtccagaaatcagaggcttttctaccggccgcattgattgcacagcgaacggcggagcgattcttcatgcattgcatgggcgacagcctcgcgctgcgcaatggctgggccatggggggcatcgaagccttgcaggcagcggtcatgtttcgtcacccatgctgggcgtatgacgatgttcagcgcctaacgcttcatcagctatggcaagtactagtggaggagttaaccaatctgcctctgcatgacgtggcgaagagagtctgggatgaacgacctcaaccactgcgagctgcagtgctggagttgtcgtttccagccgaccagagggcccgagccctggctgaacattactga

SEQ ID NO: 362881 - DNA, 2028 bp, Pseudomonas aeruginosa
atgaacgaatttacgggatcggcagcttcacaggctgactttatttggaagaacgcagaagacctttggggggacttcaaacatacggactttggcaagatcatcttgccgtttaccttgctgcgccgcctggagtgtgcgctggagccgacccgcgaggcggtgagagaggcgtatgccactttcaagaatgccgatgttgagctggataccattctgcgctcaaccgctgaataccccttctacaacacctccgaatactcccttggcaccctgggtagcaccaagacgcgccgcaatctggaagactacatcgccctgttttcggataatgctcgcgctatcttcgaggagttcgagttcggcaatactgtgatccggctggagaaagctggcttgctatacaaaatctgccagaatttcgccaagatcgacctgcaccctgatgtggtgccggatcgggtgatgagcaacatctacgaacacctgattcgccgctttggtgccgaggtcaacgaaggggccgaggacttcatgacgccgcgtgacatcgttcacctggcgaccgcgcttttgcttgacccggatgacgccctgtttgaggccagccccggtttgattcgtaccctgtatgacccgacctgcggcacgggtgggttcctcactgatgccatgaaccatgtgggcgattacggtggccgcgacaaggtaccgccggttctggtgccgcacgggcaggagttggagccggaaacccatgctgtttgcgtggcgggtatgctgatccgccgtctggaatccgaccctggccgggatctgtcgaagaacattcgtcagggcagcacgctgtccaacgaccagtttgccggtgagcgtttccactactgcctgtccaatccgccttttggcaagaaatgggagaaggacaaaaacgccgtcgaagcggagcacaaaaaaggcgagctgggccgctttgggccgggtctgccgaaaatcagcgatggctccatgctgtttttgatgcaccttgccagcaaactggaactgccgatcaacggcggtggccgcgccgccatcgtgttgtccggttcgccgctgttcaacggtggtgccgcgtctggtgaatcggaaatccgccgctggttgctggaaaacgacctgattgaagccattgttgccctgccaacggatctgttcttccgtaccaatatcgccacctacctgtggattctgtccaacaagaagccgcaggagcgcaaaggcaaggtgcagttgatcaacgccaccgacctgtggacttcaatccgcaacgagggcaacaagcgccgtattgtcagcgatgatcagcgccgccagattttggacatctacgccgctggggaaaccgatgcgttttcccggatgctcgactaccgcacctttggctaccgccgtatcagggtactgcgcccgctgcggatgaccctggaactggataaggcgggcatggagcgcctggaagccgacccctcttgggaaaagctccctgacgcgcatcaggcattctggcgcgacgccctcaagccgctgatcgggcaaacgcagacctatggctgggcagaaacctttgccaaggacgcgatcaagtccgacgaagccaagcagctcaaggtcaaggccaacaagacctttatcgccgcgctgatcagcgcctttggtcacaaagacccggaagccgagccggtcacggactccaacggcgagcaggtgcctgacacagatttaactgattacgagaacgtcccctatctggaggacatcgacgactacttcgctagcgaagtgttaccccatttccccgatgcttatatcgacgaaaactttatcgacgataaagacaagcagcttgggcgcgtgggttatgaaatcaacttcaaccgcttcttctaccagtaccagccgccgcgtaagctacatgatattgatgaagacctgaagaaggtggaagccgagattgctgcgctactggtggaggtggccagcgaatga

SEQ ID NO: 362882 - DNA, 408 bp, Pseudomonas aeruginosa; identical to SEQ ID NO: 331619

SEQ ID NO: 362883 - DNA, 738 bp, Pseudomonas aeruginosa
gtgccggcgacgagctgggtgttgcggcccgcaacactctgccaggaccaagccacggcgccggcggcgagctgggtgttgcggcccgcaacactctgccaggaccaagccacggcgccggcggcgagctgggtgttgcggcccgcaacactctgccaggaccaagccacggcgccggcggcgagctgggtgttgcggcccgcaacactctgccaggaccaagccacggcgccggcggcgagctgggtgttgcggcccgcaacactctgccaggaccaagccacggcaccggcggcgagctgggtgtttcggcccgcaacactctgccaaggatcgacctcggtgccggcgacgagctgggtgtttcggcccgcaacactctgccaaggatcgacctcggtgccggcggcgagctgggtgtttcggcccgcaccactctgccaggaccaagccacggcaccggcggcaagatgggtgattccactggaatcactctgccagggatccacttcggtatcggcggcaagatgggtgtttcgggccgaaacacttcgccaaagcgaggcatcaccactcacgaggaactcaaacaatgttcttgagcatggcccctttctttttggtcgttctcgttctttctgcactttttacagatgcgtggaacgaccgagaactcaggctgttgttaatgctgaccgtgttcgggtattcagtaaccgtgttgaccattacggttga

SEQ ID NO: 362884 - DNA, 1269 bp, Pseudomonas aeruginosa
atgcttgacctgctgaatctgccaggcatcaagcctgtcgatatgcgccacgaaggcaagtgccttgtgatagttgctgagccggtaacggtcgaggtgccattatgtggggactgcaacacccctatgcacagacacggtacgcgcaaaaacaagttcatggacacgccgttgtacatggagcccgtccgccttgaagttcagcgcccgcgatttcgctgtgagtcgtgcggaaaaatgtccatgccggagttgagttttctggatgacaaacgccgagccaccaaacggctggtcgatgtcattcggcaacagtgcttgggaaccaccttccatgctttagccgagcaaaccggcgtggcggtgaacaccgtcaagaacatcgctcatgacctcattgaggaactctcccaaaccgttcgctatgaaaccccggtcatcatgggcatcgacgaagtgaaccttgccggcgggtatcgctgtgtaatcaccaatctggcaaccaacaacgtctttgatatgttagagcaccggacccaggagcatctgaagccattcttcaaggcgctgccggacgctgacaaggtggaatgggtctgtaccgatatgtggcggcccttcaagcgttcttttgctcaatacctgcccaacgccaaactggtgatcgacaagttccatgtcgtcaagatggcctctgaagccctggaagcggagcgcaagaactatcaggcacagttaagcaaagaagatcggatttatgtcaaaaagtccattcgctggctcaccctgaagcggcccggcaacctgacgcccgcggagcaaaaggcgctggaggttgtaaagcaggcaatcccggaacttgccgtggcctatgacttcaaggaagccttcttctgcatctacgacgaacccgacaagcagagcgctcagaacgcctttgaggcttgggagaacagcctgccgccttatggcatggagcctttcaaaaaactggtgaaaacggttcacaaccattacgacgacatctttgcctactgggatgcgccgttctcaatcaccaatggctataccgaagggctcaacggtctgatcaagatgtccaaccggttaggtcggggttatagctaccccatcattcgggcaaagacgctgtactccaaagaagcccgaaaggtcggtagtggtattcgagcaggtcacggcaaggtggaatatgggccgcacattccgacgttgttgaagcaggcagagagcggggagctggattaa

SEQ ID NO: 362885 - DNA, 3006 bp, Pseudomonas aeruginosa
atgcaggtgttgcggcagggtttttccattgccggttgcggcctgatcgagatgaccgaggccgcgccggaagacaggcgtaatgaagcggtgatcaagcgctatcaggcgaacatcctgcgcgtggtgccggagctgaagtatcaccccgctcgtgagttcgccattgacctggtgctctttatcaacggccttcccgtggcaaccgtcgaactgaagaccgacttcacccagtcctgcgaagcggcaatggatcagtaccgcaatgatcgtctgccgtatgacgccaagaccaaacgccgggagccattgctgaccttcaagcgcggggcggtggtgcatttcgccatgtccgactctgaaatcatgatggcgaccaagctggatggagaaaacacctttttcctgccgttcaataaggggcgcaaggacgaaaacggcacggtacatgcgggtaacccgccaggtgagattaaggccgatggtactcaggaatacccggtagcctacttctgggaggcggtctgccagccggatgcctggctgcggattttccatagctttgtctacgtcgagaaaaaggacgttgtagatattcagggcaactggtcgaagaaagaaaccctgattttcccgcgcttccaccaatggacggcagtgaaccagatgctgaccgatgcccgcgaaaacggcgcaggcatgacctacctgtgtgaccacagcgccggttccggcaagaccagcaccatttcctggacggcccatgacttggtgaaactgcgcgaagataacggcgattcggtatttaacagcgtgatcattgtcaccgaccgcaatgtgctggacggccagcttcaggacgcggtgaagcagattgaccatcagtttggggtgatcgccgccattgaccggcagaagtcatccaagtccaagagcaagcaactctcggaggccttgttgtctggcacgccgattgtggtggtcacgatccagaccttcccctacgcgatggaagccatcatcactgacaaggccctgaaagggaaaaactttgctgtgatcattgatgaggcgcataactcgcagacaggctctaccgccgctaagctgcaagccgcgctggggatgagtgggcaaggcaagatgtccaccatgacggtggatgaattgctggaacaactgcaaaaatctcgggctcgcccggacaatatcagctatttcgcctttaccggtacgccgaagcactccactttgatgctgttcggtcgcccaacagacccgagccagccagcctctaacgataaccctccacaagccttccacctgtacaccatgcgccaggccattgaggagaaattcattctcgatgtgctgaaaggctatgtgccctacaaaacggccttcaacctttccaagcagcttgaagacagcaagcgggtaagcggcaaggccgccaaacgcgccctggcacagtggatgtcattgcatcccaccaatgtgacccagaaggtacagtttatcgttgagcacttcaccaaaaacgtcgcccaccggctcgatggcaaggccaaggcgatggtcgtgaccagctcccgcgccgctgccattcgctacaagaaggcgtttgaccgctatatcgagcagcacagcgagtacggctttattcattcactggtggccttctccggcaagatgaccggtaagcaggtgatgcaccaggatgacagcgagttcaaggatgatgtgtttatcgtcgatgagaacgaagagttcaccgagcagagcatgaacccggatgtccaagggcaggatttgcgctttgcctttgaccgacctgaataccgggtgatgttggtggccgacaagttccagaccggctttgaccagcccaaactggtagccatgtatgtagacaagaaaatcgccaaccatgtggagattgtgcagaccttcgcccgcctcaaccggacggcccccggtaaggatgaggtctttatcatcgactttgtgaacgacccagagaacgtgcgtcaggcctttaccacctatgacaagggtgctcacatcgacgaagtgcaagaccttaatgtggtctacgagatcaaggagcgcttggacgagcacggcctgtacgacgataaggacttggccgcgttcaaggaagctcgcttcaagaccattcgggacatcacccataccaaatcgccgcagcacaaggcgctgtatgccgctactgctggagcgacggccttgtataacgacaagatgaaaatgctgcgtgatggcatggcgacctgggaagcggcttttgagaaggcccgtgccaagggtgatgaggcaggtatgaagtctgccgatcaccatcaggatgagtatgccgagcaaatcaaggcgctgattggcttcaagtcggatttggggcgtttttgtcgtacctactcttatatcgcccaactgattgattttggcgacccggagttggagaacttcgccgcgttcgccaagctgctgcaaaagcgtctattacacgaagctccggaaacggtggacttgaccggcctggtgctcaccggctttgacatcaatgctcgttcagataacgcggaagacgaaggcgaaaccccggtgcttcaaccgataggtgcaggcggtggtggcgtggctggcgacaagccgaaattcgtcaaagagattatcgagaggctcaacagtctgtttggtgaggcgacgccgatccaggatcaggtggctttcgttaatcagatttcagcgattaccggtgaaagcgatgtcgtcatggctcaggtggaaagcaacacccgtgagcaggctatgaaaggcaacctccccggtgcggttcagcaagcggtggttcgtgctttgtccagtcatcagaagctggcaacccaggtgctcaagtctgaccgtcagggcatgaccgcattggttgatatggtgtatgacctgctgcgcgaaggcaaagacatcgacctggatatggattaa

SEQ ID NO: 362886 - DNA, 594 bp, Pseudomonas aeruginosa
atgcattcagacgttggaccgggcagtctactacagaattcagaaacagtttccactgatctatctagtttgagattgggcaaggagcatcttatgaatttcaataatcgtaataatcagattctgtctatgattgccgagactcagttcgatgcttacgttttgggctatattgcgaaggcgcggacaatctcgattgctgatgattcccttcgcattgaggccgaaggatcagcaatgcttgctggactaattagcgactcatgcaggaagcgtcgaacccaaaagaatccatttccatatctgctacttcagatcgcgcacgaagccttggatcgaatcaggcttaatctcgcaaatattcgtaatatatctagcgctgatgcattgtataaagagctgcttagtcaggctgcgtgggacgcctcagttgctatggataatatatcggaatttgtcgagccagatcagggtggcgtcagagtaatcgagcgacttgtcgagtttgcacataattcgggtattgcagaaggtcaaaacctggcgctggaagctcttgcagttcttggcttagacgtcaagagtcatttttag

SEQ ID NO: 362887 - DNA, 555 bp, Pseudomonas aeruginosa; identical to SEQ ID NO: 362224

SEQ ID NO: 362888 - DNA, 363 bp, Pseudomonas aeruginosa; identical to SEQ ID NO: 347602

SEQ ID NO: 362889 - DNA, 327 bp, Pseudomonas aeruginosa; identical to SEQ ID NO: 347604

SEQ ID NO: 362890 - DNA, 1062 bp, Pseudomonas aeruginosa
atgatcgtcgaaacctgcgcttctgcagcgaaattggaaggcgctcaggaccccaagcatttgatccggcaagttctggcagagcacggcattgcgacgcaattcatcatgcacatcgatcccgatgaacaactgaagaaaaagcgcaagggcaaagaggatgatcgcgacttcaaggccaccaacaccattatcgaggctatccgcctgagcggctaccttcccgcgccgataccaaaatccaaagcttcgccggagaagaccactgtagtttccgtcctgcttgatcgcatccaggaaaaaggcccggcagtgcttcttcctgtcatcacccgcgcggtgttgggggagcccaacactgagattttctggttcgagtcaggcccggactccgggggcaagtggttcagttataacgagggcgtctcggccatacatgcattcgccacgctgcttacatctgaccagctcaccaggctggtgactcaagccctgctggtacccaccaaagttgctgacgccccactgatcgcatgcctcgacagtggccttcgtacattctacaaggggctccaggacagtccaggcgagggccttcccccggtacctgaaggcgccgccatcgtacgaattcgcgcagacctggacgttgcccaaatgagcgggaatcagtcactgtcacctgataccccccactacataggcaccaaggtcggcatattccagtccaatgagagcttggacgtctattacttcgtcgctccgtccaaacagtacggctccgtccggtcgcaacgcaacaacacccgctatgagatctccgagaaagacttgcgagatccgtggcagcagctcggtgtcacggaaatcacgattatacgtgccggatcgttcgctcacccgacagctactgccgagcaagttgcactgctttgccgcaacgctccgctgtgggccgggtatcttcgcttgcccggtcccatgcacttgggcaagcaggtcgccgcagatcatcccattctggagcggttgcgcaagactgaggctaaccgctcggattga

SEQ ID NO: 362891 - DNA, 504 bp, Pseudomonas aeruginosa
ttgcgcaccggcctcgcccaggtcaacgagcgggttcgccaggaggccggcctgcgtggcgtcagcgtgatgggcagcaccctggtactgctcgccgcgcgcggcaaccaggcgagctgcctgtgggccggcgacagccgcctgtaccgcctgcgcggcggcgtgctggaagccatctcgcgggaccacagctacgtccaggagctgctcgacaacgcattgatcagcgaggaagaggcgcgccaccatccgcgcgcaaacgtggtcacccgcgcggtcggcgtgcacgagcaactggaactgtcggaagccgcgctgcacgtgctgcccggcgacagcttcctgctctgcagcgacggcctcaacaagaccgccgacgacagcgaactgcgcgacgtgctcagccacagcgatccctatgcggtggtccgcagcctggtccacctgggcctgacccgcggcgccccggacaacatcacggccctggtggtcagggccttctga

SEQ ID NO: 362892 - DNA, 336 bp, Pseudomonas aeruginosa
atgagccaaggaattttccacgttcaattcaagtccaaccttcaagactcaggacaaggattggttgtaataaagaacggaagcatcaacggcggagatgatcactatctctatcgtggagccgccccacagaagacaggaccctttaccggaaagctccatgttgataagtggagagatggaaaccgaaccgtggtcaacatcgataacttcgagttggatgtagacggaaagatagacttcgaggcggggcaccttgatcttataggtaccgttacagggcagcctcaactgcagatccaaatcataggaagaaaagtaaatgacaccttctaa

SEQ ID NO: 362893 - DNA, 309 bp, Pseudomonas aeruginosa
atggagcaagcaatgagacaggaatttgaagaccgcttcccgattcctgaaggcatcgagtggcgtgacaccgattacttcccggtgcagaccgataacgtgcacgtctacgtggcgctggcaggagcggctgcaaggtactcggcgatgtggcaagcctggcaagccagccgcgcggctctgaatgtgaggctgccaaagccatatggtagctcatcacttgatgcttattctgagcttgccgaattcaaccgaggaatcatggaatgtctagcggccctccagcaagccggaatcgaggtgaagtga

SEQ ID NO: 362894 - DNA, 165 bp, Pseudomonas aeruginosa
atgcctgagcttagaccatgcccctattgccgaggctatgaccttgagcgtcgctggtgccacgtttgcgatggtcgcggcgtcgttgacgtcgaggctcaacagaaggaacgcgcagagatggtgaagctgctgcgcgcagccggcattgaagtgagggactaa

SEQ ID NO: 362895 - DNA, 423 bp, Pseudomonas aeruginosa
atgacaacccctatcagtgatgagcagttggcggatttggagcaggctgcaatcgaaatcaaaggttggaatcttgtagatgcttttcggtatgcagacccatgcattgaggatgccgaagacgaggaatggtgcgtcggtagtattgatgaggatggaaaccagtacccggtcatgggggttaacgcccatcagtacgacagccaggattcagagctgttggctcactattacggcctatgcaatcgagaatctatccttggcttgatcgcccgcctgcgcgctgctgaggctgatgccaagcggtatcggtggctgcgcggatttgagagaggcagaataactgtgcgcgacctcaaatcgcatttgcatgttgagggcctggacgcagccattgatgaagccatggagcacacgccatga

SEQ ID NO: 362896 - DNA, 633 bp, Pseudomonas aeruginosa; identical to SEQ ID NO: 336081

SEQ ID NO: 362897 - DNA, 1308 bp, Pseudomonas aeruginosa
atgagccagtacaaagcatatcccgcatataaggattccggcgttgagtggattgggcaggtgcctgagcattggaaggtggcgagagtcaagcgactggcgtcattgcgcaatgaacgacgaaatgatgtatctactgataccatttatatcggacttgaggatgtagaagcaggatcagggaagtacaagccaacgaatggaagctctcgtcaatcagaagattcaacagttggcatcttttatgaaggggatgtcctgtacggtaagctgcgtccatatttgcgaaaagccattatttcagagatggcagggtgctgctcaacagaatttctggttctgagggctgaaaaaacagagcccagatggctgcaagaatggcttttaactcctgatgtgacgcatcaaatagagtcaggatgcgagggagccaaaatgcctcgtgcagattgggggcatatcggttcaattgaagttgtatacccagatcagcctgagcaagcgcaaatactaaccaccctcgaccgcgaaaccgcccgtattgatgcgcttatcgagaagaaaaaccgctttatcgagctactgaaggaaaagcgccaggcactgattacccatgctgtcaccaagggcctagaccccaacgcgaagatgaaggattccggcgttgaatggattggtcaggtgccggagcattgggaggcgacaaagctaaagcatgttgctgcattctctggtggtggtacgccatcaaaagaaaatccagactattggaacggctgcatcccttgggtctctccaaaggatatgaaacatgaggtgattaccgattctatagatcatataactaccaaaggactggaaaatagtgccacgaaactgattgactcgggagcggtgttgctggttgctcgatcaggtattcttcgtcacacgataccggttgggatcaataatgttcctgttagcttaaatcaggacatgaaagcattgagccttgatgaaactagggttagaccccggtttatacttcggtgggtacagggtcttaaccgctcgttgcttgggatatgggcaaaagaaggagctactgttgaaagcttagagcatgaatatgtagcgaacactcgtctacctcttccagatctgaaggagcaagatgccattctagccaccctcgaccttgaaaccgcccgcattgatgctctgattagcaaggcggaacaaagtatcaccctgctcaaagaacgccgcgccgcctttatcaccgccgctgtcaccggtcagattgatttgcgaggaaaacaataa

SEQ ID NO: 362898 - DNA, 1281 bp, Pseudomonas aeruginosa
atgcatataatagatactgtaacaatggaaggattctggggagacagaactctcagctttaaccttaatgaagacgtaaacttcataatagggatgaacggttcaggaaaaacaacggcggtcaacttaatcgtcgcagcattaacagcagactttaacgaactagacagacatgactttagcaaaataacaattaaactgaaaactgaaaacgggcgaaaaaaaccatcagtcacagtcataaagaccgcctcgaaagacacaccgttcgccactatcacttacgaaataaaagaatcttccactgacaaagctatcgttctgtcacttgatgattatgaagagcagatgatgctaaggcgttatccaatgcatattgtagaaagggaactatatcgtagacatggacggaatgcttcagaaactcttaagcgcttagtcaatgtcagctggctttcggttcatcgatctaatatcgagaaaaaatacgcagacgaagataaaaacgaatccacagtagataaaaaactaaaagagctttcaaacaggctcgttcgatacttctcttcactaggcaagcaaggttcagaacttctagaaaatttccaaaagaccgtttttctgtccatgctccatcgaaggagcaataaaccgttattctcaacagtgagagatattgatctcgaagaagagaaaaaagtactagaaggcatattctctcaattcaaattcaccacagtggactttcaaggaaagcttgacggccacttcgacgcattgaaaaaagcaaaagaaaggcttagcgaagcccctaacacactttcaaccacagacgtctcagtgctaattggcacggagagaattgactacatcgtagacgaatggaaaaaactactgaagaaaagagcagagattttcgaaccgcgcgacacatatttagacatcgtcaactccatgatgcagagaaagaaattccggataaacgaccaaaacgaactaaatataaaaacgcaatccggcaaagacttacctattcatcgactttcctctggtgaaaagcaattattaatagtccttggagaggcgctactacaagagaaaaactactgggtctatatcgctgacgagcctgaactatctctccatgtaaagtggcaagaagccctagtgcctaacctgagggcaataaacccaaactcacaaatcatctttgcgactcactctcctgatgtagttagcgtctatgatgacaaaattttcgacatggaaaggatgctctaa

SEQ ID NO: 362899 - DNA, 903 bp, Pseudomonas aeruginosa
atgtcttttacaagaacaaagtctggactctctaacctcggaatattctacggatcagacctaataattttcactgagggtggaaaaaaatcattcactaaagaagaagttgaagcaggacagtacaacacaatatctatcgacataaagttctggaagtccgtattagaagcgcacggtctagagcgaacggtatcgtttcgggctgtggggtctaaaacctgctcaaagagcatctgcgaaaaaatcataactgggcaggcaaagaatattgcagtcgcaaaagactctgaccttgacgaattccttggtttaaaacagagatcaccctacatcctatacaccaaaggatatagctgggagaatgacgtattctcgaaagacttagtttctgaacaaatcgaaagcttagctctactagataatataccagacgagataagcaagcttatcgaacaatgctactcagattacgagaacgtgggaacgcgtctagccaagcttgagataattttcagaaaacatggcataaagttcatctcagagttcaacggagagcgtttcattaattcaaaagccaagcccaaaataaatatccagcaagttaaacagctaatagagcagaacaaagaaaaaattcaaagacccgtatcactaccaccaggaacgaaaatttgcgcttacaccaacatatatggaaagcttctagaatcattagcatttgccgtaatctgttttattagcaaaaaatatctacaaataaaagacatacccaaagaaattatagggatatccatgctggaaaaatataaaaacaagataaccgcacaccccgacacatactacacacaaatagtatccgaactaaattctgcgaaaaatttacaaaaaggacaccaataa

SEQ ID NO: 362900 - DNA, 1380 bp, Pseudomonas aeruginosa
gtggtcctgcgagagcgggagattcgcgccttcacagcaatcaagcacttcggggtggaactgaccttcgtttcgccaagcgacggccgtacctggacggcggaatgggatccagtgcccgtgtttgccagcaaggagttcccgtatatccaggatcgtcaactcgcagaactggtgggggctatacgcaatgtcatcgtcgagacctgcattgatggcgaagaaaccgatatgcctccggcgccgttcatctcctcttcgctccagatggcagccggaaatgcactgaagtggtcacccgacaagacgatgaaagtcgcccagcggctgtatgaacaggggctcatcacttaccaccgaacggacaaccccaatatttcgaaggactcgatgccggatatccgtgctgtcgccaaagccttggggctgaagtgtgtagagcaacagcggatgttcaaagcggaccaagacgcccaggaaggccaccccgccatcacccctaccgactggatggccgcttccgccggtgagactgctgatgagcaggcgctgtaccagctcattcgagtccgcgcgcttgccagccagatcgaagctgccgtgtacgccgtgagaaccatcaccctccttggcgtcggccccgacaaaaagccgctgcgcttcggcgccaaagggaagctgctgaacgtgcctggctggagaaaactgctgcagggcgatgatgccgaggagcaaaagaacgaaacgccttcaagccccatcccggcgctggagccaggccagatactcaaggtctacagcggcgaggtcctggagaagaaaaccacccctcccaagcgattcaccgacgccagcctggtgggcgagatgaagcgccgcgggattggtcggccatcctcctacgcctcgatcgtgaagaacatcatcgacaagggccaggtgcagatgaaggggcgaagcctggtccccggcgagctgggcgaggccaccatcgcgctcctggagcacaacttcagcttcctcagcctcgacttcacccgcaacctcgaggtcgccctggaccggatcgccaacagcgaggacacctacatgaacgtggtccagcagttctaccagctcctgcagtcagagctgcagacgctgcgcgcgcaccccagcgcacagggcgacccgcgagcaagctctaccgccagcgctcccacggcgccggccagtgacttcctatgcggcaagtgcggtctgcccctgacccaccgaaagaaagccggcaagggcggcttcgacttctggggctgcagcggctaccgcagcgccggctgcaaggtcagctatcccaccaagaacggccaacctgacttcgacaacccgcgcgggctatag

SEQ ID NO: 362901 - DNA, 1788 bp, Pseudomonas aeruginosa
atgaactcactaaaaaaaagcgtatcagcaggaaaatatttcaaaatagccatcacactactctcccttccagcctccactgcaagcatcgcagaacaaagactagagttcacagtcaacaatgtctacataacacaatcaacacaaaattatgagagaagtattagtctgatagagggacgcagaggattactacgagtcttcgttcaggccaccaaaactaacaatgcaagaccaaaagtttttgtaaaacttttaaacaacggaaccatagcagacgaattttatattgagccagacccaagccttaaaggagttccaacaccagaagagtttaaccaagacaactacacccaaagttataacaaagagatacctgccgaacggatcaaaaaaggccttcaaattcaggtagtggttgacccttcgggggagatagtaaactgcactatcacccaaccgtgcaaaaatagatattggcctcgagacaacataccgccagaaggggactggcctcgctcagaacaaaacctgatcacagagagagttgtaaccgtaccagacatgaaagtagagatagtccccatcagctttacactaccaacctcccctcctgaacctgcaaagaagtctacgccaccagctattgacttaagctacgcaaaatctagcacagatcatgtacttcatatgcaccccgtaaaggactctatagaaacttcgttacatgaggttctcaacgttcctttttacgtgactcagactccggacaaacttgacacttggaatcggcttttaggtgttttatcagccacagccaagattgaaaacaaagtattcactcactatgtaggagcactcaatcctatccactgggactttgataaagatataagatttggctggggagaaaccccagggtactccagctttgcagtacatatccctcccagcataactcccataaaaaatccagagggagtagacctattcactgcaaccatggcacacgagattggtcacaatttctcccttggacatgtcaactgcaacactcccgaggggaatattcgtgtaagcgggtacaatgtctggacaaaaaaaatatttgacaaaaatttagggagcgtcatgggctactgtgataacagatggattagcgatctacagtactcacaggctctaacatggagaacaaagaactacggttccacatcagagacaactattaaaacggagaagagaagcccccctcaagaaacggtgatgctcatatgggggttggagcagaacgacaacgtccagcttggttctccaatctatttgatgagcattccaaccaagagccatcctcagggaacttatagagttgaagtcttcaaccatgacggcaacactaattccgtaaactttactccttcggttaccgacgataaaaaagcaaatacttttgctgtacttgtgccatccactcgagaaactacagagataagaatgtacaaaaacggaaatcttatcttcaaaaaatcaaaagacagaacacccattccgactataaagcgctcaatcacagccccaaaattagttcgaaaatccgcagaagatattcaattcacctgggacagcaaagaataccctacggcttttgtacaaaatgcggagacgggccaactgattagcattagcgagggagggaaatctataataaaaagcacaatactccggcgagcaacaattcacttgagcgatggatttgactctagagaccaagagatcctggtggaataa

SEQ ID NO: 362902 - DNA, 771 bp, Pseudomonas aeruginosa; identical to SEQ ID NO: 337582

SEQ ID NO: 362903 - DNA, 843 bp, Pseudomonas aeruginosa
gtgctcatcgacaatgccgaactggtctgcgaacgagcgcgcgaagaggtattccgggccaaggacgtacctttcaccttcggcgacatggatacctcgctgcacctgatgttcggcgagatccgccggcattccacggtggccatctccggtgaaggcgccgacgagctgttcggtggctacggctggttccgcgatccgcaggcggtggctgcggcgcgcttcccctgggcctccagggtgcgcctgccggccggcttcatcgacgccggtttcaaccgccgctgcgatctcctccagtaccagcaggccagctacgacgatgggctgcgccaggtcgaacacctggccggcgacagcccggaggagcggcggatgcgcgagttcagccacctgcatctgaagcgctggatggtgctgctgctcgaacgcaaggatcgcctgagcatgtgcaacggcctggaggtgcgggtgccctacaccgaccatgagctggtggagtacgtctacaacgtgccctggtcgatcaagagccgggacggcgaggagaagtggctgctcaagcgggcctgcgccgactatgtcccggaagccgtgctcaagcgccgcaagagcccttatccgacttctgccaacctcggctacgagcgtttcctgcgcgggagcgtgcggcgtctgctggaggacgcggcgaacccggtgttcggcatcgtttcgcgagagttcctggccgccgaactggagcatccggaggggtacttcaacacccaggtgagccgccacaacctggagaccgcgctggcgctggaaggctggctcaggttgtacgggctctccgcctga

SEQ ID NO: 362904 - DNA, 384 bp, Pseudomonas aeruginosa
atggaacgcatcgaacatcacgccagctttgatggttggcaggacgtttatcagcatgaatccacgacgctcggttgcacgatgaaggtcggcgtctatctgcctccgcaggcacagcacagcaaggtgccggtgctgtactggctttcaggcctcacctgcaccgagcagaacttcatcaccaagtccgccgtccagcgctacgcagccgaacatggcattgccgtcgtcgcgcccgataccagcgcacgcggcgaaggcgttgccgacgatcccgcctatgacctcggacaggggcgggtttctacgtcaacgccacgcaggaaccctgggctgcgaatcatcggatgtatgactacgtggtgcaggaactaccggcgctga

SEQ ID NO: 362905 - DNA, 594 bp, Pseudomonas aeruginosa
atgcagttttacaggttttcttgggtaatttttggctacactgtaggaagcatttttctcttgtcgccgcttattggctgggtagcttcgagcgctgatcttgcctggcagtggattaggtcggagggcgctcctgcgtggattcaagcagtaggctccattgctgcgatcatggcggcttggtttattccgtatcgacaagagttgataaggaaaaagaatcagcgtattgctgatttggatactttgaactggatatctctgcgcatgaggaatcaccttcaacacatgcgtgaggtgcttgatgatcctgggttgcatttcgaattctggcaggagtgcggggcgtttgagtcctggggtgtccataaaagtacggttgatacttttcaaaccggacatctgtgcggtgatgatgtggttcttttgctgaatctccgtgaggttgctgtgggtggtttgaaattggcagagagaatccagtttgagtattttgagaataacgaaagatttattgatgcctctcgtcatcttcagcagatagaccatctttggcatcaggcagattttgtcttcgatgaaaccactgtttag

SEQ ID NO: 362906 - DNA, 672 bp, Pseudomonas aeruginosa
atggagcatgaaaaaaaattttttgattcagccattaatcactatagatccaactttggagacatagagatgtggatgcgtaatgtttttgatttcttcaacagacatccggaggtcagaaagcatgttcattcggtcaaataccgcctgaaagaccctgaacatttacatgagaaactacatagaaaatgggatgaagacaacccaataacagcagacaacctgtttgagagaattaccgatctagctggtgttcgggtactattattacatcagcaaaagtttagcgaactgaaaggcctaatcgataatagattgaagcggcgagagtggtatttagtcgaagacccaaaagcctatacgtgggaccccgaagccaagtcatatttcgagagcctgggatattcggtactctttaagcctagcttttatacaagccttcactatgtaataaaacaacatgaagaatcgccttactcctgtgaggtgcaaatcagaacactgtttgaggagatatggggggaggtggaccattcaattaattatcctaaatccactcagaatgctgcttgcagggaccaaatcatggtgctcgcaaaacttattggtgcaggaagcagattggttgactcgatattttcgacacacgaagcaactaaaactcaagaatag

SEQ ID NO: 362907 - DNA, 855 bp, Pseudomonas aeruginosa
atgcaaaggataaactcctcaactcgctccatccattatgtacttaagccaaccgaagatggcatatccgatcaggcaacattaagcccacccaagaaactatctaacaatttagaccttatacctggccgcctgactcttcatatgttcgaggacaggatcgccaacagattcccccaagcgtatcagggcgacccacttgctattcgaacactcacgaaatttaaagatatagctgaaagctatgcaaaacagcacggctacgaagttgtaattttcgatacatctccgagccttgggatactaaacaaagtaatcatatccaccactgatggaattgtgatcccctgcatgcctgacatgttctccctatatggaattcgtaatataggaaattcactagccgcttggaaaaagcaattcaactcactctattcattactcccccccgagaaacgggctagctttcctgatgaatttgtgagacttcttggatatacgatttacaactcaaaaaaatattcaagcagaaacaagtgggaccttgccaccgcacattataattacgcattaaaaatcccccccacaatcaaagaatatatagatagtgaagctgtgaaattcctctctcctgaacagcttgatgagcctattggcggtacttctgtaatgcatactcataacaccctgccgaacatggcacaaaagtaccatgtgccgatatgggaggtgccgagctgcactgacttagatacggacgacgtctcaacaatttcaggtaatagaaccacctatgaggccacgagggagaaatacataactttcgctaaagacctattgtcgcggatgtcttga

SEQ ID NO: 362908 - DNA, 441 bp, Pseudomonas aeruginosa
atggatatccaggttgaagggcacaacaaccgagtcgcagggcgtgactacctggaactgaacgctcagctctcgctgacaccagagcaactgcaggtgctggctgtaaagccttgcccctcgtgcgaggtacggttggtcacggctcaggcgcagacgtgtaaccactgccttcgcgagcgtgttgccaatgaccagaaggtcaaggttggtgtggtcatattcctggtgttcatggtgtgggggtggctgcttatagagcgcggacccaatgtcgagctgtggcagttgatggaaaccctggtggctgcaggcggtatcgtgctgtgcggcgcgttgctgcttgagatgttcaagctttggtgggtgtgctacagcgcagagttcttttcaactgtttggcgcgcgttagtccggttggtgaatggagatcgtaaatga

SEQ ID NO: 362909 - DNA, 729 bp, Pseudomonas aeruginosa
atgatcaaggtggctacagcgctgaccatactggttgcagccctaacgggatgtgcgactgctccaaattaccgtgacaagacttcggcagaagtggctcatagtgttcgggtgatcgagaacgagttcagcaatgatcgagtattcgtagcacctcctgtcactggtgagccagcgggaggagtgcattactcggcagagttggccgctatacagtcgaaaggcaatggttcagtagttcatgccctccgcgtccattggaagtacggcaatgatcgctggttgttcttcaaatcggctactttgccaggcggtagatcgctggaaacgctggtcaatgatcgatttgtcgagaattgcagtgcatctaggtactgcaattacaccgagagtgtttccgctgttgttccacttgatgcgctggctagtgcaggcaatggcttacgagtgcagttcggctctgctctaggttggacagtagtcgagctgccgcgtgattacgtgttggggtacctacaggcactctccatcgccacgggtgctgctccgtcagtcccctccgagccatccagaactcccaagtgggaaccggtgccgacgcggtctactggccagtcggcggcggttgtagtcaaaaccaaggagcagcaactgcaagagctgcaaagcacctcgggactgagctacgaggagtacacgcggcggtatgagttaatcatggggcagtga

SEQ ID NO: 362910 - DNA, 624 bp, Pseudomonas aeruginosa
atggacatccttagcctcttgcgctccaactggttctggatcgcggtgatcgcggtgctgtacagcgtgttgggggtgatctcttcctccaacgcctacgaccgtgggtatgccgccgcccgcgccaagggcgatgctgcgctgctcaacctgcagctgcagcacgccaacgagcgcgcccaggccgcccaggacagtctcattcgctaccagcagcaggttacgcgggccaatgaggccgagcagttgctgctgactacccagcagcaactcgtcgatgccaaccaacagctccaggagcgcattccccatgtcaccaccgtctaccggccagcacccgcggctgcgcctgttgctcttcctcgttgcgtgttcactcgtggctgggtgcgcgacttcaaccttgccctcggcgccggtgtgcccgccgcaggagccggcgcccttgccgccggcgctacgcaagaagcctggcccgcccccggttctgacgccgaactactggaaagcggcgtcagccaggctgacctcctggcctatgcccaggactacggccgctgggccagaagcaatgccgcgcagttgacggcgctgctcgatctgcatgacagggagacgaagtag

SEQ ID NO: 362911 - DNA, 276 bp, Pseudomonas aeruginosa
atgacgaaacacccaagcggtagcgccgtaaaggctaccacagcaccgcgccacctggtcgccctggccattgtcggaggcgccctgatcgcgttccaggtcaacaagaccgacgccacccgggccagcctgcagagcgtcaccgacatggcccggcgcctcggccagttgaacgaccaggacgtctcagtcgtcgcccagttgctggcccgccccgcccgcaccgcccgcaccgcggatcctgctacccagttcggagaacacacccatgtctaa

SEQ ID NO: 362912 - DNA, 2655 bp, Pseudomonas aeruginosa
atgaacttcgaagatatctatcggctcgatgtgatccaggccctggaacacgaccaacagctggacttcaaggacatcggcgacacctacctgcagaagggcgtgtgcccgagctgcggccaccgcaccctgtacatcagccgcaagcagccctaccaactggcctgcaaccggctgaacgagtgccggcacaccgagaagacccgcgagcgctacagctacctgttcgagaacctgagcgatcgtttcccccgcaccgaggccaaccccaccgccaccgccgacgcctacctgcagcgcaatcgcggcttcgacaccagcaggatgaagggctggtacacccaggagcgccgcaagctggccgacgaaagctggggggataccgtgcgcttccctctgtgcgacggctattgggaacgcctgatcgacgcccgcgcggtagcgcgcaacgacggcgccaaggccggcatcaagtacggcatgagttacaagggccagggttgggtgccgcctgggcagagcttcgagaagaacgaccgggtgtacatcgtggaagggatcttccacgccatcgccctgcacctggccggctacaaggccattgccgcgatcagctgcaacaacttcccctggcagatcatcgaggccaaccagggaaaactgatcacctggtgcatcgccctggacaacgacaaggcagggcgtgccgtggtgggcaagtacctggcgcagatccgcaagcagaaagagatcggctgggtggccctgggcgaccccgaccgcgactgggacgacgtgtaccgcgacggccaactgggcgacgcctacctgcaggaagcctgctatcaaggccgcctgttctgcgccacctcgccgatgaagaaagcctacctggtctacctgaaaaagcgcactggcttcttcctggtggagttcggcagttgcctgtacgcggcgcgggtgaacctgaccgaactgcagaaggacatcgagggcagcgacatcgagggccaccaggccgagttcgccaagcacaccaccatcgccgaggtggccaactgcgtaccgcgcttcgagtacatcgagcgcgatgcggtcaccagcgagcagcgcttcttcttcagcttcgagttccccaacagccggcgcagctgccgtgaggcgctgccgcccagctcggtgaacgacccacgcaacttcgccaaggcactgatcgaaaaaacacccttcggcaccttcgacggcggcgaaaaggtgctctccatgctgcgcaaggaatggcagcgcgacgcccgcaccgtgcgcaccctgcccttcatcggcttcgacgacgacaccgccgcctactgctaccccaccttcggctaccacaagggaaaagagatcatgagcaacgaccacggctatctcgacgtgaacggcgagggcctgaaaacctcggtgcgcacgctgccagtagtgcgtggtggtgacttcgatccggagtggttcgccgacttccgcgccgtgttcgacatcaacggcctggcggcgctggcctggtggacgggctcgctgttcgctcagcagatccgcgccgcgcaggcgtcctggcctttcctagagctgaccggcgaggccggcgcgggcaagtccaccctgctgcgctttctgtggatgctggtcggccggcgcaacgaggaaggtatcaagcccagtggcagcggcgcctcggccatcggcctgctgcgcgccatggcggccgtcagcaacctgccggtggtgctgctggagtccgacaaaaccagcaccgacgccctcggccgtgaggtagtggttcaatacaactgggaggacatcaagccgctgttcgacttcaacgccaagcttcgcgtaaccggcgtcaagagcaccgacgccaacaccgaggcgctgctattccgaggggccatctgcatttcgcagaacgccaaggtggaggggcacgaggcgatcatcacccgtatcgtctacctacacatgacccgcgcccaccacagcacggcgctcaagccactggctcagcgcctgcgcggcatggaagtggaggacgtggccggctacctgcgcgccgtgctgtgcgacgaatgcggctggctggaacgctacttcgccgccttcgagcactacgagcagcgcttccaggccaacaagggtgtagagcacagccgcatcgtgcattgccatgcccaggtgctggcggccgccaaggccacccaggcgctgttcccggcctggacggacaacgacctggaggctctggccaagcacctggaaggctgcgccctggaacgccagcaaagtatcagtgcggaaaaccgcagcgcggcgcagttctggcagatctatcacttcctaaacgaagacgtagtgaccaccaccgacagcgacggcacccgcgaagagatccgcgagcgcctgaatcacagcagcgaccgcgacctgatcgccatcaacctggagcacttccagcaggccagccgccaggctgggatggaggtgatccccgccgtcaccctgcgtcgcgtgctaccgcagagcaccacccaccgctttatcgaggtacgcaaggtgcgctccaggctggagaagcgccccctcaactgctgggtgttcgccaagcggggaacggagtga

SEQ ID NO: 362913 - DNA, 237 bp, Pseudomonas aeruginosa
gtggatttgtcggcgaagctcaaggcgataagggctacggaaaggcttactcaggtggagttttgcgcgcttgtggatatcagcctcagttcctggaagaagtacgaggcatccattacagacatggggctgggccccgtgctgaagatcacgaatcacccgaggttcaagaagtacacactctggttaatgaccggtgatacggcccctgagtgcggccaagtcagtccggagtaa

SEQ ID NO: 362914 - DNA, 1053 bp, Pseudomonas aeruginosa
gtgtccattaagaaattggagtctggagaatggctggtggactgccggccagagggacgtgggggcccacgggtgcggaagaaattccgttcgaaaaatgaagcgctgtactaccagaacagagtgatgggtgatggtgcccggggtgagttcgagcgccgcccaaagcgggacgagcggcggctttccgaactggtcgggctctggttcaagtcatatggacgcacactcaagagtggggaagagcggcggcgagccctagagtctatggcagatcgcatgggtgaccctacggcctcggatttcaacaccagccactttacccagtaccgggccgagcgcctggaggggctgcatgggcgtgctaacgccggtagcggccggaagaagggcgagaaggccaagccagtcagcgccaataccctgaatcatgagctggcgtatctacgggcgatgttcaacgagttggagcggctgggggagtggaggggcgacaatccggtggggaaggttcggcaactgaagttcgacgaaaccgaaatggcctacctggccgccgagcagattcctcccctgctgcaggcgctccaggagctttcaccgaaggctcgcgtggtggctgaggtgtgtctatccactggtgctagatggtccgaggctgaggggctgacgccacgccaggtcagagccgggcggatccagtacacgaagacgaagagttcgaagaacagggccgtaccgataaccaaggatctgcaggaccggatcttagccgcgctccccttcggggactgctacaagaagttcggggaggccgtggagttggtgggtttggatctaccacccggccagctaacgcatgtgctgcggcacacattcgccagtcactacatgatgaagggcggcgacattctcaccctgcagcgtgtcctggggcacgcctcgctggccatgacgatgcgatatgcgcacttcagccccggccatctggcggatgtggtgtacctgaatcctctcgcaacccagcccccaccacctacttccgttcaatga

SEQ ID NO: 362915 - DNA, 1344 bp, Pseudomonas aeruginosa
atgactggcagcaagaaagaccttcttaggaagattcaagttatctctccgatggacgagattcgcgaacaaatagcagcgctgtccactccgtcgtacttggctcagatccaggaacagatgaaggcgctgaccaacccgtcgtatctgacccagttgcgtgcggcggctgctgcggtggctgacccgtcgtatctggctcaggcaagggaggcggcggctgcgctggccaatccgttgcacatgacgcagatgcgggaggagatagcgacgctgaccaacccgtcgtatctgacccagttgcgtgcagcggctgctgcggtggctgacccgtcgtatctggctcaggcaagggaggcggcggctgcgctggccaatccgttgcacatgacgcagatgcgggaggagatagcgacgctgaccaacccgtcgcatctgacccagctgcgtgcggctgctgctgcggtagctgatctatcgtatgtggctcaggcaagggagacggcggctgcgctggtcaatccgttgcacatgacgcagatgcgggaggagatagcggcgctgaccaacccgtcgcatctgacccagttgcgtgcggcggcggctacgctggctcacccgtcgtatctggctcagatgcgagaggttgcggctacagctcggatgcaaaaagagctttctgctgtactcggctcgtaccaagatttgatccgcgagtcagccttggccagctatctggtgacgtcggatgacgagaacgctccaagttcccagcgggtggaggccgagggctttgatagtttggaggtcggggacttcgcagcgctagagtccgttcccacatatgacgttgatctggaaatcgtccaggctctatccgaagggcatccagaatcgttgtccctgccagcgacgcaacgcttacaatttgtatatctcaagattgtggcaatttgggacatgcttctacgtatattcaatacttgcatggcgctcatttacctgactgcgttgatgtcaaacgcgacggtgcctgcagatgttccgaagcaggctgcccagttgcccaactatgagcgacagctgctagccgactcctaccggatcgtgaatcgcaacggtgcaaggctccgcgctgagcccagcaagaaggctgagatcatcctacagttgcagcttggtgcggttgttgaggtggaggaaaacaatggagagggctggttacacgttgtcgctgaatatcaggatgagtcggtggaagggtggattcacctcaccctgacttcgccagtgccgccgccaaagtatcaccgtggacaaattgtggacgctgacaatccgtga

SEQ ID NO: 362916 - DNA, 636 bp, Pseudomonas aeruginosa
atggttgaaggggctcagccaataccagacggtgcgccgtttgatagtgccgaaaagcttgcacgtattcaggctcaagagcgagaggaggagcgtgaactagagtgcgaagcggctcaagcgcttgatgctctggagcatgaagggtcgccagtgctcggtgaattgcttgagaaaccaaccactaaagctgctctatcacgggttgtagcttcagcaatcacgttacatcaggagcggcattcaggcccgctcccttctcctcgtcagatgcgcgagtatgagaaatgtttgcctggtgccgccgagcgcattatggcaatggcagagcgcgaacagcagaatcgtcacgaaacccaaagggcatttatggatttccgtaatcgcactttggagcatgtgagagaacgcgattctcgcgggcaatggctagggttcgctcttgctttaggggttttggctctcgggactctaatagcggtgttgggcttcccgaaaacgggagctgccttagctgctgggaccatgattggtttggctggagtcttcataagtagacgcgtgcagcgaggccctgatatgtctgaggcgcccgacccggatgagtcggatgggaatgaggggccagagaagtag

SEQ ID NO: 362917 - DNA, 1311 bp, Pseudomonas aeruginosa
atgtctgagcctgtcaacaacgctccgcgtcatcagtacgaggcatttctacgtcaactgccagccgattgggatcaccaagaaatcacgcagcttggtgctgtcgttgggggaggcacgccgtcgcgcgaggtgccatcgttctggcgaggcccaattccctgggtcacgcctggcgaagtcagcggcgaggccagcaagctgcttcacgatacgcaggagcacatcagcccgtcaggcctggccgggagtggcgcaaatctgctgcctgcagggtcgcttctggtgacgacgcgagcaacgctgggtgctcgtgcgatcaatgcggtgcccatgtcgacaaaccagggattcaagtcgatcgtcttcaagaagccagaggaagccagctactactaccacctatttgagaaggtgaagcctgagctggtccgtcgcgcgtccggtaccaccttcttggaaatctcaggcgcggagtttggctccatcaagttgcccagcccctcgcccgaggagaagctgaagatcgctcagttgctggacaccctcgacacagccatccatcagaccgaggccattgtcgagaagctgaaacaggtcaagcagggattgttgcatgacctgctgacgcggggtgtagatgccaatggcgaattgcggcctagccacgaacaggcaccgcacctttatcaggaatccaggctgggctggataccgaaggactgggaagttgctcccctggttagcaagatcagtttccctgaagggcaagttgaccctcgaaaggctccatatcgggattggacgctagttgcgcctgaccacattgaatctcaaacgggccgtctcattgccaaggtcactgcagcagagcaaaacgccatctcgggcaaatatctatttgctgcaaacgacatcatctacagcaagattcgtccgtacctccggaaggctgttttggcagatgattttggtttgtgcagtgccgatatgtacccactcagaccaaatgaaggcgtgtcaccaaggtttctattggctgtgatcctaggccattcctactcacgctttgctgagtcggtttccatgagaagcggttttcccaaaatcaatcgaaatgaaatggccgaattctctatgggctggcctagccgcgatgaacagaagttgatcgctggttttattgagcaggcggatagtgagcaggcgctggaagaggtggagttgcaaaagcttaagctgcttaaaactgccttgatggacgacctcctcaccggccgcgtccgggtcacgccgctgctggcgcaataa

SEQ ID NO: 362918 - DNA, 948 bp, Pseudomonas aeruginosa
atggcacttaacctcggcaaagtggttgtggactacctggccacgcatccagaacagaaattctccgctcgacagatcgctgagtggatttttgaaacttatcctgccgaatgccaagaaaaacgatccaatagccggggcgattacatcaagaccgatgccgacttggttcaacaactggttgcggagatcagttctcagagacctcgcttgcagaaacgtaacccggagctaaagacgaccgaggggcggccacgcaagtattactactcgacaatgtctgatgtcgctgaagtggctgcggtcgagagcgtgattgccactcctgctgcagacgcaagtggaaagtcgcagggagagcacgcgctttacccgctgctttcgctgtatctgtgggaggagtttggagtttactcaaagcgcattgacgagaagcgctcatcgaacaagcgtgggccaaacggcaaccgttggctatacccggacgtggtcgggatggaggacttgggcgcagaatggcaccaggaggtgcgggactgcgtgaaccagtattcagacaagcgcacaaagctgtggtcattcgaggccaagttgctgatcaaccggtcgaacgtgcgcgaatgctttttccaggccgtctcgaactcgtcgtgggcgaacttcggctatttggttgcggcggagatcgaggggcaggacacgctcaaagaactacgcatgttgtttgcggcacatggcatcggtttgatcaaactggatgccgacaatccggcagaaagtcaggtcttgattccggcccgtgaaagggacgagatcgattgggatatggccaatcgactggccacggagaacagggattttctggagtacgtgaagctggtgaagcagttctatcaaacgggcgaagctcggctggctgattgggatgtgccagaaaccacagattga

SEQ ID NO: 362919 - DNA, 291 bp, Pseudomonas aeruginosa
atgagtaaccgattcaaacgcgccgtcattgacgacgtgacgccgcgcaacatcgacgccagccagcagaactaccttcttgatttattcgaatcggccatgaagtcggtagccacgacgctggtgcgcgaggccaagctcgacacgtcagattttgctacggcaaaaacacggggctgcgaaggctttgcgctagtcttgagccgggttcgtaccgactcacgcaccgagtggcttggtacgtttcagcgtggcgaacaacacctcgatgtcattggtcatcttgagtaa

SEQ ID NO: 362920 - DNA, 300 bp, Pseudomonas aeruginosa
atgaccgacccacaaaaacctgctttggtcgacaacatgctcctcctgcgcaaggaggactttgacgacctgctggaacgtgccgctgaacgcggcgccaagcgagccctggccgatgttggcctggatggcgacgacgcggctcacgatatccgcgaactacgcggcctgctcgatgccttcaacaccgccaagcacaccgcatggcagaccgtcatcaagatggtcaccaccggattcctgctggcattggtggcaggcgcgctcatcaagctcaaggtgttcggaggtggccaatga

SEQ ID NO: 362921 - DNA, 354 bp, Pseudomonas aeruginosa
atgcccgcaatcactgacccgaacctggggctcaactacggctggacgctcggcgaaagcggctggggcgccggtatggacgccaacctgaagcggctgggcgccgtcgtcagcctgtcggtcaaagaccgagatctggccacaccacctgccagcccgattaacggcgaccgttacctgattcccgctggtgccaccggcgtctggagcggcaagacagaccagatcgccgcgaggattgccggcgcatgggagtaccacatccccaagatcggctggctgtgcttcatcgaggacgaggccgtgctttcggcctacaaggccactggttggagccccggcatcgccatctga

SEQ ID NO: 362922 - DNA, 2187 bp, Pseudomonas aeruginosa
atgggcggtagcagcaaatcgcagacggtcggttaccgctactacctggggatgcacctcgccatctgccacggtccggtcgatgccatcacggagatccaggtcggtgagcgccaggcctggagcggcaatctcaccgccagcggtcggatcacggtcaacatgcccgagttgttcggcggcgagaagcgcgagggtggtgtctccggcgccatcgatgccgccttcggtcagacggcgcagacaccgaatgattacctcgtctcgaagatcggctcgccgcagccagcctatcgcgggattctgagcttgattctgcggcaggtgtacatcgccgcgaacaacccctacatgaagccatgggcggtgcgcgtgaagcgcttcttccgcgactggtactccgcaaaggcggagatcaacggcgcggccaacccggcgcacatcgtctatgagtgcctgacgaatgccgcctggggcatgggctatccgacggccagcatcgacgacgcctcgtttcgcgcggcggctgatgtgctctacaccgaagggttcggcctgaacatgatctggctgcagcagagcaagatcgagcagttcatcaaggagatcatggatcacatcggcggcgtgctcacgacctcgccgtcgaccgggcgcttcgtcctgaagctggtgcgcgcggactacaccgtctcgacgctccgcgtcctgaacccggataacctcatcgagctggagagttttcagcgggctgcgtggggtgagacgaccaacgagatcgtgctcatctacaccaagccagacaccttcaaagagaccagcatcgcggtccaggatctggccaacatccaggcgcagggcgccgtggtatcgcagacacggcgctaccccggcatcacctcggacaaccttgctgcccggatcgccatgcgcgatctggccgtcgtctccacgccgcttgccaaggtccgcttgaaggtgaaccgagcagcctggaatctctatccgggtgatatgttcaagctggagtggccagcgctcgggatcgccggtctggtgatgcggattgcaggcgtcgatggtggctcactcaccaacggcgccatcagcatcgacgcggtcgaggatgtgttcggactgccctcggcggcctacaccgcctcgcagcccacgggatggaccgatccggttcccgcgccgacggcgaccacgcctcggcgtctggtcgaggccccgtactgggacgttgcccgtgcactgtccgcagcagagctggcctacctcgatgccaccgactgcttcctgcagactctgggggggcgcccagtaccgggtgccatgaactacgacttgtatagcaagacaagttcggcatcgacttacaaccagcgcggccaaggtgagttctgccccacggcggtgttggcttccagtctcgcgcaagaggtgacgagcacggccacctacagcggcgaactcgacatcgatctggtcgccaccgggacctatgcctatatcaacgacgaggtcgtcatggtcaccgccatcaacacgaccacgcagagcctgaccctgacccgtggcgtcatggacaccgtgccggtcagccacgccgccggcagccggatctggttcgccgatggcgcacaaggcatcgacccgaccgaatacgccgctggggaaacggtcaatgctcgtctgctcaccgtgaccggaaaaggcacgctggcgctggcatcggccccgaccgactccctcgcgatgaaccgccgccagaatcgcccgtacccgcccggcaacgtcaagatcaacaacgtggcctacccggcggtcgccaagggtgacttggtcatctcctgggcccaccgggagcgcctcagccaaacggtcagcctggtgtcccagaccaacggcaacatcggcccggaggctggcgtgacctacacgctgcgcatctacggggaagcgggcagcctgcggcgtacctacagcggcctgaccggcaccagccagacctacaccttggcggacgacaccgccgattccggtcttggccgacccaatgctgcgctgcgaatcgagctcgaatccaaccgctccggcgtgatcagcctgcaaaagcactcgatcgccttcgagcgcgccggctacggactttcctacgacaaatactacggaggcatctga

SEQ ID NO: 362923 - DNA, 219 bp, Pseudomonas aeruginosa
atgaccgacattctggtgacccatggtgacatgcgtcgcctgggctattgcaatcgtggcgcgcgggagtggttcgcgcgccaccagctcgactggagcctgttcatcgatcaagggctgccagcgcccatgttgctggcaaccggggacagcatggccgaggacgtagtcgccgccgcccgagaacgcatcgcctccgaggtgaacgatgggcggtag

SEQ ID NO: 362924 - DNA, 231 bp, Pseudomonas aeruginosa
atgtgggccgccattgccgttctgatcgtgagcgtactgattcagtacgcgctgcaacccaagacaccacagccccaggccgcagaactcaaggacttcgatgcgccgaccgccgatgagggccgccctgtgccggtcgtgttcggcagtgtgctggtgaagagcgccaacgtggtctggtacggcgatctgcgcaccacgccgatcaaatccaaaggtggaaagaaatga

SEQ ID NO: 362925 - DNA, 810 bp, Pseudomonas aeruginosa
atgacctacgccagccgggaagcatccactgacgccagcagtccagtggagttgtacgagtttcggcgaggcggtgaaacctggcgttacaccagcgccgcgcaggatgccacctatgcgacctacacctacagcgctgtgccaatcagtcgcggcagcatcgaacagaccacggagatcggtaaagcgggactgcgcatcacctttgcgcgcgatgtcgaggtcgcgcagggcttcatttcgacaccgccttccgaagtcaccttgctcacgctgtaccggcaacatcgcgatgatggcgaaaccgtcgcggtgtggatggggcgtgtgctcaacgcggaatggcgcgaatcggtcgttgagctcaactgcgaaccggtttacaccagcctgcagcgcatcggcctgcggcggttgtatcaacgcaactgcccgcatgtgctctacggaactgcatgcggggcaagcgcggtcgtgtttcgggtcgctgggactgtcacctcgattaccggcaccttgctgagtattccggccgctgccgggttcgcggtcgggcatttcgctggcggctacgcgacctgggcggccaacggcatcaccgaaaaacgcatgatcgtcggccacaacgccgatgccatcaccttgtcggctgtgccaccgggactcgccattggcgatgccatctatctgtaccccgggtgcgatcgcactctggacacctgccacgcgaagttcggcaacagcgccaacttcggcggattcccgttcattccgaccaaaaatcccttcggtggcagcccgatttactga

SEQ ID NO: 362926 - DNA, 915 bp, Pseudomonas aeruginosa
atgaaccagcgcaacacggccgcttcggtgcgggcccgcctgctcacccgcgcccgcgagacccgacaagacttcaatctggtcttgacccgctacgcccttgagcggctgctgtaccgactcagcgtttcgccccatgctgaccagttcctactgaaaggcgcgctgctgttcgacttgtggttcgacatcccgcaccggccgacgcgggatgcggactttctgggttttggttcggccgagttgccacacctggaggccgtcttcaaggacgtctgcgcgatggagactgacgacggtgttacgtttcgaccggacaccgttcaagcggcggagatccgcaaggaggccaactacgccggcgtgcgcgtcaccttgctcggactgatcgatggagcgcgctgcccgattcaggtcgacatcggtttcggcgatgccgtcacaccagggccggaagatgtccagtaccccgtgatgctatcggagttctcggcgccgaaactgcgcgtctatccgcgctacaccgtggtggcagagaagctggaggccttggcctcgctgggaatcgccaacagccggatgaaggattacttcgacctttggatcttgtcgcggcacaccgaatttgacggcgacaccctgcgacgcgcgattcgggcaaccttcgatcgacgcaaaacgacgttgcccccggacatcccctttggcctgacggatggttttgcgcaagatgcgcaaaagcagacgcagtggcaggcgtttctgggaaagaacagactcgaagcgctgcgcctggaggacgtcgtggtgtcgcttcgagatttcctgcttccagtcatcgctgcggcgaacgctgatgccgactacccgcaacactggccggctggcggaccctggtcgtcagtggcggggtga

SEQ ID NO: 362927 - DNA, 600 bp, Pseudomonas aeruginosa
atggaaacttcgcaccagaccattctggatctcgccgcccagcgcggcctgatacgcccgcgcgatctcgatgcgctgggtctgcccagtgtcgcactcacgcggctggttcggcagggcctgctcgtccgcgtgggtcgcggtctgtacgcccgtcccgatcgcagcgtatccgagcatggcacgctggccgaggtggcccgcaaacacccgcaagccatcgtctgcctgctgtcagcactgcgggtgcacgacctcaccacgcaatcgccattcgaggtctggctggcgattcccaacaaggcgcgtgcaccgaagatggattatcccccgctgcgcatcgtgcgcttctcaggtgccgcgctgaccgatgggattgaagagcaccagatcgatggcgtgagcgtgcgcgtgaccaacgtcgcccgcaccgtggccgactgcttcaagttccgcaacaagatcggcctcgatgtcgcgatggaagccctgcaggaagcctggcgagccaagcgcgtgagtatggacgaactctggcgctatgcatcgctgtgccgagtggccaatgtgatgcgcccctacatggaaagcctgtcatga

SEQ ID NO: 362928 - DNA, 201 bp, Pseudomonas aeruginosa
atgcattccccgctaacccccgagcaagctcgcgcggtgcttgaccgtgagggcacgtccattgctgagttcagtcgcaagcacaggttgaacaaaaatctggtcagtgaccttctgaatggccggaagaaagggcgccgcggcgaagcccatcgcgcggctgtcctactcggcatcaaagatggcgtgatcgcacagtaa

SEQ ID NO: 362929 - DNA, 348 bp, Pseudomonas aeruginosa
atgaacgggccaattttggagctgatcgagggcaccaccttcggcttcgaggcgacctggtcggatagtacgggcgtgccgattgacatcactggctgcgcggcgcgtttcgtgatctgcccggcggacagcactcggccattggtggagtgcagcaccgaggatggcggcatcaggctgggcggcgcctcgggggctgtggtggtcagcctggccccaggcaaaacggccggtaagcacagtaagcagtggcagggcgcgcgctatgagctgcgggtcgagtaccccagcggcgatgcctacagcctgctgcgcggaaccgtggcgctgtcgccggggctgctatga

SEQ ID NO: 362930 - DNA, 1674 bp, Pseudomonas aeruginosa
atggcgaagaaagcggcaactaaaaaggcggtcgaccaggtgacggaatcggccaagggtgaggaagcgatcgaccatcgcgagcgagtcagcttcggcaactacggcggggccacccggcagaaggtcgagctgcagccgttgatcgacaagctgctcgaggacgtgaaggcgatcgacaacgacgacagcctgagccgcggcgacaagaccaagcgcctgtcgcgcctggccgatcgcctgaaaaacaagctgtacgaggatcggcgccgcaaggatgcggacaagctcaaggcctcgagctaccgccgctacctgaccaccgtccgcaaggcgatcaccgcgcagaactggcgccaccactccatcgaggagagtgcccagcgcctggccaagcatcacccgcgctatgccgagcagctgctagccatggtcgacctggtcgacatcaccgagctgcgcctggcccatcgcgacctgctggcgcagatccgccaggatcgcgacgacgacgcctacgaggcggtcaagggcatgaagctcgaccacgagatcatgcgccacctgaccctgccggcggcgaccaaggcccagctggccaccgacgcagtcgagacgctcgagcaccgcgccaccaacaccatctcgatcaactaccactggctggtcgagaccatccgcgagctgctggccgcgaccgagatccgcgccgatggcaccgcggtgcccttcttctcctacctggccctggggctggcgctggcgaccggacggcgcgaggtggagatcctcaagctggcgcgcttcgagaaggtcggcgagttcgagctcgagttctcgggccaggccaagcgccggggcggggtggactacggcgacagctaccggatctacaccctcctgcaggccgacgtcgtgctcgaggccttcgccaagctgcgcgccatgcccgaggtgctcgagctgcagcacctggacaacaccgaggtgaaccgccgggtggccaagaccctaaacacccaggccaagcgcgtattcggcaaccaggagcgggtcttcaaggatagccgcgccatctgggcgcgggtggtcttcgagctgcacttcacccgcgacgcccgctgggcgaaggtcaacgagacagtgttctggcgcgagatgctgggccatgaggatatggacacccaggagagctacaaggccttcaagatcgactacaccccgccggcgaagccgacggcgccggccagcaaatacggcagccgcctcgaggcgctcgaggccctggacgagcacgagcagatcgccggccgcgaggcgatgcagaagatccaccgctgggtgaaagagaccgtgaaggcggcgcccgaggcgcggatctcgcagaaggcgatcgcgaccaatgtcggcagctaccgcccggtcatcaaggagtatctcgagctggcggccgaggcgcttgccagtccggcgcgacctgtcgaggagatcgccccggctgtaccggctgaggtggtgaaggctaagccgcggatctcggtcagcgaggtatccagcggcaagtgggtggcggtggcccgcgtgaatggcgtcgaggtggcgcgcggtgagggggccgaccgggctgcagcttacgaggcgctcaaggtggcggcgacgactagccgcgggtga

SEQ ID NO: 362931 - DNA, 264 bp, Pseudomonas aeruginosa
ttgcaatgccgtgaaaagatggacagagcgtccgccaaactcagccgcgccaggtcggcgctaacgctggccatgaaggccggccccgaggctaccaagggcgagctgctggacgcagtcctagccgccctcgagcacattgatgccgctgacgcggcgctgggagatgaggaaacgcgagcgggtcggccgggggatatagccccggcgaccgaggcaggtcacccgcggctagtcgtcgccgccaccttgagcgcctcgtaa

SEQ ID NO: 362932 - DNA, 3885 bp, Pseudomonas aeruginosa
atgacaaacgtacaacatggcaaggggctaggggccttctacaaagagcgattcaacgccgacccatacgccctcgccgactactgtcacgacgagatcgccgccgccgcggccgacgcctacgtcgactggtcttcaatctgcaacgccatccactacaacggcgagcgactgaagaagtactcgaaggtcaagatcaaggccaccgatgccaagtacaacggcaaggtgatggcctggggcgacctcaagaccgcccgcggtaacgccgagctcgaggccttcgactacccctttctgaccttctcgaacaacgccagaaaccccagcacctggtcaggcttcgcggccctggccgagatctacgaacgcgagggcggcaagctcaccgacgcccgccacctcgagtggaaacagcgccaggagcagcgccgcgccgagcgcgaagcgcgcaagctcgaagacgagcgccaggcccgcgagaaggccgaacggatccacgccgagcgcctcgcctatgaccgcgcctggctgactggcgagacctgcaccttcctctatgagcacggcgaccagatccgcgagggcacggtcgaagtgatcggggccgaggatggcaccgccccgtacctggtcaagaaacaggtcggcgccatcgcgtcacgcttcaaaatgcagcgtatgcgtgaccgtcacggtgtattcacagcggtgccgatgcacgacatcgacggcaacttcctgggcctgcagcgcctctatgccgacaagaaactgcagggcaccggggtgaagatggacggcgcgcattgcgtcctgggcgacctcgagaacgccaagcgccgctactcggccgagggcttcgcgaccggcgccagcatctacctggccgagctcgaggccggccgcggcgacgaggtcgccgtggtcatcgcgttcaacgtcgacaacctgctcaaggtgctgcgcgcctacgccaagcgctaccccgcctggcgcttccacaacgccgccgacaatgaccagtggaaagacggcaacgccggcctgctggccgcgctcgagatccaccgcgaccttcaccaccagggcatcgtcccgaacttttccgcccacctcgagctgctcgagtgcagcgctcaggcaatcgccgagctcagagcccagaacagggcgcccgtgatcggcttctgcgccgaggagctcgccgccttcaaggccgcgggcaaaggccccaccgactggaacgactaccactgcctgttcggcctcgaggcgactgccaaggccctgcgcgcacgcgacagcgtgttccgtgcggaaaaggactggttcgcctactgcctgcagcgcctgcagtacagcggcaagcgcctgggcgagaagaacgccatggccgcggtggcggccggcatgatgctctccccgatcaagtacagctacgaccaggttgtgcaggcgatcctcaaggcactaccggcagccgtcgacagcaccagccgcttcaagatccgcagccgcgcccactggctggccaagcaaaagctgcagcaggcgcgccagctgcgcggcttctccaccgcagcgctggccaagccaaacgtgcagcacctcaacatcgagggcgtgcgagccgcgcacggtggcatcgagctgccggcgcacatggccgccctggtcgaatcgctcgagggcgtcatcatcgtgcgcgcgccgatgggctcggggaagaccgagaagctgatcgcgccgctgatgcaggcctccagccgcgccgcctacgttgcgcaccggatctcgctcctcgatgacgctgccgcccgcctgggcgtcgagcactacaaacaggtctttgcctggcagatgcagcacgtctcgcacctggcctgctgcgtcaacagcctgaccaagcccatgttctacaacgccgaggagcgcagctggtttaccaccctcgagacgctgtgcatcgacgaggccagccaggtgctgcgccacaccaccaccggcccggtcgagggtcgggtcaaagtcatggatgcgctgatcgacgccgtcggcgccgccaagcgcgtgctgctctgcgacgccgacgccaacgacagcctgatcgagttctgcgagctcgcccgcccaggcgagacgatcaccatcctcgaggtcggcggatccgccgagcacatccgcatcgaccacgccgaggacgaggccgtctggcagctggcgatcgacaacgtgaaggccggcaagcgcgtgctggtcgccaacgactcggtcgagtcggccaagaaaatggccgccctgatcgaagccatggtcgaggagggcgagatcaagcccgtgcgcatgctcctggtgcatgccgacagcaaggccgaccaggacgtcgaggccttcctctgcgaccccaacgccgaggcgatcaagtacgacgtgctgatctactcgcccgcgatctcctcgggcgtgtcgatgaccaccccgcacttcgacgcccacttcggcctgttcagcggtaacacggtcggcccgtccgacgccgtgcagatgctgcgccgcgaccgcaccgcccgccactacgtgatcggcatcggccacaccagcgcccaacgcgaaaccgaccgggagaagatctggcgcggccacatgaaggccgacgaggtcgcctgcgagttcgaggagaccagcgaggagatcatcctgcgccgtcgcaagaccgcgttcgaccacctctacctggccaccgtcaccgccgagaacgcggcccggaacaacttcgccaacaacctgctgctgatgctctacgccgacggctacaacgtgcagcgcctcgacatcgccggccttggctacgacgaggaggccctcaccaaggaatcgcgcagcaaccgcaaggtggccggcgcgattgtgttcgacaagcgcatggatctgatcgagagcgtccagacgcccgacgaggagcagttcctcaagctcagccggcaggaggtgcgaagcgaggccgagagcgcccagctcgaccgctaccacatcgagcaccagctcggcgtcgacgagatcaccgccgacgacgtggccttctacgatgaccgcggcatttccaaggtggtggccatggagctgctgcaggccgacgaggagcaggccaggaactacgacaaggcgcagcgcaaggcgaaggtaaccctcaccctacaccgctggaaaacgcccgcgcacgcgctcctggggcgcgtcttcgagatcctcggcgtcgatcgcttcacgggcgagggcgagttcacgtcagagcaatgccgccaggtgctcgagtacctcaccaccagcgccgaccaggtcgagctctacaacgccctcaagctggggcgctacatccccagcaccagcgcgcgcatgtgcgccactaccttggtcaagtcgattttcgagcgcctcggcctcgctatcacaaagcgcaagacgaacggtgtgcacttgttctcagtaaacccggacaattggcagttcatcatggcctattgccagcgacgcgcagcgaagaacgtccactcgctgaccacccacgagcacgacgcggcccaccagcccaagctcgcgccagagccccaggcagatgcccaggccacgcctggcgcggcttccagcgacagggatactttgcagtgtgatggtgtaagcgagagtggaaagtatcccttgagcgtgcgggagagaatcttcgccgttgcttctcgcttcgccgcacccgccggtatctcgctgacgcgactcgtgggggcgctgacgccggaggtggcgggcagcctggccaagccgggagcggagcagagccgaacgctagggttcacccttgcgtatgcggccaagctgctgcgatcctag

SEQ ID NO: 362933 - DNA, 666 bp, Pseudomonas aeruginosa
atgtcacgcgactaccgaataggcgcagccataaggaagcggcggcaagcccttggctggggcctacaaagactgatcgacgcggccgggggcgatatgtccaccggctatctgtcgaccctagaaacgacggacgtcgccccgagcgtctacgtcgccgacaacctggcaaaagccctgggcacgtccgtggatacgctcctggccgaggcccgcgaccctgacagcatcaccccgccgggcgagccggcccagcgggtgccgctgatcgcctgggaaatggccgcagaatgggcacgcaaccccgatgccaagcgcctgccggcgggcacctgctggatcatgccgagcgagacgccaccggggagggtgttcgccctggtcgtgcgcgacgagctcatgcaggcgccgaccggggtcagcttcccgcgcggctacaccattttcgtcgacccgatgcgcaaggcggcgcctggtgacttcatcatcgggcacctgggggatccggcctcgccggtcttcaagaagctgaccagggacggcgccatgctctacctgcgcgccctgaatccgcagtttccgatgcagcaggttggtgatactttcgaggtcgtcggggtcgtcgtaggagtgcgggcgacgttcgacaaaggagaggttctataa

SEQ ID NO: 362934 - DNA, 591 bp, Pseudomonas aeruginosa
atgcgaacggaacgcgagatcgttgtcgatcagactagccgctggttcaccaattcggagtggtcgctggaacgcttcgccagcgagcgcctggcgccggccctgtccgccgccgggctgattgaccccgtcggggatcccgaggacgtcgccgagtatctgcgcagccgcaaggcatggggtatgcgcgtcgcgcggatcttccacggcacccagccgttcccgctcgaatggaagtgggtctggctgtcctgcctgcccgaggagtaccagcgcgccgcgcgtcacgagctgctggccatggccggttgcttcgacgtgcgcctgcctgagttcgtcggcggcatggcgctggaggccacccaggcacgcctgggcgaagtgacccgcgagctcggcgacttcatcgccgcggccaccccggcacataacggacgctacgaccgcaccgacgacccggccgccgtcgaccgcatgctgcgcgaaggcgccgaggcgatcgccgcgatggtcaacgagatgatcgccgtctcgacgggtaccggccgcccgctgccgctgctggtgctcggcaagatcgagggccgctga

SEQ ID NO: 362935 - DNA, 390 bp, Pseudomonas aeruginosa
atgtcggctctgcgccttgcgacccaggatggcgccccggtaccgaccggcgcggatctgcacgaccacttccactcccctgcaggcgagagcaaagaggatcgcgagcgccgcctggcccgcgaccgaaagcgcgcgcaacgcgcacgcgaggcccaggcgaagctgaaagccgaggctgtgaaggtgccgctcgagctgtatcagggcaccgtcaaggccctgcaggcggtgatcgaggccggcggcttcgacggcccccaggcggccgaggaggccattaccctgctgctgcatggtgccgccgctttggcagcgcgtgacagtcacgctttcgcgcaattgatcgcgccgccgtcacaccaggttgtcgccgatgctgacgcatga

SEQ ID NO: 362936 - DNA, 222 bp, Pseudomonas aeruginosa
atgctgacgcatgaacccgcccctctcgagctgagccaggccgacgctgtcgccctggcggaattgatcgacgccgagctgcgctcggcctcgagcctccgccccttctgcctgggctgcggtcgcgacatcgacaaggctcgcctggcggttttcgccaaggcccgccgctgctcgacctgcgccggcatcccgtgcctggccaggaggcgcgcgctatga

SEQ ID NO: 362937 - DNA, 819 bp, Pseudomonas aeruginosa
atgaccttcgccctcgagatccgccacgctgcgccgacttcgtcggcggctgagtgctgggtcgagctggaagatgctgcgcctctgtcccgccgcccgcgccgcgcctggcgcgtgccggaagtcaccctgcaggatctgcagtggctgcgcgagcgcctgatgttcgccttcctggccccgagcgactaccgcgacgacaggccgccccagaagatcctgggcgcctacgacaccagctgcacccgtgacgcttttccgcgctggcgggccgaggagctggccgagtgcccggccgacggcggccaggccaagcgcctgcccctcgactacgtggccagcctggccagggataccacccgcgtgactgtcagcgagacccgcaagaaaaagaccagctccgacccgctgccgccgagcgccttcgacgacgcgcgcctggtgcgcatcgtggccgcccaggcgtcggcctaccgccactggctgcgctatgcctacgccgactcgaaagagtgggccgacgaggccggcgcagtggtcgagctgtgggcgcgcgtggcccctgggctgggcaagatgcaggccaagacgctggccaaggccaagggcctggcgcacctcgctgtgcagcatggcaagcgctacgcgaacgccggcaccgagctgtactcggccgcccgcctggctgagctgctgggcgttaccacgagcaactacgaccagcactggcgcccccgctggaaggcgctcctcgaggcgctcgagcgcctggacgaggaggccctgcgggcggtgctgcagcagtacaacgacaagtga

SEQ ID NO: 362938 - DNA, 318 bp, Pseudomonas aeruginosa
atgttcggatggatcaagcggcgcctgttggcgcgcaaggcacgcaagtctctggatagcgttcgccagttcgaggccgcgcggctcgaccaggcgcgcacccggccggtaccgccggcctatagcccgtcgccggcctactcgacgccggtacaccagggcgacccgttgggcgtcaaccaggcgctgctgatgtcggccgtgctcgatgatgatcgccgctctgtcagctgctcgagcagcttcgcctctgacagcacctcgagctggtcggggtctgactcctcgagcagctgcagctcgagctcctgggaatga

SEQ ID NO: 362939 - DNA, 324 bp, Pseudomonas aeruginosa
atgaccatggccgccgtgctctgcatccattgccaggtgccgcccgaacggcgtcagcaggagggcaccgggctggtcatgtggatctgtccggtgtgcaataaccgcggcgaggtgacgccaagcgagagccgggccttggccagctggaacctggtcaacgacgaggatatgccgcggcacacctgcatagaccagggcgtgccgcgcttcttcatcagtggcggcaagtggggcagccgctgcccgtgctgcgacttcgtcgaccatggttatggctcgctcgagggtgctcgggctggctgggcgagggctacgcgatga

SEQ ID NO: 362940 - DNA, 252 bp, Pseudomonas aeruginosa
atgaaggggcgggtgctgagggtcaccaactgccgtgacccgcacatgtggtacgcgggcctgatcggccaggtggtgccgctggttcgcgaggaggcggactgctactggtcgcgggagcctgccggctacgtcaatatcgtgcacaaggcagacgccgagctggtcgaggtcaattgtaccaatggccaaaagtgcatttgccaaagcggccttttgcgaaaatgtgcaaatgaccccttgcaaaagtaa

SEQ ID NO: 362941 - DNA, 552 bp, Pseudomonas aeruginosa
atgaagggcctgattaagcgcatggtcgccgcggtgaccctgacgcttgccgcggccggcttcacggtgaacgaaacgggcctgccggcaccggtcgagcgcgcggccatcgtcgccgccctgctggtgatgacgccggaaatggagggcacggtctacgaggcctaccctgattccggcggcgtctggacgatctgtaccggccacacgaaaggcgtcaggcgcggcgacgtggccacgcctgagcagtgcgaggcctacctgcaggccgacctgggccaggcggtggactacgtcatgcgcgcggcgccagacgccccgctattcgccaagatcgccatggccgactttgcctacaacgtgggcatcggcgcgctggcccgctcgacgctgctgcagctggctaaggccggcatgcacgagcgcgcggccgagcagttcatgcgctggatgttcgtcgccggcctcgattgccgggatccgaaaaacaactgccgcggcatcccggtgcgccgggagctgcagcgctctgtctacctggtgcgcctatga

SEQ ID NO: 362942 - DNA, 570 bp, Pseudomonas aeruginosa
atggccaagatcatcagcaagaaagacctggccgacctgctgggcaagtcagagcgctggatctcgaagctgatcgaggagggcctgcccacatgcggcggcggtggccgcggcgtggccgtgcagatcgacagccaggccgccatcgagtggctgatcgcccgtgaagttcggcgcgagctgggcgaggagggcgacgacgacgagggcgccgtctcggcctcaactgaggagcgcctgctcaagcgcgcccgccgcgagaagctgcagatcgagatcgacaaagagcgcgggcggcttgtgccgatcgacgccgttatcacccttgccaccagcattgcggcggtctacgcgacccagctcgactccctgccaagccggtgcgcctctgacctggcggtgctcgatgaccctgccacaatccgagctcgactacttgaggagacgcggcgaatccgcgcggctacagccgaccgcctcgaacatcgcgcacgcgccttcgctgcagaagctggcgagctcgattcacttcgtcgcgacgatggtgcaggcgccgccgccgaggactag

SEQ ID NO: 362943 - DNA, 1875 bp, Pseudomonas aeruginosa
atgccgaagagctcgactccgacgagtagcgcgccgctgcctgtcattcgccagatcgaagggcagcagctgcagcgctcgcttgccgtggacatcggcaccctggacaccgaacagcgcaccgtcgaggtcgcggtatccagtgaataccccgtgcggcgctggttcggcatggaagtgctcgaccactcgcccgactcgatcgacctcacccgcctgcatgccggcgcgccgctgctcgaccagcactggcggcagatcggcgtagtcgagaaggcctggctggacggcgaccgcaagctgcgcgccctggtgcgcttctcccgcgggcagtacgccgaggagatctggcaggacgtcgtcgacgggatccgccgcaacatcagctgcggctacctggtgcatgaaatggtgctcgagcgttcggagaacggcctcgatcactaccgcgttacccgctgggagccctacgaggtttccagcgtttccgtgcctgcagacccgaccgtcggggtggggcgctccaacgatgcaacaaccaacaccatcaccattcgaggtattgcaatgccgaagccgaacgaaccccaagacgacggtcagacccgcgagcagccggccgttaccaccgacccggtgctgctggagcgtcagcgcatcgccgacatcaacatcctgggcgagcgctacaaccagcgcgacctggccgccagcgctgtgagctctggccagtcgctcgaccagttccgcgccgtgctgctcgagcgcgccctgccgggccagccgaagccgctcgccccgcgcgccccgaaggacaacgagcgcgatctgccgggcttcgtgcgtgatgtttccgccgccggcctgggcatgaccgaaaaggagatggatcgcttctcgctcatgcgtgcgatgaacgcctacgccgagaaggactggtcgaaggcgggcctcgagcgcgaggtcagcctggccctggccgataccctcaagaaagaggcccgcggcttcttcgtgccgcatgacctgctcgtgcgcggtatgtcgaagggcgaagcgggcaagggcggcgagctggtggccaccgagctgcgcgttgaccagttcatcgacatcctgcgcaacaagaccatgatggccaagctgggcatgcgcatgctcggcggcctggtcggcgacctggatctgccgaagaaggtcaacggctccaacttctactggctgggcgaaggcgacaacgtaccgccgagcgacttcgacctgaccaccatcgccctgtctccgaagaccatcgcgggcgcgatcccggtcacccgcaagctgcgcaagcaggcggcgaagtcggtcgaggcgctcatcatcagcgacctggtcgagggcctgggcgttgccatcgacctggccatgctgcgcggtaccggcgccgacaaccagccgctgggcctgctgaaccaagtcggcctgccgtcggtgacctacccgattggcggcatcgactgggattccgtcgtcgagatggagaccaaggcggccaccttcaacgtcgagggcagcggcctggcctacctgaccagcccggtgcagcgcggcgcggcgaagaagacccaggtcttcgcgaataccggcgagcggatctggcaaggcggcgaggtcaacggctacgccgcccacgccaccaaccagatgccggccaacgactggctctatggcgacttctcgcagctggtgtgcggcctgtggggcgtgctggatctcaagcccgacccgtatgccctggctggcagcgacggcctgatgctgcgcgtcttccaagacgtcgacgccgccgtgcgccgcaaggaagccttctgcgtcggcaagaaagccgccgcctaa

SEQ ID NO: 362944 - DNA, 525 bp, Pseudomonas aeruginosa
gtggcaggcttccaactgaatttcgaggtggacggctggggcgccgtggagcgtgccctggccgacgccccgcgcaaactggacgttgccgccgcccgcgccttgcgtaagacggcgcagtggctgcgcacgcatagctcgagggagatcgcccgcgagctcggcatcacgcaaagcccgatccggcaccgctacaacatctacagccagtcgacggcccgcgaggtgaagctctgggtcggcctgcagccgatcggcgttcactacctgggcacgccccggcagacccgcacgggcgtgaaggtcggccaccgggagtacgacgcggcattcatctcgccgatgaagtccacccaacgcctggtcttccgccgcaagggtcgcgagcgcttgcccatcgagaaggtgaccgaggactgggaaggcccggcagtcagcgccctggagcgctgggagcgccgcgctctggagcgcttcatggagctgttcgagcaggaggcgcgttatgtcctacagaccgcttaa

SEQ ID NO: 362945 - DNA, 531 bp, Pseudomonas aeruginosa
atgtcctacagaccgcttaaccaggtctccgacctgttcttcgccatcggcgacgccatccacgccgcaggcctgggcgtcgacgtggccaactacgacgaatgggacggcaaggtgcgccatgcctcggtgctgatcgagctcgagcgcaccaccccggccgtcaggcaaaacgacgggcgttacacgcacgccgtcaccatcaccctgcacgcagttgtcggccggtggcgcaagcattctgcgctcgaggcggtcaacctggccacctgcctggagcgcctggccgatcgcaaccgttggggcttccacggtcgcaactgcgagcaaccctgcgagatgcgcagtggcccctcgatgttccagcgcggcgccgacggctacgacgcctggggtaccacgttcaagcaggtggttacacctggcgagccgacgcccgagatcctgctcaacaccgcccccttggttgcgtacagctggcaggtcgacgacctggacaacccggagaactaccaccagttggagacctga

SEQ ID NO: 362946 - DNA, 348 bp, Pseudomonas aeruginosa; identical to SEQ ID NO: 362929

SEQ ID NO: 362947 - DNA, 663 bp, Pseudomonas aeruginosa
atgagcctgctaacccagctcgagacgctgctcgcctcggtcaacaacctgatgggtgtgatcgacggcaagctgcgcaacaaggccaacaaggccgagacctacaccaaggcggaattggccgacccgctgctgaccctaggtgccaatgcggcgacggcttcgaggctcaaggtcacgcgcttgctgaccctggccggcgaggcgaccggcgaggtcggtttcgacggatccggcaacgtcaccctgatggtgaccgtgccggggctgctggataaggcggacaaggtcgacaccttgaccccggcgcagatcgacgcccggatccaggccctgataggggcagcacctgctgctctggacaccctcaatgagctggcagcagcgctgggcaacgacccgaactttgccaccagcatggccacggcgctggcggccaaggctgaccaggccactacctacaccatcgcccaaaccgacggaaagttcttgctcaagacgggcaaggcggccgattcgtcgctgctgggcggcaatgccccggcctattacgcttcggcggccagcgtctcgacgctcgaggccggggtggccgatgggttccagcgactcgctgcggcattcaatgccggagcgactcagatcaacgcaacgggagtttga

SEQ ID NO: 362948 - DNA, 621 bp, Pseudomonas aeruginosa
gtgagcctagagactcagatcgccgccgtggtaacggcggccaataacctgacggccgccgtcaatggaaaaatcggtgccatcgacgcgcggatggacacggctgaagccgagttcgacgagtggcgcagccagaaggacgtcgagggctccttgggtgcttttggcacaattcgccgcaacatgttccaaggctttattcagtctctcggaggccccgctggcgtcgctgttaactcgggtttcgataccgtcgatctcggaacgaatttaaacgtttatgcgcacttcaaggtgccgctaaacgttaacgtcaattcagaaatgttctggttcaacatcaagggttacagctacggcgcggcggcgatcgtcgacgaaaccctggtcggttactgctacaaaccagaactggcgctgaaaagcgttgcgacgttcgggagcatgacgccagcagtctacaaggatgccaatggcaacgtggtgttgcggatcctgttgacgaatgcctactacacgacgctgaggatcgacaccatgcgcgttggcaatgggcggctgttcaacgtcggcgatttacagacgaagttgtcattggccgatactgtggtctggaactga

SEQ ID NO: 362949 - DNA, 246 bp, Pseudomonas aeruginosa
atgattgagcaagagttggtccagccagggccggagcagatcaagagtatgcaatgggcggctgtgcgcgctcggcgcgaccagctgctccgcgcgacggactttacgcaaacggccgacagcccgttgagcgaggcgcagcgcgccgaggtggccatctatcgccaggctctgcgcgacgtgccagaggatggcccggacccgttctcggtggtctggccggaaaggccggcatatctgaaataa

SEQ ID NO: 362950 - DNA, 201 bp, Pseudomonas aeruginosa; identical to SEQ ID NO: 362566

SEQ ID NO: 362951 - DNA, 1167 bp, Pseudomonas aeruginosa
atggccgaggtaaccaatttcgagcacaacggcgtctccgtcgagacgaccgaatccccggaggccatgggcggtctcggcgacaacgtcgtgggcctggtcggtaccgcgcccaaggctgatatgagcgtgccgcgcaacgcgccgttccgcatcaacagcttctccctggccgcgctgctggatccgaccggcaccgaggccggctcgctgtatcacaccgtccaccagatcctgaaagtggtgaaggtgccggtctatgtgatcgtggtcgaggagggcgccaccctggccgacacccgcaacaacctgatcggcggcgtcgacgtgacgtcgggccaggtgaccggcctcggcgccctggcgctgtgcgccgaggtgccgaccatcatcggcgccccgggcttctccgacgcccaggcggtgcatagcgagctggccagcctgggcaagcggatccgcgccagggtggtcttcgacggcctggacactggcgtgcagggtcaggttgccaacagcaccgggatcggcggtgccgagctgggctacgaccgctgctacatggttcaccagatgccggcggtctactccaaggcggccaaggccaacgtgttcctgccaccctcgagcctggcgattgccgccatggccgcggtcaagcagtgggagagcccgggcaaccaggtgacctacgcggccgacgtatcgcgctccgtcgagtacaacatcctcgacaaatcgaccgagggcgacctgctcaaccgctacggtgtcagctactacgcccgcaccgccctgggcggcttctcgctgatcggcaaccgctcgatcaccggcaagttcatcagctacgtcggcctcgaggatgcgatcacccgcaagctggtgaaggctgcccagaaggtcatggccaagaacctgaccaagaccttcatggagcaggaggtcaagcggatcaacgactggattcagaccttggtggccgacgagaccatcccgggcggcaaggtgtacctgcaccccgagctgaacagcgtcgagaagtacaagaacggcacctggtacctgtgcatcgactacggccgctacgcgcccaacgagcacatgatttaccagctcaatgcgtctgacgcgatcatcgaagagtttctggaggatgttctctga

SEQ ID NO: 362952 - DNA, 507 bp, Pseudomonas aeruginosa
atgcttaccaaccgagtgcggcagatcatcaccgcaaccctgcaaggcctgccgcttaacgcgaccatcgacgactatgatcccccggtgatcgagttcgacatggaggagatgcgcggcggtcgctacatccccgaggagatggccaccggcatgaaggccctgaccggcaagctgacgctgcagggcgtcggcctgccgatcatggctgccctgggcgtcagcggcggcgacgaggtgctgctgaccgtgcaggaggccggcgtcgaccaggacgataacgagtggttcacctaccacgtgcagggcggcaagctgaaaaagctcgaggagaaaaccctcaagatgggtgacaagcccgtcaccgtgctggagatcgccctgcgcacctacacccgcatggaaatgggcgtgccggtgatcgacatcgacacccgcacccaaaaggtggtggtcaacggcgtggatctgctcaagggcgcccgccgcctggccctgatggtgtaa

SEQ ID NO: 362953 - DNA, 567 bp, Pseudomonas aeruginosa
atgacctggaaacccgaaccgcatccgctgcgctggcccgtcaccaccgagggcggcgagaccctgaccagcatcgagctgcgcgccctgaccgtcgaggagcaccgcgccgccctggccaccgtcggcgacgacgaagacgaccagttcgaggccctgctgctggccgccaccggtctgtcgctgtcggtgctcgagcagatcaagcgccccgactacgtgagcctggtcaagcgcatgcacgagtacgtcaacctcccggccagctacttcctgggccgcaagcccgaggatcccgacgacgccgagctcctggtgccgatcaaggcgatcggccgcacggtcgaccgcctcgctctgcaggtgccggcgatgaaggcgaccaaggtcatgcgcaagctcaagaccgacgccgagcgcgcggacttcatcagcgcgcactgcaccggtctgtcgaccgtggaaatcgtgcggctgagcctgcccgattggacgcagctgcaggagcgcctgcacgcttttttgaacaaaccggcggactactttccgaacgcgacatcgaagtga

SEQ ID NO: 362954 - DNA, 129 bp, Pseudomonas aeruginosa; identical to SEQ ID NO: 350330

SEQ ID NO: 362955 - DNA, 390 bp, Pseudomonas aeruginosa
atgcggcagcagatggcgctgggcgagttcgttttcgggctcgcgaccggcttcccgtatgagcgcctttcgcgcaagaccacgggcggctgggtagacctggacatcatcagcagcaagccgatgtcgcacaacaccggccagggtctggagtccctgcgcctgagcggcaaggcccagctgggcgccggcatggccaagctcgacgagctgcgcgccatggctgacgcccgccagccctacaccctggtcgacggaatcggccgggtgtggggccgttggcgaatcgacgccgtcagcgaagaccaggagcgggtgatcgacgacggcaccgccacgctgctgtcatggacgctcgagctgcaggagttcgtcaatgcgacgggttag

SEQ ID NO: 362956 - DNA, 147 bp, Pseudomonas aeruginosa; identical to SEQ ID NO: 352822

SEQ ID NO: 362957 - DNA, 603 bp, Pseudomonas aeruginosa
atgcaccaagcaccccacgcaatcgcacgccgctgggtggcgcagaatgccgccatcctcgacacagaaacgaccggcctcgatggccaggccgagatcgtcgagctcgctgtcgtcgcctgcagcggtgagaccctcctgcagaccctggtcaagccgacacggccgatcccgccaggagtgaccgagatccacggcataaccgatgccatggtcgcagacgccccgagctggcccgaggtacaggcccaactgctgcagatcctcgagggccgccaactggtcatctggcacgccgactatgacctgcgcctgatcgagcagagcgccgcggcgcacggcatcgaagcgcccgaactgtacgccgagtgcgcgcagtcgatctatcggcacttctggcatgagcccggcgaggatccgggcagcgtgcgccggcagcgcctgaccaaggctgcagcacagcagggcgtcgagatcaccggccaggagcaccgcgccgaggtcgactgcctgaccacccgcggcgtcatcctcgccatggccagcggtaccggcgccaggtggcgggcagccgcagcaaccgaggaagccagccatgcttga

SEQ ID NO: 362958 - DNA, 291 bp, Pseudomonas aeruginosa
atgaataccatcctggggaccgcctcgagcaccatcgagccggaagacgtccaccgcgtccgcgcaatcgccgcggcgctcctcgagcaccaaggccaccgggcgtgcgagctgctcgacctggtcatcacagatgagaccccggcgagcaccgtcacgcccagccgcgctcgagccgagagcgccgtgcgcctggccgcgatcatcgtcaactacctgcgcggcgagtggggcgtcgagaccatcgaccacgagctcctgcaggcgctgcgccgggagaccggtctatga

SEQ ID NO: 362959 - DNA, 312 bp, Pseudomonas aeruginosa
atgaccaccatcagcaaacccaccaccgccaggccgagccgagccagccagctggcagatgagcacgtcgagaaggcccgccgcgccgtggtgaccgacgagggcgagaagcagctcaaggtgctggccgcgcccaagtaccacaagggcatggccgagctgaaaaacatgacgaccgagggcgtgccggtgaagcacctgctgctcgaggcgatcgaggatctgttcgagaagtacgggcggggagacggccggttcaaggtcgacgacgtgcccgagctgcgtcgacgccttgaggcgctgatgaagtga

SEQ ID NO: 362960 - DNA, 654 bp, Pseudomonas aeruginosa
atggctgcgaaggtgttcgcgatactgaatcagaagggcggcacgtcgaaaacgaccactgccaccaacgtggccagctgcctggccgtaaagcatggattccgcgtgctgcttgtcgacctcgaccagcagggctcggcaaccgactgggcggcatccagacccgaggccgaggacgatgccggggtgatcccgaccgtctcgatgggcaaggcgctggcgcgcgacctgccgcgtgtagcgggcggatatgactacgtcgtggtcgacggcgtgccccagatcagcgagctgaccgccgctgctatccgggccgctgatgccgtgctgattcccgtacagccgagccagtacgacatctgggcatgcggcgacctggtgcaactggtgaaagaccgccaggagatcgccgacgggcggccggtggcagcgatgatgatcgcccgcgctatcccgggcacggtgctcgagcgcgacgtgcgcagcaccctcgaggcctaccaactgcccatcctgcgcagccagacctgccagcgacagtcctacgtcgccggcatcgaacagggcctcagcgtcatggatctgcccgaggacaacaaagcccgcctcgagatcgaagcggtaaccgccgaactgctggagctgacccaatga

SEQ ID NO: 362961 - DNA, 1332 bp, Pseudomonas aeruginosa
atgagcgggcaggcgcggttgcgcgaagtcggcgccggcggcgcggcgctggaactggacgagaagcgtttttcccggctcggctgggggctggtgctgctcggcttcgtcggctttctcctgtgggccgggttggccccgctggacaagggcgtcggggtctccggcacggtgatggtggccggtagtcgcaaggccgtgcagcaccctaccggcggcctggtcaggcacatccgcgtgcacgaaggcgagcgggtggaggcaggacaggtgctgctggagatggacgctacccaggcccgggcccaggccgatggcctgttcgcccagtacctggcggcgctggcgagtctggcgcggctgagcgccgagcgcgatgaaaaggcgcggatcgagtttcccgccgagctgctggcgctggacgacccgcgcctgccgaccctgctggaacagcagcggcagttgcacgacagccgtcggcgggcgctgcgcctggaactcgatggtctcgccgagacggtcgccggcagccaggcgcaactggacggcctgcaagccgcgctgcgcagcaaggagcagcagcgcgccgccctcgaggaacagttgcgcggcctgcgccaactggccagcgagggctacgtgccgcgcaaccgcctgctcgacagcgagcgcctgctggcccaggtcaacggcgagatcgccggcgacctcggcagcctcggcagtacccgccggcagatcctcgaactgcgcctgcgcatggcccagcggcgggagaagttccaggaagaggtgcgcgccagcctggccgacgcccaggtgcgcgccgaggagttgcgcaatcgcctggccagcgcgcgcttcgacctggccaacagcgaggtacgggcgccggtcgccggcctggtggtcggccaggaagtgttcaccgagggcggcgtgatcgcgcccggccagcaactgatggaaatcctcccggagcgccagccgctgctggtggacgctcggctgccggtggagatggtcgacaaggtccgcgtcggcctgccggtggagctgatgttcagcgccttcaaccagagcactacgccgcgggtggagggcgaagtgaccctggtctcggccgaccgcctgctggacgagcgcagcgaggcgccgtactaccgggtgcgcatccgcgtaggcgaggagggcgtacgtcgcctggccggcctggagatccgcccggggatgccggtggaggccttcgttcgcagcggtgagcgctcgctgttgaactacctgttcaagccgctggccgaccgtacccacctggcgctgggggaagaatga

SEQ ID NO: 362962 - DNA, 669 bp, Pseudomonas aeruginosa
atgctcattgcttgtcgactggtagcgctcctgcaaagtgtcgagggcctgcacgtgctcggtcagcttgtgcttggtctcgctgagctgttcgcgagcttcacgctcggcggtttccgccaccttcgcgcgagtttcctcgctcgccagggcatccttgaggcggtcacgctcctcttgcaacgcagcatttgtgattgtcgatgtatcgagacgcccgcgcagttcggtcacctgctcctgcagccctcgggcgccagcctgtacagcctccagacgcttggcggcctcgtgatgttgccggttagcttcgtccagtttcacctgcaagtccgatccggccgctttacgctcatgcagctctgtagaaagacgtgccgcggtatcggccgacgcatgcaactgcgccttcagcttgccctcttcgatctgcagctcatggctgcgcgcttctgctgccttgagctgagtctgcagagattgctgctgagcctcagtcgacgccctggccagctctgcctgctcaagctgcatactgagctggctgatttgcctcccctgacgcagggcagcgaccacatagccgataaccactgcggcgatagcgagcaccccgcatatcacaatgatttctgtcgtccattggctagcttgcatgatcactcctag

SEQ ID NO: 362963 - DNA, 705 bp, Pseudomonas aeruginosa; identical to SEQ ID NO: 8686

SEQ ID NO: 362964 - DNA, 504 bp, Pseudomonas aeruginosa
gtgccgtactattcctctgagcgcaaagccgaactgctcaagatgctgggtcctccactcaacctgacgatggccgaagtcgctaggcgcgagggcgttactgaaatgtcgctgtatacctggcgcaaacgagccagtgccgaagaatgtgtggtggtgaccgatcccaaacacccgaccgagagttggtcggcagaaatgaaattcgcagctgtagccgaatgcgccagcttgtccgagattgaggtgggtgaatactgccgtcgcaaaggcttgtatcccgagcagcttgctgcctggcggcaagcgttcctgagtgggatggcccctccaaaagcgcagcctaaggttgatcgggagcaggcccgtcaggatcagaaacgcattaaacagcttgagcgcgaactgcgccgcaaggataaggcgttggctgaaacagccgcgttattggtgctgcgaaaaaagctcaacgactactggggagtagacgacgaggacaattga

SEQ ID NO: 362965 - DNA, 6336 bp, Pseudomonas aeruginosa
atggataagtatttctctgggctagtcgagcaggcgctttcccgtgccactgagtccaccttgagtatcttgagcattaccgatccggacttgcgtgagcacctggaaagtctgatgcgcgcggagtgcgggaaagagggtgcattcctggcgccacccgtgtttgagcagaccttcagctgggaagagtcggcgttcaccatggagcaactggcgagcaaggagcacttgctgagcaaggagatcgtggcctcgctcgatggcaaggcgaatgggcgttaccgctttggcgcgagttggaaacccttcacccaccagttggccagctggcgctcattgctagagaagaagcattcggtggtcgtcaccagtggtaccggctcgggtaagaccgaatgctttatggtgccggtgctggaggatctttatcgcgagtaccgtgacgcagctcgtcagccgctggtcggggttcgggcgctgttcctgtatccacttaacgccctgatcaactcgcagcgcgaacgtttgaatgcctggactcagagctttggaagcggcattcgctattgcctgtacaacggcaatacaccggagttgcaggcgaatgtgcgcagcgagcagagcctaaagcctaacgaaattctgtcgcgcgagctgatgcgtacgcaaccggcgcctattctggtcaccaacggcaccatgctcgaatacataatggtgcgccaggtcgatgcgcccatcgtaagaatctccagagagcagaaatcgctgcgctggattgttctggacgaggctcacacttacgtgggttcccaggcggctgaattggcattgcagctgcgacgggtgatgacagccttcggcgttacgcctaaggatgtccgctttgtggcgacctctgcgactattgccggtgaggacgctgcaggacagttgaagcagtttctctcggatctgtcgggggggccggttacgcagattgatgtctgggggggtaaccgggtcattcctcctcttgccccctgtcaacaaacgctggttgctctggatacgctcgagtccatgccgcctgtaattgcggacgatccagaggttcatccggatcgatacgaggccctggtccattctccgcaagcccgagcactgagaaatctgctggtgaccacccccaagccgttgaagctaaccgagatggtcagccagatgcgtcaggaaggtgggtggtcactgtcacaggacgaaatactacgttggttggatgtgtgttcaggcactcgtctttcagccagtgagccggcgtttctgaagctgcgggcgcacttcttccagcgcactactcacgggttatgggcctgctttgacaagtgctgctcagcaaagtccggaacggcgctgcaacaaaactggccctttggttatgtctacgccaatcagaggcaaacctgcagctgtggcagcccggtattcgagttggcgttctgcaatgactgcaatgagccgcatctgttggcgcgggataagaacggaaagctgatccagtgggaaagctctggtggcgatgaattttccctgcagactgaaacacctgttgaggaagatgcgggggctggtggctcaggggtactttcagtcaagacaccgctggtgctttgctcgttcgaaaatgccggcagcgcatacatccccgttgaggtcgataagttcgctggttcattcgcagctgtttcagctgaacgggtacggtttggggttagagatcttgatgccaagtgcagccacaacagctgtggatttagtgggctgcacggagcttctcctttccgccgcgcaatgctgggcggacccttctatgtagccaatgccgtgccgacagtccttgaatactgtcaagactatcaagaggaagatcagacgccggagcacggtccgcagtctctgcctggcagaggccgtcggctaattacctttacggacagccgccagggcacggcgcgcatggctgtacgtatgcaacaggaggcggagcgcagcaggttgcgcggacttgtcgtggagattttgagctggcaccagcggagccaggccagctctcaggtagattccagccgcatcgatccgtcggttttgcaacaattaatcgccaaggcgaaagaggaagtagagctataccgcagcgttggtatcaaggaggaagtcagggccgcggaggaaaaagttacacggtttacagccatgctagcttcagcaactggagcgaaagttaggccgacgctagtttctctagcttggtcggagctctccaatgagctcaagcagaaggcagacctgaaaggctcgatgctgctttacaacaagtatcagaagcccgagatcttccgggaccatgatggcccctacaagctggcggaaatgttgctgttccgcgagtttatgcgccgcccgaaacggcagaacagtctggaaacccaagggctggtgaaggtcgcatacgttggcatggataaggtccaagaagtgccggcgtactgggggcagaaaggtctgacgctcgatgattggcgtgacttcctaaaggtggcgctggactttcatgttcgggagaacagctatattcaggtcgatgagggctggttgagttggatcggtagccgtttttctgccaagagtctgcgtaatcccgagtcgaaagaagcggatgagatccgggtcaagcgctggcctcagatccgcaatggcaaccattcccagcgcctgatcaaactattgttgcttggcgctggcttgaacccggctaacacggccgacgttgatctggtcaatgcttggctaagagctgcctggttgcagttggccagaccgggctcagcgctgaaggctgacgaaaaccggtactacctacccagagagcacatgctgttctcgttggttgaccgggcctatgtctgtccagttaccaacaagctgttggataccaccttcaaaggctttacgccttacctacccgctcacctggatttctctcagttgactgaagagcagcgcgagagctatcaggcagagccgattgagctacctgacctgtgggagtttgaccgttctcaggacgactatgcgccgggacttgcgcgagttagaaacctggtggcgaatgatcctcttgtaagcgatctacgagcacggaacctgtggacggatatcaatgatcgggtagtggaaggtggcttctattaccgcacagcggagcactcggcccagcagtcttctgaacgcctcggctcctatgaagagatgttcaagaaggggcagctcaacgttctgaactgctccaccaccatggagatgggcgtagatattggcggtatttctgctgtggtcatgaacaatgtaccaccgcacccggccaactacctgcagcgtgccggtcgcgcggggcgaagcaaggaatccagggcgattacctacacgctttgtaagaacaacccgcatgatcagcaggttttcgccaatccgagttggccgttcgagaccaggatccccgcgccagtggtggcattgaactccgagcgactcgtacaacggcacatcaactcgctactgttggcggactttctctgcaatgtggttgggctcactcagactgagaaaaccagtctgaatacgcagtggttctacgacgatgagcacggtctctcacaatgtgaccgattcattgagcggctgggacaagttgtctccgatctggacgacgcgctcaaagacttggtgaaaggcacagctctggtcggtgtggacccggctcagctgcgccgtcgttcaatcgattcgatcaagccgctgcagagtcgttggctgaagagctatcgcttcttactttctgaggagaagctcgcgaaagccaacagcccctatctgaagcgtctccagattgaaaaggctcgccactgcaatgagtatctgttgcgggatcttgctgcgcgtaccttcctgcctggttatggcttccctaccgacgtggtgaacttcgataacttcacgattgaggattacatccgcgagcaggacgcagggaaaaagttgaagcacgatcgcgaggacaacgtatcccgctacaaggggctgccgtcacgcaatctgtcgattgccattcgcgagtacgctcctggtgcagaaatcgttctggatggccgggtgttcaggtctgccggcgtttccctccactggcataacctcaatgctgatagcaaagaagcgcagaaaatggacattgcgtggcgttgcgatgtctgtggcgctctggactatgaggaggggttgataaagaccgatgagctgacttgcagcaatgtcgactgccagtcactgatcaagccccaaaacattcgcaaggtcctgcagccctctggttttgtcaccgatgcttatgagtcggcctccaatgacatccagcatcagaaattcatcccagttgaaaccgcctgggttttcgtcaacgccaacaagactccattgccaaacccggcggttggggcaatggcttatggtgcggatggaaaggtcttccatcacagctcgggcgagcacggaacaggttatgccttgtgcatgagttgtggtcgagctgagtccatgcaaccggatagcgggttcccgcgagacctgtcgccgtctggcgagcactatccgccacgcccgaccaaagaggacaaagatcagaacaacaagcgccttccctgccagggcagcgggagcattcttcctagtgtgagccttggcgctgtagctactactgatgtgtttgaactcaccttgcaccatcccgtgcgcggggagttcattgcagactcagcgcagggaagtgcaattgccatgacgctagcagtggctttgcgggctgcgctggccgagatactgggcgtatctgcttccgaattgggttatgcaactcggccaagcaaactgccaagtggacagtccattcgcgtccttcagcttttcgacgtaatcagcggtggtgcgggctttgccactagcgcgccgctgcatgtcgaggagctgctgcgggggatggtgaagaagctcgattgcaagcattgtgaaactggctgtagtgagtgcctgctggactcccaaacacggcatgatcacgacaagctggatcgcaaggcagcgctcgactggctgggcccagacttcattcatcacgtgggtttgaccgccgaaaacaaactctcattcgccgatggccagtatgcgcctggcagcattgagagcgttctgcgccggctgatcaacgagggtgcaaagagaattactctagtggcctctggtgatgtggcagagtgggatcttcttgctccacagtttcgtaaggcgattcaggcctatgttctggccgacgagctgactgttgagctgctcgtcccggcagatatcactgatggggttcttgtgcaggatctccagcgcctgtcggaccttggagtaaacgtcgggaatgcgatcactgagccaggtgagcatctcgttgcccaggtgtttaaagagagcgaagttgtcacgctggcctcgcgcagcctcgtggcaactgttccaggccgtagctggcatcaaagtgatgagctagtcgtactctcgaagagtcagccggagtttggctggcaggtgatggacctttccagtgcagcgagcgactccttcggcaaggtagcgatcgtcgacatatcaatccacgaggaactcaatgggtcgctgctgcaattcggtgagcgtttctgggagctgcttggcgctcgagatcagcaagttgctgacgtgattgcgactgcgaagatcaacaggctgacctactcagatcgttacattcagaaccccgcggtagttacgatcctgggtgcggttctgaaagatctgaagagccgcatttctgcggatgcggttgtgcaggtgaagacgctattcaaatcaggtcggctgcaaggtcgtaaagccttcgacgactgggccaatcaggacgatttcgagttcttttcacgcaattggctgtcggcaatggttgggcatcaagttgaactgattgtggagtcgtcgaatcgcgaaatccctcatcaccgtaggttggagcttgagtttgaagacggcaggacgctgaaggtccggttcgaccaaggagtggcctattggcaggttcgctttagctcgcatagcgacatgtggtttgactttgatctggctgcccaggatcaactcatgcacatggcctggatagttgaaaccgcacggatacaaaactctgagcagaagtgggcgacggacgtgttggtcgagctaaagagctaa

SEQ ID NO: 362966 - DNA, 204 bp, Pseudomonas aeruginosa
atgcgttgcctggagaagaagggcctgctgaccatgagttcgcagttgatcggcatgctggcggcttcgacgcagggcgatgcggacgccaagagcttgcagacgggagtctgggtggcggggaatgccacccaacacaactacctcagtcattggcaggaggagaagaagcggcaggaggtcgatggctgcaaggacaaatag

SEQ ID NO: 362967 - DNA, 417 bp, Pseudomonas aeruginosa
ttgcaacagagccaccgtgagcgcatctacggtgtcagcttcagcatgccgatccccagcgggtcgcgcagtgctcgctacagccaggcgctggcccaggagaatgcggctcgcgaggatgtcgacctggccaaacgcgagctggaagccgggattgcccgtgacgtcgaactggcttcaggtgcttacgagagctacctgatcgcgaaggatggcgccgctgccatgacccagaacgaagcacagatgcagcgtgcctacgaactgggcgaggtggatctgcagtcgttgttgctggctcgccggcaagccgtcgcatcgtctaccagcgccctgcaggcccacgcggatacgctgcgcacccatctgtcgctgttgatcgatgcccactggatatgggggttggacgaaagctga

SEQ ID NO: 362968 - DNA, 795 bp, Pseudomonas aeruginosa
atgagtcagggattttttaagctaaatatcgcatggtggaattgcggggtttctcctccctctacggccgcaacccctgcggacatagactcagctcacttagaaaccataaccgagctggtcgaaacttattccgctgacataattgctctttgtgaagttgacttagaagacatagagaaaatcaccgagcatctaaatgaactctatcctgataaattctcgacaattaatctctatagaaaatcaggaaactcaattgatgatttattcctaatcatcaatagtgcaaaaataaagcagacaaatgaaccagagcgattaaatcgaaaagcccctggaacagataactatctgaaggccggatatcttgtccacttggcgctttacgatggaacacctctctggcttactttaagccattggcaaagtaggcgtacatatcaaactgacacagctgttcgcgagctgctcggcgaagcccttagaagtagcgtcgagccaattctatcgaaacatgccatgaactttgtacggagacgatctgacactttcttcaatcctatgtggggacttctaggaatggactttctatccgattctggagttgtgcatggaacctacaacggcaatgcaactcatctatcccacaagatgactcttgatcaaataatgctctcccccggattcttgaagaatggttggtcttttagtgagattggagttactgcggtaaatcacgcgagtgcatccgatcacttacccatcgtgtgccagcttcaaaggataatttaa

SEQ ID NO: 362969 - DNA, 153 bp, Pseudomonas aeruginosa
atgtcggagtgcctcttgctcaagaccatcttcttgctgctcaccgcgtacctgttcggtgtgtgggagctgcatcgccccgagtaccccacctgctggatcgatcctgaacgccttgcgtgctggtcgttggccgcgcccaccggaaggtag

SEQ ID NO: 362970 - DNA, 1437 bp, Pseudomonas aeruginosa
atgcccgtggccttcgtcgtcgacgacatccgccgctgccatccggctgaaatacgtggaagcgccccacagcgcgcggtgcggggcgttttttttaacggcggccacgggcatactaggccggtccaattcccaggtgcccgccaccccatgctccgcctccttcctctcctgctatccctcgcctgtctcgctccggccttcgccgacgagcgcgccgacacccaacgccagctggaacagacgcagaaggacatcggcgagctgaagaagctgctggacggcatccagcaggaaaagagcggcgtgcagaagcagctgaagtccaccgagaccgagatgggcgacctggaaaaacagatcaaggccctgcaggacgagctggacaagagcgaagccgagctgaaacggctggatggggagaaaaaaaaactccaggacgcgcgcattgagcaacagcgcctcctcgccatccaggcccgcgctgcctaccagagcggacgcgaggaatacctgaagctgctgctgaaccaggaacacccggaaaaattcagccgtaccctcacctactacgactacatcaacaaagcccgtctcgaacagctcgccagcttcaacgaaaccctccgccagttggccaacgtcgagcaggacatctctgcgcagaaagccgaacaactgagcaagcaaggcgagctggacagccgccgcgaggcgctggcagcgacccgcaaggagcgccagcaagccctggccaagctgaacagcgactaccgcgaacgcgaccagaagctcaagtcccgccaacaggaccaggccgagctggccaaggtactgcggaccatcgaggaaaccctggcccgccaggcccgcgaagccgccgccgcggcggagcgcgagcgccagcgcgcgctggccgccgaacgcgagcgtgcgcgccagcagcaggccgcccccggacgagtcaccagcccgccgcgcgaacctgcgccgggcccgctggtctcaagcactggcgcggtctacggcggcgcgttcggctcggcccgcggcaagctgccgtggccggtgaatggccgcgtcgtggcgcgcttcggcagccagcgcggcgacgatccgcgggcgaaatgggacggcgtactgatttcggcgagcgccggcagcaccgtccgagcggtgcacggcggacgcgtggtattcgccgactggttgcgcggagccggcctgttggtcatcctcgaccacggtggcggctacctcagcctttatggccataatcaaagcctgctgaaagacgccggcgacaccgtgaaggccggagacccgatcgccaccgttggaaccagcggcggccagagtagcccggccgtgtacttcgccattcgccatcagggccgcccggcggaccctactacctggtgccgcgcgcagggatag

SEQ ID NO: 362971 - DNA, 228 bp, Pseudomonas aeruginosa
atgggtatcgagacggaagaaccgaaccagaagccgccgaccttctggcagatgctgcacagcgtgatggctgccgccttcggcgtacagagcgggcgaaaccgcgcccgcgacttcagccacggcaagcccgtgcacttcatcatactgggcctgctctttaccctggtgttcgtgctgttgctggccgggatcgtgaaactggtgctgagcctcagcggcctgtga

SEQ ID NO: 362972 - DNA, 582 bp, Pseudomonas aeruginosa
atggacgcgctgtccaccctcggcttcgactacccgccgcgggccgacttcttccgcaaggagttgcgcgagttcctcctgctcgcccgcgaacagcaggtcgacccgctcagcctgaccggctcctacgccggcgccatgggcctgccgcaattcatgccgagcagcttccgcgcctacgcggtggacttcgacggcgatggccacatcaatatctggagcgacccgaccgacgccatcggtagcgtcgccagctacttcaagcagcacggctgggtcaccggcgagccggtggtctcggtggccgagatcaacgacgagagcgccgagagcgcggtgaccaggggcgtcgacccgaccatgagcctgggcgagctgcgtgcccgcggctggcgcacccacgatgcgctgcgcgacgaccagaaggtcacggcgatgcgtttcgtcggcgacaagggcatcgagtattgggtcggtttgccgaacttctacgtgatcacccgctataatcgcagcgccatgtatgccatggcggtttatcagctggcgggcgagattgcccgcgcgcgaggtgcccattga

SEQ ID NO: 362973 - DNA, 828 bp, Pseudomonas aeruginosa
atgaaaaatactctcgaactagaaatgcgaaaatttggcttcctagccccaaacttcgaaaagatagagcagtttgttaaagaccttttaggtgaacgacttgtcctgctcagagacatgaatatcttggccttagaaatggcagaatcaggcgcagagctatctcaagggcagacatcaatgagcccgatagttatcagcacacttgcaatgcttagaagcctagagaatttgcaagcaggaataatactgttagagcgcggaatgagcgttgagcccaagattctagcaagatgcatttatgagaacgcgttctgcataggtgctgcattcaaaaatccaattgaattttcaaaaatccttaacgatgacaacggcgccgccaagctagcccaagcaaagcttctaatgaaacaagagcacagcatgagcaagataacatccgataaggttagaaaattcatagacgaggcaaaaccactccagaaacaggcaactatcaatattgcaaaaatcgctgaaagctctggattcggggaattttatctatactacagagtgctctcaggtgaagcaatgcacttatccgcagactcattacttcggcatattttcaccactggagaaaacacatggagcggcttcaactcagccctaataaatgaaaacgaattaattgactccgcattctacctttcaaatagcactatgtgtgcgatacttgcctataacgattttataaacaaagagccaatcaacgaaaaaatctcagaagtatgggctcgcttagttggacttgtttccgaggaaaatggcagtgaaaattag

SEQ ID NO: 362974 - DNA, 453 bp, Pseudomonas aeruginosa
atgaacagttccagcctgatcaagggcgatgagctgcataccacccagggtgagcgccacacccggatcggcggcaacgaactgctttccatcagcggcgccggcagcatcgccgtggacggcacctgggtcgtgcaagccggatcacaggcccgcgtcaccgccaccaatgtgctagtcgatgccggcgtgaacctgacactcaaggccggtggacagcatatcgtcatcaactccgcagggattttcagcagcgtgccgatcgtgcagggcggagccccgatggccggcatcgcaccgcagcaggcactccaggctctggccgaagcagcacagaccgtcgtcgccaattcgctgcctctcgtggctgccgccaggcaacgcgccgcggacttctgcccgctctgcgaaatctgtcgcgatggactgtgccgtgttggaggtgccgcatga

SEQ ID NO: 362975 - DNA, 666 bp, Pseudomonas aeruginosa
gtgtctgagagcaaggtcaaaaaggcaatcagcgtccgattcgatccagtggagtatgcgaattactcagctatggtcgaagatgcgggggtagccgtgagcgacggccttcgctacctgatgacggaaaagctgcagcaagcggaaagggccgacatgaagaaatttcatatcagcttcgattttcgatggaaggagcgtgacgttacttttcctgagcacatcgggaatatgctggtgacggtgacccctccccgtgagctatcggacgatttcttgcagcggctcatttttgtcatcccagagttttgggatgactcagggtcgggattgaaggagatgttccgcatcgactcagcctatttccacagagtcacggctgagccccaccatagaacgagtaccaaggcctcaagaaatgtcctgagcttccatctcctcaaaagccgatggagagctgccatattcgactatggcagcgggtacaaagcagaggagctagaagatcgaattcgctcagcggttatgtctcactttacccagactatccggctttacctcatcgatcatcttcctgcgtctcgggtactgccagaggagttgttcaatgagatgatgagtttccgcgatgaaagcaccctcgatcagatgatggctttagggtag

SEQ ID NO: 362976 - DNA, 171 bp, Pseudomonas aeruginosa
atgaagcgccagcaacgcctgtcactcacccaggaggaagccgactcggtaaaccaccaacttgatttgatcgagcgatgcaccggcaaacgtatttccgtgaacaagctcattaagcaggctactttgcagaaagcagagcaggttttggaacaggggaaaaatgaatga

SEQ ID NO: 362977 - DNA, 180 bp, Pseudomonas aeruginosa
atgagccgcaaaacccctccacccgccatcgctggcaaacccattttggttacctttggggtcaaccagaccgacaaggtcaacaaagcggccaacatgctgaacaagactccgcgccaattcatactcgactcgacgatggaggcctgcgagtcagcccgcaaagtacctaagccttaa

SEQ ID NO: 362978 - DNA, 783 bp, Pseudomonas aeruginosa
atggtgggctttgccgccatcatttgttcacttgtttggggtagacctttgggacttgtcgtcacgcagaacctggtcacggttgaccacgccgtcagagagcatctgatcactactgtggatggcaaccctaaaacggacatccgggagtgcgggctaaaggtcacgtccttgttcacacggatcaagtcctccgctaagcggagccgggatcgaaaggccagtgtgattggcgataactgcccgcttctgtacgccctcaaaggcaaagatggccttacgaccaatatcacctccatcaaacgcctggcacagagcggtagcgagatcctggcggtaattgccgcacaaacccaagccgacacagtagtgtatatgccgtcaggctacagtttgagccgcatcgtggcgtcgcgatgcgcctccgtgctcaatgctgaattggcccatgatgtcttcgtaaagtcgaccaagctggaagcctttgacatgatccgaagagcagaggacaacggggaaatcactggcgatgaacgcaaaggcctccagttcaggctgaaaaaagctgatggctttcccctgaaggtgatcccggtggagtatcgccacctgttcacgccgctccaactcaacccagcttttcgtggtaatgttactggccgcgtcgtgttggttgacgaccttctggccacggggcggacgctcacggtggccaaagagatcgtccaggcgatgaatggcgtcacctcggtggaagccatctgccttttcagcgacgtgtga

SEQ ID NO: 362979 - DNA, 804 bp, Pseudomonas aeruginosa
atgaaggattcattttcaaggcgtcacggtttctcgcagatcgacgaggccgaaatcaccgtacgagaagatgcaccgcaagcgctgcaggaatacctgattcagttgagctacgagtgtggtctcaagccctcagacctgcgccaaatcatctgccagaccttgaaggttttgcccgataagcagaactggagcgagagacccaacatccacgaggagaacgtccagcggcttgagcagtgcaagtggttcaaggtgtatgacgtcatcgagcggctggatgactacttcggcaaccgcaactacgacggcgatgtgtacgagcacttcacgactgaactgaatgagttcttcatcgagcacggcataggctggaagctgctgaatggtcgcatcgagatgcgtggctctgagtcttttgaacagattctgacctcggcgaaagaaactgagcaccaacacggtcacgtcacggccagcaaggaattgcaccaggcgatagctgacctctcacgccggccatccccagacccgactggagcaattcagcacgccatggcctcgctggagtgcgtcgctcggcaggtcactggtgaccaacaggcgaccctgggcaggatcatgaacgattgccggacgctgattccagcaccattggatcaggcggttatcaaaacttgggcgtacgcctcggagttcggacggcacattcaagaagggcgcgaaccctctttcgaggacgcagagctcgttgttggcctgtgcgcctcggtcagcagctatctgatcaagaagtcgaagtga

SEQ ID NO: 362980 - DNA, 1182 bp, Pseudomonas aeruginosa
atgacgcgaggggtagacagtgggttggccaggaagctgagggaagagaagtggacgctcgccaagctacaaatgcaacgtcctgagaaactgctggaactcggcctcagtgaatccgtcgtgccaaagatcctcgggaaaggcaggccgccgataccaacggatttcctcatcaagacgctttatgacaatcgctggctttgttgtgtctgtcgagaccctgtccgcccggtcatcgttcaccacatcaagtcatgggcggaaagtcgcgatcattctccggcgaacctcgcagtcctttgctctatccatcatggggaggcgcattccacgcatgctctggagcttacgctcaccgctgaccggctcaagtcgattaaggccgattgggagcatgaagtcagtcgtcacgacccgttggccatatttaagtccacccagctaatgagttgccaatggtggtacttcaatcacctcagggttttcgaaattgccgaacaggtcggagtggagatcactcagctcaaggggttccagggcgccttgcgaaatggcgcgtgtgacgacgaaggttacctttgctccagtaagggcctcgtgtacgttgaccaggcccggtcactctcgctgtatcgctacatgagcaacatgctgaaggccgccgtggggcatgcttgcgtccgtaacatttcggatgacctggatcgggccacactcgatattctggtcacacctggcgatctggtgttcgtacagggttcgtatcacttcacagatatgcctcctgacggttccggtgcgaacatggttcgggggcgacgcagcgtcaacaaagtcgaaatcacgtttgtctttgacaggaacgaaggaacgtcgggctcagcgcgtacagagtggctgcttggagtgcgctctttgggctgcctactacgtgcgaacaagctagagagagacctcaagggcatcctgcatatcgaagccactgtgctggctatccgcagcgcccatgaagagttgaagtcgaggatgtatgagataggcctctatcaaagcggcctgataggtcatgaggacgaggaattggaagatttcgatcctgggtactctgagggcgagggcgagggcgagggcgagggcgagggcgagggcgagggcgagagcgatgacttactttactcgtag

SEQ ID NO: 362981 - DNA, 168 bp, Pseudomonas aeruginosa
atggacaagaaagcgccgggtctcctgacacccttcgagttcgcagaaatgatggaggacttcagcgaagcgggtgaatggatgtccaaacagctgcgatcgaaatcggacaaaggcactgacatgatcgatgacgaccaggatcggcccgatcctatggaggactag

SEQ ID NO: 362982 - DNA, 630 bp, Pseudomonas aeruginosa
atgcgggtcgccgcagtcgtttttgacgctttcggaacgttggttgagatagcgcagccgacacatccgttccggcagttgctgcgagaggggcgacgccaaggccgtctgcctcgcgctgatgacattcgaacgatcatgacccgttgcctttctctcagcgaggctgcgctggccttgggtatcaacatatcgccttctaagctcgaagctctccatcaacgtttggaggaggagttggcaagcattcggccttatcccgacgcagtcgaggctgtcgagctgctgcaagctgcagggctaagactggccgtatgctctaacctggcaatgccctatggctcggtagtggagagcattttcccgcatttcggagcgtatggtttcagctatcgaatcggtgctatgaaaccgcaacccgccatctaccaacacacttgcgatctgctcaatgtccggccagaaaaggagctcagtggtaaagggcggatcgtcatgattggcgactcagaaaggtgtgatcgggatgggcctggccaggtcggtatcaagggttacctgttgcgcaggaatggagacagggcttccaatctttctcattttgcacaatcagtgctgagtgataggtag

SEQ ID NO: 362983 - DNA, 735 bp, Pseudomonas aeruginosa
atgaagcttcatatactgtccgatctgcattgtgaattcgctgacttcgccccgcctgtcttggactgcgacgtcgtggtgctggcaggggacatacatgtgaagtcgaggggggctcgatgggcgagcgagtctttcaagacgcccgtcctctatgtgatgggcaaccatgagcattacggcggcaaccttgatcgaacctatgccaagctgctagcgagcgctaccgagcatgtgcatatcctggaaaatcaggtctgggagcatcgaggcgtgcagtttctgtgcgcgacaggatggacgagttttggctcgaccggcgacgttggcgctgctgcatggtgtgcccgcgacaccatgaacgacttccgcactattagcgtgggtgatcagttccgtcgcctgcgtccggacgacttgattgctagaaatcgagctaccaaagcgtggcttgaggagcagctctccaggcctttccaaggtaaacgagtggtggtaagtcaccatgcaccgctcatgcagttcgtaactgaccaaggcgctaacccccatttgagagcggcctacgggaatgactgggatagcttaatgtgctttgacattgatctttggatctttgggcatacccataaggctatagacgagtatgtaaacggcatacgattcatcagcaaccctcgtggttatccatccgagcagactggtttcaggcctgaacttgtagtcaatgtttag

SEQ ID NO: 362984 - DNA, 477 bp, Pseudomonas aeruginosa
atgcagaacgagatagccgccgtagtccgagctctacgcgacctgcaaggatctgctcaggaggagctcgccgagatcagctcccaagccaatctgtcgcgcttggagcaggggaaaacgcaggcctctctggccaagctcagcaaaatcgcgctcactatggattttgatctcgtggccctcgttgcgctgtgccaagccctccaggatgggtcatctcctctcgacgttatggcgaaggcttcgagcaatctagacagctttatagccaaaggcgggttgcaggccctggaaaagcattgggaggttggggaagggctgatcaaacgcacacggggcaaacccagcaactcagatcgagttcgcgccgtgctggagctcaaggccagcggcatgaccaaggcggaggtcagccgggcgcttggtttacctgaagcgactgtcaggcgttactggctcaaagatctgcctggctag

SEQ ID NO: 362985 - DNA, 315 bp, Pseudomonas aeruginosa
atgaataccagcacctttctagaggacggcgatttcctgacgaaagaagacttcctttcgttcgctaaggggatgcgcaaaccggaggcggcaaccatggattctcaggcagtgatccaacacccgtttaacgtctgcgcggtcattgttctggccgatctcatcgacctgatccgttacgagctggaggtgatcgaggacgacgagctgggttcgcggaaaggggtggacctgttcaatgagatgctggtcaacatgcacagcgaaaccgaaaagcaattgctgatcgaagcaatcaacgacgcattcatttaa

SEQ ID NO: 362986 - DNA, 255 bp, Pseudomonas aeruginosa
atgactatcgaaacccacatcctgtatttcagcgaagccgaggccctgcgcgagttcagcggcttcaccgttgaagtgtcccatcaggctcgcccgaaccagaccccagccaacgtcaccatgtacatgatcgttgcccagcgtggcggcatcggtcgccgcgaggtgatcgccgagttcccgctggaactgcacgccacgatcttccgtgacatgtgcgaaggctttgtgcgcagcgagcgcctgaccaagtaa

SEQ ID NO: 362987 - DNA, 177 bp, Pseudomonas aeruginosa
atggctactcaagcccttccctcgttccgtgtcttcctggcccgcctggccgcttctgcgcgccgcgcagcggccccagctcgcccggtgccgtccatgcagcaactggccgagcgcgaccagttaatggagtccgccgaccttctgaccctcgcacgggctgttaaacgggcctaa

SEQ ID NO: 362988 - DNA, 246 bp, Pseudomonas aeruginosa
atgtacggacaccagaccacgccgaccaaggccgccaggacatgccaggcgcttgccgccgctgcgcgcaaggccgagctgcaacacgattgggaagtggccgcagagttctacgaggccgccgcgacgttcatcaccaaaccgggcgaactggcgcaccgcgatagcgccggcttgctgcgcaaggccgccgcatgctgggaagccggagatcgaggccagggcgcaggacctggccaccgttga

SEQ ID NO: 362989 - DNA, 729 bp, Pseudomonas aeruginosa
atggagtggactttctcgaaatcgctactggtgacgatgcgaccctttacgggtgcgcccgcctcgggtggcgttggttcgtctttctggattgcgcaatccacatcctttccctggccatcactttccggtcggggtggcggtggggtggtcgtcgctggtgttccagctcgctcctgccttgcggccctcgctcgcatcagcgccttgcaaaacccgttaaagccaatccccatcccgtgctcttctttgagcgttttccaaacatcctcccgtgaggctccggctgtcagtgcggcctcgatctcgccgagcatgttccgcaccagggccgaatcgctccgtggttttagtcgcgatagtggcatcgcttacccctcgttatcgacctcgggcacttttgtcccctctttgtctctgatccgtactctagccgtcccttttgactctggcaagtcccttttttgtctctccggtgtcttcacatcgtctctcggttgtcttcaatgcgtactcagtggcacccctgggcggcgaaaagcccctcacgctgcgcgtgagggatcaggaggacgcttttttgcggcctccgaggggtgcagacggctattttctcccttaaaagcagagcggtattttcccttaacgagctatacaccatacgcaatgcttcgcatcgctaagtcgttgaaaaataaagcattttcaacgactcgcgaaaaagcgtaa

SEQ ID NO: 362990 - DNA, 1257 bp, Pseudomonas aeruginosa
atggcgcgggtgcttgcaccggccaacctcagacgtgcgtatcagcgcgtggtcagcaacaagggcgcgccgggtgccgatggcatgacggtcgacgacttggcggactacgtgaatcagtattggccgatcctccagaggaggttgctggccggcgaataccacccgcaaggtgtacgcgccgtcgacatccccaaacccaaaggcggcacccgacaactgggcattccctgcgtcgtggatcgcctgatccaacaggcactgctgcaacagctcacgccgatcttcgacccgctgttttcggattacagctacggcttccgtccgggcagaagcgcccaccaagccatcgagacagcccgcgcccatgtggcggcagggcatcgctggtgcgtggaactcgatcttgagaaattctttgaccgggtcaaccacgatctcctgatggcgtacgtggcgcgccaaatcgtagataaacgcgtgctcagactgatccggcggtacctccaagccggtgagatgtcgggtgggatcgccagccgacggcaggaagggacgccgcaaggcggcccgctctcgccgttgctgtcgaacatcctgctcaacgaactcgaccgcgagctggaacggcggggtcatcgcttcgtgcgttatgccgacgatgcgaacatctatgtgcgcagccctcgtgctggcgaacgagtgatggccagtgttgagcgcttcctgaatcagcgcctgaaactaacgctgaatcgggataagagccgagtagccgggtcttggatgtgtgattacttgggttacgggatgagctggcatcagcaaccgagactgagagtggcgacgatgagcctgggtcgcttgcgcgaccggctcagagagctgctacgtaaagcgcggggccacaaggtggcgactgtcatcgagcggataaaccccgtgctgcgcggatgggcgggctacttcaagctgagccagagcagacggccacttgaggaattggacggctgggtgcgtcacaagcttcgctgtatcgtctggcgtcaatggaagcggccctctacgagggcgcgcaacttgatacgcttgggacttaatgcggcgcgggcgtggaaatcggcagtcaatggccgaggcccatggtggaactcgggagcgccccatatgaatcaggcgttgccgaagaagctgtgggaccgcctcgggctggtctcgatactggatacgataaaccgacttaaccgtataacctga

SEQ ID NO: 362991 - DNA, 939 bp, Pseudomonas aeruginosa
gtggatagagaattggatcagccccttcagcgcaatctggagcggctatacaattacctagaaaatccagaacgagaggaggcacagcgtgttctgctcgcagcggaaccagagccgatccgaattactcacggaattcctgacctctataccgactggctgtcatcccccagctactcagcacaaggtggattgacggggcaactgacgcaggtcataagccagactgccgggcggcccgttctagtgttcgacgactacttcatgaaccagcagatcaatacctttatccaagaccgcatcgatggtgacaaagccgataaggtcagccgcctccagtccaatatttcctatctgattgaaatgggtattaatatcgatttcaccgcccgtcatgagcttccacctggtgggcgaggcaacagagctactattccgacctctgaccccaacggtgaatcaggtgtaacgattggctatggcttcgatgtcggccagcacgatgaatccggcattcaggctctgaacatcgctgaatccacgcgcaaaaaaattcgccccgccctcggcttgaaaggagcgaacaccgcgaccttccaggcattagctcaactcatcccggtactcacagatgaagacgggctgtccctctttaccgccaagatgatcaaggtcactgatcggatgaaggtgaagttccagcagtggagcaccttacctccggcggtcaaaaccatagtgacagacctgtattaccactatggtgagtattcctcgttcccaaactttgagactgctatttctcagagcgactggccagccgccattagggagttgaggaactggaatggtactcccaacagtaccgatccgagcgatggcatagccaggcgattgaacaatcgcgcggactatctccaacgatccctgggactctag

SEQ ID NO: 362992 - DNA, 1710 bp, Pseudomonas aeruginosa
atgtcatctctttcgatactggcccgaggtgagcggctacgcgagcgcctgctgaccgacgtagccacagacctgcgtattacaggcttccagtctcccgccgaggatgaaaaggaagatggcctatctctcgacaggcttaccggcctgggctcaccgcatatctggggtgtccaggtactggacgacagcctgatcggcttcggtatttttcgtggagatcggctgatcgttaatcgagcggccagtcacctggatgacaagctcgtggtggtagacctaggcggcgagggataccgagtgcggctggttcagcgtgacttgttcggagggcgctggctcaaggctgctgaccccaccatgcccgatctacagctagacggcgagcagatcattgaggtgtggggtgtcgtgggtagtaagtcgtgtgtcgccatgagcataccgtctcgtgtgtttgctctcatcgactgcaacagcttctactgtagctgcgagcggatctgccagcccgagctcaagcgccggcctgtcgtcgtgctctcgaacaacgatggctgcatcatcgcccgcagtagtgaagccaagctactaggcatcggcatgggcgctgcctattacaaggtgcgccatgagttacgccgccagggcgtggtggcacgctccagcaactacccgctgtatgcagacatcagcaatcgagtgatgcacttgatggctgagatgctgccaagcattgaggtgtattccatcgatgaagcctggggcgacatgactggtgtggtagatcctgaaggcctgggtcgaagcattcgcgagcgcctggcgcgcgagatcggtatgcctgttggcgttggcatcagcacaaccaagaccttggcaaagcttgcgaactgggcagcgaaaaagtggaagggtactggtggtgtgctcgacctgaccgaccccattcgccaggataagcttcttcgcctagcgccggtgtcggaggtatggggtgtgggccatctctcagcgtccaagctcgcagccctcaatatctccaccgcctgggatctggcccagttcgaaatcggcactctgcgaaagacgttcggtgtgaccatggagcgcacagcgagagagctgcgcggtatcagttgcattggtttcaacgaaggcccgccccctaaagaggcgatcagttcaagcagaatgtttggggtgcgccagacagagctaccaccgattcgtgaagcactggctacgtatgtgagccgcgctgcggagaaattgcgtgctcagggctcgctatgcagcacgattcaggtaggccttcagactcagttagcggatgtcgacgggccgcgttacgccaacgcagtgacgctggccttgcctgcacctaccgatgacacgagagagattttggcgctcgctcagagaggcctaggtcagatctaccgccctggatatcccttctctaagtgttccatcttgctgatggatttgagtcagcggggcgaattgacgctagacctttttgcgcccaaaccccgccgtggcgccgagcagctgatggccgtagtcgaccagatcaatcaacgcgagggacggggcacagtgcgcattggtcgggtgccggcgaaacccgcttggacgatgcgaagggagatgctgagtcagaggtatacgacgaggtgggatgaagtgattggcgtacgggggtag

SEQ ID NO: 362993 - DNA, 330 bp, Pseudomonas aeruginosa
atgatgaaacgtttcggtaagaccctgctcgccctgaccttggcgggctctgtggccggtatggcgcaggctgcggacaacaaggtgctgcacgtgtacaactggtccgactacatcgcgccggacaccctggagaagttcaccaaggaaaccgggatcaaggtcgtctacgacgtctacgacagcaacgaagtgctggaagccaagttgctggcgggcaagtccgggtacgacgtggtggtgccgtccaactccttcctcgccaagcagatcaaggccggggtctaccagaaactcgacaagtccaagctaagaactggaagaacctga

SEQ ID NO: 362994 - DNA, 417 bp, Pseudomonas aeruginosa
atgaaagcgttgctgctggcggccatgccggtggtgctaatggatggcactaccccagacctcaaccgctggttgcagatcgagccggccatcatcgccgccgtggaatgccgtcaagccttgccgttgcgcgtgctggacggcattgcgcccaatgctcccgatagttggtcgctgacgccggaacgcagcttcacggcattcggcttgccggtgaagcggatcgagctgttcatcgatccggatggtgagctgggtgcaagccatacagcagttattgaaaagcgcagcctggaacaggtgcgcaagcaactgaagcttgccagccagcgcgggcacatcggccagctatcggcagatcagcccagcgccgaagttcaagtgagctgcacggtcgccgcaacggggcaagggtga

SEQ ID NO: 362995 - DNA, 1293 bp, Pseudomonas aeruginosa
atgagtggtaacgaaaaacagcccttggtgctacggctgcggttcccggagtttcgggaggctgaagaatggaaactggaaccacttggcaagttggcgaagcggcgcacggtaaaaaatgtcggactcgaacacacgcgcgttctcaccaattccgccgagtttggcgtgctcgatcagcgagattacttcgaaaaagacattgccaatcaggggaaccttgagggctattacatcgttgaaaaaggcgactacgtttataaccctcgaatttcagctagcgcaccagtcgggcctatatccaagaacaatgttggcacgggggtaatgtcccccttgtacacagtgttcaggtttgacagtagcgacaacgatttttttgcccactatttcaaatcgacgcattggcatcagtacatgcgtcaggcgtctagcactggcgctcggcatgaccgtatgagcatcacaaatgatgatttcatggggttgccgctgcctatttccaagccagaagaacaacaaaaaatcgctgactgcctgtcttcgctggatgatctgatcgcagcggaaaccaaaaagcgcgacaccctcaagacccacaaaaagggcttgatgcagcagcttttcccccgcgaaggcgaaaccgtgccacggctgcggtttccggagtttcgggatgcgggggagtggaaggagcgactgttcggagacctacttgatgacattatcgactttagaggcagaacgcccacgaagctcggtatggaatggggtggtggcaatattcctgccctctcagccaacaatgtcaagaacggttttattgattacaacgcagagtgctacttggctagcgaggaattgcatttgcgatggatgggcgatgttaacctcgaaaaggaagacattgttttcacgatggaggccccgctaggcaatgcattactcctgcccgattcgagaaaatacatactcagtcagcgggtagtggcattcaaaacaaaagctgacgtcttgaatccatttcttgtccaaaccatctggggagacggcttccaaaatgcaataggaaagttggccaccggttcaacagcaaaaggtatcaaccaaaagtcgctaagaacgatttcgattcggttgcctaacaaaaatgaacaacgacgaattgccgacagcctgtcttcgctcgatgatctcatcaccgcccaagcccaaaaaatcgaagccctgaaaacccacaaaaagggcctgatgcagcagttgttcccggtactggacgaggtgcccgcgtga

SEQ ID NO: 362996 - DNA, 786 bp, Pseudomonas aeruginosa
gtgacttggctgactgcttatcagtccgggcaggactgcgtttcctggcaggggcactgcgcgcaggaaggcgatgcgtttgatgcgttcctgcaagggccggtggccgcgcggctgcatgatgtggcaggacatgctgccctgaccgagcatctgcgtgggctgagtctgaccggcatggggcacgatgcactggaagaagtgctggcggctgaggtgccggaaacccgtgattgggccgccggtgaggcgctggccgaagccgtgctggaagcggagcacgatgtggtgttgccgtggaataccgagcgcgacaaacgcaatccctttgcctccctgcccggcgcggatatcgtgggctttcagcgcgatggcgaatcccaccggctggcactgggggaagtcaaatgctcgtccgaagctcagtcaccgccgcaggtcatgaacgggcgcagtggcatgacgcaccaactggataccctcgccaccaatcttgccaccctctgccagttgctcaaatggctgctgccccggatcaaaggtactgagcatgaaacggcgttcaacaacgcttgtacgcgctatttcaacagtgggaagcgtgatctggtgttgtttggcgtgctgattcgtgaccaaaccgtgtgtgaaaccgatttacaggcgcgtggccgctccctggcaagccgcctgcaagcccccagttgctgccgcctgctggcgttgtacctgccctggccgattgccaaactgcccgagcgtgtcgggcagggaggcggcgcatga

SEQ ID NO: 362997 - DNA, 3162 bp, Pseudomonas aeruginosa
atgaatcattggttgctcgatgccatggtggacaagcgtggcctagcgctgcgcgaggccgaccgggtgcagttctatcgcgaaatgtccccggaagcaccagccttcgacgcacaagccatgcaggatgtggccaccgtgctggaactggcggtgctggatatggagctggatcgttttgccgatgatgcggcttccctgaacatgatgcgccatgcagctgaagatgcgttccgactttggcgggcgctgcctttgccaagtgagccaatggaagctgccacgcagcttttacgggcttcagccttggctgtgattggtgatcgtggcgcggatgccgcccgctggctgcgtgcgctggaggatgcccaaacctcgcccgccttgacgctggattctgcggattggggcgagcgttgccgagcggtgctgaccgacatctggctgcgtctggtgcgcaaaaaaggctggtctgaccgcgatgccgtgctggagcgggtggcggcattgcgtgatgcccagcagacattcgagcgcgactatctgggcaccttcgaaccacttgccgccaagcgttcggcactggagctgattgccatctaccacctgaccaaggcagccgatgtactggcccactacatcactgatggcgtggtggaggaaagttaccagatacaacctttgctggattcacactttgaccgtgccattgccgcttgcgatgcgggccagttgctggagctggggccgctgacccgcctgctggcacgcgctgccgcgcagatggtggagaactcgctgtggacggttacccgcgccgtcaactcgcgggtaacccgattcgtgcgcgaactggtaagccgagggcgtggtgaccgggcgctgtttgacgtgctgccaccgcaacggcgcaccctggctgagcatggcttgttgggttccagccgtcgtgcggtggtggtcagcctgccgacatccagtggcaagacgctgattgcccagttccgaatgctgcaggcgctgaaccagtttgacgaccagaaaggatgggtagcctatctcgcgcccagcagagcactggtgaatcaggtcacacgacagttgcgtcgtgatttccagcccctcggtgtggttgttgagcgggtcagtcctgcgatggaagtcaatggcatcgaagccgggctgctggcggaatcgcaggacgatacccagttccgtgttctggtggctacaccggaaaaattcgatctgatgctgcgccagggctgggaggaaaagattggtcgtcccctgacgctggtggtggtggatgaggcccataccattcaggacaaggaacgggggctgcggctcgaactgttgctggctaccatcaaccgggaatgccgcgaagcgcagtttttgttgctgactccctttattaaaaacgcccgagaagttgcacgctggttgggtggtcaaaactcggatgacatcagtctgggcgtggattggcaacccaacgaccgggccattggcattgtcagcccgatggatagcggggccctgaaggggaaaagccgggattaccggctgagctttcaggcggtacatacctcgcgcccaagcattcgtttggatgaggacttttctctgggcaaagaagaagccctggctgcttctctatcaaaagccaaggatattggcactttggcggcgatgaccgcacgcaagctgtcggcgcgtggccctgtgatcgccatgcacagccgcccggattatgtctggaaattggctgagaagctgaaaagcaatcgcagtgatgcattgccagacgatgtgcgttttgtacaggactatgtggctgccgagctgggtgtagcgtttccgctggtcgatctgcttgctcatcgagtcggtgtacatcacggcggactgcctgaagaggtccgcatgttgatggaatggctgttcgagcaaggccatctggatgccttggcggccaccaccacgcttgcgcagggggtgaactttccggtcagcggtgtggtgatggcggcaacccagtatccctttggtcaggacatgccgcctgaggatttctggaatattgccggtcgtgctggtcgcgtctcccaagggcagcttggtgtggttgctctagtcgctaaggatgaaagcgaagtggcacaaaggcgggagtttattaatcgaaacacgggcgacttgaattctgcactgattcagattgcgcgtgctgcggctgatgggctggaagacctggggctcatcgtttaccaccatccagaatggtcgagcttcttgcagtatctggctcatacctatcgccagatgggtcagccatcgaactttgcggatcagatcgaacaggtactgcgtggcacttttggctttgagaaattgcgcatatcggatagccagattgcccgccgtttgctgaatggtatccatcgctatgtcgattatctcgccagtccttcccaaccgctgaagctggtggatagcaccgggttttcactgcaaagtatcaggacggtgttggcgcataaaggcgacctggggccggattcctggaatcgtgagcggctgttccgttctggtgacaacaccctgcagaacatgatgggggtgctgttgcgagtacccgaattgcgcgacaacctgaattcggtgctgggtggcagatcaccggatggtgacaagttggcacgcattctgaaggattgggtaaacggggcagatattgcccatatcgcgacgcaatatttcagcgagggtggtgcagatgctgtcactgccttgaccaagtgcggacaaaacctgtttggcaaactgacccataccacgtcctggggcctgaatgccctgctggccatcaccacggcggagctgaatgatgaggagcgtaaccggttatcgaatctgccatcgcaggtttactacggtgttgccacagacgaggccgtttctttgcgtcttttgggggttcctcgccgtgctgcgccgcggttggccgaggccttgcgcttaacacgggaggattcactgcctgccattcgccagcgtctggaaaacttgccggagcaggcttggagtgaggccttgggtcgtgaaggcgctatctaccgtaaggcttggatgattctggatggggctcagtga

SEQ ID NO: 362998 - DNA, 1137 bp, Pseudomonas aeruginosa
atgaaacagaatacgccgccattttttcctgatcttcccgcgctggcgacccatctgcgcagcgagctggagaacaaaaaagccatcctgctctatgcctacaacggcaccggcaagacgcggctatccatggccttcaaggacatgggcaagcagggcgtggctcgcgataccttgtatttcaatgccttcaccgaagacctgttccattggaacaatgatctggcaggcgatgtagaccggcgcttgctgctcaatagggattcgcgattctttcaggggctgttcgatctggagatggataaccgcattcgcccattgctgcggcgttacgcggatttcgatttccgcatcgacactcaggagccagagtgggccgtgcgcttctcgcgcttggtggatggacagaccattgacaatatcaaggtatcgcgcggtgaggaaaatatcttcatctggtgcttcttcctcgcggtagtcgaattggcgatggacccggaaatcgaggcgtaccagtgggtgaagtacctttatatcgacgatccgatttcgtcgctggacgagcataacgccatcaccgtgggcaaccacttggcacaagtgttgggcaaggcggataacctattaaaggtggttatttcatcgcaccacccactatttttcaacgtgatgcacaacgagctggatgcgcgcaagtcgagaaaagtctctgcgcactttctctcgcgttccaaggcagatggctcgtacaccctgacctacaccggggcgacaccgttcttccaccatgtggctgtactgaccgagttgtacaaggccgagcagtcgggcgagctgtacacttaccacttcaacatgcttcgctccgtgctggagaaatcggcgagctttcatggcttctcgaacttctcggcctgcatccctaccgacgatgccgacgaccctgaaggcgtgctgcatgcgcgactcatcaacatcctgagccacggcaactattccttgtttgagccccagccgatgctggaagagaacaaggcctacttcaagacgattttggatggcttcctcaagcgctatcccttcaatcccagtttgttccctcaggcttctgaggtggcaacagcaggtacaccatga

SEQ ID NO: 362999 - DNA, 657 bp, Pseudomonas aeruginosa
atgccaaaatactatgcctatctccgggtttcgcgtgacggccaagacccggaaaaccaaaaatacggtttgctcgaatacgcgaacgccaaaggcttcgcgccgctacagatcgaggaagaaattgccagcagagcaaaggactggcgcaagcgcaagctcggagcaatcatcgaaaaggccgagcgtggcgacgtgctactgacgccggagattacgcgcattgccggttccgccctcgccgccttggaaattctcaaagcggcgagcgagcgcggcctaatcgtccatgtgaccaaacagaagatcatcatggacggcagcctacaaagcgacatcatggcaaccgtgcttggcttggctgcacagatcgagcggcatttcattcaggcacgtaccaccgaggcgctacaagtcgccagagagcgcggcaagacgctcgggcgacccaagggcagcaaatcgagcgccttgaagctggacagccgtattgatgaagtacaggcatacgtgaaccttggcttgccgcaaagtcgcgcagccgagttgttaggcgtcagccctcacaccttgcgcctgttcatcaaacgccggaacatcaaacccacaaacactagaccaaccatcaccatgccggggagggaacaacatgcctaa

SEQ ID NO: 363000 - DNA, 1734 bp, Pseudomonas aeruginosa
atgcacccctactacgccaaggaaacacccggcgagtggcaaggcgaaggtgccgaacggctcggcctggtcggccccgtcgatcagctgcaactggccaaactgcttgatggcaagttgccgaacggcgagcggatccacaccacgttcaatgccgaaaccaacaagcggcgcatgggcttggacatgacattctcggcgccgaaatcggtgtcgatgcaagcactcgtcgccggcgacaaaaatgtcaccctggctcacgaccgggcggtggccaaggccatgcaccacgtcgaaaagctcgcccaggcacggcgcaaggtacagggcaagttcctgcgcgaacgcacggggaacatggtcattggcaagtttcgccacgaaatgagtcgcggcaaggatccccaactgcacacccatgcggtgatcatgaacatgacgcagcgcgccgatggtaaatggcgtgccttgttcaacgacgatattttcaaggttcagcatgaagttgacgccatgtacaagggccaactggccttggagctgcgcgagctgggctacgagatccgcgtactcgatggcaaaggcaacttcgagctgaatcacatttcacgggaacagatcgaagcattctccagccgcagcaaagtcattgaagaagcgttggccaaggacgggaaaacccgggccgacgcgaccactctggaaaaacaagttatctcaatggccaccaggccgcacaaagacgagcgcgaccacgatctggtgaaacagtattgggtgacgaaaagccgcgagttagggatcgactacggcccacaaagccgattggatggccgcgagtatggtgaatcaggcccagcgtcaggcgctggccgcgttccatctgatcccaatctacccgcagggctgacaccggcccaagccgttgtgcaatacgcaatcaatcacctgaccgagcgtgaacaggttgttacccagttggacctgttgaccgtggcgctccagcgttcggtagggttggccgggcctgaccaggtacgggccgaaatagcccggctggtacaacaaggtacgctcatagagtcagcaccggcctactcaatggcacagcccacggaaaacgcgcccgtgttgtcgcctgcaggttggcaagctcacctgcaggagttgaaaggctggacggacaagcaggcaaaacagtacgtggccaccgccatcgagcgcggttcattggtgccaaccgagaagcgctacaccacacagaaaggcttgaagcgcgagaaagccatccttgccattgagcgcactggccggggccaggtgacgccgctcatgtcccaggagcaggtcgctaaagcacttgaaggatcaaccctcaccgctggccaacggcaagccgtcgagaccatcgtcagcacggagaatcggtttgtcggcattcagggtgatgctggtacgggcaaaacctactccgttgagcgggccgtgcaactgctcacatccgtcaacgaggcaatgagttacggcaagacagaggatcaactcggctatcgaatcctcgcattggcgccgtatgggaaccaagttgccgcactcaaaaacgaggggatggacgctcataccctggccagctttttcaacaccaaagacaagaccctggacgaaagtgtcgttttcagaagacgaccgcaccatctgactggatgtaacgcctggtgtgcatacggctcctga

SEQ ID NO: 363001 - DNA, 441 bp, Pseudomonas aeruginosa
atgccccccaaatcggcgtacgccgaccggctcgatggttaccgccgatacctggaaaatcgggaaggcagcttgcgccagatggccagccactgcggcgcggaactcggtgcagcgcacaagcgctgcaagcgcgacctggtgttttcattcctgcaggtggaacggctgaacgggctggacataactccgaccctggcagaaaacctctgcaccaagctgctcgggagaggggtggacgtacggattgcgctggagaaattcgcaacggaagggcgcacagccgccaacaaatcaaaggtcggtcctgagatcctggatcagctggaggcgactctggagccgatggtgcaagccctggtcatggccatgacagagatccgggtccgctaccgggatgacttcgatgactgcgtagcacatcgccggttcaagccctaa

SEQ ID NO: 363002 - DNA, 222 bp, Pseudomonas aeruginosa
atggctcgggaaatcgccctgcagttgcccaccgcccaggcgatgatgcgcacctggtccgtggacaactgcaccgttcgctctggcccttgttggggccccgctcactggacgatttttgtgtgtgggctgggcgactgcgcaagagcggccttcggcgaccaagggctgcgcccttggatccgcaagcccaacgcgccggcctccgaatggatgccctaa

SEQ ID NO: 363003 - DNA, 1020 bp, Pseudomonas aeruginosa
atgtcgtctgatgaactcattttccaggctgaccggattcactcagtttccattcataacgtcaccctggttgctaaccagatcaatgaggacgggaaaacggctgacctggttatcgagtaccagggaaagcagcacacgttgcgcgccgctcattacgtgaatgagagtgacgtaggcaaagtgggctatgtactgccagcgcattttgcgtcgtcggcagcagggaatggcaccatgattttccgggcctaccaggatcaaagcctgcgccgcgtgtacgagctggacaccacgaacgatgaatttcagatggtgccgcttaaccatgggaagtggccgcaccaccgcgctcatttgacatgcggttggcggtgcgacagtcgacctaccggctttctcgcaccggcagggcttgtgcctggtgccaaaggcgagttcgtgccggatgaaacagaagttgtttccgtacgcattccgcctgaattcgaatgggaagcacgccggcatcagatgaaacctgcggaactgctcgaaagctttattggcgacctggccggcatccagaactttggcaacaggccccgggctgaccgcttcggcagcaacggcagcgacgaacgcatgctggctgatcactggctggagcgggcgcatggtatgaaagctatagacccggaccagatgaatcagcaggccgaggaagcagaggaatgggatgcacagcaggacgaatggtcggagctgctgggcgaatacgctgatcgaggcggtgatcctcgccagttgctggaagccgttgacggtgtgctgaccaagctggacgagttggggcctgattttgtgctggatctgcaggccgaggttgaagcgactcaaaccctgcccaaactcaccgagttgaatccctcgcagctggcgtaccttgagaaatggctggccagcaacggcccgaacaacctcctaaagtggccaggttggcatgacgcccgagttggccaggctccgaaagacgtttga

SEQ ID NO: 363004 - DNA, 396 bp, Pseudomonas aeruginosa
atgaatatcaccgctcaggcccccgcagtcagcgcccacaattggctcactaccggcgactttctgaacttcgccaaaaagatttgggcgccggtcgcgtcgaatagcgaggcgatggagcgcaaggttgatgacctgtacggcgcagcatgcgaacgcttccctacctatgacacgatggtgcataacgccttctgtgcgagcatggacgcagagttcggcgccgatgaccaggccgagggagtggcagaaatctttgcgtatgcccgcgaggcttacggctatatgtctgccagtgaaaacgaagcacaacgccaggaagacgccgacaacggcctttgctggcacggcctggacagcatgacctgcccttgcggttgcttcgaaaacgactaa

SEQ ID NO: 363005 - DNA, 264 bp, Pseudomonas aeruginosa
atgaaacgcaagaccaaacggcgcaactggctacccgtggttctctgtgcgattgccggtgtaggtcttttgacggttgaaatgctcgcttcgcggcatatgcttcaacgccggcttgatcagaagtaccaggaaaaagtgcgttatctgcaggagcatccaccgaccaccactcgcatcgaaatattggtgccggatgctgcatcctccatgacgccgaaacgcattgatgaagcgctgcatccggctggacggacccagtaa

SEQ ID NO: 363006 - DNA, 441 bp, Pseudomonas aeruginosa
atggacgaacgaacggaacaggaattgaccgcgtacctcgatgtgctgctgtggctggagacggcttcggttgccgagatcgagggggctttgtcggtggccaccgctcccgcccgcgaggatctggagctgggtattcagtgcctgatggactcggatcggcccggcctggccaactacttcccgaacctggtaaaccggcccacctccctcaatgagatccgccaaaagttctcagcgatggcccagtccatggatcagttggaggattcgttgcgtcggcggcgaaccgatccgacctatcccctcatgggttacggcgctgtactcggtacattggccaagctgcagtacctcaacaaaatcacaccgtcgcagcgcgagctgctgctcagcgagctggccagcctcaaaggcggcgggctgcgcctggacaactga

SEQ ID NO: 363007 - DNA, 222 bp, Pseudomonas aeruginosa
atgttccgcgatctcaccatgagcaaagcccaacgttccagccaggccctgcataccgctgcgcgcttggcagagcatcggaagaagtggtattcagccgccgagctgtacgaagccgccgcgtcactctggccaggtaagggcatcagtttgatgcgtcgtgccgaacagtgccgctccctggttgtcgatgccagcgatgaaatggattttgaggattga

SEQ ID NO: 363008 - DNA, 243 bp, Pseudomonas aeruginosa
atggctatcgaaacccacctgttctatttcagctcagccgcgcagctgcgcgagttcgccggcttcaccgtcgagccatcccaccaggcccgcccagggcaagaccccgccaccgtcaccatgtacaccgtcgtcgctcagcgttccggcatcggccagcgcgaagtcatcgcggagttcccgctggaactgcacgccgagatcttccgcgatatggccgaggcaactgcccgcgccctctga

SEQ ID NO: 363009 - DNA, 1092 bp, Pseudomonas aeruginosa
atgaacgcgatcagccgcggctgtccactggacagcgctcagcccattttatccctggcccaggtcgaggccctgcgcactgcgttggcagggcggctgctggccgtctgtttcggatctggcgtggactccacggccatgctggtagctctgcacgcggcagggttgcgcccggatatcatcacctttgccgacactggcgcagagaagcccgagacgctggcccacatcgaggcgatggattccgtactgcgggcgtggggctggccgactgtcagcgtgtgccggaaaaagcccaagccgaccactgaataccaggatctgtacggcaactgcatggccaacgaaacgttgcctagcctggcctttggcatgaagtcctgttcggtgaagtggaagcaggtgccccaggatcagtttctcaagggcgctcgctccggccccaacgccaggtccccccacccactttggaagcatgcccaggcaaccgggcagcgcatcgtcaagctgatcgggtatgactgcggcaaagccgacctgcgccggtctaaggcgatcaaaccagccgacgccgacttcgattatgtctatcccttgcaactggtccgctggacccggcgcgattgcgtacggtcgatcacccaggccctcggtgcggacctggtgccgatcaaatcggcctgctttttctgcccagcttccaagcactgggagctgtattggcttgccgcgaatcacccggatctgctggagcgtgccctgttgctggaacgcaacgcgctcaccggcaagcacagtcgtttcgacgcggtgcagttcggtgcctcatgggaagacctggtgcgcaatgccgatggattccccagcacgacgaccacggtagggctgggccgtagcttcgcctggaatcagtgggcacgggtcaacgacgttgtggacgagggtttcaacgtcaagcgcaccgctactgatcgagcacggttcgccaagctatccgacaccctgcgagatcctgacaacgccttggactcacgcacaccaggaatacccgtggtcgacatcaccgccgagcagatggagctatggcagtaa

SEQ ID NO: 363010 - DNA, 345 bp, Pseudomonas aeruginosa
atggccacccagcaggtagcgccgcccatgtggcgctactccctacgctggtgtatgcctcacctgccttgccctggcgcctttgagttgctggtgatcgaggcgccggcagggcagaagctccccgaggaaatgcgcaaggcgtgggaggcccgcccagcaggctatggcgtctgcctggacttcccagcctcgcaagcggtgaggcgctggagcgacgaggccaagggcaaggtacggcgcaagaaccttgagcggcggatagagaaacaagcgccattgttcgcggatgaattgattgcccgcgagctggcccagcgacccacctatttcgaaggcaagtaa

SEQ ID NO: 363011 - DNA, 369 bp, Pseudomonas aeruginosa
atgagcgcctatatcgtcgaccgtttccatatttccgccatcctcatgttcggctgcaccggcaagcccgatgcgacgacctaccaaatcctggccgaccagggccagcaactgctggacgaaaacctgcgctcggttcgtgcgcgctatccgggcgaaaccttcagggccgaactgttcgggctggatgaaaccgtgcgcaaacccaccccccttgaagccctcaagctcattcaatgcctggagtaccagtcgaaccaaaatcgcgactactacgcgaccgaggcattccgcaccctgcacagcatccgccaagcggcccagcgcaagctgccgggttgggatcaggcacagtgggactttgcgtga

SEQ ID NO: 363012 - DNA, 780 bp, Pseudomonas aeruginosa
atgtctattttcaaagagttggcgctacctactacgctggacgatctgctaactgcccgcgaggaagcgctgcgcctgatggcagatgcacgccgcacacttgagatggccgaggaagtcctagcgcctcatggtcgctatctgatgcctcacgccgggaaaatcagggaagaccaggacagggtgcgccgcgaactggacacctccctatggcgccgggcgttcgatatgaccggctttaaacagctcatggacgcggaggccgtcgcggagtttgagaaaagcctttgcccatccccgcctgaattcaccgcatcgacaattagcgcgacgttcattgacctgcgcataaacgccgaatcgatgttccagcgtggggttttcaatgtgttccggtatctatctgacgactaccgcacaaacgctaaagagccgttccgcatcggcccgaaagtcatcatggaaggcatggtcgaatcttcgttcacaagtggtctttgcatccggtacggttcgtgggcaaaagacaagctgaatgaccttgatagggtatttcaaacgctcgatggcaagcccttccagcctcacgcattgacctcagctatggatgctgcctttcaggctggggaagtgttcgagaacgagatctaccgggctaaagccttcaagaaaggcacgctccatctggagttcctgcgcctggatctgctggataaggtgaacgagcagatagctgaatactatgccggcaacgtccttccagacgctcgggctgcgtag

SEQ ID NO: 363013 - DNA, 303 bp, Pseudomonas aeruginosa
atgaagacaattaaacaaaccgccacgtacaggaactgggaacgcaagctgcgagacaagcaggccaaagccatcatcgctgcgcgagtcttccgcgttgcgcatggtctgcttggagacgttcaaccagtgggccaagggatcagcgaactgcgtatccaccacggccccggctaccgcgtgtatttccagcagcgcggtaaccagctggtcctgttgctgtgtggtggggacaagagcagccaagcgcgggatatcgaaaccgccaagtccttggccagccagtggagtgacgatgaatga

SEQ ID NO: 363014 - DNA, 300 bp, Pseudomonas aeruginosa
atgaaagaacaattttacgactacgatcccgctgatgcgctgaccgatgctgagtccatcgcagtattcatggaggacgcattcgaaacaggcgatgcggcctatatcgcaaaatgcctgggtgtcgtggcccgcgccaaagggatgaccgcccttgccaatgaatctggcctttcccgcgaacacctttaccggtcgttctcggacaagggcaatccgaccttgaaaaccctgctggccgtgatgcgtgccgttggcctggacctgacaacacgcaagcacgttgaaccggcacactaa

SEQ ID NO: 363015 - DNA, 222 bp, Pseudomonas aeruginosa
atgaacacggatctgatcgtcaaaaggattttgctcacacccgtggcagctggctttgggtggctcgttgccaccatgattgtgatcggccttaacctggccttacctaccgtttcagtcccatggatagagcgcgctgggcctatcggcgccattgtgggcatcgccattttttactggatgacctggaaagatggtcgctcggccacgcggaaaggttag

SEQ ID NO: 363016 - DNA, 324 bp, Pseudomonas aeruginosa
atggaaaacatcgcttgcatgaccaaaaggccgcgttacgccctcgcttgggcggtatgggtgggcgtcgccgcgtgggcatcgctacattccccctaccctggattcactggctgggactatgtgttattcgcgttcctggtcatggtgcccaagggcataaatggcgagttccccgcgttgacggatagccctgatgatctgacgccggagagaaaacgccgctacgtctatacgctgatcacgctggggctttttgcctgcttgctgtcacggcacgtctccattctcgacagccccctggtgcgtgtattcatcggctga

SEQ ID NO: 363017 - DNA, 297 bp, Pseudomonas aeruginosa
atgaacatccgcgccccgcatgtctggatcgtccaggtagaaggcgacagcatgcgcgatgccggcatcttcgacgggagccgcctggtggtcgaccgctcgatcacgcccagcgctgggcatatcgtgctggcctacgtcgacaaccagccgctggtgaagcggctggccaggtcgccggcaggctggattcttgaatcggctaaccccgcgtacaagagcatcgcgcccagcgagtacggcaccatcgaggtgttcggggtcgtgacttgggatctcacgcagcatgcacagtga

SEQ ID NO: 363018 - DNA, 750 bp, Pseudomonas aeruginosa
atggcgaccgtcgactgggagcttgtggggcaagcccggtggtacgactgcaaactgggcaagctcaaggatgttgagcttgcccgtttgatcgggtccaccccgcacaggatccggcgccgccgtgagcaacttgggattgcgccctggtcggtcggccagatgatagaaccctacaagaatctgctgggatttgcccccgacagtgcaatcgctgcgcgttgtggcgtcaccaacaaaagtgtcaaagcctaccgcgagtcgctgggcattctgccggtgttccggcccgcaccccgcaaacaggtgttgccgctcagtcatgacctgcggccctacaaatcgctctttggctatgtcagtgaccaggagattgcccggttggccagcgtcgatctggccatggttcaggaagtccgcgaaggactgggctttgaacctgtgcaaccaatacctggtgacagcccccctactcccattcccgactaccacggcccctggttgggttatgagtcactgttggcgaccatgaccccgactgaaatttgccggcaggttggcgtgccgtacccagtgattgtgcagcgctgcgctttcttgggtattcaaccctataagcgtgtgtctgtagcgtcccgctacgaccacctgttagggaaggtgccagatgcgttggtggccaagcttgccggagtatcccgtgcgagcattggcgtacgccgcaagcggctggccagccgcaaaagctga

SEQ ID NO: 363019 - DNA, 1272 bp, Pseudomonas aeruginosa
atggcagatcaacggtatgcggtaagcatcgggcttggcgaaaaggccgagcagtattcggaggcttaccagacccagccaagctatgcggtgcagtggaaaggcgtgctgcagaaggcacacggccatgccctggtccgctgcctgtgcccaggcaaaggcacgcggaggttggccgtacggcacaggtcagataaggattctttccacctatcccgctatccccacaccggcgccgagcatgcgcttgattgcctgtactactcgcccgaccccgacaagtcgggcttaggcgcctacagcaaaggcgtggtcgaggaaaccaaggacggtgacctcaaggtcaaactcaccctatcgctgcgcaagaaggatccggcagaagttcagccgatggagggcaccgcccctgccccatcaagcggaaagcccacgaagccggcgatgaccttgggtggcctgctgcatctgctatggagcgaagcgggcctcaatcagtgggtgccaggcatggccggcaagcgcggcctcgggctgattcacagtcggctgcagcaagctgccgaccgcatgctggcttcgcgcatgaggattggcgatgccctggtcattgcgacgaactcagctggccagcaggccgacgccaacagcctcaaggtggccagcgcaatgaggaacagccgccgcttggtcgtcattgccccgctggccggctactccgaggaacgcgagcagaccatggaccggtacatcaccatcaccggcttcaacggcattccgcgtctgttcactgacggcgatctttggcagagaaccgcccggagctacgaggctgcgttgcgcggttggcgtgaagggcggcgcgtcatcgctattgttcagaccgatcagcccacctcagccagcaaagcccaagcgctcaacgtcgccctgatggtcgtcagtgatgaatggatccccattgaatctggctacgagggtgtgatcgaggcgctgttgcgcgagcaagggcgccggttcatcaagcccatgcgtttcgatgctgggcaggagcaggtctttcccgatttctggctgatggacgtcggcgccggcagagaggtgccgatggaagtgtatggccgtcaggatccgaagtacctggcccgcaagcaggtcaagtgcgcctactacgcccagcactacgggccgaccgggtggtggtcttgggatgccagttcagacccgcgtggcctgaacattccagccttcccaccagctcggcatccgtag

SEQ ID NO: 363020 - DNA, 546 bp, Pseudomonas aeruginosa
atgtctgacgagcgctatgcacagctgcagcggacgctgatcgaatccgccaagcagcacctggtcgagctgaccggtgccttggcgctgcccaacggcgtggaccgcaatgagggtgtttcttcggcctggtggcaactgaccgccctcacccagctgaccaacttcgacagcggactggacgaggcgaccaagcatgaactgcgtgccatcgatcagttagccatccaggcgacaactcagccggtagacaaggcactggtggccagcgaggcagacagtgaaattgcagctgcgttggctgatcccaccagctcgcactggtttaggcacagcttgcagcaagcgttaccgcgtgatccggtggatgcggtcaatgatgccgagtggcttttcgagttgttgaacaagcgctgcgtggcccagctgcaggacgatcctgcaccgccaatgaacatggcgtttcgtacggctgatggtcgcaccacgcagatcgacattgcacaggctacgccagtcatcgagcttggcgacttcaaggcctga

SEQ ID NO: 363021 - DNA, 291 bp, Pseudomonas aeruginosa
atgccacagccaagcaacaggactttcgaagaacaggagctgcacgccaaggcccaatgcttcgactggaacagcgattacccacatggcgccttggtcagctacgaagaactgtatggccagggtgaaacgcaccgcgacgaaacgcgaggcaaagcgtgggtgatgtgtggccaagccgtgatttttgttgccggtttgtccggtgcggtatcgctcgaccactgcaccgtcgttgcggccctggaggccaagcaagaaccggcagctggggaagtcgatcatgtctga

SEQ ID NO: 363022 - DNA, 945 bp, Pseudomonas aeruginosa
atgacggagaagaaaaactcctttggtcgtgcagttgcggcgacggccaaaaagctttctgactttcaaaagcgcccggccaatgaaggtgcgctgattgaaaaggtcaaccctggcgaaatcgagtgtgtgaagcagatccgtagccaagacaacccaggattctctgacgaatcgctacgggaactggcggacgacattctggtaaacggccagatcgaaccctgcgtaatacgaccgcacccaaaccctgagtcaggcttcaagtacctgatggttgccggtgaacgccgttatagggcgtgcatcattgcgggtgtgctggtcgaagtgacggtgaaagaccttaccgatgctcaagcgaagcgcattcagcggtccgaaaacgttcacagcgaaaacctcactcagctggaactggcacttgccctgcaggaagacaaggacaggctcggcaccctggagaaggtcgctgctgaatggtccaaagggatcaactgggtggctgaacgcctttcctatctggtgaacgtcaccaaggaaggcgcaggccgcgaggcggtcgctcgtggcatcactgcggatatctcgacggtcaacgatatcagccgcctcgataaactggacccgcaagctgctgcggatctattggagcgcgcagagggcaatgaagacctgaatctccgccaggaggtccgcaccacattgcgcaacaccaaagccctccgcgtacataacggcggatccaagaaaggatccgaaaaaggcgcaccggggaactcgacccagcaaaccctgctcgatgaccagttgggcaaactgcgcgaggcaaacgctgtgctttcagcacaggtggaaacgctcacctcggaaaacacctacctcaaggccgagttggagaaagcccgtgcgcagctggccgagcgatggaaaggctctgaatga

SEQ ID NO: 363023 - DNA, 768 bp, Pseudomonas aeruginosa
atgaaacgcactgccgttgcgaaccaaaagggtggcgttggcaaaaccacccttgaagcccacctggcctgctatgcagcagaacaaggtaaacgtgtgcttgtactcgacctggacgaaagcgacctgtcgcagttcttcccccctatcgaggatggcgacgatacgccctacctcatggccagtcagcttttcactgacgagcacgccggcttcgtcccccgccaggttgcgcccaacatctggcttatcgaggccgacgtagcgctgctggatgtggatgatatggagctggacgttgtaaccaatctcgccaaggctctggaccgcttcaatgacgagttcgacctttgcttgatcgatactccgccgaacctgcagcgccgcatgattgccgccctagcggcttctgattcagttgtcactccgttcaacatcagcgcattcaccctggctcgcatgccgaagctgatggccacaattgaaactgtgcaggatcaatacaacccgggcctgcgtttcctaggtttcttgccgaacctcatcaatagccgctcaagcgaagaactggagatcttgccgagccttcgcgaggaacacggcgaggccatgttcaacgaacaaatcacccaccgcccctgcatcaacaaatctctggcagccggcaaccctgtgtggcgtaaagctcgcagcgggagtcagcgggatgcgggtaaagaaatgaaacgggcctgcgcagcggtgcttagcaaggtctttgcggagtga

SEQ ID NO: 363024 - DNA, 462 bp, Pseudomonas aeruginosa
atgcaactctctgctcgcaaaactcaacgcaacgtaggtatcaacgacaaacaaacctggcggacctggctcaaggacaaagccactgcaactctgaaacaagttctctcgcaaaagactccatcgcacaaggcattgatgcgcgatgactggatggccaaggccaccaagatcgcagtgttggggtcgctgttctccttcgcaatcctccctgaaatcgccaacgcggcaatggatttcagcggcctgaaaaacctggccaaggacgtagtgtccttcctcatctttgatatcggctactacctgggcatcgcagccattgcgttctgcggcttccaggccaagtcggggcgcatgtcgtggggccagttcggctgggctgttgccggcgtgttcctggtgttcttctcgccaaacctggtcgataccatcaaaaccggtgcgcaaaccgcactgaagtga

SEQ ID NO: 363025 - DNA, 609 bp, Pseudomonas aeruginosa
atgctggtgagcgcaatggtgccgtatgacgttcactacgatgacgaaaccgttatcaccagcgaggaagcgctggttcaagtcatcaaagtggacggcctcttgttcgactcgctttccgccgagcagatcaagcgcttcgagcagcagcgcaacactgtgttccgcaccatcgcaagcagtgacctgactgtctacgtcacgttcgtgcgccgcaaggtgaccgactttcctgatggcgtaggcggtacctggttctcccagcagttcaacaagcgtcttcgccagcgctacgagagccgtggtttctacatcaacgacatctacatttcgttggtaagaaggcgttttcgtgcgggtatgccaggtctgatggatcgggctatcgcgctgatgaccggtaccgaggccactaagaatgaagcggaatcgctggatgcgatggccgactcgctctacaaggcctccaacctggtgctgcgtagcctggctgactacggtactcgccggctacgggtgcagcgtcatcctgagccgcgtatgggccgtattgatcgtgaaactgcgttcaaggggtttggggagcaatggaaccaaaaaccaacgtaa

SEQ ID NO: 363026 - DNA, 297 bp, Pseudomonas aeruginosa; identical to SEQ ID NO: 362371

SEQ ID NO: 363027 - DNA, 630 bp, Pseudomonas aeruginosa
atgaagcgcctgctcgcagccaccctgctgggcgtcctgagcgcctgtcaaccggccttcgcggcggaccggattcccgtcgccgccgaacagtaccggcgcaccctggtgcgcagcgcccatgccgaatggggcctatcggcgccaatcgccacctttgccgcacaggttcaccaggaaagccgttggcgtgccgatgcgcgctccccggtcggcgcccagggcctggcgcagttcatgcccggcaccgcggagtggattgccggcctgtatccggctgccctcggcaccaaccagccattcaatcctggctgggcactgcgcgcgctggtcacctacgaccgctggctgtacgagcgaaaccaggccgccagcgagtgcgatcgctgggcattcgtactgtccgcttacaacggcggccaggggtgggtgaatcgtgaccgtaggctcgcttcggcatccggcgccgatccgctggcctggttcgatgccgtcgagcacttcaatgccgggcgctcggccgccaacttccgcgagaaccgcaactacccgcgcctcatcctgctgcgctacgagcggatctacctgcagtggggcgacggcgtgtgcggcgagaggtacaccctgtga

SEQ ID NO: 363028 - DNA, 684 bp, Pseudomonas aeruginosa
ttgtggaatgagctggtcggcccgttcggcgccttcgcgctcgacgaagaagtcgcgcaggcggcgcaggatgtcggtcaggccggtgaccgcgtagggcgcttccgcgaactcgatggccagggcgccatcgtcttcggcgaagttcagcggggcatcgggaatgcccttgatggccggcggcacggcaccgaggaaaccgatatggcgcaagtagtgcttgcccggaaccgggttgcccggcgagtccggcaggtacaccgacgcgctgcgcttcttgtacatcttgcggttcgccgcctcggcgaactccggcaccacctggtgcggctcggcatagagcatgccgtcgcgcacctccaggcccttggcccagccataggccggcgcattgagcttggggtggccgatgacgagcggggcctcgctgagtgccggatcgtaggtcgcggcgatctcctgcaggatggcctcggtgaactccatggaccggccgtcgttggcgacgtgccggccggagggaaggatgggcagagtggcggttggcgttttcataccgccagagtgaagcggcgcgcagagcgttgcttttcggcagaccgaaaatcgagtgcggggtgttcaggggcagaagaggtgttttctacgaaaccacgcggactccatccctggcaagcccggtga

SEQ ID NO: 363029 - DNA, 732 bp, Pseudomonas aeruginosa
atggacatcccgaaggctctggaggcttgcggcctggcgagcacggctggccgccacctcggcctctgccgaggcgacagcggcctttgcccgttgcagttcctgggcagcggctcgctgggccgccacggcggcgccctcgtcggccgtggctttctgagccgcggcaaccgctgcggcgcggctggcggcggcgttgctgagccaggtggtggtcaagcctgtaatggcggcaaccgccttgcctgccgctatcaccatgacggtgtcgagagcggtacccagcagttcggcattggcactcaaaccgtccaggacgctggccaccccggaaatcgctgccgccagggcctctcccgcgccttggccattggtaaactccccgaccaggcgcgtgaaggcattctccagctcctgcacggccatggagaccgtcttgatctgggtgccgaactgctcgtccacactggcggccgcattgcccagggcgtccaccagcacatccgccgtcagttgcccctcgttggccattttccgcagttcgccgatgttgacgctgagtccatcggcaatcgctttgaggagcgcgggcgcctgctcgctgacggagttgaattcctcgccgcgcagcacacccgaggccagcgcctggccgaactggaccagggccgcttcggcgctttgggcggagctgccggagattgcgatggacttggccaccgtctccgttag

SEQ ID NO: 363030 - DNA, 519 bp, Pseudomonas aeruginosa
gtggccgtgtacatcaccctgccggagcttgccgatcggcccggcgccgatgagttggccggcgtcgccacgcctcggcctcttccggcggtcgacacagagctgctcgatgcgctgctgcgcgatctgccagtggatcgctggaccccggaagagatcgaggtcgggcatgccacggtggacgtgatcaacagcgcggtgagcgatgcacaaggctacatcgacggcttcctccagcgccggggctaccgtctgccactggccaagcgttacggggttgtcaccgggtggaccagggccatcgctcgctacctgttgcaccaggaccgcctggggccaggcgcagagaaagatcccatcgtgcgggactatcgcgacgccctgaaattcctgcagctcatcgccgagggcaagttcagcctcgggccggatgacccgctgaccccgcccggcagcggggttccgcaggtctcggcgccgccccgcaccttcagccacgacaccctgaaggactactga

SEQ ID NO: 363031 - DNA, 930 bp, Pseudomonas aeruginosa
atgagcaacgcaccgtttcccgtcgatcccgaactgacggcgatcgccatcgcctaccgcaacggccggatgatcgctgacgaagttctgccgcgcgtgccggtcggcaagcaggagttcaagtactggaagtacgatctggcccagggctttaccgtgccggaaaccctggtcggccgtaagtccaagccgaacgaggtggagttcagcgctaccgacgaaaccagcagcaccgaggaccacggcctggatgcgccggtgccgcaggcggacatcgacaacgcaccgacgaactacaaccccctgggccacgccaccgagcagaccaccaacctgatcctgctcgatcgcgaagcccggacctccaagctggttttcaaccccaacagttatgccgcgggcaacaaaaggacattgtctggcaccgatcagtggagcaacccggacagcaacccgctgccggagatcaccgacgccctggacagcgtcattctgcgcccgaacatcggcgtcctgggccgccgcaccgccaccattctgcgccgtcacccgaagatcgtgaaggcatacaacggcacgctcggcgacgagggcatggtgccgatggccttcctgcaggagctgctggagctggaggcgatctatgttggcgaagcgcggctgaacatcgcccgaccgggacagaacccgagcctgattcgcgcctggggcccgcatgcgtccttcatctaccgcgatcgcctggccgacacccgcaacggcaccaccttcggcctgaccggccagtggggcgatcgcgtttctggctcgattcccgacccgaacatcggcctgcgcggtggtcagcgcgtccgtgtcggtgagtcagtcaaggaactggtcaccgcaccggacctcggtttcttcttcgagaacgccgtcgcggcttaa

SEQ ID NO: 363032 - DNA, 690 bp, Pseudomonas aeruginosa
atggaccaagaccgtatcctcgacaagatcaagaagtgcctggaaatggccaaggggcggggttccaacccgaacgaggccgagatcgcgctgcgtcatgcccacaaactgatggaagcctacaacctggagatgggcgacgtgctggccagcatggctggcgaggccagggttcccgccggctcggatggaaaaccgccggcctggcgggtgcgcctcgctcaagtgtgctgccatgccttcggcacgcacctgatcatctgcacctcctatttcgaaagcgcttcgttcctgttcgtcggctgcgcggcagcgccagagctgaccggctacgcctaccaggtgctggagcgacagctgcagaaggcgcgcaaggacttcctgagcacgcagaaacgctgcaagcgatccaccaaggtagcccgtggagatgccttcgcgcatggatggatcgaggccgtgtacgccaaggtcgaccagttcgcgggcgtcgacgacaacatcgccgacgcgatccaggcgtacatggcgaagcaccacgctgacgtcggcaagttcgagatgaagcgccgcaagctcaaggcacgtgacgaagtggccagtgaggcggggtacgccgcgggcaagcgcgcgcggctgcaccaagggatcgggcaccaggccgtagctcggcttactcagggggtgtga

SEQ ID NO: 363033 - DNA, 672 bp, Pseudomonas aeruginosa
gtgccgcaggcggatatcgacaacgcgccgacgaactacaaccccctgggccacgccaccgagcagaccaccaacctgatcctgctcgatcgcgaagctcggacttccaagctggttttcaaccccaacagctatgccgcgggcaacaaaaggacactgtctggcaccgatcaatggagcgacccggccagcaacccgctgccggagatcaccgacgccctggacagcgtcatcctgcgcccgaacatcggcgtcctgggccgccgcaccgccaccatcctgcgccgtcacccgaagatcgtgaaggcatacaacggcacgctcggcgacgagggcatggtgccgatggccttcctgcaggagctgcttgagctggaggcgatctacgtcggcgaagcacggctgaacatcgcccggccgggacagaacccgagcctgattcgggcctgggggccgcatgcgtccttcatctatcgcgaccgcctggccgatacccgcaacggcaccaccttcggcttgaccggccagtggggcgatcgcgtgtccggttcgatcgccgacccgaacatcggcctgcgcggtggtcagcgcgtccgtgttggtgaatcggtcaaggaactggtcaccgcaccggacctcggcttcttcttcgagaacgccgtcgcggcttaa

SEQ ID NO: 363034 - DNA, 138 bp, Pseudomonas aeruginosa
atggcgaacctgcagaagttcacgctgaaggactcttggaaggactgggtagtaaccctggaagcggacctggatatccggctcatcagcgcagaagtcgatgtagacctcgatcttgagttcgaggagggggtgtga

SEQ ID NO: 363035 - DNA, 300 bp, Pseudomonas aeruginosa
atgagcaccaaacgcacccacgacagcgtcagccgcgccctgcgagtactcaaggccctgcgcggccacaccctcaatgggctgagtaacgccgagctggccaaggcgctgggcgagagcccggcgaacatcacccgctacatggacagcctgatcgaggccggcttcgccactcgcctcgacagcggacgcttcgccccgagcatcggctttctgcaatacgcgatggccaccgccgaggagctgcagcgcggcgccgcacgcatcaacgagatacaggcgcgcatcagcgcccactaa

SEQ ID NO: 363036 - DNA, 195 bp, Pseudomonas aeruginosa
atgagcaccaaatccaccgacacctcgctcgccaagcgggaggtcgtcaccttgatcgcggaccacacccatgccggcgagccgaaaaccaaaggcagcaagatcgaggtcagcgcaacggaaaaagattttctgatccgccacggcaaggtggtggaacctgtcaacccgtcggccgcgaaggcccaggagtaa

SEQ ID NO: 363037 - DNA, 318 bp, Pseudomonas aeruginosa
gtgctactggcccaggagaccctttcgcccaagcccgccggccatgccggcggtgccgcccggcagatggcgaccgtgcatttcatcgtcaccctcgcggtacgcagctaccgcgacaacaggggcgtcagcgcggcggatgacctgcgtccggtgctcgatcaggttcggcaggccctgatcggctggaccccacccggcctgtccggcgcccgtgactgccaactggtccaggggcaggtcgtggactacgacgcctccatcttgatctggaccgacctctatcagacccaacacgccatcgggagaccttcatga

SEQ ID NO: 363038 - DNA, 294 bp, Pseudomonas aeruginosa
atgaagacgccggtatacaacggagccctggccgagaattcgtcgctcaaagcgaagcctgccgcgccgcgtacgcaatccaagaccgagccccaacgctcaccagcgcccgtgccggctttgcagccggctcctggcgtgaacccgaaggtctggttgagccggatgatcgccgcccaggcgctgctggccgcgcagacggccaggctcgctcgcgaactgggcgtcagcgatgctgagctgcgccggctgggtcgtcggcatggcatggaggtgttccatggcactcgctag

SEQ ID NO: 363039 - DNA, 297 bp, Pseudomonas aeruginosa
atggctgatttggatgttgaggttctgcaggcgcggcttgatggcctacaggagtcgtttctgatactgggcgctctgctgaatcaaagcggggttgtgagtggccaggtcttgcaagcgaatatccgctcgcggattgacgacctgcaggagcctcacccggttttgatggagcagatgcaccatctggcagatcagttgctgcggaattttttccacagcaaaggacttggccgagccgagattgatgagcgcctgcgtgaggtattggcagatcgaagccccactcccgattga

SEQ ID NO: 363040 - DNA, 897 bp, Pseudomonas aeruginosa
atgaatacccgcaatttttccctgccgcagttgcagaacctgcccatcgatgaagcacgcatcgttgccgatgcgctggccgtccacgctacttcccgccagatcgatagcgccgcgagcaagctggccgcgctggccgaggcagggctcaagggtgaccgccaggcctatgccgcgtaccagcagttgctctacgtcctttcgttgagcgacgacgtggcgaccgcccagacccggcgttggctggcccgggcgatctatcgcgtcgaagagcgtttcatgcccgccgccgatctttccagggcgctgtccgaggaggatttccagaagcgtctcgaacaggaaatcgccgcgcagtcccgcgagcggcacccgatgtcgcagtacgtgttctccggctcggcctcccgcgcgcagctccaggtgttcctccgtcaccagtggttccgcaccttccgcctgtaccgcgatgcggccgacctgttggtcaacctgaccgatgtggacgaggccgcggcgcttgcgcgctacctctatggcgagttgggcgaggaagacgaaaagggttcgcatccgcgcctgctggccaagctgctcgaggccatcggcctggaggctgacttccaggccgtctcgacgatgcccgaggaaatcgcctacctgaacaatcgcgcccgtgccttccggcatgccgaggtcggttgggggctggcggtgttctacatcaccgaactggtcgtgccggggaaccacgaaaagctctatcgggccctgctccaggccggcctgagcgaggaccaggcggagtactacaaggtccacatcagcctcgtaccgccgcgggccaagcgcgaatggcaactcatcgcgcggcggattccggaccagaccgtgtaa

SEQ ID NO: 363041 - DNA, 1146 bp, Pseudomonas aeruginosa
atgcttttgcgtatccaaagcgatgagtctctgcgctcatttatcgcgcgaaacatatttctgaattggcatgatcccgagataaaggctcttgatcgcctaacaaaatttgctgtctgttctaatgatgtaaaagtaatagctgcggctatggggtggtttggttgttatggcttcaaccgtcttcttcaccaccacaccttctacccgaggtattcaatttttaaaagcagccaagatatttcttattcacacacagaatatcgcttccaataccatcatttcgagtcggatcgtgtttccgcagccttttgcccggagtgtgtgaaagaggatttgaacgtcctcggtttttcatattggcgaagagcaccccgcccagacatcaaggtttgcgccaaacataatgttcatctagtgagcaactgcccattctgcggcaggacctttgcctataagggccatggtttggaggtaatgtggaagggctgcgctggccgtcatcttagtgagatactatctgtcaagaatgaagactccttagagctaaaaaaggcaaaattttttaaggacgtttttgatttcggttttgttattcctatcgagtccgccttattagcagtgaatgataaattcttgtgtttaatttcttcttacggcgaggttggtaaaggagtagcagaggagttaagatctaaggtaaggcacgtacttaaggttatagaggcacatgccgctgagaacaatgcaatgtttcttagtgaatattcaggcttggctttggactcagttttatttctttacgagagttttaatcattttctggaggatgtgaagcgttataggtatgagcctcgcccggtatcctccctttggtctacttatcgggcttggggtagcgagtccgctcaatatgttgaagaggattatgttcatggcgtaggtcactggttgtgcccgtacccatctcctctctctcaacttagccatagtaacgacagatatgatcgcccgacgctgtacccgtgttgcaattttccatcgcctcgccggaaggggcatcagctgagtccaaggagagttggccctcctttaccagcggttccggtgctggccaatcacaaagatagcagctcaggaacttaa

SEQ ID NO: 363042 - DNA, 609 bp, Pseudomonas aeruginosa
atggattctaaacttccggtctcatatcgcgtggcacagcaggtccggcgcatgcccaaagggcgggtcttcagcaccaggcgctttgcagccttgggaacgaaaaacgctatttcaaaggcttgcgcccggctcgtaagcgtaggcgagctcgagcgcgtttatcccggcatctacatgcggccaaagcgaagcccgtacaccggctgggttcgtccctcggttttggacttggtaaaactgcttgccaagcagaacagttggacgctgcagatccatggcgctaatgccatcagaggattcggactcagcactcaaatgccactcatcccaatttattacactagcggccccagcagatctctgtttgtcgggaatgccgaagtcagactcgtgcatgccgcaccaatgactttgcagcaccctggaactcgtgttggcatggctatcagcgctttgctgtatttaggaaaaggagggtctaagccggatcacgtcgaaaaaataaaaagagcgcttagtgctgacgaactggttacattaatgaactgcagattgccgatatggatgcacgaagcattagggactgccttgaacacacacaaatag

SEQ ID NO: 363043 - DNA, 1680 bp, Pseudomonas aeruginosa
atgcgaatctatgatcaaggctctgtacattggcagccaactgtcgccttaaattggctggaggatgagacattttttagcgtttgtagtcgtcatcatgtgatttggggcagccctgacgcgatgactacgtttcgtggattattccagtcagagggtaattcactacctcatgattttccgcacagtttggacgcgctccgacacccgatgcgggcggtgctaggtgatccagacgtgattatctctcgaagaaccatcttccccttttttcgtccgttccagtcacaggaacacatccaggcagccctaaatataatgaagggattgcagcttggatcaattaaatacaagcttggcctggtaacagggcgctttggcgcagaacatcctttaaaagcatgtcacgcctgtattgatgctgacattaataaccacggaacttcttactggcatctttgccatcaatatccaggcgtaagcatctgccctatacataagcagatgcttcaggaaagcatccataataggcaatggtctgggcgctttcgttggactttgccagacaaaggcgatctgacatcatgggactttgcaggtttcaattccattacccaacatgctcttctacagttatcaaattccgttcttgatttggctgctcttggaaatgtcagatcctttgacccatttattgtaagctcggtctatcgcaacactcttcaagaaatggactttctaaattcaatttcacagaaggcagcgccatcactggccaaatatgctgcattgcttcagccttaccactctcttacgtcgctacctcatactgcgcaaaaggctcgtacctacatagagcatcttgtcaggaatcctcgcggccacagtcatccgctcaagcacctcgtgatgatcaattggctgttcggacaagtccgcgatttcattgatgcctacgaccgtgcgaaagcagaaaaagcagaaaaagcagaaaaagcagaaaaagcagaaaaagcagaaaaacaatctgttcaattcgggagggtaggtcaatacttacaatttgaaggatctgcggagtctacggagacattaccgcaaaaacttaaaccgaaagtcctcaaacctcatacccgatctgaaatattgagacggcttcgcaaaggtactccaaaaaaacttatttgctcagaattcaaactgaccatatcaacagttaataaacttctcagatctgaggcgttagttaaaaaagcttggacagaatccacacacaacaaaaccctattaaaaaataggtcagaatggaaatccttgatcaaaaaacaccctaactctagcgctaaactcgtacgctccgaaaaccccaagctctacgcatggctttatcgcaatgataagtcttggttactaaaagaaacagagagacttccaaccgggagaactggaaacaactcaaaagttgactgggccttaagggacgaggcactagaagctcttcttataacgaaacttaatgaagacccttgctctattagaagtagtaaagttagcaacaaggatatttatacgctagcacccgagctatctatctgtctaaaatctcgcaatcaatacccgcgcacacgtgcgctattacaaaaagtaaagaactgccaccagccttccaagctgcattaa

SEQ ID NO: 363044 - DNA, 963 bp, Pseudomonas aeruginosa
atgacccctcagcagagatttgagctgatagtaagccggcaaggccgctttaggtggggggaaatctatacgccttccacactggctgttactcgtgaagcgccaaagggttctcgtataagtcggctgaacagccggaaacttgggagaacgctacatgttttgtccacccctgagcgagtgttcgctcagctcgcgctttatcatcctgaacttattgatattcacgaacaaaaaatgttgtcgcccgtaacgacgattcatcctttacatggtcaccctttgacagttggtacatttccaccgccattgcgtggaacgctagaaattgcaacgcagattggattcaagcatcacgagattgtagttactaactccagtggcgagcgtaagaaagtaccatttccctatcaaggggatcttctgctctttatggctagccacacggggatgccttatgccgtgaattggtctgtgaaggatgtaagaaatgctttttcggaaagacggctctcaagcgccaagagcccaattcagcagaagaaagatagagatcatgctcaactcagagccaagcttgagttggagtattacgctagcgcaggaataaggacggttcaagtctccttagatatgattgatccggtagtcatagctaatctggatctactctttagtatgcacgaactctcagtaacgcacgattctaccgtaatgtcggattttagttgctcgctacaggaagcttttgcgaatgggataccgctggcacatgtggctcttcagtacggtgctcgttgggggtgtcgtgatcagtttattgcagcgatctatcaggatatttggagtcggaaattatcgataaatttcttcgagccaatactaatagatcatccgctcaaaccatcagaacaagacctactgtcagtatatggcagcctgttcgtggagtttgaagcatga

SEQ ID NO: 363045 - DNA, 2007 bp, Pseudomonas aeruginosa
atgatgctaggagcgcgaattgtcgcgcctcagggtttcaagtgttttgatcaaggacaagcttatcattttcttaatagcgactctgatcgaaaccgagtcaggcttgtcttgtttgccaatgaaaacgaagatgtgagtgtagagcttattacagtttctaggattgattttgaggaaggtcttgaacagggttttttggttgaagacgcgcgagatgactacccgccgtggttaggacctattcaaggttattctgtctctcacttggagcgccgtagaatctccacgaaggaaagttatagccagaaggtagatcgtagatatatggctatttcggagttgatagctaattatctgattgtaattagtagcgataatcccaatgctattatcaatgctcacgccaagaaatctattccacagcagaatgcgaggaggcttaggctgtggttctatagttatatagtttttggttttaataaatgggcgttaatgcctccgcttcaccgtattggcggctggaaccgcgaggcccatacgaattcaaggaaattaggcaggccttctccgaaaggacgaagttctgggtatccatgcactgctgaaatgaaagagaagattctttcagggttcttgaggtttagatcggcgtatggcagccaagaaaggctttatagtgatgtattaaccaaagagtttggctgcaccgtcgtaacaaggggggattcaaagtctttcattcatcctgatggaaaaccttttccttcgattacgcagttcaaatattgggtacgcaaacttatcaatccgaaagcgctcgcctatgagttaaaagggccccatatagcgagagctcaagccggatcagagggtagctttgctgagagcctgactaacttgaatcagcgtgtagagttcgatggctataatctctctgaaaagctttcaggtatcactgaaggcagtgcagtggatggattctgcgtagtgcgtgcggtttgtggcctatcgggagccatactgggcatcggcttttcagagggtcgagaaaacatggaagcctataggatggccctgttttcaatggctattgataaggtgaagtttggcgaattatttgggttggtgataaagcctggtgagtggccgagtataggactctccggtagtatcgttttcgatagagggcctggagctggctacgactgcacgtcggaaatacgctggcttggaagtcttgagttaactccttccttttcaggacagtccaaggcaactgtggagtcgtctcatccacgggataagaagacgctagatcagccaagctatgttcacagtaagttgaacttcgtacagatggctcgacgtgagatcatgcgtgtactatctgataatcatagctctgatgcggctatgcggatgacggaggaaatgttactgacaggtttcaaacctacacctcacaatatttggtgctatctcgatagtcgcggtcgaaatagtgctattggtatgccatatgatagagctgttaggttatttctaaccgagcatcctgctacaattaaaaaagatgccgtatatttttatggtcgtaaatatagatctcaggcgctagtaaacacccgagtgttcgatcgtattgccagaaatggtacagtttctgtttctgcattcgcactaacgatgtgcgtgcgacatatttgggtcgaggtagaaggtttgctatacgaattggactttattcgtcctgcaagtacaccggaaagtagtgtcgatatttcactgcatgatctgaaagaaatcgacaagatgcgtcgtgcagttgcggcagatcttcgacatgaaaggccggcgattcaacaggaatttagggatcgattcgagagagaaaccggagaggaatgggacagcggtcagcgaaagctaggccgaccctctaaaggtggtgcggcgctgcgggatacggctgatttcaaccgcctcagaggaaaggcaaagtga

SEQ ID NO: 363046 - DNA, 1350 bp, Pseudomonas aeruginosa
gtgaacgaggtcatcaatacccgttttgacggctgcttggatgtcgagcgtattcgcgagcgagtaactgtaaagcccggtgctgttagagatttaggtggcaaggacgttttggtcgctgccgaagcactcgaaggtgctcttaaggaaatttatctacccaatgatttttccctagcgttcatcaaggaaatggcaacgaaggcgtcgctgcacagccagagactattttcgagtgaagtggaatacatttctcgaatttataacccccctgacgtggaagtcgctcctatctgcctgacgggcctagccggaataggtaagacccagaccatagcagctctgcggaaggttttgcctccacctgtagacctcgcctgcaaccattttgagggaagcttgaagttgacctctcactggtatgcgagcgccaggggcaaagctggcggtaggcagatgttggcggactttgttttgggtgatcaaaggtcaactagccataacgttgctaaattactcgtcgagtgccgccgtcgggcaaatagagatggtgtatcgctactccttctagaagaaactcagcacatcaacgctgggcagggtgtttcacgagtcacagacatcttgttaacgttggccgcgattggccctccgatggtgtttgtctccaactacagtcttttgcacaagcttttgggtcgcaacagcgaagacaagcagcgcctgctttcggagccgaggatcatgctacccgatgatccagagagctctgggtggaggaattacattgttgaatgcgttagggtgtcgggcggccacatatctggatcaattgatgacctcgctcacgaaatttataagtctacgtttggaatcaagcggctcgttgttcaacttataaagcacgcctacatcgaagcgcgtagctccggacgtgagtccctgactctgtcagacattagccaggcatatcgctccgtcgcatatgcggcgaatcgggaggatgtggaggaactgcagctacaagcgctgcagaatcgtaggacaggtggccggttagatcttcgttgtccgtttgagcttcccgtaaccgtccgatccaacattgtggcatttgcccgcgcagatcgagataaccgtgtcgtagccaaagtctttgattcagcccttaatgaaagcgagcgggcagctatggatcacattgagaaggccacttcgaaaactactctgtcgaccaaggctcctcgtgctcctcgcttgccaaaggcgtcagtcgaggatttgaccagcgcctttcaccaatttgtcgagtctacaagctctccgcctaaaccgaagaagccaaaataa

SEQ ID NO: 363047 - DNA, 1452 bp, Pseudomonas aeruginosa
atggatgctgaatcgctggaaatgcttgcccgttcctcgtgcaccgcgcatccgcagagcttcggcggcgcaccggccgagtcgtcctgcaagcacgaacacagtcacatcgttgactctaaaacccatggcggaggctacgccggtccggtgagccgacggatcttctgtagccactgccgcctgcaacgctggctcgacgtggaggcggcgctggcgctggcgcaggccgatgtcggcgtcattccgcccgaggccgcgctggagatcgcgaaggccgccaggctttcggccgtcgacctgcagcagatcgccgacggcgtggccagcaccgggcactcgctgatgcccctgctgggtgcgctgcaacggaactgcagccccagcgcgcgcgagtacgtgcatttcggcgcgaccacgcaggatatccaggacaccgcgcagtccctggaaatgcgcgatgtgctggatgaaacggagcgggcgctggacatcctcctggaccggctctcggtgctggcgagcgggacccgcaatgcgctgatggtcgccaggacccactcgatcccggcgttgccaaccaccttcgggctgaaggtggccggctggatcgacgagttgctgcgtcaccgcgaacgcctgggcgaggcgcgcaagcggatcctggtggtgcaactgttcggcggcgtgggcacgatggccgccttcggcgacgaggccatgctcctgctcgaaagcttcgcgcggcggctgtcgctggacgtgccgctggcgggttggcacgtgtcccgcgaccgggttaccgagttcgtcagcaccctggccatggtcaccgcgtccctggcgcggatcgccgacgagatccgcaccctgaaccgctgggagatcggcgagctggaggtgggctggacgcagcagcagatcggtagcagcaccatgccccacaagcgcaatccggaaggctgcgagcaggtcgtggtgctggcccggctggccaaggcccaggtcctgctcgcgctggacgccatgatcctcgagcacgagcgggactaccgcggcacgcgcctggagtggtgtgcggtggcggacgtttcccactatgcgctgatggcgctgtcgctgctgaccgacaccatcgacgggctcacggtccacgacgagaccatggcgcggacggcgaatgcatacagcgatgcgatctgtaccgaggcgttcgtcttcgagatggccaagcaactgggcaagagcagcgcttacgaaatcatcttcgagatcacccaggcctgccagcgcaagcggattccgatgcgccaggcgctcgagtcggatccgcgggtgggcgccgtcatgccgaaggaaaccctggccaggctgttcgagccgcggacccatctcggcatggccgggaccatcgtcgacaaggtgttggacaaggtcgccagccaccactga

SEQ ID NO: 363048 - DNA, 591 bp, Pseudomonas aeruginosa
atgagcgccaactcgctgcttggcagcctgcgcgagttgcaggtgctggtactcaacccgccgggagaggtcagcgacgccctggtcttgcagctgatccgcatcggttgttcggtgcgccagtgctggccgccgccggaagctttcgacgtgccggtggacgtggtcttcaccagcattttccagaatcgccaccacgacgagattgctgcactgctcgccgccgggactccgcgcactaccctggtggcgctggtggagtacgaaagccccgcggtgctctcgcagatcatcgaactggagtgccacggcgtgatcacccagccgctcgacgcccaccgggtgctgcctgtgctggtatcggcgcggcgcatcagcgaggaaatggcgaagctgaagcagaagaccgagcagctccaggaacgcattgccggccaggcccggatcaaccaggccaaggcgttgctgatgcagcgccatggctgggacgagcgcgaggcgcaccagtacctgtcacgggaagcgatgaagcgacgcgagccgatcctgaagatcgcccgggagttgctgggagacgagccgtccgcctga

SEQ ID NO: 363049 - DNA, 834 bp, Pseudomonas aeruginosa
atgagcacgggattcggcgcgcgtcctgacggcggtgccttccactaccgccaggagcaggacatccaggcgctgaagctgcgcctgcaccgctacatcatcgacgagatcgacgaagacggcatgaacctgctggagggcgcgcgctccgccgtggtccagtacgtctcggaaaaggtctgcgaatacggctcgcgccatcaactggcgatctcccgctacgaactggaccgcctggccgaagaggtggtcgacgaactcaccggcttcggcccgctggagatcctcctgcgcgatcccggcgtctcggaaatcctcgtcaacggaccgggccgggtgttcgtcgagcgggaagggcggctctaccagagcgacctgcgcttcatcgacgaccaccatgtactgcgggtgatccagcgtatcctcgcgcccctcggccgacgcctggacgagtccagcccgatggtcgacgcgcgcctgccggacggcagccgggtcaacgcgatcattcccccggtggcgctggacgggccgtgcatctcgatccgcaagttcagccaggagctgctgcgcagtgccgacctgctggcctaccagagcgtcgacgaagccttgctcgagttcctccgccaggcggtctcgcgccgctgcaacatcctcatcagcggcggcaccgcaccggcaagaccaccttgctcaacgtcatcagcggcttcatcgacgaacgcgagcggatcgtcaccatcgaggacaccgccgagctgcaactcggccacgaccacgtggtgcgcctggagacccgtccgccgaacgccgagggctacggcgaggtga

SEQ ID NO: 363050 - DNA, 357 bp, Pseudomonas aeruginosa
atgagccagcgggaatgcgccgggttcaactggccgccacttgccatcccggcagaggagccagtcagcatctgcccacaggccgttaaccgggccggggctgcaatcgctgcgaagtcctgcagacgttgctgcaccttcgagccgtccttgcgggtcatcgacaaagccgattccggattgcccgtccgatcgttctggcatgatggtgttggccatccgctcagcaccgccgcatggttcagcgtgatgttcggtgttgtgaatccctgcgagggcctcctgttcgagtcgcaggctgttggacttggccatcccgccaattgcgccaggtcgttcaggttcgccatcccgtga

SEQ ID NO: 363051 - DNA, 990 bp, Pseudomonas aeruginosa
atgtttgcaaaccttaaggccgtggccgtagccgcggcgttctttttgactgccgtaacaacagtctcggcggactcttggaagcccatccgtagcgggtccagctctagtgggtggcaaaaggtcgtttgtgatcgatcggggaatggatggcggtcctgcaacatgggattgacgattgtcatccaggcaaccccgggctccctcgctgccctcggggaacaggcgacgttggtggcaacagtccaggactacgatgggaacaacgccggtagtggcgtagtgatcaactggaccaccagcgacggcgggctcagtgctgccgccacgacaacagatgcgaacggccaaacaacggtcatcctgacttcatcgcataccctcgggggagccacggttactgcaacgtcgccggcggaaggcggtagcggacaaatcaccgtcccgttcaccgataaatgggttgctaccagcgcgacctactcggcctggcagaactctggggcgccctatagctgtactgcctggagtcctgatgccagcacgattgcaagcgggacggcattcacgcagtcagccatctgctatcaaaaccaagtcgcctatcagcaaaatcgcgaggtcagtctgatcacagggcaggttcgcaatgttggctcgctgattccgctgtaccagactcttcaggtaactgtcactcaagccgccaccggtaccaagcagagcgcaccatcgtgcttctgggattcgttcacgaaacatggcgtcaattccgacggcgtttggacgcgcaccacctcaaatacaggcgggcctggcactaatttcctgttgtaccttggcaaatacgttggagaggtcacctacataggggatacgtttatctataacggcgccgaatactcgatcggtaaattcaggcagagcacatgccttggtaagaactgcacgagcagccgcgctgagtacgaggtttgtagcgtgccctag

SEQ ID NO: 363052 - DNA, 342 bp, Pseudomonas aeruginosa
atgacggaggatgacttcttccgcatgctgttcacccggggtattcctcgcgccaagcagggcctccccaaaatgattgacccggagacgcagttctatgacgtcactggaagcggtagagaatggggatactggtacagattccagagttactcctcgaaagacctggacccggcccaggtcaaaaaggtgcttgcacctgggatcatctcgaaagtgtgctcgacaccgagcatggtgagcccatttatggatatggggggaacctatcgatacaactacgtgggaagggatggccggctgatcacatccgttcaagtccaccggcaggactgtcaatga

SEQ ID NO: 363053 - DNA, 297 bp, Pseudomonas aeruginosa
atgaaaaccaaaaaatccaagttcgtttctaacctaaagctatcagtcgggttcgccctgtatgttggctgcgggggagatataccagcaccaaaagcaattgttccgatgatgtattggtcggtgatcattgccgattacgtgctgcggacaacgaacataattcgaaaattgctcaaaccgattcttctccacaccccactggggatggctttcctcgctacgaggtttgccctggatctggccctcgcggcctgtcatgcggaaatgaagcacatcggaaaaccggcccggtga

SEQ ID NO: 363054 - DNA, 210 bp, Pseudomonas aeruginosa
atgagtgaggtcaccaccgagcaccttgccggtgcttcagccctggatggcgaggaactgaccctcgcccttctgcgagagaacgaagacctgatcaagcagaacaggcgcctcggcaagaggaagccgcacccatggctgatgttcttctttggggcgacctatggggcaattatcgcctcgatcacagtctactggagcctgtcatga

SEQ ID NO: 363055 - DNA, 306 bp, Pseudomonas aeruginosa
atggagaagtcttcttccgtgagcagctcagtcgtggactccaactcaggttggatcaaggcctttgtagtatttctgatcattgggtcagcgccacagcagctcgtgctgatcagaccggaattcgccgtgcacgcgaactacccgctcttttctgtcgcaacggttattgcactccttggttgttgtttgtctcttgcctatggcgtcaagaaagtaaaggctttcaaggttcgtgttgtgctcgcgagtatgtctgttctcgcgctgtgtgcagctgtagttaccttgaacaagctgctttag

SEQ ID NO: 363056 - DNA, 135 bp, Pseudomonas aeruginosa
atgaaaactatcattgtccttatcgctattgttgttggtggcattcaacttggcttcaaggtattcgatgccggtgttgaaaccgctcagcagtctcacaccgcagaaatgatcaaggcgcgtcatgcgctttga

SEQ ID NO: 363057 - DNA, 210 bp, Pseudomonas aeruginosa
atgtcgcttcagattgggcagtcagtccgacttgtaccgacccaaggtgcccatcagagggagaagccgggaactgttacgagcatcaccagaacgcaagtgggtgtgactgctgatggtgagcagtatgaggttcgttaccggatcgcggatggattcccggtgcgtaaatttgaccaggggttcccctgctacaaggtagtggcgtag

SEQ ID NO: 363058 - DNA, 246 bp, Pseudomonas aeruginosa
atgaacccacggttgaagccgtcgctggctccgatcgacaccgtgttcatggttctgttcacacctgcagccaagctccccttgccagtcaaggcatggctgcagcctgaggctgtgtactcgattctgaaacctgcctcgtgcggggtgatcacttcagtacaggtcacgaagacctttgcgacctcacactccggcgcatctctgctgccgataaccaagacagtggaactgacacgcgggtga

SEQ ID NO: 363059 - DNA, 645 bp, Pseudomonas aeruginosa
atgaaccccgcattcgcacaagccctagccgcccgctcactgtggatcaacgtagctgtcttctccagcatcgaagggtgtgattcccaggccgaggaggccttgcaggaggcatatgacgccgtccaccagctggcgagcgatgatgtactgattcaccgccactacggaccccgggccccgctgatccttctggacgtgcctgagttggctgagcagtacaacctggcacacgagttgtacacggagctgtactacgagaactaccgcaacggctcgattggtcacctctcggcaagctggctcaaacctgaagcgcccctgggtatgccttacacgagatggctggcggcgattgacacccgagtagcggccctcctggatgttccctttcaacaggctgcagaggccacaaagggccatgccaagacactattgctcgcctggagccagggcataagccccagtgaggctgcggaggtcgtggtggatgcgtacctcgaccgggaatgcctcagggagttcgaggaagagcaagagcgtcaggcgcacttggaggacctgcaagatacctacgactccatcgagagtgacctgtggactggctggcgcgaagagtgtgcggacttgggcttggttgactag

SEQ ID NO: 363060 - DNA, 1257 bp, Pseudomonas aeruginosa
atggagcgggtgcttgcaccggccaacctcaggcgtgcgtatcaacgcgtggttagcaacaagggggctccgggtgccgatggcatgacggtcgctgacttggcgggctacgtgaaacagtattggccaaccctcaaggccaggttgctggccggtgaataccatccccaagcagtgcgagcggttgaaattcccaagccgcagggcggcacacggcaactgggaatccccaccgtcgtggatcgcctgatccagcaagcattacagcaacaactcacgctactcttcgatccgctgttttcggactacagctacggttttcgtccgggcaaaagcgctcaccaagccgttgaaatggcccgctcccatgtggcggcggggcatcgctggtgcgtggagcttgatctggaaaagttctttgatcgggtcaaccacgacatcctgatggcctgcttgcagcgtcgcgtcgaagacaagcgagtgcttaggctcatccgccgctaccttgaagctggggccatgtcgggcggtatcgtcagccaacggcaagaggggacaccgcaaggcggcccgctctcgccgttgctgtcgaatatccttctggatgagctcgaccgcgaattggaacggcggggtcatcgcttcgtgcgctacgccgatgatgcgaacatttatgtgcgcagtcctcgggcgggcgagcgggtgttggccagtatcgagcgcttcctgtgccatcgtttgaaactgacggtgaaccggaagaagagccaagtagcaggggcttggaagtgtgactacttgggttacgggatgagcaggcaccagcaaccaaggctgcgtgtggcaacgatgagcttggggcgtttacgcgaccggctcagaatattgctgcggagtgtaagggcccgcaaagtggcgactgtcattgagcgaatcaaccctgtcctgcgaggttgggctggctacttcaagctcagccagagcaaacgcccacttgagaaattggatggttgggtcaggcataaacttcgctgcgtcatctggcgtcaatggaaacggccctcaacgagggcgcgcaacctgatgcgcctgggcctgagcgaagaacgtgcctgtaaatcggcctttaatggccgaggcccgtggtggaactcgggagcatctcatgtgaatcaggcgctaccgaagaggctatgggataggttcggactggtctcgatactggatacgataaaccggcttagccgtataacctga

SEQ ID NO: 363061 - DNA, 222 bp, Pseudomonas aeruginosa
gtgagcaaggccgttcaagggtggtaccgaagccggccaggcatctatcagcacgagacaggagcgcggatctggagccataccgcgccctccaaagccggcaatcaggccctgcagtgggaagtacgtctttccgatggctcgcggcaatcgggcttcaaatcgatgagtgacgccatgcgtcttgctcaggaattcgacccggaaatgcggcgtttctga

SEQ ID NO: 363062 - DNA, 324 bp, Pseudomonas aeruginosa
atggccgatgaaaagcagttgatcgtgatcgcaacagaagctgtgaacgttttttccaagctatttgatggggctgtcgtatcgtgcggtagtaataccgcttctgtgagagcaagcgggactgccgcagattcagtcgttatagactgccatcagacaaacaaacgtatagcgctgctcaccatggatcagtatcccgatgagtttgctatcgccgtttgtgacaagaataatcctgatgacgtgaaatctacccgcttgccaatatccgaattgcttaccaaaacagtgattgaacacatggaagccaattttgccaaatag

SEQ ID NO: 363063 - DNA, 258 bp, Pseudomonas aeruginosa
atgaagatcaaagaacttcagcagacgttggagtgctggacattccggcccacctggtacacgtcgcacgcgatagacacagaggccatggatgaagccatatcaaatatccaggcactggatttcaccccaagccgggatgaactggccgaagccatatacgaaaacgtaaaaaacattccggccattctggatacgcccaccgatctccggaaagctgctcgggacttcgctgcaaaaatttacttacagttatag

SEQ ID NO: 363064 - DNA, 183 bp, Pseudomonas aeruginosa
atggcgttcgctcagcggatcatggctactgcggcagcggaaccctaccaggtcgtgcctcaggggcgcggtttcttccacatcgtcgaaactgccaccggcaaggtgcgcgggttccgccggaaccacaacgaagcatgcgcctatgcagagcaattgaagcgccagcaggccgccaagtga

SEQ ID NO: 363065 - DNA, 765 bp, Pseudomonas aeruginosa
atgcctgtcaacaggaatctaagaaaaaaatggatcgatgccagatacaaatctgacatggggagtgcaatcgccagtcttccaccaaccaatcatggaatgattagattatataatcttagcaaagccgagcacgcattaagcaacctagagaactcaagaataaaaatatcaacattcaacgacctaaacgacccattcgaactattagcagcgaatttcaaagaatcaagatcccgaaagatctttagagattggaagtcaaccaccaatgaaaaaacgggaatcatctgcttctctggagactggtccgaacccgtaatgtggagtcattatgcagaaaaacacaaggggatatgcctcggattcaacgttaatagagatatagtccagaaaatagattatcagtcagagcgtttattgatcgagctagatagcgacacaaatccggagcatctacctaatgaattgaaagatagcctgctatgcacgaaatcatcaggatggagttatgaagaagagcatcgaatctttctagagctaaattcagacctcaaaataggagacctttactttcgagagttcgatgacgatatagagctagccgaggtcattttaggacctctttgcgagaaaccaatcagcaagattaggtcattggtagcctctaaatatcctaaggctgttgtattccaagcaaggttagcttttcaatcattcaaggtcgttccagacgaaaggactgtcagatggataccagactaa

SEQ ID NO: 363066 - DNA, 294 bp, Pseudomonas aeruginosa
atgagcgccatgaacgaacagaaccctatccagcatctgactgatgagctggagcatgacttgacggctcgctatggggtgatgctgggcagcaatgccctgtggcgggagttggggtttcgctcgccggcggcttttcgcgtggcgctgtcgagaggaatgatcgacgtgccgttttttacactgcccaatcggcgcggcaggttcgcgctggcgaaagacattgccgcctggattgccagacaacgtcatgctgcgcaaataaacgaagcggatggcgtggtcgatcgctga

SEQ ID NO: 363067 - DNA, 1038 bp, Pseudomonas aeruginosa
atgagttttcgcgcgagcatgcgaaacaagcgacgccaagcagcgcctttcgccaaacgggatcaggcggacgttttgcgcgtgcgatattggtatgaaggcctgcggttgcgcagtggattggccacggcctataaactcgaacagcacttcgagccggagtcatttcgcaagcaggatgggattaccagtagccgctgcaaatggcagcgctatgcggctggccgacacaccccgcaggctaagtgggcggcctgcgtcgatgcccgggtgccaggctcactgcaggagctgcagcatcccctctgggccatcctgaaacagcagccatcccgtgccacgatgagcgaggcatttctgcagcggttgaagccggatgtacaggcagtgctgttcgagcccgtgggcggtgtcgaggtttactggcagcgggccagagtcaccgtcgtgctgataagaaagctggagcgtatcgccagcatggatgccctggcggcgctgacctggttgctgcgggaagctatcgcacagggcaatcataaagctgcacagaacctggcgcgcagcctttataccgtactgctaatgatgggcatcgagtggcaaaaccgggagatggcggagccgctgctcaagctgtttgcgcaacgcattttgccgctgggttctccaccccatcggcggttctgtatgagcgggaaggacatgcttgagtgctcggccgcactaaatctggttgtgttccaaactaccgacggcaggcgtcgcagcctgacctggctgcagcgggtgcacatcatgcgccggttactggctggcatgacgggcttcgatgtggtgcatgccttggcaccccagtacatacctgcgggcaccgatgtgccggagaccgtcatgcaccggcttgaacaagatgagcgctggcggcaatgggggtggagcagcatcaactctctccagcctgagccatttccgccgcctgagctcttgctttcgcggcgggaggcaattgaggccacatcaatctcacctgagtaa

SEQ ID NO: 363068 - DNA, 912 bp, Pseudomonas aeruginosa
atggcaatttggtttgaagaaagcttatatgaccacatcaagcttcgtatcgaggttgaaagggtagttgctgatagtgtgaccaccttcgggcagcgtgcatttatcttcgacaccgtaaagcatggcagggttttttgcctcgataatgtcattcagtgtgccgaatcggacgaattctattatcacgagatcatggctcatgtgccgctgacctccatgggcaacgcgcagagcgttgcgatcattggtggtgcatccggagcaatggcgcgtgaagttcttaagcacaagaactgcctccatatcgatatgatcgatatcgatggagagaacatagagctttgtaaagaattcatgccgaaagtccatcaaggttgctttgaagatccgcgactgcgcgtccatgtcgccgatgcataccactggatggcgaggcaggctggctcttatgacctgattatcgtcgactcccccgacccaatcggcccggcagaaaaattgttttctagtgatttctatgcttattgccgaagcgcgctgaagaaggacggtgtgttagtgtgccaagctggcgtgcccttcttccagtacagcacttatcgcaaggtcgtcgacgagctttcctctatgtttcattatacgggaagcttcaacagcccggttcccctgttcatcggcggcaagatgaacttcgtgtgggccagcaatcattacgacctaaactcctgtctagacactcaatgggagcgacgagccacagagatatccaccaaaacaaagcactacgatctgcatgtgcatcgggcggcgctcgatattatgcacggcgtcgccaaaagtgcgtctgtcgatagttgtctagcgcagggcgatggaggcacattagttcagaggggtatttatgcttga

SEQ ID NO: 363069 - DNA, 405 bp, Pseudomonas aeruginosa
atgcttgacaccttctccgagatgactgtgcagacgcaaatctgccacctgaatatccttgtaaagagcctggatatttcatgggatttctataagagcattctcgggttcgagtatgtttatcacctgtcaccaacgaagatagtcgcagcgttcaatggctttgacttttatattgaacaggaagacaactggcaaggtattgatgagcgcatgcacttcggcttacgcaccactcaagagaacgtctttgcttgggctgaacacctgcgcagtcacggtatctcgctagttaaaggcaacaaccctgcggcagagatttacgtggagcctggcagcaaccgagtggccctctatttccaagatcctgatggcctgaccatcgaagtctatagcccggagtga

SEQ ID NO: 363070 - DNA, 282 bp, Pseudomonas aeruginosa
atgctagatacctatcttcaggtagccaacggcgcgcctgtccggatcgacgctgatctgcttgaacaactgctgaagtatcaatggcgccatgttggtggacgtgtgatctcggttaaaagtccaaacttcgccgaggttcttgacttggccacagtgatcgctggcttcggtgccgtggtgcacgatgcccatgactatcgccgtgttgctctgaaccgtgtcttggtcaggcggggcgcaaatggacgaatcgaggtgcattgccaatccggcgcttga

SEQ ID NO: 363071 - DNA, 981 bp, Pseudomonas aeruginosa
atgaagacttcatacaggccgtactactcggtttgggacgcccccaatatcgtagtcgactcggcgccacgggaaggcacggtgctaacgctctctcactggccgtccgtacactgtgacccggtgtatcgcgctgacacctctgccgagatggctatcaattatttggcgcgatcaagaggggtgattccagcaccatgggtgactgcctctcactacgatgtggatgcgctggtttcgttgtacgcctttagctctcctgaagtggtgctctccaatcctgctctctgggtagagttggctttcgccggcgattttgaggcttcacgcaccgacgaggtgcgacagcttgcaagggctttggagttctgggccgacgaacacctttcacctattgcctctgatctcaagggcgttgcgatgagtgatcgccattcccttgtttttgacgatctcctgccacgcctgggggagatcgctctccaccccaagcgtctgaaggagcgctggcaggctggagaaatactctatgcgcgctccatggcactgctttgcgacagttccattgatgtcattgaacgccccgagcttgacctgacgatcattcgcagtaacaagccccatcttcttgatggagatacttcatatctaggatttgatgcattcgcgatccaccgtgtcgcgcaaggcgccacagtcgcaatgatgatgggagatcactactgtttggtgcagagatatgaaagctggatccagttcataagccgaagtatcaggccgcgtcaggatctagcaccgctgtgcgcctggctgtcagcccaggatcaggcagtctgggagtacgacggtgtccagtatgttgcgccagttttggcaattccatcgaacggttccagctcgctctctcaggacacatttatcagtgatgtgacggattacctggcagcggcgcctggcgcctggaatccaatgatgctctaa

SEQ ID NO: 363072 - DNA, 651 bp, Pseudomonas aeruginosa
atgaagcacaagaacactgtagtcgatgcggtacggatacgctccacgacgatgattccgttcaatccgatgggcaaactgcgccagacggaaaagcctaagctattcactactttcgatgggctgggtgacaagaaagagcacctagctattacctttggcgagccgtcgatcgttgaccctgtcttggtcagactgcattccgaatgcctgaccggcgacatattcggctctttcctttgcgattgccgggcgcaactgcacgagtcaattgagacacttgagggggtcggtggggtgttgttgtatttgcgccaagaaggccgaggtatcggtctatacaacaagttggaggcctacgcactgcaacagactgaggggctcgatacgtttatcgctaatcagcgtatcggtttcccccaagatgcccgagagtatgatgttgctgctggcatgcttaaagctatgggtataagtcggattatcctgctgtcaaacaatccggataaggcggcccaacttaccaagtatgggatcgacgtcgtccagcgcatttcgacgaagactcatgtcaaccatttaaacaagaagtacctgtcagcaaagtacttgagcgggcaccaactggtgggcctcgcggaaaatacctaa

SEQ ID NO: 363073 - DNA, 876 bp, Pseudomonas aeruginosa
gtggcgagcacatttaattgggtcgagaggaaagttgacgtcctgctgaacgcactctgtgcgctggggttgaccctcaagcaggatcagcgttacgaagtgacatccaacgtgcgcaagcgtttggtgctcggcagcgcccactacatcggtagttatgtcgaggtgctgcggcggcagtgggatgtttggaagagcctcccggagattatgtcccaggatagccacgttattggacaacaactgctgggcagcgtggataacgacggtttcacggcgctattccaagatgccatgtcccaagtgtgcgatgggaacatcaggggactttccgatctggagatatggaagcagggaatgctggtgattgatctggggggcgggcacggcttgcatgttgccacattgtgcaaggagttccccggtatgcgcggtgaagtatgggatttgaattcggctcgccaaggggcggaacagaacttccaacgccatggtgttactgaccaggcgtcctttagggtttgcgacctagatattgatctgtatgccagcgatacgctcgccgatgcggtgatgcttaatcatgtgctacatcacttcaatcccgaccaagccgagaggattctcgtcaaggcggtagcgatgttggagcctagaggctcacttatcgtcatcgaccagaccctacaagccgatggttatacaccccacgattctgcactgttctcgttttacctgatggtcaacaacagcaagggacagttgcatagtgtgccgtggatctctcaaatcctcgaacgttgtggatgttcggttcgattagaaacctgcggctggaacaacgaagacttcattctcatcgccacgcggacataa

SEQ ID NO: 363074 - DNA, 1770 bp, Pseudomonas aeruginosa
atgcatacttctcctatcacctcgttggcctatgacgagcacggcaacctctacagtggaggctacgacggcctcatcgtggcctgggatgttgatctgcgcactcctaagtggtttgccaggcacgatgagctgataaatagcatcagagttatcggcagtgggctctactcggcgagtgcggatcgttcggttcgcgtctgggatacgcactctggagcccttctgagagtcatggtgtcgggccacgaagacgacttaaatgtgctcagcctctcttctgacggaaaccttctcgctgtgggaggtgaggaaggtaaagtctggctatacgacgccgatggagaccttatctggtcacagtcggggggaactttgtcatcgccttccgattgcatagacgctatcggcttcataagcgcgcacagcgactcttggatcatcgcaggagacgaccaaggcttcctgaaggtctacgatctcaccggccaggtgatatggagtgacaacgttcatggggcagtcgagacctgcgcgacagatgacatcgggcattctgccttcctaggtctggacaacggcaggctagttcgtctagcgattttgcctggcccagtgttcactctgaccacggtaaagccgcatatgagcgcgatcaaggcggtgtgtgtaaatccgcggacgcggcagttggtgagcacggcctacgacggcgaaatggtgatcatgtcgctgcctgatctgaaagaaactacccggcttcagatcgccaactacgggaatctagggtggtcacgcagcctggctttcaatcccctgaatgagcatgtcttagcgtccagctcgctcggaggggcaccgcagatttggtgcctgcggcgcggcgagttgctgctccccgaagcagggccaacattcggcctgaatgcactggcagtgctgcggggcagggtcatcagtggtggcgacagcggtatcgtctacacctatcacgccggtgttctggaggagagcctcgatctgagggtaatgattaatggtctggctacctccgatacgacgaacttagtcggcgtgtgctgccagagtggcgagactttgattgtcgatgccgaaacccatcggatcatcgaaaagatcagtagtgacggctctcccgctgtgagctgcgctttcagccccacgggagcccggatcgctatcggcagctacaacggcctggtgcgtatatatgacatcaccgctagctccctgctgatcagcctgcaaggcccagacaccgtcaagaccatcagcttcctggataatgaggactttgtggtggtaggcggtgcagacggcaacctgctgatcatcagcgtgaaggatggcagcgtcattaaacacttggatgggctttatctggtaaacggactgtcctggtcagccgaagcgcagcaactgattaccgtaggccgtgatcaggctgtgcgtaagtggaatcgagatctgcaattgctcgatgaacggactgtacatacccgctcaattaaatcggttagctggaaccccagcgggacagcctatgcgactgccagctacgacagcacggtaggtatccatgaggtcgaatcgaccaactttgcgactgggcacgataagcccggcgtttcctgtctcgcctggctggacgatgagcacttagccagtggtggctgggatggaaccatccgcatctggaaccggtctggccaggaacagctctgtatccctgtcggaacaggcatctag

SEQ ID NO: 363075 - DNA, 393 bp, Pseudomonas aeruginosa
atgctttcgttctgggaaatctatgtacacgacatgttcaaagccaaggctttctacaccaacgttattggtcttgaggtcgtaagggagcaggacgacttcatcgttctgcagaggaacggtgcgaagattcacctctgtcctcgggaggatatgccggaatacctcagatccaaaggcatggagagcctaggggcaggtgttgaattctgtttcgaaaccaccgatatccaggccgtctattcccgcgctctgtccagcggataccccatctttgagcagttgactgaccaaccgtggggcaaaaccgacttccgtctcattgatcctgacggcgcttatattcgggtcagcagtccacgcactcgtgcaaacctgtgcctgaagaactag

SEQ ID NO: 363076 - DNA, 1146 bp, Pseudomonas aeruginosa
atgacgacgacggtgagtgaaagcaagaatatctcaagccttgcggtcatcatgctatgcaacctctccgctgccatggcattcggtctgctacagccagttctgaccattcgaatggagcaggccgggcagagcagtgccatgataggggtggtagtaagcgtgtggtcgttggcgatcattgtgggcggcccactgtatcccaagatcatctacaagctggggattaaaccctccctggtttcggggctggcgctcaccggctgtttgattctgttatttcctctctccaacaatccctttgtctgggcgttattccagttcttactcggattggctttcggtcacttctgggtggtcagcgaagcttggctgaacacactggctagcgacgaacgacgcggtctaactgctagcctctacatcgtttcactggcactcggcggctccattggtccgctgcttatcaatttggtcggctaccaaggactgtccccctttattctctgctcggcgattctgattctgggtacgactccggtgttctttctagctgatccgccggatctggatgcagaagaacctccgagattccgctcaatcatcgcggcgtttcccatgattttgatcctcggtttggtagccggtttcaccgaccaagcgccagccggtttgttacccgcttatatcctcaaggcagggttcgacgttgaactggtcactgctgcgctattcatggttgggtttgggaggctgctgttcatcatccccatcgggatacttgccgactacgcttcgccccggttggcgttgatattcagctcatctctatgtattgccctcgtgcttgcattaccagccacgctcgggcactcactttatctgctagccatcctctttttgcttggcgctctactggatgccttctacgcactgtgcctggcagttctgggtgcacgctacaggggggcggaactcgcctctgctaacactgtattcgtcatgttgcacagtttcggcagcttcggtggcagcttcggtcttggtctatcgatggataccttcggcatcaacggttattcgtttttcatcgcgatgatcgttgcgttgttgccgacgggttacttgctgttgcgccagcgctaa

SEQ ID NO: 363077 - DNA, 912 bp, Pseudomonas aeruginosa
atgaagcgaattgatctttcccaaggacttggcctttctcgagaagcattcgactgccttgttacggacatttaccacgccagctcacaggaaggttgtttcctacttgaagggcacggaattcctttgcagctcctcagggaggcgcgacaagctctgcggcacgttttcgcactatcccatgagcaaaaaatgagcgctaagcgtccatgcgggcgctaccgaggatatattgagcggacgacctttgctgatgacgaacgagatgggcctcccgtaatgtacgaggggttcgtggttggcacggagatccagcccgacgatccggaagtccagctttcggatggtatgttcgcgcccaacctgtggccagcgggtgctccagatatacagcagagcctttcggactactggcaagcaattacaaaggtatcgaacgaactgctcaagctattcgcggtatcagtcgggcaggatacccatgtttttcttgattacttctactgcccgctttcaaacctagttttattgcactaccccgcagacgagaacagtgactgcatggcgccgaagccccataccgactccagtgcgttcaccgtactgctactagatgacgtggcggggttggagctgcaacggagaagcggggaatgggagcccgcgccgcaggcaggcgacgcactgcttgttattgtcggcgaaatgatgcaggcctggacaggtgggctctatagagccgcccctcaccgggttaggtcgccaagaaacaccaaccgggcgacgctggcgtacttcgtttcgcctagttaccgaaccatgatcgcgccgaaagcgggtgagctggataacccgatttttcatttctccgccggagcgcgattcaagcagtacgttggggagttcgattga

SEQ ID NO: 363078 - DNA, 612 bp, Pseudomonas aeruginosa
atgcagaccaaaattgtggtcatctgcggtagtgatagaccagcctccgcttcactggcgattgcgacttatatccgtaacttgtgcgcagaacaccctgccgtggagagggtggaaatcctcgatctgaaccaagagaaaatcccattgtgggacgaagggttctgggataacacaccctactgggagagtatctggcgtccgatctctaacctgctcaaggacggcgacggattcatcatggtgacccctgagtggggggggatggtgccgcctacgctgaagaacttcctgctgctgtgcgagccatcagagataggtcacaaacctaacttgatagtctcatgctcctcctcaaggggtggcgcgcaacccatcgctgaactaagaacatccggctacaagaacaacaagctatgccacatccctgaccatattcatattcagaaagtgaatgaagtgatcgaggaaataaccagcggcaagcacgacacctatttcgctaagcgaatcgactggtcgatcagggtgctattgagttatgcgcaagcgatgaaaccaatgcggcaggcagagtttctttttgatccgacatatgagcacggaatgtag

SEQ ID NO: 363079 - DNA, 222 bp, Pseudomonas aeruginosa
atggcatacgcagttcagcggaagtggggaaagttcggccgcgactacctgcacgcatgggacgaggagttcggaacctcctgcatgggctcgatcaagaaggcgatgaccttcgccactaaagacgaggccgaagcggccgctgctcgcgctcagcgtgattgcaaagaccgtgatggcaacccagccacctcgtgcgccttttccgccgtaccactctaa

SEQ ID NO: 363080 - DNA, 867 bp, Pseudomonas aeruginosa
atggcggccaaatcgttcaagcagatgatcaaggacggcgacctgaagcgcgcggatgcgatgaaggctcgcctcgaagaccttcacgaagaacctggtttcaacctgcgcgccgagggcgaagacctcgagcagagcatcgcggatctggccgactacctgcaccagggcggcatcgtccccgcgctggaagtgcgcccccgcgaagaaggcggcatgtgggttgtcgacgggcaccgccggcggcgcgcttacctcaagctcgacgccgagggccggctgccacgcgacccgaacggcgagttctgggtgcccatcgttgcattcggcggtaacgacgctgagcgcgtgcttcgagtgatcaccagtcaggaggggcgcaagctctcccctctggaactcgcacacggctacaagcggctcattgcgttcggatggaccgtcgaacagatcgcccagaagatggggaagacccggcagcacgtcgaccaggtactggtcgtaggcaacgcgaataccgatgtgcagcagttgatcagctccggcgcagtcgcagcgacgaccgcggcgaaggtcgtcaggaagcacggcgagaaggccggacaggtgctcggccagcagctcgcgaaggtcattgcagcgggcggaaccaaagtaacccccaaggcagtagccgagccagtcgtgccgcgcgccattctcgaagagttgctgaagctcaatcgggagatcgtcacggcgttcccgacagcccttcgcgccggcctggctgaggggccggaagcgatcaccctcaccaccagggcatcccacatcgaaagattgattgaactggtcgcgagggccgatgacgccctcggtgaatag

SEQ ID NO: 363081 - DNA, 231 bp, Pseudomonas aeruginosa
atgaatatctatgaatgcgaacgtctagcacgcgatctcggccatgacaaagcaaagttcacggcgatcttccccgccgggccgttcgaatgccaatggctggacgcctatatgggcatcttcaaggtcgacgctgacggaatgcgcaatggcttcgtgaaggttaaggacatggctgagatgttccccagccttgaatgtgtcgacctgcgcgtagacgacgacgcctaa

SEQ ID NO: 363082 - DNA, 720 bp, Pseudomonas aeruginosa
atgtacgactatgcaatccgtttcgaacaggacgatagcgctcctggcgttgccgttttctgcagagacttgccggaactgaacagctacggcgacgataagacccatgcaatcagcgaggcgcttgacgccatcgggacgaccctgtcgctctacattgacgcgcgaaaatcgatcccggaagccactccaccagaggagggcgagcatgtcgtccacctgccagccgtcacggtggcgaagatcgcgctgtggaacgagatgatgaagcgcggaatgcgcaagtccgacctgtgtaggctcctgggcatcgcccaaacccagggcgatcgcctggtggacttcttgcaccacacaaaaatggacgccgtggagagcgccctactggcacttggcatccggcttcgtcaatcagttgaggtcaggtttgacgaggtgaaactttacctcgagcgtgacactacggtggtcttatcagaggcatggtgcgaactgagcgcatcctgcaaagacgaagctggaaattatcgtggatggttaagccttccaagccagacatccccccagcggcaaacaatcaaagggattgaggctcatcgactcgcctcccactgtcacctcagcatatcggtagatgatgataggcctggcgaagcacctttcgaatcgcaggggcgaattcacttgccagtaacgttctactcagtagaagtaaagtag

SEQ ID NO: 363083 - DNA, 315 bp, Pseudomonas aeruginosa
atgaacttcttgctggttctttcgccgcagtatggcccggcggaattcggcgactacaccaccgtctcggtttccggcggcgtgctgactgttgaggggcgcgactatgcgttcgccgacctcgccgacggcgcagaactcatgatggaggacttcgccgatccatatcccgtctaccaggttcggcggcgaggcgacacgatctcggtgtggatcatctacagatatccggcaggtgcgacccatgctgccaagtaccctgagccggttactgtccctgctgaattcgacgggcctgttgatctgccgatgtga

SEQ ID NO: 363084 - DNA, 672 bp, Pseudomonas aeruginosa
atgaacgggcgccggccatcagcagcatcgctcgcagcgcccgcggcgctgctgggcgacattcgggcactgatcgaggcggcgcgcttgcgcgccgcctcgacggtgaatagcgagcttacgatgctctactggcgcatcggccaacgcatccacacgcaggtcttggacaggcgccggggcgcctacggcaaggaagttctgcccaccttggctgcgcagttggtggaggagtacggcagcagctttgcagagcagaacttgcgccgcatggtgcagttcgccgccaccttccccgacgagcgaattctcgtatcactgatacgagaattgagctggacgcacttcatcgccctgatgccgctgaaagacccgctccagcgggactactacgcacagatggccagcacccaacgctggagcgtgcggacgctgcgcgagcgtatcgactcgatgctgtacgagcgcacggcgctttcccaaaagccggaagaaaccatagcgcaggagttggcgaccctgcgcgatgcgcagcgcatgtcgccggccctggtcatgcgcgacccgtacatcctcgacttcctgggcctgcgggacacttggcaggaaggcgacttggaagcggcgatcatccgtgaaatggagtccttctgcgtaattgcatccacttga

SEQ ID NO: 363085 - DNA, 417 bp, Pseudomonas aeruginosa
gtggtgtggcccgacagcaaggttggcggcatttccaagcccatgagcgaggaagcctatcggctgctttcgacggcgccgcgtctggaaggctgcccttacgtcctgccgtcgccgaacgacccggccaagcacctgacctttggcgagcactatggcggctggtgccggacgctcaaggccgccagcgtgccgcacgtaggcacgcacggcatccgtcatcgctcgaccaccgacattgccaattccggtgtgccgaccaaagtgggaatgaagctgacgggccacaagaccgtggcgatgttcatgcactacgtccacaccgaggacaagccggtgcgcgaggcggccgagctggtggccagccgccgccaagccatcacgggcgcgcggcagcttgcggaggcggtggcatga

SEQ ID NO: 363086 - DNA, 255 bp, Pseudomonas aeruginosa
gtgaagccgttcaccaccggccgcaagttctaccgggtgatgttcgagcagaccaacgaagccggcgacggtgagaaacgacgcatcacctgcttctatgcgcggatcagcctgaacggcggcctgccgctgaaccagggcgcagagttcggcgtgatccctgtgcagattcgcctcctatccgacccgaacatctacgacgtcggcgaggccgcgatctggacttgggaaatccagaacaccgacgcggcctga

SEQ ID NO: 363087 - DNA, 150 bp, Pseudomonas aeruginosa
atgacgcttcaacagatcgaggtgttcctcgagcaggtcggcgaacaggtcaagcaagaccggcgcgaccacctgttccttcgccgcgcggcacgcgcgcccctgaaggggtttaaacagttcctgcaggagttcgatcatggccggtag

SEQ ID NO: 363088 - DNA, 759 bp, Pseudomonas aeruginosa
atggtcatcgtttgctgcgtttttacacggtctgggccagtaggggccaatcagcaccagttcgacgaagaaacacgcgccgatggtcgcgatcagccccagcactatggcctccaggcggcggaagttggcgccctgcagggccagcacgatcagggtatcgaaggcggtgaggaccaccccggtggtaatcgagactcccagcagcaggtggaaggccagcgccgcgccgagcacctcggcaaggtcggtggcgacgatcgacagctccgccagcagccattggccacgcgccacgccagggcggtagcgctcccgggagagttgcgcgaggtcgcggccggtggcgatccccaggcgcgaacagaggctttgcaggagcatcccggaaaagctcgccagcaccaccacgaacagcagcgcgtagccgaagcgcgagcccgcctcgatggcggtggcccagttgccggggtccatgtagccgaccgagaccagcaggccggggccgacgaacagcgccagcttgcgcagcggcgaggcgtcggccggcaccgccacgctgtggctgaccgccgagggacagaacggcgcggtggccgtggtgggcagggagtatttcacgaggcgacgccggatcggggaggaagtgcgaccagcctaaacgtttcaccccggtcgcgtcttccctcccctcaggcctgggcgcgctggccgaccaggctcagctcggcgaccttctcgcgccgctgcgccaggtag

SEQ ID NO: 363089 - DNA, 1725 bp, Pseudomonas aeruginosa
atgcccaaggcttacccctacatacgtttttccagcgacaagcaaaaagacggcctcagcatccaacggcagacagaagccatagaggcttatcttgctgctaatccacaccttgaggtcgataagagcctaaacctcgaagacctcgggaaatcaggctatgcaggccgtcaccttcaaaaaggtggtgctctttacttgttccttgaaaaaatcaagagcggggaaattgaaaagggttctgttctaattatcgagcattttaatcgtctctctcgcttgaaactccataaagcaatggacttattcaatgagatattaaggcacggtatagatatagccgtgcttgatgaaaagcagatatttaccgccgaaagcatttcatctattgactacattaaagcagtgcttaaatttgaccttgctcacgaagaaagtaaggacaaatcaaagaaaggcaaagacaattggaaattcaaaaaagaagcattgcggaactctcaaaacccgcaaattgaacgattgaacttcactaaaaccttgccgctatggcttgaaaaaacagatgcagagatagtagtcaatgaacagaaagccgaaacaatacggctaatttttcgactttgcatagaaaacaatggctacatgagaatagccacgcacttaaatcagagcaaaacaccaaggctcgacgcatctaacggcccttggacattagacatagttaaacggctactccacaaccgtgccctactaggagaatatcagcctaggaagacggtagaaattgaaggccgtgctcggcctatctatgtgcccaatgaagaagatccaattaaaggggtataccctgccgttattgatgaagataccttcaacgctgcacataacggcttaacgagccgtaagagcacaggcgggggcaggcgggccgatatgcccaacctttttctaaaattacttaaatgcgacgaatgtggcggctccataaagttcaataagcatcataatggctacaagcaatacaactatttaaagtgctttaacagcctatatgggcattgtgtcagtctaggcccaaagacttggcgttatgaacaatttgaagaaatgtttttcaaattctcggggaaacttaaccttgaggacatattcaagaagaacgaacagtcaaaagtcattcaaaaagaaatcaccgcactaacagcaaagcagaacaagaaaaaagaaaaagtagccgagattttagaacagattgagacaatggagttctcaaaatctctttatgctttgatatctaagttagagagcgaaacggaagaacttgaaaccaagataaaacaaaaataccaagaattgagttcagtcaagcaagaagaacttgaccgacgaataaaggactttaaagatattaacagccttctacttcaatcaaccgaggtagagacaagggaaaagataaacaaccaccttcgcgggctaatagaaagcattgcgttagattttaaatcaaagacctgcaccatacgatttaaaaatgggatagagagacatattcacaacgatggaatgtttgccagcatcccaccaaaagccgaaggtgaacagagagaaaaagaccttgatgccatattgaattggcacaacaaaacagaagcagaacggcaggcaatctatgaagatgcagatttcaaaatagtccccctaccagtttccgccgaatga

SEQ ID NO: 363090 - DNA, 1635 bp, Pseudomonas aeruginosa
atgaatgacctaaaaaataccactatgctctggaaaagaatgaactactcagcccaaaagggcagagtaaaaaagaccgctggattatctcaattaaagagttcacttaatcacagccttcgcactgtgatgaaaaaagaactcgaattcaatcaagacctatctcaccgcaatttcattatccacaataacaagatgattaggcttgatagcctaacacttgaagacaggcagagccttgtcaatgaaataatgtcatcggttcagagtgatataggcacacatgaagacctatcaaaactcaaagacgaccgctcaaaatacgcctacaagctcaaaaagctgctatccaaggctgacgaaccagaagcccttaaaacgcttataacgggcgttctggaagcccaggacagcacgctatccccttccctggtggatcaagtcgattcgataggcgttaagcgtgcaaacgacaagaaaaaggctatcggaacctacatagaactacataacgagattattgcagcgggcaataattcattgcacaaaagcaaaacagtagtgcaggaatgcttttttaaattccccacaagaaacaatatcaacgaagttaagccagttgactaccttcgcataattcacgacttccacaaaaagcacctgcctgaatacgagataaaaacctgcgtatttcacggcgacgaagtattaagtcaaaaccaaataaataatggcgttcaccctcacattttcatcagcgggaagaactcaaagactggtcaatatgatttagtgcaagcccaactttatttagtcaatagataccttaaaagcaagggcgagactgagataaaaaacaactcattcaaagcatcacaaaaaattggagaaacctaccaacgccttgtttatgaatacgtcaacaaaagactaaaagaatttggctataacatcgaagcatctgtacatgagaaaacgaaggaacataaagaaaaacttgaggcaatagcaaaggacgctaacaaagccaaaataatgagaaacttcaatctactttctcaaactcaatcggccattgctgatgctcaaaaacagatgcaagaaataaagcctatacttgaagaaaaaagaacagacaacaaacgacttcaagaacaaaacgagagccttaaaactgaaattaaagacaataccaagacaataaaaaagcaaacccagcagattgacaatggaaccaaggaactaaaaacacttgatgatagatacagaaaaacactaaacaactacgaaaaacttgagaacgcaataaaaaagagcaacgagacataccaagcaattcaagatgttgacatagcgattgatgtcattgcttttcttaacagcgaacgcagagatataaggctggcatttaataactacaaagaaaagaatatcgaggcattaaagaagatgacaaggaaggaaagaattgactttcttgaagcaaattcggagcgtttaaagcgtgagcatttaagcgatttagtgtctacaaatttaagccttggagaaaaaacaagtctaattattcacgacgctacgcaagcagtaaaatcgacaatcaacacagttagaagaagaatgtccgggccttaa

SEQ ID NO: 363091 - DNA, 3306 bp, Pseudomonas aeruginosa
atgcttataaaaaaatcgtcgaatgcacccaacccactgaaagcctggctcagcgaattcctgctcaatcgcgagctttttaaaggcccgcatggcaaacccctctatagctatcaggtgtccgaggaggagtacaaatcactccttgagctgctgaaacagcaactcagaagatcggacaaccccttgcatgccatgcacctaggggcctgcttctgccttttcgtcagtgaacaatatcgccgcaactacaacagctcctggtcctggtccggagcagaggcggaactggggatttctctgaccccgcaacagcatgcggcgctgaccaacgatgggctggcctattggaagaggccgatacgtttccggaacagtggccgcgactggctgggctcgctgttcaccgagggcggcttgccctggccgctggtgcaaagcgagtcacatggtttcgggcgggctgtacgccggggcatcaagcacttctaccggaccgaaggcaaccggagaaccacggctgacctgatggccgacttcgaggagggccttccggccgctttccgcaatctggagacgcgccggctgctggcaggcatcgtcgaccagctcatgtatctggtcgagcactaccccctcaaggatctgcaggatccagccagccacctcgatcagcaggctccaggctggacggatgctttcccaatcccgctggatgaaagcaatgcccgcacgctgctcaatgactggctacgcgatgccggccagaaacgtcaggagcgcaaggaggcacttgagaaaacccgggcgttcacctgcgaccactttctgcatggcacgccgccccaatggtcgatacgcaccgacctgatcctgccccctgaagcaacctttgcgatagacccgacgactctgggcagcacccgcctggaactggcctactacgaaggtgagcggctgctggcccgtggtggtgccgtttatggccagctcaccgcagagggcatcagggtccgcttcgccaaccctcaggtcacggtggagcggcgcacgctcgacgagccgctgagcctgcgcctgctggataacgggcgcacggtacattgcctgttcttcgacgacagcgcactcgattaccgggaggctcccctggttttcgagaatcgctccgagcgctggcaactggtggccacctccagttgctcggtggcgtccggactggctcggcttcgcatcccccaggactttttcataacctgtgaaggtgcagctccagacaccctggcgcaggatacggagcatggtcgctgggtagagatacactcggacctgtctctggccaagggggccgaccactaccagatcgagctgaatcaggctggcggcgacgagcgcaaacctaccctgtcgggcgtttttgcactctacgaaagctccccctcgatcgtcttcctgggctggccacgccttgagctacccgacgactatccccacccccgggatgagctgctcgagttcgtcaacggagagttgctggaccgccagcgcaatagcagctacggcctcgcccgctacactctgcgcaaccgctcgggtaaaacgctgctgcagcgccgcttcggcgtcctgcccagggagttcagcctttccctgtttcctgggctcggacagcagcccgcccgcctcctacccaaaggcacacacctgcttgatttgcaggtcgtcagcgataccctggcagcagagcaatccgaacatgctctgcacttgcgccaccagggggagaatccccccacgaccttcattctggaggccggccagggcctgcctcccattcagctacgtctaccctacccctaccagggggctcgtcttctggaccagtacggcaatccgtcgcgaacccgcgagctgacactggccgagctgatcggctaccgcatcgcgctgacctccggtcttccgcagggccagacgttccacatggagctggagctgatctgtacggagcaaccgcacccgaaacgcgccttcagcatccgggtaggcacggcgcctatcatgctcaacctgttcagctacctaagcgacatgcagaacatgcttggcgcagttgacgaacaggatgcctatatcaggctttccctggaaaccgaacacctactgctgaaactcgatattcgccgctatggcggtcaactccagtgggaggggcggcatgccttctatatctgcaacacctccaatgctgcgatactcgagggcattcaggccgaggcgatgctcctgtcagaccccaagcgcactccgctgaggctgaccgagaaaaccagcgagacggtgggcaccggatgcttcgagattccgcagaaaatgcagtctcaggggccatggctgatctatccgagcgaacaatcgagcgttcgcttccgtccgggcctgtatataacgccggacaacaccctcgactccgagtccgaggtgtgctcgctgcatcgcgccgctgagcttttccacccccagcacaatccgcatgtcatcgagcagcagattgccgccatggcggccgacttcaaccacagtggctggcagtatctggccgacctgaagcagcactaccgccacttgccgctgtcgtccttcgaaacctggaaagccctgtcgcgcaatcaggaagcactgagcttcgcggtattccggctggaaatggacgaatcgttctgcgcacgcatacgcgacgagcttgctgtcatctgggaagctgtcccgcttccgctatgggtacaggcctaccggctattccacgactgcatgcgcctgaccggtcttcccgaagcgctggtcaacaatctcgtctcgaaccgggccaacgtgctgcgttgcatcgtttccgggttcgactacttgggagactatctgagcaccggcaatcgcagtgcgctgaccaggctgccaccggcaagtgttctgcctatctggtaccaggatctgcgtcgtcttcacgagtccaatcggaactggcccaccctactcggcagcgagctttccaggtgggtcgacaggcagcggctaccccctctggtgaaagccctttcgctggtggagttcaccgatgccgtggcctacctgccgatcttcatggccttcgtcaccgccggcaaagccagaatcactgacctcccggcgacacctgcctatctgaaatttgccattcgcctggtttccgactttgaccgtcagggctggttcgtaccggtgcatgccctgatggtgtcctatctgctcgcctcgcaggatgaggcataa

SEQ ID NO: 363092 - DNA, 537 bp, Pseudomonas aeruginosa
gtggtggctcagaagcctagattcctcaccattggctttagcagcgctttcggcgagtacaccgagcacagagagccgctagaccccgatgacatcagttactgccatcagaaccacacccctatcgtggtgaccttcgctgatcaggcaggaaatttttccttcaagctgactctctggcttgtcactttctacgccctgagtgattcaccgatttacttcaacggtgcctcgcacaagcctatgtacaacagcattgttgagacgattactggggtagaacccgtcaatcgcaagggctattgcttggttaatagtgatgatgcgcggaatccacatgcccttattaagtgcgatgagcagggtagagaaattgagcacatcagaaacctcccgcccctacccgagagtgagctttgggccgaactcaaggcctacaatgaccagctgaacctatccctcacggacgcggcagagataacgcagactacggtgtacaagtacgccgagtatgctggaggagaaaccttcgactga

SEQ ID NO: 363093 - DNA, 1716 bp, Pseudomonas aeruginosa
atgctctggcacggcttcccggtgctgcggctgctggccgcctggctcgcggcgagcgccgcgctgttcgcgctgttcggctggctggagcgccgcacccgcgccgctccggtgagcctggcgagcgcgccggcccgccgcggcgcgagctggccggcgcggttcgcggtgttcggcgtgttgctggtggtcagcgtggtggccgcgcgcggcacgctgcgtcagggcccgccgctgcgctggggcgatgccttcaccaccgcctcgaccttcgccaaccacctcggacagaacgccacgctgtcgctctacgatgcggcgcgcaaccgcttctcgagccatcgcgacaacagctggaaggcgacactgccggttgcggatgcgcaggcgatcgcccgcgagctgctgctgaccgccaacgaccggctggtggacgccgagctggcgccggtgcgccgtgacttccagccgccggcggacggccagctggcggtgcgcaacgtggtggtgatcctcatggagagcttcgccggccgctatgtcggcgcgctcggcagtgccgacggcatcacgccgaacttcgaccgcctggccggcgaggggctgttgttcgagcgcttcttcgccaacggcacccacacccaccagggcatgttcgccagcatggcctgctttcccaacctgccgggcttcgagtacctgatgcagacgcccgaaggcggccatcgcttctccggcctgccgcagctgctcggtgcgcgggcgttcgacgacgtttacgtctacaacggcgatttcgcctgggacaaccaggcggggttcttcggcaaccagggcatgaagcgcttcgtcggccgcaacgactacgtgaatccggtggtttccgacccgacctggggcgtttccgaccaggacatgttcacccgcgccgccgaggagctgggcaagctggataacggcgcgccgttctatgcgctgctgcagacgctgtccaaccacacgccgtatgcgctgcccgagcagttgccggtcgctgctgtcgaggggcatggcgcgctggatcagcatctgacggcgatgcgttattcggactgggcgctggggcagttcttcgacaaggtgcgtaaccagccttggttcaagcagaccttgttcgtggtggtcggcgaccacggtttcggcgcgccggaggaagtcaccgagatggacctgctgcgcttccacgtgccgctgctgctgatcgccccgggcgtcaccgagcgtttcggcagccgtcgcgaggtggtcggtacgcaggtggacgtggtgccgaccatcatgggccgcctcggtggcgaggtgcgtcatcaatgctggggccgcgatttgctcagcctgccggcggacgatccgggtttcggcatcgtcaagccgtcgggcagcgaccagaccgtggcgctgatccgcggtgatcgggtgctggtacagcccaaggagcagccggcgcggctgtatcgctatcgcctgggcggtgaaccggctggcgagcggatcgccgctgccgaggatcagccgcagctgctgcgccagctgcacgcctacctgcagaccgccaccgccagcctgctggccaacaccagcggagatcgcagcggcgagggcgagtcggaagcggtggccgccgaggtgccgctcgcggtgaaagcggccccgccggcacggccggacaagggttga

SEQ ID NO: 363094 - DNA, 483 bp, Pseudomonas aeruginosa
atgatccgcaaaccttacgctctcgccctcgccatcatcctcgccggcaccctcggccacgccggcaccagcctcgccgccaccagccatgaccacggccacggcgaaggcgcgccggcgctgcaactcgatgccggcaagcgctgggccaccgacgcgccgctgcgccaggcaatgggcaccatcaacaacgatatgcgccaggcgctgccggcgatccacgaagaccgtctgcccgccgcccgctacggcgaactggccgagacggtgcgcggccaggtcgcctacatggtggagaactgcaagctgagcgccgaggccgacgcgcagctgcacctgatcatcgcccagctgctcgccggtgccgacgccatgagcggcgccccggccggtcagcgcgacggcgcggtgacggtggtcggcgcgctgggcgactacgccacttacttcgccgacgacagcttcaagccgctggaacactga

SEQ ID NO: 363095 - DNA, 465 bp, Pseudomonas aeruginosa
atgagcaacaccaccctgcgcaacgccctggccctgtccgtgctggtcaacgtcggcgtgctcgccggcctcggctggcagaaactcagtcgcgatggcctgccgattccctccggcgcaccgaccgagctgtcgcgcgagctgcaactgagcgccagccagctgcagcgctggcacgatgccgaggcgccgttcctggcctacctgcgcgcctccaacgccagcctcggcgaacaccgcaaccggctgatcgaggcgattttcgccgaacaggtggaccgcacggtgatcgacgccgagcaggcgaagatcgccgaactgcagaacgaacagcagcgcctgctcatcgaccagctgctgcaggagcgcgagatcctcgaaccgcagcagcgcgcgcggctcgtccaggtgctcacgcagcagtcgttcggcgccgacaacatcgagcaattgcaccgcaaatga

SEQ ID NO: 363096 - DNA, 429 bp, Pseudomonas aeruginosa
atgactgagcatctggacatggcgatcctgtccgcctacctcgacaacgaactcgacgccgccgaacagcgccacgccgacggccacctggcggtttgtccgcagtgtcgcgcgacgctggccgaactcgacgggctcggccagggcttgcgtgcgctggcctgtccggagctgccggccgggttgcaggcgcgtctgcagcggccctttgcgccgccacccgcgcgcagcgggtgggcgcgccactgggcgcagggtatcggtgccgcggcgtcggttctgctcggcctgctgctcggctacaccctgcccggccagccgtcgcgcagctcacccagccacgacctgctcgccgtcctcggcagcgcgccacccggcgcgctctgcgcgcgtcccgaattctgctatctgaaggtaaacctgaaatga

SEQ ID NO: 363097 - DNA, 561 bp, Pseudomonas aeruginosa
atgaacgacagcgaacaggacctcatccagcaggccgcgcgtggtgatcgccaggcgttcggcacgctagtgcgcgtccttcaggcgcgggtcttccacttcctccgtcgcctgctcggcagcgccgacgaggccgcggacctgacccaggaaacgttcatccgcgccttccaggcactgcccagatggcgcccggaggcacgtttgcagacctggctgctgcagatcgcgcgcaatgccgcgctggatacgctgtgccagcggcagcgctacgtcgacgtggcgccggaggagcaggccgagccggtcgatccggcgccgtcgccgctaagccgactgcagagcgcgcgcgatctggcattgctggaacgcttgctggcccgcctgccccacgaacagcgcgagatcctgctgctgcgcgaggtggaagggctggcctacgacgaactggccgccacgctgcagctcaacgccggcaccgtcaagtcgcgcctggcgcgcgcccgcgaggcgctgctgcacggctaccgtcaggccaacggaggcaccctcgatgactga

SEQ ID NO: 363098 - DNA, 525 bp, Pseudomonas aeruginosa
atgaagatcgcacccctcgctgccgtcgccgggctgggcctgaccctggtactggccggcctcagcttcgccgatgacgacgaccatcgagagcgcaagggctacaagcggcccaagcgcctgacggtacccagcgacgcaccgctggtgtggaaggaagaatgcgcggcctgccacatgctctattctcccggcctgctgcctgccgatgcctggcgcgagcagatgcgcaccctgggcgatcactacggcagcaacgcgtcgctggacccggtgcaggaaaaggaaatcctcgacttcctggtccgcgcctcggccgccaaccgcctaccggtggagccgtcacccaccgccggcgagccgccacgcatcagccagacgcgctggttcgagcacaaacacgacgagctcagcgaagccaagttcgcccgcgagtcggtcggcggccgcttcaactgcgtggcctgccatcgcgacgcggaaaaaggcgacttcgacgaggaccgggtgaagattccgcgctga

SEQ ID NO: 363099 - DNA, 408 bp, Pseudomonas aeruginosa
atgaaagcccgctggatcatcctcctgtcctgctgcctgagcctgcccgccctggccgaaaccgaacacccactgctgcccggctacgccgcccaggcgcgtcaggagaatccgaacttcgccggtttctccgccgagcgcggcaaggcgctgtacttcgccgaggagcagcgcaatggcaagaccatgagctgcaccacctgccacaccgccgacccgcgtcagcccggcaagacgccggcgcatcgcaaggtcgatccgctggcgccggcagccaaccccgagcgcttcaccgacctgaagaaggtcgagaaatggttccgccgcaactgcgacgacgtctacgcccgtgaatgcaccgcgcaggaaaaaggtgacttcatcagctggatcgacagcatcaaataa

SEQ ID NO: 363100 - DNA, 1611 bp, Pseudomonas aeruginosa
atgaggatcgccgtcgtggctgctttcaatcgtttccgtctgttccactggctgctggccggtttctttcttggcgcctacctcagcggtgacgacgccgagacgctgcatatctggctgggctacggcctggtggcgctgttggtgtggcgcctgctgatcgtgccgctgcgcctgcgcggcttcccacagctgctgccgccgaagggccagcggagcaagccgggcctgtcgagcgtcggcaagtggctgacggtcggcgcgctgggcagtttcgccattgccagcgtggtcggcctgggtatggtcgacaacggcgatgtgctggccgccctgccgggcgtggggccggatgtcttcggcgctgccagcgacatcgatttcatcggctggatgggcgatgccgaggaggtgcacgagttcttcgccaacctggggctgtggctgatcggcctgcatgtcggctatgtgctgctgttccgccgcaagtcggtatggccgatgctgcgcggcgtgcccaaggcggggccggcttcgactgcaccttcggcttcgacgtcgacaccggcaacgacgtcggtcgcgaccgcgttcgcatcggcgccagcgcctgccgccggggagttcacccgtctgcgcatcgtctcacgccaggccgaaaccgccgacagctgctcgttcaccctgcaggtgccggccgcccagcgcgcacgctttgccgcgcagccggggcagttcctcacgctgaaggtgcccgctgccgagccggcgctgctgcgctgctactcgctgtcgcagcgaccgcaggcggatggcgcgctgcgcatcaccatcaagcgggtgcccggcggccgcgcgtcgaactggctgctggacaacctgcaggccggcgattgcatcgaggcgctgccgccggccggcgtgttcgtgccgcgcaacctggatgacgatctgctgctgctcggcgccggcagcggtatcacgccgctgatggcgatcctgcaggcggcgctggtcgagggcagcgggcaggtacggctgttctatgccagccgcgatgccgcctcgctgatctttgccgaggagctggccgagtggtctgcgcgttaccccgatcgcctgcagctgcgcatctggctcgatgccgagcagggtgtgccgagcggcccggcgattgccacgaagatcgctgactggtcagccgccgacgccttcatctgcgggccgcaaccgttcatggatgccgcgggtgccgcgctgggcgagcggggtgtggatgcggcgcgtatccatctggaacgctttgccgccgcagcgccgacggccgcaccgggcgggcgccgcagccgcctgcgggtcgcgctcgacggtcgccgtcacgagctggacgtgccgcgcggcgaggtgctgctggaggccatggaacaggctggcctgcaaccgccgagcgcgtgccgctcgggtgtctgcgccgcctgcaagtgccgggtggtggagggcagcgtgagcatgcgcagcaaccaggtgctgagcgaaagcgaggtgcgtcagggctgggcgctggcctgccaagccgaaccgcgcagcgccgaactgcaagtcgaatactga

SEQ ID NO: 363101 - DNA, 903 bp, Pseudomonas aeruginosa
atggacttgcaataccttcatactgccatccttgagcttctctcggatcggccctcagaagtcggcgctcgactgaagcagcgcttgaatcgcaccctcctaaacgcaggtcttcctgccttcgatgaaaagcagtttggctacaggaaattcacagaatttttagttgctgagcttggcgagcacctgattgtcgaaaagccggttgagggtggtgatattcagattaccctcaaacacccatcgatcgctgcatcagccgctttagctgggcagaacgatacagcacattcgtcgtcagcaaagccactccccgtccgtctcattcgcggcgacatatggcaggctttcacccatctcaacgagcaccgtaagcgctatctggatagagctagcggtaaggtgctgcattttctcgactctgaggcagctaacgttgccttggttgcagaagcgcctgaacgcttcgttgagattcctcgcgtcgacgctgatacccagttgtcttggatgcagcagttcctggcgatcagcagttttccgaacgctgaggccgccgcgcttgcccagttgctagagcagccctattccagccagttgagtgtgctatttggtcgtgcgctgggcaagcggcaggctgagtggaaacggtaccgggctgagcgtgtcacggaggtcgtacagaactgggcgggtgagcatgagatccccttgagccccctgtttacattcaaactcggccgctctgaagagactaccgaggtgacctcatcggcggcattagggcagctcagtcctcgtgatcaggctcagaaactactggccttgatgtctgagcaagagattgtgtccatcgcaattcctgcgttgctaggttgcgttctcgccaactcccgtctgtaa

SEQ ID NO: 363102 - DNA, 855 bp, Pseudomonas aeruginosa
atgaccaatatctttattgttggcctgccccaaagtgagcaaagtcgcgtcgagagcaagctcctcaagcggcaaatcacggctcaaatcattcccagcggctgggggaataaaggggaatacgtccttttaccgcatcccagtcacgcgattcatgccctatggcagtactgcgagacgatcgggtcggggttcgaggacgctcgtatttttgttcttccatacgctctgcttccagaaaatgttgatgatgacatcgacgagatgtcgaagatgggcgcgaatgtggtctggtttgagcaggagaaagatggctggccgttcctgaagcgacgtgagcagctggatcagccgaaggcatctaccatcactcggttgctgctagaggcaatcggtggtgaagaaaaaccagaaaacccttcggcttatatcgcagatgctgtggcgaactgccccaagctcatcgtggtgtccaattccatcgatgcctgtgacgaagtcagtaagcagcggtaccggttcatcagggacggtattgatgcgctggtggagataatcggcctcgaaggccgaacagaaggcaccatggaggagtttttccgttcgagaaaactgaatcttgcccagtccggcggggacaacatcgaacttgaggtattgctgggaggcaggtcgattcacaaggaaacgtcctgcattcaccttaagaaaggagacgccacgaatcctcagaactgccctcggatttattaccaggcagtggagctgacggtggggtactacgtgttcctgctttatgtagggccgcatcgggagggggacttcgagaagactcaccatctcgactcgacgtga

SEQ ID NO: 363103 - DNA, 2559 bp, Pseudomonas aeruginosa
atggcaacgcacaacgatgctaccgggtatctcctcgcctatcgcgataccgtcaatgaggtgtggttccacgccatctgcgaccacgcaatacagtcgaatggggagccactcgttgactcggatctcgaaaagctctggaactactttctcggaaccgaagcgttcagccctgtggctgccacacctcctcagttggctttacctgccaaggccgccgcgcagacttaccacctagagcagctaaccgcattccgagacttcaagcgtctgagtccatctcttacgctcgacttgcctaagaaagtaactttgattttcggtaaaaatggcgcggggaagtccagcctctgccaggcactgaaagtgctatctaatcccgaaaagccaaaagagccgctcaccaacgtcagaagcaaagcaaaggtactggcctcgtttggatataaattcaaagactcaccgagcatacagaactggagtgagctagatggctacggcgtgcaagcacaagcactaaagtattttgactcaaccattgccatcaagcacgcgacaggctcgttaaacccagaggctgttgttgagatctctgtattccggctggagtgcttcgagtacgcaaagaattacatcaagcaatttcaacagttttgcctcacaaaaatcgacgcaacacgaaatattacaaatctggcgatcactgctcttaaaaacagggtcattacttctatcgatattgccactggcgagttcgccagctgggaggcgaccaatacgcgccccatgttgacgtggatatcaagcatacccgcctacgacccagctacaaaagaaactagaacccagcaacagcagcaactccagcaacttactgccgctacgagccaggaagggaaaaaatcgcttcaagcagaacaatcactattatctcagttcgcttccactctgcgtttgtttaagtcaacttgcgaaaagtattcccctgccgaggtggtgctggtcacgaacacacttcagcaaaagcaggccgcaagcatagagttaggccgcgccgtttttcctgaagggactgaccctcaactgcaccagaaactaatctttgcagcaaataactcggcgcctttgttaacggcgcagtcatgcccactctgccttcaggacgtttcgcagacacgcagcgtgctcttcaaaagctatcatgagttcctgatatctactctgcatgcagaaatcgaccaactcaaagcacgccaggataaattaaatgaagcgtatgctgtggtctacaatcttcagaaaccagacactctgatttatacacctcacttttcgcccgagttcatactgggtttgaatgccactttagatcgcgttgatcgtgcgattcgcgagaaaaccataaccgatgaaatgatcgaagattactcgcaatacctgcaaatcgatgactatattgacaaaatctccgagcgccatacgcaaattacttcagctctttcgctagcatctgccgacctcgataaaacacaagccgaaattaagaggctgcaaaatgcgattaatttagacatcgtctatgaggccgccttcagcattaaggaggatgtcgtcgcgctatgcaatgcagctattagcttcgaggaggcagcagaagttgtaaacggcttcaacttcacttcccgccaagcagcgttgactgcaaggatgaaggaagctcacaccgagttggttttgaattcgtttattcctcaccttgataacgaatataaaagactgagcggctcatctttagagcagatgggcgtcaaactcgccccccagggggcggaggccatcgtcacacctaaggttggtgacagcccagtacatcgggtactcagcgaaggtgaacagaaggtgcatgcactagcagtatttatgtgcgaggcatcgaccacggcacatcaagttctagttctggatgatcccgtcaccagctttgactacaactacgtctcgaatttctgcgaaagactgagagactatgtacgggagaaccccagcgcccaacttatcatccttacccataactgggacttttttgccaatcttcagtcgacgtttaaccgctcaggcttggatcattgcttgtctgtgcaggtgcttgaagactgttcaacagtgtctgagtacgtcgagaaatgggacgaattgtgctcacagatagaagcgtacaccggctcgccccatgagccctccagcgccgagaaagaacacctttccggcctccttcgcaggctgattgagcgcatcactaatggctatatatttaacgaacagcgccatcagtacaaacacaaaggtctgagtatttcgaccttccatcaatttacaaagcttgtccctcttctgcctcaagaggctgacaaactcagagatctttattcaaacctcagtcccaccgagcatgatgatattcgcaatttttattcaggaaagtcgcgcgaccaatttaaatcttggtatgacgatctaattgccatgaaggccgccttactggcgaggaagccgaaatga

SEQ ID NO: 363104 - DNA, 225 bp, Pseudomonas aeruginosa
atgaccatgccgcatgagcgcaccagggcagtcatccacaccagagattttctggtcgagttgtcacgaaatgtcgagctgccggaggatgtcagatccagtgcaaagcacttgctgcggcactatccgagcgcaactgaagttcttctggcagggaaaggcgaagagctcctcgcaagcactatttgctggtcgaatgtattcagttccgccgccgagtattga

SEQ ID NO: 363105 - DNA, 591 bp, Pseudomonas aeruginosa
atgaaatcggcctcgtttatcttcgacaggcgtctgtatgagctgcttcaggaggaagggcacacgaagttcacgacccgtgagcttcgcgatgcttatgccaaaagcctagatggcatgaatttccgtatcgccgatgtgcgccgctatgtgtatgagcagatccgccgattgctgcgcgtgggctgggttgtacttgataaagatcgccgtgttcgaaatcaggtttatcaccttctgccgattccggcgcatctgcagctggagctgatcgataacgggttcgagaacagtctcaaatctgcacttgagttcgagcaggaacctgtagtgctcgatgatgcggttttgccgcttaaaccttcagtcgatgcggatcagcgcttggaagcgctccacaaagaaatccgcttggacttcctgtcttcgatgggcgaggcagagagattcaaactgctcttggaagacatgccgcatttgcgggacaaggttgagggcgagtacctggaggcaagagatcgtagttcacggctgctcgggcatcttcgcgccatcgaaaagacgctcaagacgcttgccgccgcacgatga

SEQ ID NO: 363106 - DNA, 636 bp, Pseudomonas aeruginosa
atgagtgaacaacttgtttcgccgcaggacacctataggcggctgatgagcgaggccagcgatagccgccgaaagcgcagccttgaagccatcaacgaagcgtgccagctgctgcatgagcgtcattcttcggacttctcctacaagaccatcatcacgcttggcaatgaccgagggctgccggttcccggtgaaaagtccatcgtcaataagaccggcgagcattaccgggaactgatccaggcttggaaactcgcgtcgctgcccaaggccaataagacaaaaactggtccaaatgattggatcgaacacatccaagacccggttctgcgcatgagcgtgagcatgctcgccaaagagttgcgggcgctcaaggccaaggaggcgcgcaaggctgcgcacagtggcgcaccaatcatccttggaagcttaatggggcaggccgtttccactcggccactgttgaatgatgctgagttggcagcgttgaaagctgcgattgatccggtttcgcttggcttagtagggctgtcgattggcagcaggggcgaattggtggacgcgaaaggacggacgatccacaagccgggtttccgcgacgcgatcgaaaaagttctggctgtgcagctgaagtga

SEQ ID NO: 363107 - DNA, 1383 bp, Pseudomonas aeruginosa
atgccagctgtcttcgaatcgtctcatcgtgagttcagagcctttgtggctgattcgacaggaattcagatcaccctgccggttatcgtcaccgagcatggcgtcttggatcagttcgctcgatacatgtatctgaaccggatcaaaagtcgttcctggcaagagtcagcgactttcgcgttgcagttgctgttggaatacatggaggccaaccagggcttctatgacacgccgagggcgctgttcacagcgttctcaggcgcgctttatgccggtacggtgtccaatggctgcgacccttctggcctgtggtggctgccgaggcaatctgacgatgccagcaagttgataggccatgtcacgcgattcagcgattggctggctgtcgttaacgaggacgctaagcagcaactcaacccatggcagcaggcgactcggcacgaggagcgcctgaattgggcggcctattcgcaccgcagggataacgcctttctttcacacctctggcgttccacgtcgctgacgaagcagtccagggccgtgcgctcaaggatgatgcctgttgaacgacaggcgccgaccaaggcattttcagaggaacacttcgaactgctggtgtgcgagggtttccgcaggcggtcacgagattcacgcggttctacagaccttcgaaatgtcctgattacctacctcatgcactacggtggattgaggctgtctgaagcgctctcgctttggagtgatgacgttagcttagaggccggggaggtcatcgtccgtatttatcaccctgaatacgggctggcacctgacggcaaggccaaccgcgctgcttaccttcaaagccaatacggcctgcaaccccgcaaccgactggtcaaagcgaccgacccgctgttcctcgggtggaagaacggcctgattaccgacccgcatcgacgctgtttcgaggtgttcttttatcccaatgaagccgggcagatttttgcagagttgtggcgtgactatcacctgaaacagcggttaaagccgaaggccagcgaaggtcacccctatgcctttaccaaccgcgacggcaagccttactcgcaccggatgttccgcaaggctcacaagttgggtattgagaggatcgggttagtgtacgagaagatcgagggcacaaccccgcatggccaccgtcatgcctatgggcagcgactggctcgcgatggcgccgacccgctgttgatcaagaacgccatgcaccatgcgtcgatcacatcgagtcagacctacacgcagcccacgacgatgcagatgcgccagagtctccgagacctggaggagcggctgcgcttgcagcatgcaaatgattccaacgcccttttgatcaaggactga

SEQ ID NO: 363108 - DNA, 1191 bp, Pseudomonas aeruginosa
atgaagaacgtagcgaacctggaccgcacagccaatagttcagccactaagcaaagtggccggacaaccggcaacgcccgtagcctgagcttcttgggcggcgaagcactggtttacgctaccaacctgatccgtgactgggaggcccagctcctccacttggacgggctgaagaaaaaaagcgtcgagtgccactcctccaatcttttccgcttgctgaaccacgctcacgtagccccttgggaactcaagcccgtccacgtcactcgcttcttcgagtcgcgcatgagcaaggacggccagcaactggctccctccacggtggccgtctactgtgctggttggcgttccttccaggcctatatgctcgacatggagcggatcaacgaaatccaggcaaccttcaaggttcgcccgatcaagttcgtcactgaggaaaacggcatcgccgtcaagcggcacaaatcgaatgccgcccggcccaaggcctgggctctgacacccgttgaaattgatgctatcgatcaacaatttatcttcgacataaaggctgcacatgcggcccgtagcaagtcgctactaccgctgcagcgtgaccgtgtgatgtttcacctcgcaatccattttgctctgcgcgtatccgaactggtcactattcagctgcatgacttcaaggccagccacgaccccagaatgaaggccttccagaactttggaacgctcaccatcaccgggaaaaatgacgctacaggcactatccccatgcgtgagcctgagatctatgaactgctcatgtggtatctggcgaacatacggcaaaaaatcctcctccgccggaagggctctggaaacggactttgccactacgacgacaaagagtatgcgactgccaacctcctattcccaagcgagcgtggtggcgtcatcgaccccaacgctttccgcaaccgcctgaacagcttggcagtcaaggcaggtctcacgcaccacaaactgacgccacacattctcagacataccggctgcacgaacatggtcggcgtattctccgcagaagtagcgcaaaaatacatgagacacaaaaatctctatacaacactggggtactaccacccagcgccgctggatgccgctaacgaggcgaatgccccgcttacgttgtttagcagcttttttgatgacgaggattga

SEQ ID NO: 363109 - DNA, 474 bp, Pseudomonas aeruginosa
atgaagatcaagctgggtaatcgcctggaagtcctgatgaaagactcaggcataaacaccttcgaggaaatggctcagcggctcactgaaaaccaaggatggccaatcaccagaaccgctctcagccgaaagttccgatccgacgatgtatcgctgagcctttcgatgatagaagcgatctgcaatgagttgcagtgccttcctggagatctgtttgaaaccaatgtcaccgaggcctcggaggattttgttgaagagcttagaagccgcctgcaaccgttcagatacggcgtcattcgactccaaaggctaggcagcgacaccacggaggagagacccgccgatacagccatctccacatcgaaggaaggcaagcgcaccaagtcaatccgtgggaaacagcccgaaaatctagaagacattgtaggcccgaaggtatcgcacctccatgcaggaaaaatcaagaacgactaa

SEQ ID NO: 363110 - DNA, 1335 bp, Pseudomonas aeruginosa
atgcaggaaaaatcaagaacgactaagcgtccgccgcttatcgtggactgcaagctttgcggtggtcgctttcagcgagcggcgtggcacggccctgcccctgaccactgcatgcgctccaatgtagaacgcccaagcgaatgctggggtaatcaacctgacggcagcctgctgaaattgtgtgtagagtctctgcgctcccggaaacactcggggcatgaaatgatgcacttcatcagcctactggccggtcttggccacgcacaggatcagtctgaaaccaaagttcaagactatcttgcctcgctgctccccgaagagcggcacatcttgatcaaccgagcatcaacagagctgtcggtatatctggcaaagcagatttccctcttgccacccacagaaataagagccccacttagggacagatcaatttctgaagagcttcccgaagggctccgaggaaaacttaacgcctacaaaaaaaacctcgaaagacgctataaaattctcacagagaaaggccactctcgttctgaaaagtatgcagccagagccttgggaggaccgatacgcctcgcacattaccttcattccaatggcgtcaccgattgggatgcggtcaaaaaacgagacatcgtggtattttttgaaaaatgctccaaagaagaaatcagaccgatactacgattctatcgattcattgacacccgacaaaagttccaagatggccgaggcaggaaaaagtcaaagccttccaccaagccaccttacaactttcagctgatgatgcccgaagagctttctcgatttctcgcagagatccgctcacgtacaacggacgccgagtaccttgctgcatggcttgtgtgtcgaatgggaatgacagctaccgcagccttgaagctcaaccttgactgcgttgaaatgcacgacgatggccacgtcgtgatcaagcctgctcaggcttggctttccgtccccaagagcatcgaaaagatactccttggagtcctttctgaaataaagccagactgggcagaaaccccatccaaagagcgctcactgataaagctgtttgccagacacattccggcacaagcaaatttcattgacaggacgttccaaggaaaaacacgaatcctgcgtaactcagccattttctcggcaatgatgcgtggacaccttgatcgcataacactgcaccacgccatgggcgtttcgatgccgcacatcgtgcaactggaaaagctgctgtccaccgacattcattgccgccttgaccctgagttcatcaagaagcgtaacaagcacatcctgggcacagccgatgactga

SEQ ID NO: 363111 - DNA, 306 bp, Pseudomonas aeruginosa
atgactgacgcaacatggttcgtctacatgctggaatgtcgtagcaagcggatctatacaggggtcaccccctgcctggatcagcgcatcctggcccaccagaagggtcagggcgcgctgttcacaaagctcgactcaccgcaagggctcatcgccgccaagccctttcccagccagcgagaggcgcgtcaggtggaactacaggtcaaacgtctccccgcagcttacaagcggaccttggcccgcctctggtcagagcagtacccgatcgacgagatcgcccagaagctttttccgccgcagtag

SEQ ID NO: 363112 - DNA, 792 bp, Pseudomonas aeruginosa
atgccaatcctttgctatgaaatcacgggttcggcatccccgaacccgcgcagtacaactggggccgaggacggccagctctccgcagttctcaaggttgatcacgaagcagccaccgcgcaggtctactctgagcttgtggcgaatcgcctggcgatgtttcttggcattcctgtggttgttggcgtgcctgcgcgtgctgccacggatgagcgcctgcgctttgctgccttgcgcgcagcggaagccagcctgaacgtgtacgacttcaccgatgacgatcacgctgacccggatgcggacgagtatgccgaggtggttttacctgagggcatgcacacccagtctgggcatgcctacgccatcaagagcctatgcgagaagtacccgttggagactgcacagattgccgtgttcgacctctggatcggcaatgaagatcgagcgctcaacttcaaggccgagctgtccaatcaggaccgtggagtcattttcgcactggatcagggatcgtctctgctggcgtgtcgccgaggaattgacgagtctctcgtctgcctggagcgcgacgatcagccgactttccatccattccagaagctggtcaacgcccgttactgcggtgcgatggtcgagcggatcatgtccatgccggactgggcgatcctatctgcaacgacctatgacgacaccgtaggcaacgtgatgctgcatgagcagttcgccacctatgaagtgctactgcggcggaaaaagcttctgggcgatctcgtcgatcgggtactgctctga

SEQ ID NO: 363113 - DNA, 3117 bp, Pseudomonas aeruginosa
atgaacgaaaaccatctggagcaagcgtgcctggggtggctggagagcctggggttctccagcctgaaaggagaagtggtctcccctggcggcacggaaggcgggcgcgagaagtattccgaggtggtgctgcaaaaccgcctgcgcgatgccatcgaaaggttgaaccctggggtcagcagtgcggaagctgatgctgcggtatccaggttggccctctacggcgcgcagtcgttggtcgatggcaacaagcaggtctacgactggatacgcaatggcgtgccagtagagcgcattgagagtgatgggacacgaacctttccactggtgcgggtgatcgatttcgccggcccgaacgatctgctggccgttcagcagttcactgtgcatggccagcaggtcaggcggccggacatcgttctgttcgtgaatggcctgccgctggtggtgatcgagctgaagaatccggccgatccgaacgccgatatcctgtcggccttcaatcagattcagacctacaagaccgacatcccgcagctgttctacttcaacctgctcaacatcatttccgatggtgttgtggcccgttacggctcgctcacggctgatttcaaccgcttctcgcgctggcggctgctcggtgatgaagtcgcgcccaagtcgcttctggagctggaagtgatggtgcggggcctgctcaacgccgagacgctgatgaccttcttccggggcttcgtcgcctatggtggcaccgatggtggcgcgtccttcaagatcattgcccagtggcaccagtacagcggtgtactcaaggccgtagagcgtgcagtcggcgcgctgctggagcgccatgatggcaagggcggtgtgatctggtttacccagggctccggtaagtcgctgctggcactgttctatgtgatggcgctgcgcgacaggccggagttcaagaaccccacagtcgtgctggtaaccgaccgtaacgacctggatgggcaactcttcgagaccttcgctgactgtaggtggtctctgcgagctacgcccaagcaggccgatagccgcgacgagctgcgcgatatgctttcgtctgtcgaggctggtggcgtcttcttcaccacgatcaacaagtttgccccggagcgcggtcagaccagcgttcccgagctgtgcggacgctccaacgtgatcgtgatcgctgacgaggcgcaccgtacccagtacggcttcaaggcctcgctggataccaagagcggcaccaccaagtacggcctggccaagtacatgcgcgatgcgctgcccaaggccatttacctgggcatgaccggcacccccgtcagcgacgatgaccgcgacaccgaagaggtgttcggtagctgcgttgatatctacgacatgatcgctgcccaggaagacgaggccgtcgttccggtcagctacgagtcgcggatcatcgagctgcgcttcaacgaggccgaaaagcaggatctcttggaggaattcctggaggcgaccgagacagaggacgagagcgagcagaacaagacggccagccgcctgacacggctggaagcactggccatggccgatggccggctcacaaccttggctgaggatttcgtcgcgcactgggaggctcgcaaggaggccattgccggcaaggccatggtggttgccatctcgcgtgaggcggccgttcgcctgttcgaggaaatcgtggagctgcgtcccgagtgggagggcaatgacctcaactccgggcggatcaagatcatcatgactggctcctctgctgatcccgaggagtaccagaagcaccggacgaacaaagctcagcgaaagcagctggaaaagcgcttcaaggacgagaatgaccccttggaaatcgtcattgtccgcgacatgtggctgaccggcttcgatgctccgcccgtccacacgctgtacgttgacaagccgatgcagggacatggactgatgcaggccatcgctcgtaccaaccgtatctggaaggacaagccgggtggcttggtggtggactacatcggcatcgggcatgagctgcgcgaggccatcaggcgttacaccaaggctactggcgatgaccgcgagcctgtcgatatcagcggccaggccctcaaaatcctgctcgacaccctggacgtgatccgccgcgagttcttcgccaagttcgactacagcggctttgaggaccctctgaaggccctggcgctgcttggcggcgcaatggagcatctgatcaagctcaacccggaagctgacgagaagggccgcaacaagggcgtgcgggcctatctggatcaggtcgtcaagctcaccaaggcgcaggccctggctggcacatcggcgcaggcgatggcggtacgcgaagagatcgccttcttccaggctgtgcgtgtttgcctgatgaagctgacccgctccggtgagacccgctcccaactggaaaaggaggctgctctgcgtcagctcgtggccaaaggggtgctggtcgatggggtcaaggacatcttcgccacgctgggcatgagcaaacctgacatctcgctgttggacgaggatttcctagcgcagattcggaaaatgccaaccaagaacttggccgctgagctgctgagccgcttggtggccgatcaggtcaaggcgcgggggcagaagaacgctacccaggcgaagcagttcaccaagcgcctggaagaggcgatcaaccgctaccagacccgtggtctgacgaccgccgaagtcatcgaggagctgatcaagctcgcccaagagatcaactcggccaagcccccggagggcctgagcgaggaagagttcgcgttctaccaggcgctttccgagaacgagtcggcggttcgcgagctggggcatccggtgttgaaagcactggccctggagctaaccgacaagctgcggaagtcggccacgatcaactggcagaaccgccagtcggcacgagcgagaatgctggcgatggtcaaggtactgctggccaagcatcgctacccgccggacaaggcgcttgaggcgaccgagaaagtgattgcgcaggctgagctgttggccgatgcctgggcattcgagcatccctga

SEQ ID NO: 363114 - DNA, 936 bp, Pseudomonas aeruginosa
atgcataactaccctctccttgatgtggaaacagatttgctgctccacgagggagatctgctcgtggagctggctcgccggccaggagtcgagatccttccactgctcaaggggcggcttgccggcctgctcaagccagatatcacctcgatcagcattgccgacgatggcctggtcagggtgctgagcactgagctggatctcagcgagtgtggcggcgaaccaccgttcgcaagcatgcggcctgtacagcgcacagccctgaacctcttcgaggcggtgacggtgccgcgcagcgtgagagaggccattgacccagccccaggcctcagccccgtcatgctcgaatgggccgtgcaggcctgcctggagccttccgtggccatgtcgttgcgactggtcgatgagtcggccttgccgctgctggaggcttatagcgcagcggatgaactggaggctgacctggatgagcacaaaacagccgtcaagctgctgctcgatatgggcaatgcctttgccgggctgctgctgcccacgctggatcgcaaagtcatcgaggcctcgattcagaagttgagcggaatgccgccctttggcttcgtagacggctgtgattcctactgggtggaaatctgttcgctcgacgcgggcttcatgttcgcagagcaggtcgctgccgatgtgtgggcaaaggtcgaagaagcacttgcggagctaagcgcagaagagcgcttggcgctcctgctgaccaaacaggactgcgatgactggctgcatgaccgtatcggtaacctaagcacgccggagtacatccagctccttgagccgtgcctggataccgaacggctgctgagcgatctggttgagggcgttctccatgaagctgccggccagggggctctgcgggcctctgggcaaggcgaattgttttcctag

SEQ ID NO: 363115 - DNA, 1299 bp, Pseudomonas aeruginosa
atgaagaaatccaataagctccaagatgtcgttcagctaataagggggactacctacaaaagtgctttgcttggcactaaggggccggtattgcttggtcttggtagcattcagcgaaacggagggtttcgagatgattcgctgaagaattacggcggagagtctaggcccaacatgcttttgcgcccaggcgatatgtatgtgtctttgaaggatgtaactcaatctggggatttgcttggagcagttgccagagttcctgagcatgtccgtctggggcgattgacacaggatacggtgaagctcgatattgttgatttcgagtatccgagggcgctgctgtactggagtttaagggcgcctcaatatcgagcttattgccgagaacatgcaacaggaactactaatcttggtttggcgcgcgaagattttctgagctttgatcttcccgaggctactcctgatagagtttctctggccatgctgcttgagtctattgaatccgagataggtattttgcacggaatcaatgaaacgcttgagtccatggctcaggctatcttcaagtcgtggtttgtcgattttgacccggtgcgcgcaaaggctgagggccggcaaccggagcgcattgatgctgctactgccgatatgtttccaaatagcctggaggattctgctattggtaagattcctaaggggtggacggtcggcatgcttggtgatcttgcagatgtctcgcgcaggcaagttcaacctaacgcaatttctgaagatactttttacgtgggtcttgagcatattccgcggaaaacgcttgggcttgatagctggggttcggcggctgggctgggcagtgcgaaatcatgctttgaaaaaggagacattttgtttggaaaactaaggccttatttccataaggtcgtggttgcgcctttttctggggtctgctcgactgatgtaattgtttgtaactccaagtctcatgattattatgggtttgttgtgatgcagctgtttagctgtgagcttgttgcatttgctgataagttatccaatggggcgaaaatgccgcgatcaagctggaaagacttggctggttattttctggcaaagcctcctgctgagctggcgagagctttttcagatactgtaaagcctatgcttgatcaaatagttacaaacattcatcaggctaatagtctctgccagctccgtgatagcctactgccgaagctgattccgggggagcttcgctttcccgaagccgagtctattgtcaggagcgctgtgaatgcataa

SEQ ID NO: 363116 - DNA, 1608 bp, Pseudomonas aeruginosa
atgaccagtgaagagttcaagaagacgctgtgggatacagccaacaagctgcgcggctcggtgtcggcggctgaatacaagtaccccgtgctgggcttggtattcctcaagtatgtgtccgacctgtacgacgctcaggctggggtgatccgggagcgcctggccgacccgtcatcggagctgtacatcgaggacgaggaactgcgcgccgagagcgctgccgtcttcatcgaggacaagaccttcttcactcaggacaacgtgttctgggtgccggcggaggccaagttcagcaagctgctggagaaagcggcggcagccgatttcgcgcagcaactcgacaaggccatggcgctgatcgaggcggagaaccccagccttaaaggcgtgctgtaccgcgagttctcacggctggagctggagcctggcaagctcggcgagctgttccagttgatcgccaagctgaagtttgaccccaagcagcacggcagccgggatgttttcggcgaggtctacgaatacttccttggccagttcgccttgaacgagggtgcccgtgccggcgagttctacacgcccaagagcttggtctccttgctggtggaaatcctcgcgccgttcaagggcaccatctatgacccggcctgcggttccggtggaatgttcgtgcagtcggccaagttcaaggatgcccacgccaagcagcttggctcttcgggtgatctgccgatctatggtcaggagaagatggccgaaacccgccgcctgtgcctgatgaacctggctgtgcatggcctggaaggcaacattggccagacttacggctcgaccttcaccaacgaccagcacaagacgctgcgtgccgactacatcctggccaacccgccgttcaacatctcagattgggaggccgagaagctgcaagacgacccgcgctgggtgcatggcattccgcccaagggcaatgccaactacgcctggctgcagcacatgctggcccgtctctccagtcgcggccgcgccggcatcgtgctggccaatggctcgatgtcttcgcaacaatccggcgagggtgagattcgcaagaacatggtcatccatgacgtggtggagtgcatggtcgccctgccgggacaactgttttccaacacccagattcctgcgtgcctgtggttcctctccagggacaagcgtgtcggcccgaacggcaaggctgatcgcagcaatcagattctcttcattgatgcccgtaaggctgcctcaggccgtatctcgcgtacccaggtcgagttcactgactctgacatggcccgcatcgctcagacctaccaccgctggcgtaataccgtgttcagtgatggcgagccctacgaggatgttgcgggcttctgctattcggctagctatgaggacgtacagaagcacggattcgttctcacccctgggcgttttgtaggctcagaggcggtggctggtgatgatgagccgttcgtggagaagatggatcgtctaaccgcacagcttcttgatcagattgccgagagaaatgctatcgagaaatccattctggatgggctgaagggaatgggttatgaagaaatccaataa

SEQ ID NO: 363117 - DNA, 642 bp, Pseudomonas aeruginosa
atgatcattggctacgcacgagtcagcacccaagaccagaatccgcagctccagctggatgcgctcggagcggccggctgtgagcaggtgtttcatgagaaggccaccggcaagctgcgcgagcgtgtcgagctgacagcctgtctgcgatccatgcgcaagggcgataccctggtggtctggaagctcgaccggcttgcccggtcgctcaaggatctggtcgagatcatccatgacctcgataagcgtgagatcggcttccgctctctcaccgagtcgatagacacgaccagcgcaggcggtcggctggtgttccacctgttcggtgctctggccgagttcgagcatgcgctgattcaggagcgcaccaaggccggactggcagcggctcgcgccaggggacgcaagggaggcagaaagccgtccctctccccgaccgatgtccgcaaggccgctgccatgctggcagacccgttgattaccaagaccgaggttgccagccactttggcgtctctcgcgtcaccctcaatgccgccctggcccgtgatggctacagcggacttcctggcaccgacagcggcgcagcagggaaaaccacgaaacgcagaagcaaggcaaaggatcaagctgatgaccagtga

SEQ ID NO: 363118 - DNA, 957 bp, Pseudomonas aeruginosa
atggccttcaaccagatccagttccagcacggcatgtcgattccggaattccttcgtagattcggcactgaggcacagtgcgccgaagcgatcaaggccgcgcgctggcctgatggatttcgctgtccgcgctgcgccagcagtgatcactatgtggtcggccacggcgcccgcaagctcttccagtgcaatggctgtcggcatcagacctccctgaccgcaggcagtctcatggcgcacaccaaactgcccctgacgacctggttcttggccatctacctcatcagtcaggctaagacagggctgtcggccctggcgctcaagcgtcagcttggtgtgagttaccccacggcctggctgttgcatcagaagatcaaccgggccatggccgcgcaagacgccacccaccaactcagcggcacggtgcagcttgatgacgcttacctcggaggcgagcgtacaggcggcaaagtcggtcgcggctccgagaacaaggttccctttgtcgcggcggtctcggtcaatgatcacgggcatccgattttcatcaagctcaatgtggtcagagggttcacatccgaagcgatcagcaagtgggccaagtccaatctggcaccgggcaccagcgtgcacagcgatggtttggcctgcttcagtgcggtggccgatgccggttgccttcaccttccgatggtggtcggcggcctcaagccgcgcgacctgcccagcttcaagtgggtcaacaccgtgcttggcaatctcaagaccacgttggccggagcatttcatgccctgaactaccgcaagtacgccgagcactacctcgcaggcttcgcctacaggttcaaccgccgcttcgatttgcggggcctggtcgcaagcctcatcgtcgatgtcgtgagagcaaagcccatccaggaaaaggcggtcaggtcgcatgctgagacacgtttctaa

SEQ ID NO: 363119 - DNA, 183 bp, Pseudomonas aeruginosa
gtgttcaccgacaaggcctcgggcaaggacacccagcgtccccaactcgaagcgctgctgagcttcgtccgcgagggcgacaccgtggtggtgcacagcatggatcgcctggcccgcaacctcgatgacttgcgccacctggtgcagaagctgacccagcgcggtgtgcgttcgagttcctga

SEQ ID NO: 363120 - DNA, 255 bp, Pseudomonas aeruginosa
atggccaacctgatgctttcggtgatgggggccttcgccgagttcgagcgtgcattgatccgcgagcggcaacgcgagggcatcgccctggccaggcagcgtggcgcgtaccggggccgcaaaaaggccctgtccgacgagcaggcagctaccttgtggatgcgggcagcggccggtgagcccaaggctcagctcgcccgcgcgttcaacatcagccggcagaccctctaccagtacctccgcacgaacgagtga

SEQ ID NO: 363121 - DNA, 696 bp, Pseudomonas aeruginosa
gtgcctcacctatcgaggctcctgcaagaggccgatagagccggattcgccgatgacgaccagttgttcaacgtcaaccggttctcaccgcactacaagagcaaggtgatgaactccgaccaagtcgaagccatgtaccggaagttgaccgagaaggttggggtgcggatgaccccgcaccgtttccggcacaccctggccaccgacttgatgaaggcacccgagcggaacatccacctcacgaagtgcctgctcaaccactcgaatatccagaccacgatgagctacatcgaggccgactacgatcacatgcgtaccgtgctgcatgctagaagcctggcccaaggcgcgctagagaatatcaggaaggtggattacagcggctccccgcaagcctctgccaaaccgaaaccatgcgggcaacctctcgctcgagtgagtgaagcgccgccaccggaggccaggacagagcctgcagaaccaagggagcacacaccatggacaggcattcagggaggtccaaccgcgtgggaagcagaagcgctaccacagccacctgacacctttgagcaaagcgtgctgttcactctgatggctcaacacttatcgaaccgtgccgcctcggcgtccgcggctcccgctgcaacaagtggaactggtggatggggatctgccgcccgaagcagtctcgcctag

SEQ ID NO: 363122 - DNA, 693 bp, Pseudomonas aeruginosa
gtgcctcacctatcgcggctcctgcaggaggccgatagagccggattcgccgatgacgaccagttgttcaacgtcaaccggttctcaccgcactacacgagcaaggtgatgaactccgaccaggtcgaagccatgtaccggaagttgaccgagaaggttggggtgcggatgaccccgcaccgtttccggcacaccctggccaccgacttgatgaaggcacccgagcggaacatccatctcacgaagtgcctgctcaaccactcgaatatccagaccacgatgagctacatcgaggccgactacgaccacatgcgtgccgtgctgcatgctaggagcctggcccaaggagcgctggagaacgtcaggaaggtggattacagcggctccccgcaagcctctgccaaaccgaagccatgcgggcaacctctcgctcgaatgggtgaagtaccgccgccggaggccaggacagaacctgcagaaccaagggagcacacaccggggacaggcattcagggaggtccaagcgtgcgggaagaagcgctaccacagccacctgacaccttcgaccaaagcatgctgttcactctgatggctcaacacttatcgaaccgtgccgcctcggcatccgcgcctcccgctgcaacaagcggacctggtggatggggatctactgcccgaagcagtctcgcctag

SEQ ID NO: 363123 - DNA, 3363 bp, Pseudomonas aeruginosa; identical to SEQ ID NO: 341661

SEQ ID NO: 363124 - DNA, 999 bp, Pseudomonas aeruginosa; identical to SEQ ID NO: 327980

SEQ ID NO: 363125 - DNA, 672 bp, Pseudomonas aeruginosa
atggacgtaaacgacgtagtgaaccaagcggaacagatcaatctttaccagaatccggggcagtctatttctggtctctacaaggggttggctaaccagtgctctcccggccagccatttccagaggcagagcttgtggaggcttgggatatccctctcgtgctccatccggagtttgttcctaatggagacgcctctcaactcgataaggaatacggaacgatccttgctgccgagtctgctcagattattctgcttcaactccaaatggctcaagacagggctaaggcgtgcggagaaattacagccttgatcagttctatctcctccaacctcaataccgtcaagagtcgtcatggtgctagctatctgaacttgctgaaacaatcaccgaaccgatacccgactagcgtcggagttgagattatgtcaggtggtagcccaaaccaggattctggaatcgaggtctcttacggtgccaatctcgcccggctaactcaatcacaacttcagtcgatgaacctgcctgccagcctcaaacaactgctaactcagggaatcggtgtgaagctttctcagcctgagtattggcctgcttacaacaatatagccgctggcattcgttatacaaccggaatggcgataacgcttgcctattgggcaacggtttag

SEQ ID NO: 363126 - DNA, 1023 bp, Pseudomonas aeruginosa; identical to SEQ ID NO: 94639

SEQ ID NO: 363127 - DNA, 729 bp, Pseudomonas aeruginosa
atgcaaggccgccaccaggccatagagcatccccgccagcaacgagatatgcgaaccggagatgaccatcagatgcacggtgccggtgtcctggaacatgcgccactcggccgcactcaatcccgagccatcccccagcaccagcgccgccagggcggcgccgcgcccctgtgcgtcgaccgccagcaggcgctggcgccaggcatcgcgccaggcatccaggccgctggccggctgcaggcgttcgcccgccttcaccgtgcccacagcaccgacccgctgcgccaacaaccaggcctcgtagtcgaaacccgccgcgttcaccaggccgcgggggcgtttcagggtcaccgccaggcgccagcgttcgccgcccatcagcggcggcgcgccgcgccagctcaggcgcagacgctcgggaagaagcacgccccgcgcagcgctgacctcctccagccggaagcgcgtgacgccctcgccgctcgccggcagatcgaccacacgcccctccagccaaagggtgcgaccatccagctcggcggccaggcgtccgtccagggcgacttgcgccgagccgcaggcccaggcgaacccgagcaggaacaaccccagccagtacagccggccgaacagcagcaacagtccggcggcggccatgcccagcagccagccgaccgacggcaattccgccaggaagcgcagggccagcagccccgcggcgagggctga

SEQ ID NO: 363128 - DNA, 183 bp, Pseudomonas aeruginosa
atgaccaagtcagcagaaatcgttcttgtggctctggaacaagcccaggccatcatggcgaggtggttcgagcccgaaggcatcagcgccgaacaagcgatcgatgagcttttaccggtactggacaatatccagctgatacgagctcaacgggaactgcgcgaagagttgagcgaggactga

SEQ ID NO: 363129 - DNA, 990 bp, Pseudomonas aeruginosa
gtgtcgacgattcatccgcgcctgaatgaccagggaaagcccgtcgagatcagaactcccagcatcgcttcctccgaagacgcgtggctggatgcctctcaaaccgcaatggcactaccagcaggttgggcgccgggcgaactaagtggattgcccctcacttcatggaacaatccgccatcggactcgctggactggaacaccttgagtggtatcaatccatccattgctgagccgccattggccagcactaacggcaaaaaacttgcagctggggcggttgtcgtcgaaccagacggtcgcgtttggctagtgcaccccaccaacggattcggaggttatgccgcaacattcccgaaggggcgaattcaggatggactttccgcccaggccacagcgattcgtgaggtgtgggaggagagcggcctgcgagtccgaattcttggctggttgggagattttgaacgcacgacgacgatgacccgtctcttcatggcagagcgggtcggtggatcaccggtagacatgggatgggagtcccaagccgtaagcctctctccgctggccagcttggacgcaatgctcaacgggatcgctgaccagccggtgctggcaacattgaaggctgctcgggacaaatcaaagccggaagaccaaagtacagtgttgaatcacggcggctttctggtaaggacgctccaggccattgatgggttttatgccacttaccatcactggccgactcggttgcaaatggactctggctgtctcaccaacctggtttgccatcacctttctccgcttggcttcttccggctgcaggccgcgctcaagctggaggtcttggatggctcacatctggttgctctggacgagtcaggtcgaacattcgattacaacgagaatggctgggacattcagaataacgccacaacagcccggcagtggcttggtctggatgacttagcgcccagcccttctcacgagtga

SEQ ID NO: 363130 - DNA, 249 bp, Pseudomonas aeruginosa
atggagctctgcacaggggtagggataggtctggtattggttgtcatggcggcggggctggtgtggggggcttggaagctcgctcagccggtccagctgcgccaggagttgcaggtgcagcttgagcgcgtgctcggggcgcacgtggccgtggttatggaaaatcgcgaattgcagtctgccctgcgagccgaggttgcccatgtgcagcagttacagcgccagctgcagctcctgcagtctcactga

SEQ ID NO: 363131 - DNA, 1062 bp, Pseudomonas aeruginosa
atgaatcgagtggaccgtatcaggggctgcctgctggggggcgcggtgggcgatgcgctgggggcgccggtcgagtttctctgctggtcggccatcgaacgcaagtatggccctttcggcatccgcgacctcgacgaggtctatggcgtagtgggcgccattacggacgacacgcagatgatgctattcaccgccgaggggctgctgcgtgcccatgttcgccaggcaatgcgcggcatctgtcatccgccttcggtgattcatcacgcgctgttgcgctggtacctcacccagggcggcgaaccagccacggaggtgggacaagatggctggctgatccagcagcgggcgctctggtcgcgtcgcgcccctggcatgacctgcttgtccgcgctgggcgccagttcgtcattcggtgagctggcgcgcaacaacagtaagggctgtggcggcgtgatgcgggtggcgcctcatgcgttctttccccaagccttcgagctggcggccgagtcggcacacctcacccacggtcatccgaccggctaccttgcggccggcctgtttgccgacatcctggcgcgcctggaacgctcacgttgcacgctggaatgcgccgttgccgaaagcctgggacagtacgggcagctggaggggatggctgagacccgggagtgtgtggagctggcactgtgtctgtaccgcaaggggataagcccgaccccgaaggggatcgctttgctgggtggcggctggacggctgaggaagcactggccatcggcctctggtgcgccctgatggccgaaaactttgagcagggcgtgagttgggcggtcaaccatagtggcgacagcgacagtaccggactcattgccggcaacctgctcggcattcagttgggtgttgccaacatccccgagcggtggctggtggcgctggagctgcgcgacgtgatcgatcgggtagctattgatctcgactgggtaccgcgaacgtatggaggcgaatgcggtgaggctcgttctcatgatgacgaaatctggcagcgctatccggggtggtga

SEQ ID NO: 363132 - DNA, 393 bp, Pseudomonas aeruginosa
atgatgacgaaatctggcagcgctatccggggtggtgagatgaagggcctatctctgttgctctgcgccggaatgctgattggcatggctcacgcggtggatcgtgacctggataacgatggtcgctgggactatgaccggggtggcacggaccgcgacattgataacgacggtcgctgggattacgacaagggggggaccgatcgggatctggataacgacggccgttgggattttggctccagtggcaccgatcgggacgtcgacaacgatcaccgttgggactacgacaagggaggtaccgaccgagacctggacaatgacggccattgggacaacgaccttggcggctcggaccgtgaccaggataacgacagccgttgggatgactga

SEQ ID NO: 363133 - DNA, 2031 bp, Pseudomonas aeruginosa
atggtaatcgctcctctgactctcgtcatcgttgcactgatcgcactagcctttctcgcccttggctggatcgtcggcggtcgtctggcaactagcaaggtagcccgcgcggaggttgaaaccctggctggcttccaatcgcagcaggcgcagcttaatagcgaactggccttgtccaggcagagggaggcgcaggtgcgcaccgagctcggcacggctgtgcagtcccatctgctggccgcgcaacagctcgacgacgtgcgtgcggcggcaaaccaactgggcgtcgacctgagcgctgcccaggcaagacatcacgccgaactggagaggagccaggagaagtcccgtttgctggaggagcagggccggcaggtagtcgagcaggccagtcggcaggaagagatgcagcagcaaatttcggcactgcgtgaacagctcggtatgagccaggagcaggtcagccaattgggagagctgaaggctagcctggcggccctccaaggacgttacgagcaaacccaggtggagctgcagcagcagcgtgagcagctcggccagagcagcgagcaggccgtgcaattggtggaattgaaagaccagtatcgccagctggagcagcgtcaccgcgagatcgaggaagtggtcaaggcacagcgcgagcaactcgggcagagcagcgagcaggctgcgcagctgctggagctgaaagacaagtaccgtcagcttgagcagctcctgcgcgagactgaggaagtcctcaaggtgcaacgcgaacaattggggcaggcgaatgagcagaagctgcaactgggtgagctgcgcgacaagctgcttgcccgtgagcaggaactcggcgatttgcgaggccagttggccaagacccagtccgcgctggcggaaaccatcactgcccgtgacaaggatcgggaggccgccgaggagaagctgcagctgttgcaggaaaacaaggaacagctcaagcaagagttccagaacctggccaaccagatcttcgacagcaagcagcagagcttttccgagcagagtcgacagggcctggatgcactgctgaaacccttcaaggaccagttggaatctttccgtcatcgggtcgatcaagtgcattcggaaaccatcaatggccagagctcgatgaagtccgaactggtcaagctgatcgagctgaatgcgcagatcaccaccgaggcctccaacctcaccaaggcgctcaagggcgataagaagctccagggcacttggggagagcagaaggtagagctgctgctggagcaggccggtttgcgcaaaggcgttgagtaccagcgcgaggccagcttcaagaatgaggatgacgaaaacggccgtccggacttcgtggtgcaactaccggaaggcaagcacatcatcatcgacagcaaggtgtcgctggtggcgtacaccgactacgtcgcggccgaaaccgatgagcagcgtgcggcagcactggcggcccatgtgcaggcgctgcgcaaccatgtgcagtcgctcgccggcaaacgctatcctgagttgaccgggatgaactcgccggatttcgtgttcctcttcatgcctgtcgagccggcctacctgctggcggccgagcacagcccgtcgctgttccagcaggcctatgagcagcgcattgcgattgtcaccgccaccaccttgctgccggtgctgcgcgtggtggccaacctgtggagcatccagcggcagaaccagagcacccttcagttggcccagcaggccagcagcgtctacaacaagttgcgtatcttcgtcgagaagatggaaaagctcggccaccagatcagcactgtgcaaaagacctatgccgacagcttcaacaccttgaccggcccccatgggagcctgacccgcacggtcgacaagttcgtcgacctcggggtcaaggtcgtcaagcgtctgccagcctcagtggtgggagcggatgatgactcggtaggggagggtgatgcattggccctggaggaggttgccgaatga

SEQ ID NO: 363134 - DNA, 342 bp, Pseudomonas aeruginosa
gtgcacatctgggattacccggatagcgacggacatttgggcgccacggcttgtatcgtcgtgccggcattgctgccctggtacgagcagtgtggcgattggacgccgctggcctggtggatccacgacaacctgccgtatgccagtcagtactggttccccaagctggcggcgttcaacctgcgctggagcgccaacccagcgacccggcagagtattggcatctatgtcgccaatccgcacaccggcgacaagaaggcactggtcaaggacggcatcgccacgctgactgtgcagcagcggcagcagatcgtcgccccctggctcgccagcctcgcctaa

SEQ ID NO: 363135 - DNA, 603 bp, Pseudomonas aeruginosa
atgttaagtcaacgggccagagacgagttagcaaatttcgaacatgcgatctgttggctggtgaatacaattcaacatgagaaaagtacatctcggttgcatccagaaacctctcgcactagacatgcttgcgccaatgataggccctcggcatacgcatacaggaaggctggcaggctcgcagtggccaacggtgatgatgcaatcttcgaccaacaccaccgaggagttcctggccttttccgccatctgccgctcaagcggcgacagctcccacaacaaacagtgaaaggactagcgatcaaagcagaagactctggttccgcgatgccaggctcaggcatcgtgatcgatcagcaacacaaccgacgccggacgaatgccccgttggtagcaacgttgaacagcatgcgcactgaacgccatctagaacctccagaacttgatccagcctgtttgtgtcggccgtccatggccttgcggagtccttcccggccggcttcctgccaggcacaaagaaaggatatgtcgcgcaatttgacatgcaaatactgggtgcccgcacaggtcaagtattggagcaggtcctgcaccgctaattaa

SEQ ID NO: 363136 - DNA, 1515 bp, Pseudomonas aeruginosa
  misc_feature (1494)..(1503): n is a, c, g, or t
atgactgcaatgaataccgtgcagctggtgccatttgccctgaaagatgctccggcgctgattgaaactgtgttccccgcgcagaaggtgtccttcgaagcgcagcgtgagcgcaaagcaggcgcaggtcaaaccctgacggcgctgggctcatactggaaggggcgcaaaccgctgatcctggtgcgggccataatccttggcagtctgctaccggcgaccgaagaggcagataaagatcttgagctgttcgagaggttgatggcgttcgacatccaaggcctcggccgacgggcggtcgaccaggccgcgctcaagccggcggacatcgccaagatgatcaccctgaagaatccctgggactactttgacttcaagattgtcgtcggcgcccctctggacgagcaggacgtggcgatctggtggttccctctggacgtggcggagaagggactccgtatcaactggaaacgtgggctcagcgatgaagctaaggcggacctgtatgcacaggctctcgccacccttcctacctacgaggagcggtcgctgctgtgcaagcgccccgaagaggtggatcaagagtttctgctccagcccgtttggccgctggtaaacgagcgtctggggcgatatgggatcaacgcgcattccatgggtcaattggtcgagcagttgggcatcctgcgttacggtcatcgcccgcgagtgggagatacttttgcaggcggggggtcgattcctttcgaggctgcccgaatgggttgcgacgcctacgcctccgatcttaatccgattgcctgtatgttgacatggggagcaatcaatattgttggggcggcccctgatattcgtcgcgagattgagactgctcagcgcaaagtggctgaagcagtagatcgagaggtctctgctttaggtatcgagcatgatgagaaagggaatcgagcaaaagtttatttgtactgcatggaagttcgttgtcccgatactggctggatgatccctttggctccgaactgggtcatctcaatgcagcgtaatgtcgtagccaagctggttccgaactgcgagggtaaaaggtttgacatcgatatagtctccggtgttagtcaggatgagatggagaaggcggcacaaggaactgttcaaggtagctacgtagtctatgaggtaaatggtaaggtttataggaactccataaagactctgcggggtgattatcgaaatgaattcggtgagaaagcaaatagactgaggtcgtggtctgtatccgatttcaagcctcggagtgatgatgttttccaagagagattgtactgtatacagtggataacaaaggggacattagaaaaacctaggaaagagacatttttttccaaggtcaaccaacaggatctagatcgagaaagaaaagttgaggacatcgtaagtgaaaatttgagtgagtggcaggcgcgcgggtttgtaccggatatggagattgagccgggnnnnnnnnnnatacaatactga

SEQ ID NO: 363137 - DNA, 792 bp, Pseudomonas aeruginosa
atgctgcgcaagcggccagtgggcgaaaaggtgggtttcaaacagcgcatcctgccagccgtacgcaaggaagtggccgagcagattgagcagatgatgcatctcaacgacgaagcgaaggcccgcgtgggtgaaccggtgttcaacgacgccgacctgcagatggctggctacgctgcagccctgaaagtgctgactgcttacaccaaaattggcgagatcgatgtcaccacctttgccctgcgccctcgtgtcaagggcgaggtcactgtagtggatgagatcgtccagcaagcatcggaagctgccaacggtctcttggtacctgagggtgtgtcaccagatacttggcaatccattggaggggtgcagcgcttctacctccgcatgctagatatggagtccgttggggcatttaagctggataactaccataacttcgctcgggctttccatgtgaaggatatgaacaagcttatggcaagcctttccgctaacaatgcacgtttgaagcaagtgcaagagttctcttcgcgtgaactaaccgacagcacggagatcggaccaacctggctggggcatttgatcatctccatccagcaactgatggctgaggtcgagccgcagactgtagtcaaaacgctgatggaagacctgcccgactacctcgaaattcgtccgaagctgattgacctgacccgttttctggagagcaaatcccgcagtgaagcagtgcgggcggcggccgaagtgctggcttcgcgcatgcagacccagcgcttggactcctga

SEQ ID NO: 363138 - DNA, 132 bp, Pseudomonas aeruginosa
atgaagaatctatttgcggtcatcggcattattgttgtcgccaagaaggggtatgaactttatcgcgagtactctgagatgaagcgcgagagggaggaaaagacagcgaatcaagcttgtccatcaggataa

SEQ ID NO: 363139 - DNA, 1707 bp, Pseudomonas aeruginosa
atgcttgcaagccagaaagagttcgccacttacttgaaaaaaatgcaggggctgctcgatggtcaggcgttttcattcgatcaggcgttgcttccaaaagtgatggagaccgagctggtggttcccgtaatcggggctttcagcgcgggtaagagcacgttgttgaatgcgctgatgggcaatgaaatcttgccggtgggcattgcgccggaaacagaactggcgaccgagctgcgctattccgctgagccctatctgctggcaatcaagcccgatggtgtgcaggaacgcctgcctgtcgacgcgttgagttcgatcaatcgtcgctccaacgagttttcgcatttgcgcttgtacttggacagcgaggcattgaaaaccattgcaccgctggtgctggtcgacatgcccgggttcggttcttctctggaaaaccacaacaaggcaattgcttactacttgccacgcggtgtgcactttgtagtgctgactagtatcgaagacggcaatatcacgcagtcgatgctgcgcaaactcgacgagctcaaaacctacaacaccgagttcaccttcctgctgagcaagtgcaacctgcgcgctgccgatcaagtggaagaagtgcaggcgtacgttgatgatcagcttggggtgtatttcggccagcactaccgcagccttaccctcggcaatcggggcggcgaggagctgaaaaatgcgctggccgcattgcagcccgacgcattgttctcgcgcttgttcattgacgttctcaaggaccagaacttcgaagtgctagcgcagatcaacctagcgctcagcctactgaaaaaggacaaggccgaaagtgaacaggccgcacgtgcgctcgaacaggccctgcaaaaactgctggatcaacgcagggatgtggagtcggacctgaaggagcgctactccgggaaaatgctcgatcgtagtctgcgcagcctggaaaacgcactcaatgagtctctggaagaactggtcacgctgggctgcagcaaacaaacgagcgccctgtcgaacgccctttccgacattattcgcagtagcctggccagcaccatcaaggctgaagtgcaggacatctccaccagcatggtcgaccggattgccagtaacctgagtgccaccagcggccagatggccatgctggacctcaatggcaactggagcgaagaactttccaacaaggtcaagttttcgctggagcgcaccaccgaaatgctcagcgattggtccacgcgcttgagcagtcgggtcgagagcgacaagaacaatggcgtcatgctctaccgcagcctttcaaccgtgctcgccgtcacgaccaccgtggtcaatcccttggttgagctggcaatcatcttcctgcctgagatactcaggatgctcaatggcggcggcaatgagcgcgagatgtaccgtcagaagctcactggcgaagtgttccccaacatcaaggcggaactgcgcgggaagattccggcaatcattgacgaacagctcagcgccatgctgaagaaaatcggtgacagctttgaggagcagatcgccaagcaaaaacatgtggtcgacaccattgcacaggaaaacctgcagcgcgaagccgagatcggcgaaaagagttccaccctggagatccttgccagtgcactaaaagccgctgcaaacgaacacctgtataagtaa

SEQ ID NO: 363140 - DNA, 2244 bp, Pseudomonas aeruginosa
atgaattaccagacactcgttgatttcagcgaacgcctgcacgcattggtaggcagtaatcaggatctgtttgcgcgggaaattgagcagttcaagcgaatgaacggcatcgacgagccgcaacaactcgcgcaggcatgccaggcactgcaggaccagaaccggctgatgaatatcggtatcgtcggccgcgtaaaggctggcaagtcgtccttgctcaacgcgcttatcttcgatggcgagccgatcttgcccaaagccgcgacgcccatgaccgctgcgctgaccacgatcacctggggcgaagtgttccaggccaaggtcgagttctacagcgaaacggacatcgccgcgatcaggttcaagtccgatcagttcgagcagcggctagccacacgcaagcgtgagtgcctggaagaactggtgaagcggcgcagcgcccaggccaatggcgcgcccctcgatatgcagcagctgacgcagatggccgataaaaaggccctgagcgagttgcaacgcgaggagggcctgttcgcggcacacgaccagtaccagcgcatgaagagctccggtctcgacgcggccacgctgcatttgcaaagtgagatccgggccagtaacccgaaggagttggccgatcgtttgcacaactacgtaggtgccaacggcacgttcatgccgttcaccaagacagtgcatgtcgccatgccactcgaggaactccgcaatatctgcatcatcgacacccctggcatgaacgacccggtgcaatcgcgcgaagaacgcaccgtcgaactgctgaaaacctgcgacgtggtgttcatcgtcagcccggccgggcagttcctcaatgaacaagacctcgaggtgatgggccgcattacccagaaggaaggcattcaggaactggtgctggtggccagtcagatcgacacgcaactgtacggcagcgaaaaacgcgcgcgcctgaacgatgccgtggaggccatccgctcccaactttcgtcacgggcgcaaagtaccctcacggaccttaagttgagtagcccggaggtgggttctgtattcgataacctcatcagctcggtgcaccgcaacctgctgcacagttccggcttgtgccacagcctcaatcgtcgcttcgacgcgcccgacacctgggattccaacgagcaggtaacctgggaaaacctgaggaccgattacccggattacttctcgcgcgataaccaggcgctgacattgaacagtctggacagcctggccaatatcgacgcggtcaaaatcttgctcgctcaggttcgtgagaagaaagccgaaatcacccgcgagaaaatcaccaacctgctgctgcgcaaacagaagaatctggaggcatttaaggcgctgatcatcaacctcgcgcgtaaccagatcctgcagattcagaatgctaatgtcgatcaactggatgaacagcttgtttcgctggagtcgaaacgattgagtctttcgctggagctggatgtcagcttcaagtacacgatgctcgactaccgccagaagttgcgcgacgacatgcgcaagaaggctgctcagctactacgcgaaacccagaccactatccagtcggcagaaagcactttcagcgaaaccattaccgtcgacaacgatgggcttggcagttggttcgcccggaaactttggggtggcggcaccacggaaaaaacagtcgtccgcgccaagatcatcagtagccacgtcgtgtccacgatcaacgagttcatgaacgacattcaggatgagttaggttccacggttgaacactctcatcgcggattgaatgaagaactggcccgaaccctcacgcccaagatacgtgaagtgcttgagcaagatgccaacgcgcaaatgatcaagctcgcaattctttcgatcattcaatctattccagacgacgacttcgacctgagcatccccttgcctgacagcctgaagagtaacggcacgctcaagggctacgaagctgaacagttcaaagacgcagccgatgactttatcggttcgttgggcagcaaggtcaaaagcaaaatcagttcgttcatcaacaatgtggagcgcagaacacctgccaccatttccgactccttcgtggatgaggtccaacgcaggatcaatgcgctcaaggatcaggtcaacaacgcggcacaaacgatcgacgggctcgaacgcctggtgcgcaagactgaagaggtcaccttgtga

SEQ ID NO: 363141 - DNA, 2058 bp, Pseudomonas aeruginosa
gtgagcaacccgccgcgcatcaatgaacaggcattgtcgacgctgaagtcgatctcacggttctggcagttcaaacgcaagcaattggcggctgaacttcaggggcatctggtcgatgcccagcagcagctcgatagcttgttcagcaccagccagcagttgaccgcacaatgcgctagccagagcgacgagatccgctttctgaagtcgcgtaacgactcgctcgtcgatcagttgcaggtcgtaacggccaacatggtttcgaccaccgaagccctcgagcaagagaagagcaagctgcacaaagccatgctcgcgctggcacaggccaagagttacaccagagacttggaggagcgacaggctcaggctctggcccggatcgccgaacttgaagcgagcctggccgatcaccaacagcaacttgccgaaaaggaacagcgcatcggcgagcttcactgcgcgctggccgatgttcgacagcaactcgcagaactgagcgacgccaatcagcagttggcggaccagagcatcgggcaggcaatgcaaatccgcacgctggaggcgcacaacgaggcgctcacggttcagctgcaggcagaacatgccagagctgtagaactggaagaacgtaaggcgcaggcgctggcgcaaatcaccgagcttgaagcgtttctggaggaccacaaaagtcagttgctctccaaggaacagaacgtccaattgctggaaagcctgaccgaacaactaaaggcttctcaccagcacctggaagacaactacgcagatatcaacaggcaacacctgtcgctcagcgagaaattttccctggtgagcaaagtgctggcccagcagccgcccggcaatgtagcgctggccaaattcgccgaattgatcaaccacgattacatggagttcgccagtcgcgaatcgtcgctggccgatgaagcccaggccgtgctggagatgcaggcgatcctcggcgagatgcagatgctcaacaacttcccgagtattgcgggaaagaccctgctgagcatcgccggcggcttcagcagcggcaagtcagcgctcctcaacagcttcatccgcaacccgagcgtgcagttggcaaccggcatcaacccggtgaccgtggtgcccagctacgtcgtgtgttccgaggagacccggatcaagggctattcgtacaacggtggtgccatcgacctggagcctagcctttatgcgtccatgtgccacgaatatgtccaggccttcggcttcgacctacggcgcatcctgcccttcatcagcgtcaaggtgccgatggatccagacctgttcagcaacctgtgcatcatcgatacgccgggttataaccccggcgcatcgggtggggctgcagctgcagaccgtggcactgcagcgtcgctggttaatcaggcatcggccctggtctgggtcatcggcctcgacccggccgggaccatcgaccagtccgacatcgagttcattcagtccacgccattccgcggggagtcgctgtacatagtgttgaacaaggccgatgtgaagcccccggaacaaattctgcagatcatggagcaggttgccgaggacctggctttcgcgggtatcgagtactcaggcatgtgcgcctattcatccgtgcgcaagaaagactacccatccagcggccttacgtttgaccagttcctgcgctcgatcaaccgtaaggtggatgtcgtcgggagggttaccggcaaactcgatgcggtattcgatgcgtacaagcaggctatcaaaaccgacattgcgcagttggaaggtcgcaaagacgagttcaacgctttcaagctcgatgcgctggaaataggtggaacggcgctgtttgaccgaattgatcgagcattcccgctatctgaacagatgctcgattcttcagagctggaaagactgctggatgaatgcgaaagccttcgtcgcaaactcaaggtggccgcccaggaagccttgggggctccgagcaaagctcaaaccgcgcgccacttgagcccgcacgcggggattgcctga

SEQ ID NO: 363142 - DNA, 276 bp, Pseudomonas aeruginosa; identical to SEQ ID NO: 325094

SEQ ID NO: 363143 - DNA, 351 bp, Pseudomonas aeruginosa; identical to SEQ ID NO: 331798

SEQ ID NO: 363144 - DNA, 435 bp, Pseudomonas aeruginosa; identical to SEQ ID NO: 325092

SEQ ID NO: 363145 - DNA, 327 bp, Pseudomonas aeruginosa; identical to SEQ ID NO: 336095

SEQ ID NO: 363146 - DNA, 162 bp, Pseudomonas aeruginosa
atgaacgggcgcggcatcggccttcccgccctgcttccggggcccctgctggccgcgggctgccagagcgggccggacatgctggcggcgccgggggaggtgaagggggcggcgctggcaagcagcggcagtaaaaccaagccagcgacaaccgctcgatag

SEQ ID NO: 363147 - DNA, 891 bp, Pseudomonas aeruginosa
gtgtacaatctgcttgttacggctgccgaaggcgcatgggacatttccgcatacgaatatgaccggacgcggtttcttgagcacacgacagatagcatcaaggcgaaattttccaaccttgatgcaaatgctcaggaagaactgaagtcgctcccgacacttttcacgtacgaaggagacgatgaggttgtgcgggttgggtatatcagaagaataaaagagcgtgggcgaagcatcctggtcgagtatgaattcgatgacagtatccccgcgttcaatttctccaagctgaagtcattgctgacaaagcttgacattggaaggtgggagatgtcgcgcacccactgggccgtaaaggacgaggatctttttgagctgcttgcctcggagggccttgtggatgagagctatgttgctgaaggccgcccgcctggtcgcgttgaagaaatgcgatttcgggtcgcactgtcctttcccggtgagaagcgagattacgtagctgccgtagccgcagaagtgaagaaacgtttggggcgcgatgccgttttctatgacaaggatttcactgcacagctagcacggcccaatctggacaccttgttgcagcgcatctacctcaacaactccgatctggtcgtcgtatttctttgcgcagagtacgagcgtaaggaatggtgtggcctagagtggcgcgccatccgaaatatcatcaagaacaagaacgatcacgcaatcatgttcatgcgcttcgatcatgccgatataagcggcagcttttcgattgatggttacgtagatttggacgagtacacaccgctggaggcagcgcggatggttgtcgaacgagttcgcttgaatgacttgccccccgctgggacctcatgtatctga

SEQ ID NO: 363148 - DNA, 294 bp, Pseudomonas aeruginosa
atgacaacgctcaagccatcgctgcccgatgcgttgcgaaagatcaggaaagcacgtggcctgagccaagaggccttctcggacgtatccagccgcacctatctaagttcgctggagcgcgacctgaaaagcccgacgctgaacaagctcgccgaactgtgcgaagtaatggaagttcacccgctcacgctactgacgttggcgtatgccggcgatagcacgcataaagctgaggatgttctggaacaggtacggcaggaactcaaagaaattctcggagaaggtattggctga

SEQ ID NO: 363149 - DNA, 600 bp, Pseudomonas aeruginosa
atgagtacgatttccacgaccggccctgcgccgcgtcctcgctcgccccgcgcaggtttgcgcgctcgcatcgtgctggcgggcttcgccgctgtcggcctcgctgcgctggcctgggcggcgttcgtgcagccgctaccacgcctgatctacaacccatccgacagcgtggcggtcggctggtatcgcgtgcagccgctcgaccatcgaaccgcctcgctgccacgtcccttgtccgtgggcagcatcgtcctgacccgattgcctgccgacgctgctgcgctcgctgcgcagcgcggctacctgccgacgcacattccgctgctcaagcgcgtgggcgcggtcgcgccgcaacacgtctgcatcctcgccgggcaggtacgcatcgacggcatgccggtggccgccgctgcgctgcctgccgaccggctgggccggccgctgccatcctggccgcattgccgcccgctgaccgaggacgaactgttcctgttgagcgtgaccaatccggcgtcgttcgacagccggtatttcgggccggtcagcgcatccgccctgatcggcgtcgcgcatccggtatggctggagacacgcccatga

SEQ ID NO: 363150 - DNA, 771 bp, Pseudomonas aeruginosa
atgactgctgcccgcaaaggtgcaactcgcgctaccgatatacccgccgacgtgctgcaagccctgtcgcgcggcgagatgcaaagcgccaccttggccgagtgcatggcgcttaaccaggcccaactgatgcgcgtggtctttcccggcctgtcgctcaaggcgctgaaagaagtcgattccgcttgcgaactaggcgttctcaagcggatgggccgcatcggcgccgtgttactggatgcgttgggcaccgacggtatcgaggcctgccggacgcatagcgtcgataccgtgcgcggctgggcctgcttcatgatcggtgcacagccggagctggatctttcggcccgactggccgccatccagccgctggccgacgacgcgcattttggcgtgcgcgaatgggcctggatggcggtgcgcccgcatctggttcaggaactggatgccgccatcgcgcaactggcaacctggacggcgctgccatcggaacgcctgcgccgcttcgccagtgaagccttgcgcccgcgcggtgtgtggtgcgcccacatcgccgtactcaagcagcaaccggaacgagcattgcccatcctctcgccactgcgcgccgatccatccgcctatgtgcaggactcggtggccaactggctcaacgatgccgccaaggatcaaccctattgggtgcgtgagctgtgcgcgcaatggctgcaagagcaagccaacgatgccacgcgccgcatctgccaacgcgctatgcgcaatctgaaataa

SEQ ID NO: 363151 - DNA, 339 bp, Pseudomonas aeruginosa
atgtcgcactacctagtcgaactctatacgcccaatgcggactggaaggcattgaccgccgaacagcgccaggagtttttgggcgccatcggcaccgccatgagcggcttatccagcatgggcgtcgaagttctcacgctcaccgaaaccgagcctggtatagaccggggcagtgaacaccgctttctgggcatctggcgttttcccgacccgcaggcgcgtgatgcgttactgatcggcattaaggccagcggctggtacgagtatttcgaccacgtgaacgcggccggtgcggatggggactttgcccgacactttggtgctttggcaaacgcctga

SEQ ID NO: 363152 - DNA, 624 bp, Pseudomonas aeruginosa
atggattacctgtcacatctgttgaccctgtctggcatcattctcttggcatgcgccagccctgggcctgattttgtcgcggtgacgtcgcatgccttgaatgacaggcgcagcggccttttcgtgggcttgggcattgccagcgccgtgttggtgtgggccgctctggtcatactggggttcggtctgctcgtcaaggagctgctctggctgtacgaggccattcgcatggccggcgccgtgtatctggtgtacctcggcagtcgcatgctgatcggcgttgtcaaagggaagtacgctgaacaggatgttgctgccgtatcccatgtcggaatcggccaagcgtggcgccgaggattcatcgtgggcatcaccaatccaaagacggccactttcttcgccaccttgtttgtgaccttgctgccggtgggggcgccgtcctgggtctatgtcaccgtcattgcgctggtgggcatcgttaccagcctctggctttgcctgctggcgtcgttcttctcggtccgccgtgtccgatccgtctatgcggtcattcgccgcccggtggatgccctgatgggggctgcactggttgcccttggagtgcggatggcaaccagccgctga

SEQ ID NO: 363153 - DNA, 207 bp, Pseudomonas aeruginosa
atgccggtcgggccgaccaccgccatgtgccccacgtcgccgatgtgcgtgacgaagcggaacggcgtcgcgccatcggtgcgggtgacgatggccggcggcccgtcgaggtgcgcgttcttctctggcccggcccacaccgccgacaccggcatcatgtgcgccaggttcagcgtcgagacaatgggctggcgcacgttggcataa

SEQ ID NO: 363154 - DNA, 204 bp, Pseudomonas aeruginosa
atgcgcaaggcgattgatcaagacgtgctgaaagctctggtggaaacccaggcgctgcgcgagtaccgcgccacccgcaaaggcaccggctgggccctggaagcgagactgggagtcttactggctaccgatagagccagtgcggcggtggccatcctgatcacggcaactcgtcaaaggaagacggggtttgtggagcggtaa

SEQ ID NO: 363155 - DNA, 546 bp, Pseudomonas aeruginosa
atgagcatcatcattcacagtgtcgtgcatgacgctgacgactttggcaatcgctacctgcgggcacgcttcagcctggacggttgcgactacgaactggcgctgaacgatcaatcggttgatcgctcgacgctcgagctcgacaacgacacctgcgatgccatcgatgaggccattgcgctgtttatgcatgaccattgcgttgatcccgagccctatgacatcgacgatctgactcgccaggcgatgttgctcggctatcgtctgggcacgcgttatgtgctcgatgtagtgggacttggcttggagctagtggagaacacggatcgcgtgcgcaagcgcgtgcgggtctttaagaaccgtgctgaagcggcgttgtggttgcgtatccagctcgacgataaggggctggaaaaaggcccggtcaagcgcgtcaatgcgaacattcccgaggctctgcatgacgatttcaaagcgctctgcgtgcggcggaaagtcgatatgcaggacgtgctagccacgctgatcatcgagtggatgcgatga

SEQ ID NO: 363156 - DNA, 126 bp, Pseudomonas aeruginosa
atgatgcgtccggacgctaaggtcaaagccgtctacctctatccgaagcccgtcgacttccggaaatccattgatggtctttcggtgtcacggcgggtcgcctcggccttactgacggtggtttaa

SEQ ID NO: 363157 - DNA, 861 bp, Pseudomonas aeruginosa
atgtggttcgatcggattggcgatgtactggccaaccatcatcatgtaggtgtggagtccgtatgcccgctatttattcatatgaatattcccggtcataagcgagtgctagacatcgtcgatgaactacgcatggtcaaatccgagtacgaaatatccagacttgctcatacctgcaatctgctgagtgaggggcatcagctgcttctcgacaactgcaaggttggtgaggtggccttagcgatggagaaactggtgggctcgacgctgatggccaagcagcttagcattctgccctccagcaaccttctctgtacgcagttccatggcgtagtgcaggtgccgtcggttacacatgatccgcacaatttttccaagctgcacgagttaatgactgcaggcgggccgcacgtgaccatcgttgccggttctgccaacggttatggggctgagctggagcgtactttcttcctggactcggttcctgaagcagcgcgcaaaccgtttgatacgatgctttcggcacgtgcgctggcattcgagctcgcggttccgggtgcctcaatgcacgaggtcgatgtgcgggtcaaagagctgatcctggcagcgggctacagcgaggactgcctcttgcatcgcactggtcacagtttcggcgtgactgggcatgaagcgcctttcctggccgaggggtaccaccacgtaattcagcccaatatggttttcagcattgagccagcaatttatctgcgaggtattggagggtttcgcttctccgacacggtgctggttaccgagacaggtaataagagcctgacagccgctccagaaacgcttgagggcttgaccctgaagggctaa

SEQ ID NO: 363158 - DNA, 1233 bp, Pseudomonas aeruginosa
atgcgcggctggtggatcgttctggcctcggcaattgggattggatttagttcggtaatgttcttcacggccggctattcgatgctttccgctgggctgaccgcctcgttcggctggggcgtatctgagctggcactcggtgccagtatctttctcagcgcccaggcgttgggctatcccatcggaggtcgcctgatcgatcgctggggcagcctgcgggtgatccaggttggtctgtttatctttgcactagagctgctgctactaagcctaattggctcgcttactcagttttatttggtgctgttcgtcatgggtctgacgacggtggctacccatacggcgccctacctgcgggtgatttcgctctggtttgatcgcagtcgtggcaaggcgattggcattgctgcctcgggcgctgcgctgggggcggtgtgcttcccgctgctgattcagcatttcattgagtggtccgattggtccgatgcactgttggtcgtggctgctatcgagctttttgtctgcctgccaatcatgtcactgatgatcagggtacctccgacgggtaacgattcggcctttgctgctgagccggtagcaaccgataaggtttgccaaacaaggccgacgggcatgagcctgaagatggcaatgcgcactacagagttctggttaatggtcgtgatatttttcgtggccggtgccggaacgttggcggtcaccaccaatgctgttcagatactgactgcatccggggcgttggacctgagtcttgctgcttcggtaatcgcggtggccgggggggcaacgctgataggccgactgctttttggcttcctgcttgatcacttcaatccgcttgtcctcgggttcattgccgccgcagcgctatcgcttggctggctcggttggaccgtcgcctcgggttactggctattaatgttactaggcatcctctgggggattggttcgggtggcgagaacgacctgctgccttacttgaccctgcggtggttcggcgggttgcacttcggcaccctctacggggtgctggccggctcgttctttctcggcgccgccctagggccggtgtcctatgcagcgttggcggtagctacttcgtcggttactacgccgatcgttgtcctggcagttgccaatggtatcgctgcctgcggctttctgttcctcaacatgaggcggagcgcggtcggtactcttgagcatgcctaa

SEQ ID NO: 363159 - DNA, 558 bp, Pseudomonas aeruginosa
atgatggtggaacttttccccaaggtggaggtgacgagccagtctcaagtgctcgaccgcaggcggataagttgcgctggcgcaaacagttcgctgggcatgatgctggaggtggtgcgccacagtggtggtcaggagctagtaagtgcggtggcgcaagttttgagctgcgacaagatgcgggaggttgtggatgtttctgtgatatcgattgacttcgatccgactttgccgaaagccctcaagctggcgctggagctgatgaacggcaatattgaagaccccctcgcaatagatgagattgcatcctacgtgggtatttcgaggcggcatctggagcgcctgttccggcgttatgttgaggcgacgccgccgcgctattacttggaactgcgcctcacccatgctcgccagttgttgcagcacaccaacaagtctctgatcgaaatcgccgtggcgagcgggttcgtgactcttccgcatttccagcgctgctttcgggcaatgtttggagtagccccagggcagttccgcaagcgtcaccaaaaaggtatctga

SEQ ID NO: 363160 - DNA, 498 bp, Pseudomonas aeruginosa
atgcgcttgcacaaactcaaggccggtgaaaacaccggtacctacctggtcgaatcaccggtcaccgaagccgacatcctgctgatggcccagcagttggccagccagcggctgagtcgtggccgccagctcaccgagcccaaacaggtcttcatccacctgcaaaccttactggcagactacgagcatgaagtgttcgcgctattgctgctggatagccgacaccgggtgatcgccttccgcgagctgttccggggcacccttgacggcgccagcgtctatccgcgcgaagtggtcaagctggctctggaatgcaatgccgccgcggtgatcctggtgcacaaccacccctctggcgaccccgagcccagtcaggccgaccgcgtgctgaccggcaagctgaaggacgccttgaatctggtgggcatccgtacgctcgatcacattgtcgtcggcagcgaaggctgcgtttcactggctgaactcggaggattctaa

SEQ ID NO: 363161 - DNA, 429 bp, Pseudomonas aeruginosa
atgtccgaggacttctaccccgacctgcgccgcgccaaacaacccgtcctgttcatcgctatcgatatgtggggcatcgaaggtccctatgccgacggcgagtggcacagcctgattcacgacttcgccaaggactggacgcgcaagaatccacaacaggaaacggcgacgctctggtccagcgtgcagccctgcgcaatcttccccaacggcacctcctgttacatggccaccagcaccaagctgccgctcaagttcctgcaagacctcgaaagccacctgcaaacccattgcggcccacacgctaggattgccggggagatcatggtcagccgagcggacggctggaggccctatctccactttgaagcgggcaatgtctgggagcagattgatgcggtggagtggaagggccttatcaggtcgtga

SEQ ID NO: 363162 - DNA, 774 bp, Pseudomonas aeruginosa
atggctgactcgcccatccggctctccacagcgctactggatcggggcttcctcgtcgaaaaggtggaggacgacatttatctcaccgacaacgcttgcctttacgccagaatcgtcgggcccgacaaccgccggctgcgttccgatcaggagctgctcacgagcacgctccagcagctcgacctgggcagcctattgccttgcgagatgccgggaagggccgctcgactgagcgcaccggatcaaccactgagcccacagcagctggagctcctgttctcaccccggcatgtccggcaggaggctggctatgcgcgctgggaagcccgactcaaggtactcaagaagcgccagcatgtcgccaaggtttacctggaagcgctggatacgcacatcgccctgctggtcaaggcactgtcagccgccagctgcgctacctggagttcttgtgacgggcatgacaagggacgcgcgtatccgctgcacgtgtccttcgtcggcccggtcaacctggcttgggcccgatatctgttcgagtcggcgcaatcggccgagctcgacctcaccaacctgcaattcaaccaggacgaagaactgagcgagaccgaaagctcgctgcagagccctcaacgagacctgagacgagtccgcgaacaggccatccggctcgggcgcttcatctacgagaaccgcttgaagtttcgtgccgaacgtctcgactggctgagtcggtacgaaaacacactgacacctgaacagaccagaaggaactag

SEQ ID NO: 363163 - DNA, 1050 bp, Pseudomonas aeruginosa
atggccgttttgcccaacaccagcacccgaaacacgctcactcgccagtgggaaatgctccgtcagattccggccaaggccccgggcatcacgagccgccaattgcagagccggttgaaggacgccggctacccggtcagcaaacgcacgatcgaacgcgatctcatcgagctctcgattatcttcccgctgacctgtgacgaggagagcatgcctttcaattggttctgggctcctggcgccagtgtcgatctgccgggcatgagcctgagcgaggccctgagccttatccttatcgaggacgccattcacccccttttgcccgttgggatgctgaatgcactgcagacgcgcttcgatcatgcccggcggaagctccagggcatggctgacatgactctggcagcccgctggatgagcaaggtggccagtgttcgccctgatctgaatctccaggcgccagaaatccaaccggaggtgctcgagaccctccagcaagcgctactggaggaacgacagatccagtgcagctactactcggcccatggcgacaagaccagccagttgaccctcaaccccttggccctggtccagcgtggcctgatcacctacctgattggcacggctgccccctatacagatgttcggcaatacgccgttcaccgttttcgcagcgccgaaatgctgccgtcaaccgccgaaggcgtcgggcagttcagccttcagacatacctcgccagcgatgcgctgcagtttggtagcacgcagaaactgcgcctgcgtgcccgggtgagcaacggcctcgcccgactgctgcgagaaaccccgctatcccgtgacatgaccctggagccgcaggaaacgggctatcgcctggaggccacagtcagcgacacctggcaactccagtggtggatcctgtctcagggggacaacttcgtcgtcgagcagccggcaagcctgcgcgagagcattgcgacgaaactggccagcgcactggcgggctatcagaacgtagccgcccgggtcggggagtcggaacatggctga

SEQ ID NO: 363164 - DNA, 2106 bp, Pseudomonas aeruginosa
atgcctatcccgcgcacagacttcgagatggaacctcaccccgaagccccccaaggcacggatagctgcccgctttcacgccaatggacctacgccatcgtgctcgatctgggtggccaccggcaactgatccagcgccacggtttcaatgacgatgacctagcagcggagttgggcttagaagccctgatcgaagacgatttcgatccgcgccacgccctggccttgcttcggcgtgagcgccggcggttcatgaatactcacaccgacttcggatacccggatcgcatggaggagaacctccaggcgttggcaaacctggtcggtctgaacgaagcggagcagcacgtcctcggtttctgtgtgctgatgaacacggatccgatcctcgacagtgccgtggatctgcttgggttgctcggcttcaaccgttcgctgcgcgtgctatccgccctgctggagattccccgccaggaactcagccaatgcctgagcaaagatgggcgcctggtccgggccggcttgctcgaagccagagcgcaatcctgtgaaaccttgtcactcagcggtcggctgtccatcgagaacaccgacttgctgacgcagatacgcctgcacgacggccgccccatcgacctgttcaagcacgccttccgccgcagtgagcctgcccatctgcggtgcccagacttcaagcacctggacaagacgctggacatcgccaaagcctacctgggcctggcactggcggaaggtcgccggggcgtgaacattctcatctatggccccccgggtaccggcaagacacaactcagccgtttactcgcccaggagttacaggcatcgctctacgaaattgcctgctccgacagcgatggcgatccgatcagcgccaatcagcggctttgcgccatgcgctcggccatgagcgtcctttacgcccagcgagccgcgctccttctggacgagatcgaggacatcttcgatttgccgccccttgccttcaccggcaagcacaagtcatggaaaggttggatcaatcgcatgctggaggagaacagcctcccctgcttctggctcagcaacagcatcgaggccctggacaatgcttacatccgccgcttcgacctggtcatcgaactgcccaacccaccgaaggaacagcgcaaacgcatcgtgcaggaagccagtggcgatcgactgggtgttgagctcgtcgagaagctgaccagccacgaccacgtgacccccgccatgttgactcgcgccgtacgtgtggcgcgaacgctgcaccctcgcgccagcagggcgctggactcgactgtccaaggcctggtggatgccacgctgaaagcgcagggatacgatcagctagaacgcaaccaggccgtgcaactccccagcttctactcaccaggattgatcaataccgacatccctctggacaacctgatccgcggcctgcgccagcatcaggaggcacgcctctgcttctacggcccgccggggactgggaaaacggcgtttggccactggctggcacaagagctgcaaaagcccctgatggtccaacgggtatcggatctggtctccccctacgtgggtaccactgaacagaacctcgcccaggccttcaccaaagccagcgaagaaaacgccatcctgctgctggatgaagtggacagtttcctccaggaccgccgcaaagcgaagcagagctgggaggtcaccgcagtcaacgagatgctcacccagatggaaagcttcaagggcttgttcattgcatcgaccaacctgatccgcgacctggacgaggcgtcattgcgccggtttgatctgaaagtccatttcagctacctcacggcgaatcaggtccaggccctcttcagcgcgcatcttcgcgccctgaagctcaaggatccgggacgcaccgccgggcaacgcctgcatggagcaacggacctcaccccgggagactttgccctgatcgccaggcaggcgcgcttcaggccatttgccacggcgaacgaagtggcaaccgccctgctggccgaatgccgtctgaagcgcgccagtctggcgcagcccattgggttcgttcactga

SEQ ID NO: 363165 - DNA, 387 bp, Pseudomonas aeruginosa
atggatcgcctactcaaagaaatgctggagtcgctgctgcaggagtcaggcaacagcaaacgtttgggcaagcgcatcatcaaccttgccggcttcctcagctccgccgaagcccctgaccccatccgcaaccagctcaatagcctctctcgtctgctgatccagcaggatgccttcgacgccctcctcgagcccgtgaacctgatggcacgggccgggcttacccaggctgccaatcccgagatcgccgtcccgctgctgagcagcctagaagccgtgcggaaggagatcagtgcgctggatgacatcaactacgccgagctgattgcctggctggtcgagcaggcccagcagcgcaagctgatccgcgccaaggggcttgtctag

SEQ ID NO: 363166 - DNA, 1035 bp, Pseudomonas aeruginosa
  misc_feature (1018)..(1027): n is a, c, g, or t
atgagtcatacagcttttatcagtgatgtagcactggcgcgggtactgaaggacgtcagcgaccctcacgtcaaagagtggatagtgtcggccatgctggcagtccgtgaagtgtttccccaggcagacttctatccactgcgtaagcgggatgaggtcggagagtacaacgacatctatgtcggtgtgggggctaggaaaccatcgacggattcagggaagaacgccctgatcatcaatgccaagaacaataacgcctacctcggttttcaacacaacggagggttccaggaaaaatacgaggctaaggtatcgccccctcggctcgatgcttcaacgtcaccagacgtgagtgtcgtcaagcaatggctggaggagctgcgagacctagttgatgtcgaggaccgcaaggcgtttctcggagaggcgcgatccatggatgtgtatctgacccctgagaaaacagggagtgtgaaatcagtggctgacgacggcgaaccggcgacggctttcatcaggccgcccctgaatcagatcttgttcggaccgcccggtacgggcaaaacctttgctacagtcgatgccgcgctggaaattttggattaccagtacttcctgcaccatcgtgaagatcgtgtagcgttgaagacgcgcttcgatgagctgagcaaggaagggcgggtacgtttcgtgaccttccaccagagcttcagttatgaggacttcgtcgaaggtcttcgtgcagtcagcaatgatgagcagcaattggagtaccggatcgagccgggcgttttcaaacgcctttgcgatgatgcacgaacacagggaatccagtctgaaactggtattcgcagtaatccgcggatctggaaaatttccatcgatggtacgggtagttctccgaccaagcactactgcctgaaccatggtgaggcacgaatcggctggggtaagaccggagatctgctgcagaacgttgagagcaacagttactaccaaggcctcggaacaaacgatnnnnnnnnnnaacgatag

SEQ ID NO: 363167 - DNA, 1026 bp, Pseudomonas aeruginosa
atggcgataggcgacatcctgctgtgcatccattcttcagaggctgtgaatgcagtgggtgtggtgaccagcgactatcgcttcgagcagtctcccccttctggcgtcgttcacaactatcaacatgtccgttcggtgaagtggctgtaccgggatctcaagctgccgatcctgcccttgaacgacaacaagcagttcacgctgaaaaccgtctatcccatcaatcgattcagttggggagacctgttggcccacttggagaagacgggggccatagctgtcgggccagccctgggcaagattaaggcgcgtcagtctcatgtgctggtaatcgacgagatcaaccgaggtaatgtgtcgcgtattttcggggagttgatcacgttgatcgaaccctccaagcgcgagggggcagatgaggcattgagtgctgaactaccctattcgaagcgaccgtttagtgtccccgataacgtgtatctgatcggcaccatgaacaccgccgaccgctcactggcagggttggacatcgctttgcgtcgtcgcttcgtgttccgcgaaatgcctcctaaacctgagctcttggataaggtggatgttggcggagtcaacatcgggcaattgctgcgggtcctgaatgaacgtatcgagatgctgctggatagagagcattgtctggggcatgcctacttcatgcctttggagaaggacaactcactcgcgcgtctggagctgattttccgcaatcaggtgttaccgctgctgcaggagtactttttcgaggactggcagcgcattcagtgggtgctgaatgatcatcgcaaaccgcaagcgctccgctttctgtcacagcgttccgggaacgtgagttccctgtttggtgatgttgcgatttcgacgcataaccttccatggcgtatcaacgacgaggccttcaagaagccagcggcctatcaggggatcattgatcaccaggtgtcagccgccgatgacctacttctggccatagaggccagcaacgcgtga

SEQ ID NO: 363168 - DNA, 255 bp, Pseudomonas aeruginosa; identical to SEQ ID NO: 327978

SEQ ID NO: 363169 - DNA, 1644 bp, Pseudomonas aeruginosa
atgccccatcaagtctggatggatacttaccgcaccttgggaattgccccgcacatcgaggtcgatagcaccgcatccatggccacggtgctggagcatgcgctccagcgttttgcggatcgacccgcattcaacggttcgcagggctacctgacctacgccgagctggaccgccagtctgccgctctggcggcttggctgcaggtcgaactgggcgttcagcggggcgaccgcattgccgtcatgttgccgaacgtgctggccttcccggtggtgatgctcggcgtgctgcgcgcgggctgcgtccaggtcaacgccaacccgctgtataccgcgcatgaactcgagcatcagctgcatgatgcggactgcaaggcgatcttcgtgtattccggcagcagctcgaccctggcgcaggtgtgtcgcaaccctgcgctggcccgcgtcatctgcgtcggagcgggactgcccggcgtcggcgaaccctgtctgccggcggtggacgcgcaactgggtgagcaccttgaactggagtgggttctggccgccggccaggggctcgagcgcacgcccgtgccgttgaacgcagacgatctgatgttcctgcagtacaccggcggcacaacgggtctgtccaagggcgcgatgctcagccatggcaacctgctggccaacattgcccagtaccaagcgttcatgccttcgatgctgacccatgagggcgaacgcctgatcacggcaatccccctttatcatatctttgccttgacgatgacgctggcctacatgaccgttggcgcagaaaattggctggtctccaatccacgtatgatggatgagtttatcgaccttatccggcgtgccagaccgagcgtgtttatgggcgtaaataccctatatgccggcctgctaagccatccgcgcattgctgatgcagacttctctagcttgcacctttccgtggggggaggcgcggccatccagagcgcggtttctgaaagctggctggcgcggaccggaacctttattcgagaaggctatggcctcagtgaaacctccccacttgtctcgttcaacccggagatcgttgatcgctttacctcgactactggcctgcctgtgcctgggaccgatgtgtgcctgctcgacgatcgcgatcaggtcgtggcatggggcgaatccggggagatctgcgtcaagggtccgcaggtgatgcgcggctactggaaccaactgcaggtgaacgaagaagctttcaccgccgacggctatttccgtactggtgacataggccagttcgacgagcaaggcatgctgaagatcgtcgaccgtaagaaggacatgattattgtctccggcttcaatgtattccccaacgagattgaggacgtcgcggcccgccaccccgctttgctggagtccgcctgtgtcggtgtccctgataataggactggcgaagcggtgtgcctgtatgccgtacgtcgcgcagatgccgagctggacgagcaggcgctggctgactacttccgccagaatctagccgcctacaaagtgcccaagcgcatcttctttgtggatgagcttcccaagtctggggtcggaaagatcctgcgccgtagtgtacgcgacatggcgctggcctga

SEQ ID NO: 363170 - DNA, 1035 bp, Pseudomonas aeruginosa
atgacggactcgctcaataaggatgatagtggggccgattggtcgcgcgacatgattgggcaatctcctccgttcatggccgtcatgaagctgatccccatacttgccgaccgtgatgcctcagtcctgattgagggagagacgggtaccgggaaggagcttgcggcccgtggcatccattgctgcagtcgtcgccgggggaagccattctttccgatcaactgcggcgcattaccagagaacctgatcgaaaacgagttatttggccacgctcgcggcgcattcactgatgcgggcgctgcggggcctggattgctgcggctagcgaatcagggcaccttgtttctcgacgaaatcgatgcactgccgatgcgcggccaggtggtccttctccgctttctgcaggatgggcgctaccgtccgctcggtgctcagcaggaggaggtagcagatgtccggatcatcgccgcttccaatcaaaaactggaaacgctagtggaggagcgcagcttccgagcagatttgatgtatcgactgcgtgtaatgtcgctcaaaatgccggctctacgcgaacgccctggtgatccgctattgctcgcggattacttcattggcaggtttgcacagcgttatggtggcaaccacggcgaaagaaggcgctcgctcgattcctatatgcacgcctggttcgattcatattcgtggccaggcaatatccgcgagttggagaacctgatccatcgcgagttcctgctggcagatggaccggaactcagcataccggcaccggaatctctggaagttggttacaagggccaagggttgattcagagcgccgctaacgacgtcccgcagacatatgcactcgcccgaatgcaggcgctcgaatcgttcgagcgaaaatacctcgacgagatcctgcgacgtacgcagggaaacgtcacttgggcggcccgccttgccgggaaggaaaggcgggctttcggcaaactcctgaagaagtatggcatcgactctgcgcagtttcgcaagtga

SEQ ID NO: 363171 - DNA, 2346 bp, Pseudomonas aeruginosa
atgtcaaattggaacaggaagcttcatccgatcgtgacagaataccgcccccccagccttatccgaggtatcgaagtcacgcaggcaattcaacactaccagtcgtggcagcacctgcaccaaccaccacttcccccgggtgataattcggtgcagctcgtggcgaacaagcccgcgttagtgcgtgtttacctcctcaacgattggtggttctcgacacccgagcgtttcgtctacccacccggctgcacgcctaacgttgatttcggcgacccccctccatgtgcccagatcattcctgcccaatctttccggttcaccggaacattggaaatcagccgtctcaagtctggatacacgctgctgcctccatatgcgtctatggtgcgggtggaggttttaaacgactcggtggaagcttcagatgaagggtactatccgaaggggcgctatgcggctcaacgcggcgtgggatacaacacactaagcttcattatcccggcccaagaaatgcacggtgttctgcatctccgcgtcaccatccaagcacccaatggatggttatcggaatccacattgtttgtcagcgccaagctcaagcaaaccctccacctccgcgggatcatgatccgctacagtggcccgtccaccagtcaggtaccggacgccgaaagcgtcacactgcccccacccacgctggcagattttcagaaaatatcgccgctaacgcttgcaatgtttccggttcaaagtttcgcaagctacagcagcgcaggcgagttgaattgggacaagccacttgacgacccgcagcctgatccaaaaaagtccactccaaattggagcgagctgctactgaaggtcgttgagcatgtttccaagggcgggaactggccgggcctgttgtactacggactcgtacctatacctgacgcttccaaaaagaacttgaaagtaaggggggatggtattgcgggttgtgccgtcggggccctcgtggggtcaccgactgacgagtgggtcatggcgcatgagctgggtcacgccttaggtttattacatgcgccgtgtggtgaaatcacgaatgtagatcccgcattcaggcccgacctttacgctccccatccctccggttccataggcgagtatggggtcaatttccgttctactactccgcagtacatgtcaccacagacatgctttgatttcatgggttattctggggagccttggatctcgccttaccattacgacaaactccttgggaatcccagactcaatccggagaacgacgaaagttctctgcattttgtcggtcctcacaaacaatctcgaattcctgagctggaccttcccatgccgccttggtcggagcgcgtcccgaatttctcgccagcgatttccataattggcatcgtccatggtgcaaacgagatcgagattagaagtgttgcgcggatcagggcatgtacggagttcaccggtgggcaaaagaccgacttgcgagccgaactaattggcgaagatgaactcgtcgcgtcccgcgcacaggtattttttcgcagcctctctctctctggcagatacggctgcggcgattgtcgcgatgaacaacttgactatccctgcctcttccaagcacttgtccccaataccgagcgcggctcagcgttgcgcatcagacgcggagagaatgaactgtggatccgccgcgcgccccatatcaaagctcagatcatcgcttggcgagctgaactgttaactgcggatcgggaagggtacagccctgaccgtacatcaatcgagttggcatggcaggcatccgttgccggcgaacagatcccaggggcatgggttcaatggtccggcgatggcgggggcacctggagtgttctcgccaccggcctgcaagggcagattgcaacaatagacggctcccaccttccagccggtcccttgttgctgcgccttatgcttgatgacggattcgacaccgccgaatccacgcctatcacagtggatctcccatggcgtgagccaaccgtgacaattcttactccccataacgggcagacacttctttccgacttcccgatgcgcctgtgggcagcagcgagctcacagcatggcactgagctgaacgctcggcgtatacactggctgctggatggcgaaatgatcgctgaagacctagactcgttcgctatcggaccagcgccaggacaacaccgattaacgctcatcatctcactcaacgagcacgaagtagagcgcaccattgagttcaagacgatcagcgtgtctacccgctcgagtgatacgcaggacgatcccagtagcacttag

SEQ ID NO: 363172 - DNA, 669 bp, Pseudomonas aeruginosa
atgcttcgttttgcagaaaatcgcaatcttcatcaacacgatgcagagacctttcaagactttccggtaatgattgaaaaaggaccattcattcatgagtacctggtggcgctaaggcgcacgattaaccttgcgcttgatcagtatcccagggtactggcatttcgggtggatttgcgtcttccgcgtctggtggggattccggatgatgcttacaccaatcgcgtcatcagtcggttcatcgagtcgttcaaagcaaaaattgagcacaaccgcgataaagcgcgtgaacagagcaagtacgcccatgactgcagggtgcgttacgtctgggcgagagaggtgggctggggagggcgaccgcattaccacctgctgatcctgctgaaccgagacgcctactacacagtcgggcggttgcagccacaaaggcccaacatgatcagccgtatgcaggaggcttgggccagcgctctaaagtgcgaggttgatcaagtacggggtttggtggagatccccaaaaatgcagaataccgagtcgaccgaaatgtccggccagggaatatggatcagttgcctgaactgtttcgacgcgcgagctacctctgcaaagcttcaaccaagcgttatggagagggcgctcatggctttggatgcagtcgagggtag

SEQ ID NO: 363173 - DNA, 1302 bp, Pseudomonas aeruginosa
atggggcgaagcatagggctaggactagcgttcctgctgttactggtgacaagagtggatgcgttcgctacgggggcagaagcatgggatgagaccaatcaggtggcggaacagtacgtgcggctgggcttgttgcttgctgcgcatgatcctctgccgattttcttctttggccctgaggagtggcgtaccgaggcaggcaaacagaagaaaccgctgggcgagctgaaatcgcaagtggatcagttgattgcccgcatgcaggccgtgcagagctccaaagagccaagcgatgctgggcggcatgtcgcgctcatggggcggctcatatcgatgcggactcgcatcgatatgctgatggggcattttcccaagagcttcgaggaagagctgcgcctgatgtatggtgtaacggttccccgacgtgacgaagcgcactttctcgagttgaccagcaggctggacaaactcgtcccgggtgagggggagttggcggtgcgggttgagcgctttcgcgatcagttccgcattccagtagaccgtcttgagccggtcatgattgcggcgatggacgagtgccgcaaacggaccgtaggcaagttagaacttccggcaaacgatcaggcgaagctgattattgtccaggataagccatgggtgggcttcaccttgtacaagggcaactcgaccagcgagatcctgatcaacaaggatgtgcccgtacacatcgatcgcgcgatcgagcttggttgccacgaggcgtatccgggacaccacgtgcatgcctccctgattgatgcggggctggtcaggtcgcggcactggatggaatacaccctgatcacgctgtacggtccgcaggcgatcatagcagagggggtagccagctatgccgaggatttggtgtttaccccgagtgagcggttgcatttcgaaaagaccaaactgatgcccctggccggtttagatgccagcacgctggaggcctacaatcaataccgcgaaatcaaacatgaactcaactacgcgcgcaacgaggttgcccgtcgctatctgtacgagggcatgtcccgtgaggaagctgtagcctggctgcgcaagttcggcctcgaaaccgaaggtactgccattcagcggatgaacttcatcgatgctatgcgcgcttatgttgtctcctacaactatggtaaggatctggtcggcgcttacataaagcgcatggcaggcgatgatgtggacaagcgctgggccgcttatatcggcctgattactcggccagtcatgcctaacgatctacagtag

SEQ ID NO: 363174 - DNA, 1746 bp, Pseudomonas aeruginosa
atgaaaaacaatagatctgcagtagtatcggtgcgtatgtcgcaacggtgtggcctgctagccaagttaatctctgcagctgcgcttggtgccgtgtccggtcaagcctgtgcactcagttttgagtatgaaaatggcgtgaaatgggacttggatacaacgttgcgctactctgccgcctggcgcgtcgaagggcagagtgacacgctgctcaaagagtccaagtacatcaacgccgatgacggcaaccgtaatctcgataccggactcgtcaagaatcgattcgacgttctgatcgagtcggacttgaactatggggaatttggtgcctttgcccgtgctcgtgcttattacgacgatgtttactcggaacatacggataacgactctgctgccaccagcaatggcgtgagtcacagtttccgggagttcagcgacgatacgcgggactttatggggaagaaggccgaactgcttgatgcctatctttatggaaactttgacatcaatgaccgctcgcttaatgtgcgtgtcggtcgccaggtggtgagctggggtgaaagcttgttcctgcagggaggcatcagctcggcgatggcgccgctggatgcaagtcaggcaaacgttccaggtgttgaactgaaggagttattcctgccgacggggcaggttttcatgcaatatgacctgaccgataccctcagcttcagtgcctattaccaatacgaatgggacaaaacccgctttgatgaggcgggcagctatttctccacaaccgatatgctggacgaggctggtgagtcgatcatcgtcgggtacagcaatccagcgctgccgggcatcactgtcccagctggtctgcgtctggtacgtgggagcgataacgagccaagcgacaacgggcagttcggtatcgccctgcgttatctggcagaggaactgaatgacaccgagttcggtttctactacatcaactaccacgacaagaccccaaccgtacgcaacaccctctttccgctggggccgcaactgggcttcgtgcagattccgggaatccccagcgacccggttgtcagtaatgtcttgccaggcctagtgggcaagtcgccgacgccggcgaacgcagtcgttgtgggtgagtactcgctcgactatgtggagaacatcaacctctatggcgccagttttggcaccgtagtgggtgaaaccaatatcagtggtgaagtcagctatcgggtcaataatccgatatctgtcacccgggaagtggcgggcactgcggtaacggaaatgactctggcggataccatccagtaccaagtctctgttgtccaattgcttggtgctaacaccctgatggacaatctttcactctcagctgagatcggcgccaatcaaattctcggctatagctcgcgcgaactgggagcacccggcgtgcatggtgcaagtgacaaagacaatcgcgcctggggcgggtccatcacgctgactcccagttattacggcgttctccccgggttcgatctggacgtgccggtgagtgtcagcacgggtttcaacggtaattcgccaatcatcggcacctttacggagggcgcgaccaaggcgtcgatttccactcgtttaacctacaagaacctctaccaggcgcagcttacttatgtcggtttctatggcgatccgcaggatagccaagtgactgatcgcgacttcgtcggtgtcagcctcaagtacagcttctaa

SEQ ID NO: 363175 - DNA, 1188 bp, Pseudomonas aeruginosa
atgactcacccgcctaagggttaccagccgggcggtgtcaggattgaccccttcgctgcagaaaagcccttgatgagcatcaatggtagcaactacaagtcgtacgccgaacaactgacgccgggtatgcaaatgctgttcgagaaatatccggacagctttcgcatggatatttatccgacgcaccgtacgcatgccctgcctgagtggcagtacaagcagaccctgctcaatgctacccgtgccagcctggatagctcaggcagtggtgtgaagaacgcctatggcggtgtgccgttcccgatccctaaaaacggcagtgaggtcatctggaaccatctgcttcgctacaacggaacttccaccgagggggtatttaaggcgttcgtggtttatcccaatggaaccacacaagcgtccacctatcggaatatctggcagagcccctactacgatcctaagggcagtctggaaaccttcaacggcaccctggccagtttcgtcaacgtggtgtatgagccgacacggcgtaagggtgagtacactctggtggtcgacccggtgaatgccgtcgagcagatgcgggcgtcctggcagtacttgcctggtcagcgccgcgtgcgccgtgctccaactgtcgcgtacgatactccagatgcgtccaccgctggtctgacgacctacgatgacgcctatatgttcaacggggcaccggatcgttacgagtggaagttgctgggcaagaaagaaatgtttatcccctacaacacctacaagatccagtcggcacttgccgatggccatgccgaggaagatgtggctacagaaaaacacatcaaccctgacttcctgcgttgggaaaaacatcgggtctgggtcgtggaggccaacctcaagcctgggcagcggcatatctataagaagcgagtgttctatatcgatgaggattcttggtacgccgtgcttgaggatcgctacgatggtcgtggcggactgtggcggacttcggtctacaacctctacaacacttatgaaaatgtgggcactgtaggctcttccttttatcacactgacctgatcagcggcgcctatctggtaagcctagtgaaggagccgctgactcacatggagttgaagtccgacgacttctttactccgcaggggctgcgcaagttggggcagcgttga

SEQ ID NO: 363176 - DNA, 369 bp, Pseudomonas aeruginosa
  misc_feature (314)..(323): n is a, c, g, or t
atgagaagcaacaagcgcagcattcttacgcccgcggctccaatccttatcggaagcgccagatcctattgggcaacccacttttacagcgttttgaagtgtattgactcgcacaagcagctcgcccattcgcctcggaagttcaaagagttcccggtgtggaccttgagcttgttgagggggaatctccccctcaatttcttcaacgaagttgagtcgtatgtacagaattggggagtgcaatacttcctggccagcttcttcaaccaaaagctcggaggacacctcgtcattgagctcctcgagcggctggnnnnnnnnnntggactcgttcgccttccatatctcaggaagggactctgcccttag

SEQ ID NO: 363177 - DNA, 255 bp, Pseudomonas aeruginosa
atgaacccattgttcaccaacctcacccaggaaaccctcgcctacctcgaggaccaactgtccaacaacgacgtcgccggcgacgacgagctcatcgacctgttcatcgaggagctgtcgctgaccttggagcaggccgaagcggctgtcgcgctacgcgatcagtacctctgccaggtcttcctgatcggccaagggccgctgcaccaagccgatgggctcaggttcgtccctcacaccaagagcgttcggtag

SEQ ID NO: 363178 - DNA, 648 bp, Pseudomonas aeruginosa
atggccgagatcaatatctaccagaaccctggtcaatccctggctaatatctataagggttttgcccgtcaatgcaatcctggctttgtcttccccgaagcacagactatagaggcatgggacattccgctgaagctacacccggaattcgtcccgggcggagacatcagcaaagcggaccagcagtattcgacgttgcttgcccaagaactagccaacggcgtaaccattggtttcaggatggtcaatgaaaaggaacgtgtttgcaacgttgagatacttcctttgctcacctccatggcgcagaatcttgatagaataaaggctcgcttcggcagcggatatcttgaccgcttcaagggcagcctgaacgtctatccaaccgacgttggtctatctccggacgcctccggaggcatttcgcaggagtccgggctgctggtttcctacggtgtgaacctgcggacactggctccaggcgcttggcaggcaatgacgctccccgaggatattaagacgttggtagggcctggtgttggcctacgtctggacgcgccaaatttcagcgacgtattcaatacgatcaaatcgggcctccgctatacgaccgcagtagccttgctgctggcctattttgcagcgatctaa

SEQ ID NO: 363179 - DNA, 969 bp, Pseudomonas aeruginosa
atgaacaaccgcaagcacaacacccacctctcacagtccgacatagccctgcagatcgaatcactcgtccaggctatcgagcgcagcgatacacccgcatatcggatcacgcacaaacggtcaggctatgagcaggtcgagcagaccagactctcccggtacttcaccaacgtgcagcagatgtacaacctgttcgatgatcgggtgccatacgactacagcgagcacctgttagcgttcagggaggcatgggaatacatcggcctccagcgttcacccaatggccctgtctgcatgagcgagacgggtacgtactggctcagtcatcaacagagcatgaacgtcctgaccgaacggatccgtgagttgacccgtcagcggtggtatcagcgcaaagctggggatcgagcctatgaggcacgcaagcaagcgcaggagatcatcgcttacaacgatgcagtgatgagcctttactcacgcactacgataatccggctggacttgtactaccgccctgaagctcaggctaggcagcgcgtcgagcaggtattcgatcacctggatgatctgatcgaccaacacagccgtcatcggactttcgagcacctgattggctacacctattcagtcgagcagggggattgcaaggaggggcgtgggtaccacatccatgcggcctattacttcaatggcaacatagtgtgccgcgatgtctgtaaggcaactaggatcggcaaactgtgggaggagatcactcgtcgtcagggctatgcccatagctgcaaccacgacaaggaggggtatggtgacgagtgcggcatcggcttgatccagcgggaggatcagtcgaaacgggcccatacgcactacgccatgaaatacctagtcaaggacgatcagcacctgcgcttgaaacctgcaggggcgcgctgtctgcgtaaggggactcttagtcgttctcgtcggtga

SEQ ID NO: 363180 - DNA, 261 bp, Pseudomonas aeruginosa
atgactatgtctgaagtggtttcgacaggggcgttggtgttgatcggggtgatcctggcggtgctcctgttgcagtacatgaagttgcgcgagctctggcagatagcgctggcatgccgacacaacgcgcgttgggcgcggatctgggagatggagaaccgtgagctgcggtcggcacggcgtgctgaccaggagcacatcgcccagctgcagcgcaagctggtgctgttgcagaaccttattgcagcacaagagcgataa

SEQ ID NO: 363181 - DNA, 1050 bp, Pseudomonas aeruginosa
atgaacagacttgaacggatcagaggctgcctgctgggcggcgctgtaggcgatgcacttggcgccccggttgctacgcttgggtggcctgccatcgaagccaggttcgggccgaaagggataacggactttatcccagctcatgacattaccggtgcgatcagcagcgctacgcagatgacgctgtttaccgttgagggcttgctacgggcctatgtgattgggagttcagggcaggcatgccatgtacccagtgttattcaccacgcgctgctgcgctggctgacgactcaggactatcccccggcgatacaagtcgccaccgatggttggttgatcaagcagtcgcagctatggtcgcgtcgagaccccgacacaacgaacttgaacgcactgaaggtcagtgggcggttaggtgcgcttgctgaaaacaacagcaagggctgtggagccctagtgcgggtcgcaccctgtgcattctttgccaatgcgtttgactacgcggcgcagtccgggcgtctgacgcacgggcatccgacgggttatctggcggcagggcttttcgctgacatcctccagcgggttgtcgatcgtcaagacggcctggagcacgctgtgactcagagtctggccaggtatgggcacgtacctggtatggaagaaacgcgcagtctcatcgagcgcgtgcagttcttttataacgaggggtacacacctacaccccagcgcatcgacgatttcgcttctggttgggccgctgagcaggtgctggcaattggattgtggtgtgcgctgacggcacggtcgttcgaggagggggtggccatggcggtgaatcacagtggcgacagcagcacgggcctggtcgccgggcaattgcttggtgcgcaatatggtgctgccgctattcctgctcgctggctcatgcgcctggaattgcgccgggtgatggctcagatggcggaagatatcgagcgcgtgccgcgggagtattgcggggttggcggggagtttgatgagcagattgaactggcttatccccggagttga

SEQ ID NO: 363182 - DNA, 126 bp, Pseudomonas aeruginosa
atgaagaatatctttgccgtagtcggatttatcgtgattgttaccaaggggtatgagttataccgggaatatagcgagatgaaacgtgagaaagcggcgcgggaggcaggtggcagttcgatttga

SEQ ID NO: 363183 - DNA, 897 bp, Pseudomonas aeruginosa
atgcaagcagcagcagaacttctcgaaaaaatctgggtgctcgacgaggccgccttttcaaaggcccttatcgatgcgctggcagcaggcaaggcagtcattcatgacggcgtggcttattacgcggcaggcagtggtaagacgggtgtcatccagcacctaccgttcaaggaaaccgtattcaagtccgccgaagaagcactcaaggccgcgcagatgaccaccgtgatggctaccgccgcgtccacctgcgtgattctcggtgcgctgatcatccagaccaaatacctggcggcaaaactcgacaagatccagaacacagtcgacgaaatagctaaagagttgcatacccaaaacatcgtctattacatggacaaggtcaccgactacatcggcagtatcgaagtagcccgcaccttgctcaaggaccgcagcttggctagtgaaatcaaggaggtggccttccccttgttggcaacagccgcagccaagcgcaaccatgcgatgtcattcatcgacaacattctggcgttggcgcagagccgcaacgagttgagcagcaagcactacgagctggtagtcaacttcgcgcacatgatgctggaggtcatgccactcggcattcatacagaatatttgctggcggcccgggtaggcaaaccgatgctcgcccaactgatattggaagatggtgcagagcgttatcaaggcgcaatgcaacaatacaaagcattcctcaatgcccaacatcgcgaactggtacggggtaacatgggtgacaaaaccgtggtcctgcagcgcatcgaagacaaggctcgtcacctgattcaatcgcaagagaatcagctactgctcacgttgccctatggccgtatggcaacgctcgaagctgcatga

SEQ ID NO: 363184 - DNA, 741 bp, Pseudomonas aeruginosa
atgggtattagctatcgcgcggatgacgacctggcctttctgcaatattgccgggaagacgatatccgcaacctggcggcctatctcatgttcgacaaggacggagaaaagcgcagagcaagcgaaatcgccgatgacccgcaattcaagaagctgcaaggccagccagatcaatggcggcgctgctggcaactggttgctggtgagctacaacatttcgctggagactcaatcgtcaacctgttccgacgtcagggtgtcctatacagggaaatgctctgcgacgtctgcgacaagactgacgtgaagtacgacaacaaagccagcgcctacgccatcgaaaaccagctcatcgaaaagctggtggcaaagagctgggagcaaatgtcgccggaacaacagcgtagcacagccgaagaaatgaacctgaacggctcgcttggggcggtgccgctagtcgcgatcatcaatgccattcgtgcaggtggcctgggctcactgcagtggtcatcctggcttgcaaggggggctactgcgtctttcagcaatgcagtaggggtaaccctcagtggcgctgcggctctggtaggtgggcgcgcggtagcggccatcgccgggcctttggcagcgatcgccgtcaccgttcctctactcagcggtacggcgtaccgggtcactatcccggctgtcattcaaatcgcgttcatgcggcggcagtatgaaaaagaggatcacttctaa

SEQ ID NO: 363185 - DNA, 1635 bp, Pseudomonas aeruginosa
atgacccaaccaggcccgatgacccaactgctggccctctatgaggaagtggatggactgtgtgaaacctacaacccgcaggctgtcgccagcattcgcgaactgagccgggcgaagaaggcccaggccggcgcgagcatcatggtgtacggcgtctacaacgccggtaaaagcacgctgatcaacgccttgctcggccaagagctggccgcggtagccgatgtgccggaaaccgcccgtgtgcaaggctatcgctggggcgatttcgaagtgctcgatacgcccggcatcgacgcgccgctcgagcatgaagccatcacccgagagcagctggtgcagtcggatgtggtgatcttcgtagtcaatccgctgggcgtggtcgaggaagagaaaaccctcgatgtgctgcttgagctggtacttgccggcaagatgatcttcctggtactcaactgcaagagccgtttcgaccccatcgacctggcccgcatcaaagacgaactcagcgaacgcattcagcagaaggccggtaaccagaaagtgcttgggcatatcccgatcgtggaggtcaacgcccgctccgcgctcaaggcgaaactggagaacaagcagaacctgctgaacagctcaggctttccgaagttcgaaagcgatctggccggattctttgcatccgtggagcagaaggccatcgtcgcgcgtgtcgccaccgaactgtgcagcttcctcgatgcaacggtagccgagctggacaaacaccaggaccaagcctcgatcaaacgcctggacgctttctatggcgaaattgcgcgtcgcgagatcgatattcgccacggtttgaaatcgctgatcgaagccaaggccgcctacatcggcaagagcacgatcactgcgctgaaccaaaacatcgatggcgctcagggcaagatcgagcagcttatcgggcaggccaacgaacaggtctgcagcgagctcgaagacgcactcactcgccttggtctggacgcttcagagatgctcgacgaagtcattcgagacgtgcaggtacagccacaggcctacaatgcccaggctgcaccggccctcgatacgcctgaagccctctacgaccaggcgcccgcatcgcagggcatcgacctgagcctgctcgaatccggcgtccgccaggccagcagcatgctcaaggccgagcatgtcgtcagcgtgctaaaagttggcaagcagtggctgccgacactgttcaagggcgtcggcccggtcaccatgggcaaggttgccgagcagatcgtcggtaaggtcatcccggtcatcggtattgctttccaggtaggcagcacgctgtactccgccttcgctggcgaccctgaccagcagcgcctggaggaacaggccaaacgcgaggcccaagagcgcgagcgtcgcgaccaggcgatccaggcattcgccgatgagactgcctgggaattctcgcggtcgctgaacaccatggtcgatacccacctgaagagcaacttcgccgagatcaaggacaagctgcaaagcctgcgtggcagcctcggccaggaccagcgccgcctcagcgaggaccgcgaacgccttgtccagtgccgagccgcaatgggtgagtatgcctga

SEQ ID NO: 363186 - DNA, 1764 bp, Pseudomonas aeruginosa
atgagcactgttactcgcgatgagttgatgcaggtctttcaacaactgcagggtcagttttccagtaagaagcaagacttagcgcaggcccaacaacgcttcgatacgctgcgcacgggcttcgtcaccctgttgcgccaacaaaccgaaagcatggctagcgcggtcagcgacaataacccgctcaaggaaggcgctacccagatggcgcgacgcctgacggatcaattcagcgtttgggaagaacgcgccgaggtacgtgcgaaaggcgcagagtttcgtgaaaactacaatgattccctgctggtgttcgtgtacggcaaggtcaagtcgggcaagagctcgctgggcaactacgtggcctgggggcacagtgagccaactgcgcaactcaaagaccacgccactctgaaacccacgtatttctcccatgaccgaaccgacgtcgccagcggcgacaaagaaggcgaggcgtacagttccaagcaattcagggtcggcgccaccgaggccaccagttctattcaaggcttcaagctgcctgggttcacctgggttgactctccagggttgcattcgaccaattcggccaatggcgacttggcgcgcaagtatgtcgaccaggcggacctgattctctacaccatgaactcgcaagctccgggccgccaatccgatatgagcgaggtcagcagcctgctcgatggtaagcgcacgttgatgattctgctgaccggcagcgacatcaccgatgaagacgaggacgacgatgggcaactcgtcaccgaagtattgatgaagtcaaaggaaacccagcagcggcaaatcctggaggtcaccggcaacttggtggagatgcaacatgacgctgccaaccatgtcaccatcctgcctatctcgacccgttttgccgagcgccacccctcgaacttgcaagaaagtggcctgggtaccctgtaccaaactctcaaggcattggcgcaaggcccaggtgtcgatctcaagctgactacccctctgaacaacctgcgcaaggctatagctgaaacctgcgacgacctgagcctaatcaaggagctgaccgagacgttcgaccagcagatccaaaagcaggagcaggcggtagagcgcgagctgcgaactctgagccagaagggcgtcaccgaaatgcgcagtttcgtcaaccagctgttcaacgggccccgcaccgacgacgcgcagcttcagctgcgcgagcgcctggccatggtgctaggcaagctgactggcgaggccataaaaggcatcggtgaaaaccagcaaaatacgctgcagcgtgcgttcgacaccagccgtctcggcgccatccctgcttaccgggaagttacggtcgagaaggaatacaccagcggcacccgcagcagcaccaaaactgcctggggcgctggcggggcggttctcggtggagtcattggcttcttcgttggcggccccgcgggcgcagctgcgggggcctcgctggggagtgccgcgagcatgattggccgcggcgccgaggtcatccgcgccaaacacaacgtggtcgtcggcgacaacctggaagaacaacgccaggtggccatcgagcagtacgccaatgccctaccagattatctgaccgtgcaggtacggggcatctacgagccgctgagggactccatgctcgagtactgccaaatcctgacgatcgaaatggagcgcctgcgtcaggcactcatcaccctcgaaacgagcactgcacaatga

SEQ ID NO: 363187 - DNA, 594 bp, Pseudomonas aeruginosa
atgcctctaccctggttgatcggcgttgcggcagtcgctgccgccgccgccattgccaaagcggtcagtgacgacagcccgtcatcttcgagcagcaccacgcactccgacgatagtgaacggcgtcagcaggagcaggaagccaagagccagcgggaacgcgaaaacctgaaagcccgagtgcagtcacttgcaggcgaccgacgggaacaactcaaggctcagctcaggggtgcggcatctacgctggccgcctcatcggacaaacacaacccggtctctgaaggtatcagcaaaatgacccgcctgacgcttgaaggggtgccgggggatcagctcgaacaacgcatccgcagcaccgcatcgtcgacatcgagttacggcaagacggttaaagccattcttcaggcgtcacccgccatggaaggcggccacatcgttcatttcatgcagggcgtgaatctgctcgaatccgtgtccgcgcccgccgaggcatctgccgccgaccaggcagcgctcgcccaggcgcaagcggcccaggcacgtatcgagcggctgcagcagcttaaacgtcaacttctccttcaggcgtaa

SEQ ID NO: 363188 - DNA, 870 bp, Pseudomonas aeruginosa
atggaccgaaccaaacgacttgaggcgctggaggcggagtaccagctgtttgttagccagcgcgacaacgcccccccgagcaagccccgcattgccgcctggggcctggtcaaggcagggaaaagctccctgctcaatatgctcagcggccacgccagcgacgagcatttccaaaccggtgatgtgcgtaccacccgtaccaaccaagcgctggaactcgacaactacgtactggtggacaccccaggtctgggctatgaccagaatgacactcaacaagcgaaccagggcctcgatgctgctgatgttgtgctgttcgttcatgccccgcctggtgaactggaccaggaagaagtggccctactcgaccagctgcgcagcgcttttggccaggatgttggcgagcgggtggtgctagtgatcagccagctggacaagctgcaggacgccgacctcgccgcagtcaaggacaccatcgaacgccaggccttgattcatctgggtacggcgcctgaatgcttcgtcatctccaacacgcgcttcaaaagcggtgtagagaagaacaagcaagggctctgcgagaaaagcggcattccacagttggcgcagcatctgcaaacactttcgaaaagcctcgctcagtctctggcagaggcccggcataagcgcctggcacggcgtgctttggagctgggcgagcggatcgacgctgagatcgaacgggacctcaagctgatcgagcagatcaccgagccgtatgtggtcaaggccaaagccttcgtagagcacatcgacggcgctcgccgcaccttcaaagctcatacgtccgacatgcaaaaagcacgcaccaaactcgacagcctcaagtaa

SEQ ID NO: 363189 - DNA, 744 bp, Pseudomonas aeruginosa
atgatcaagaaatcggtgacggagctcgcgttcgtcaacagtaaatcgcccctacccaccgtcgaggtcgattcgcagtccatcgagggcgcaggtttcagcatctaccgcacggtgatgcaggtactcacccaattggctgagcaggacgcatcactgcgggcgactctctatatgtacggtactgtcagcgtcaacttccgcgagccgtgctggtctgaatttttgctggttgcaggtccagaaaaagtgctgcgtgccttgggggctggctttgaacgtttgccggccgtgaagtcgcgattcagtgattacgttccgtcttccgcagccctgcgcaccttccatgtccaggatggcttagtgtgggaacaagaggatgccagcacatggtgctcccatgcccagacgctggctgacctgaccgctgaggtcgacgaggctgaagaggccgacgacgatggcgagctgattgaggaggatgaagcggaagagacctgcgataccgaggacctggaggcttcggatgaccaagaagaagactcaacggtcgttattggaaaccggaaggcggctcgctatcgggccgcgcgctccgatgcaaaagtgagcaccatccgggcaaggatcgaagacgtcttcggattaccggaaggttctgtcgcactctgtgggccagacggccgcgccttgcgaggaaacgcgctgatcaggacgctgcgtaagcgttgggacgaaaattga

SEQ ID NO: 363190 - DNA, 381 bp, Pseudomonas aeruginosa
atgtcgattccggattttcaaagcgtcatgggctatggcggctcgcgcaaggaggcgggcaaggcaacccagtccaccaacgatgacggaatcgacggcatcatcaaggaggacaagctcggcctggatgtgatctacctgcaagccaagcgctggaccaatacggtgcatcgtcccgaaatcgacaagttcatcggcgcgctgactcggcagcgggcacgcaagggcgtattcatcactacgtcggagttttccgcaggcgctcgcgaggcggcactaggcctggatatcaaagtggtactgatcgacggtgtcgagctcgcgcggttgggtggccgaagaagccttgggtattggcctgtggtgcgccttgatggctag

SEQ ID NO: 363191 - DNA, 228 bp, Pseudomonas aeruginosa
atgagtcgaagaaaacattgtgatgccctgcaatggctggcagccggattggtggtgttcttgctggtcagtgctcaggctcaggctcaggatcgagatctggataacgatggcgtctgggattacggcaaaggcggcatcgaccgggatgtcgataacgatggcacctgggattacgacaagggtggtatcgatcgcgatctggatagacgggacttggggttatag

SEQ ID NO: 363192 - DNA, 4908 bp, Pseudomonas aeruginosa
atgagttttgccattgccggcctgaccaacgccaacgagttctacagccagcactacctggacgagatcctcgaaaaagaccttaagcccctgttcgaccagtggaaggagcagggcgccgaaagccctatcgcccgcttgcgcacggcctccggtgccaacggttacttccgcgcccgccagcacttcctcaccgagcgcaaggccagcgatcgtgccagcctgtttatcgatctggtgcagccactgctgcaggccatcggctaccaactggcgccggaaaaactcgccttggccgatggcgagctgccggtgctggccacctaccgcgatgccaagcaccagccgctgctggtgatcgccgccgccattgccggagtggatgacgaggagctggggccgctgcagctcaaaccgcaggcgaccgacagccacggcaaaagccgccaggccgacagcgattgggaagaaaccctcagccgccggctgttcgccgatgatcatccgccgcgctgggtgctgctggtgcaccacgaggaatggctgctgatcgagcgcagcaagtgggggcgcaaggcgctgctcagcttcaaactgcccgacctgtttggcccgcgtgacgacaaactgctgcgtgccctggcggcactggcgggcagccagtcggtactgcccgccgaaggcggtgtggcgctgctcgacagcctggacgacaactcccacaaacatgccttcgaggtctccaccgacctcaagtacgccctgcgcgagtgcatcgagctgatcgccaacgaggccatctggtacaagcgcaccgtggccaaggagaaggtctacgagcgcaacgacaccgacctggccgaccagctcagccgcgaaagcctgcgctacatgtaccgcctgctgttcctcttttacatcgaggcgcgccccgagctgggctatgcgcccatcgacgccgaggcctacctcaagggctacagcgtcgagcacctgcgtgagctggaacagactccgctgaccaccagcgaggcgcaggaaggctactacttccatgaaagcctcaagaagctgttcggcctgatctggcagggcttcccgcgtcgtgcggacaacagtgggcagatggacttcaccgcaagccacgacctgctgctcgacaccggctttaccatcgccccgttgcagggccatttgttcgacccggcgcgcacgccgctgctgggcagcgtcaagttgcgcaaccgcgtgctgcaacaggtgattgaactgatgtcgctgtcccgcggtggtggcaagcgccgccgggggcgtatcagctacggcaccctgggcatcaaccagctcggtgcggtgtatgaatccctgctgtccttccgtggcttctttgccgaggaagacctctacgaagtccgccccgaccccaaaggcaaaaaggccagcgcaggcgaggaaggcgaggacgccgataacgaggatgacctcgacagcagtgacgagccggaaagcagcgacgcggacaagaagaaggacgccgaactcgacccgctggaagcggcctatttcgtcccggtcagtgccatcggccagtacaccgatgccgagcgcctgtttggcagcaacccgcgcaaatacgccagaggcacctttatctaccgcctggccggtcgcgcccgggaaaagtccgcctcctactacaccccggaagtattgacccagtgcctggtggaacatgcgctgaaggaaattcttcccggcaaaacggcggatgagattctccatctcaccatctgcgagccggccatgggcagtgcggcgttcttgaacgaagccgtcaaccagctcgccgaagcctacctgcaggccaagcagaaggaactcgggcagagcatcccccacgagcagtacaccgaagaaaagcagcgggtgaagatgtatatcgccgacagcaatgtcttcggtgtggacctcaaccccattgccgtggagctggccgaggtctcgctctggcttaacgccatcttcaagggcagccatgtgccctggtttggcctgcagctgtacaacggcaactcgctggtcggtgcgcgccgcgaggtgttcagcaccgcccagctcacccccggtaaaggcgagaacggtctgcccgagcgtgactggcgtgctgctgcccccaaggcattgccgctgacgcaggcgccgcaggccaccgagatttaccacttcctgctgcccgccgaaggcatgggcatggtcagcgataaggtggtcaaggcgctggagccagccgccttcgagcagttcaagcaatggcgcaaggcctttaccgcgccactgaccaaggatgaagtgcgtcgtgtgcaggcgctaagtcaggccgcagaaaagctctggcagcaacacgccgaggaactggcacgcgtacgcaaggccacctgcgacgaactgcacgtatggccggacccggcggccaaccgggcgccgaccagcaccgcgcagaaggacgccatctaccagcgcgagatgctcagcgaggcgcagaaaaacgccagcccctaccgccgcctcaagctggtgatggatgcctggtgcgccttgtggttctggccgctggacagggccagcgaattgcccagccgcgagcattggtggtttgtcctggaaaccgtacttctgggtaatgccagcctgagcagcgccccggctgatgacctgtttccggaaactcagccgcagcaggggctggacttcacccccgagcgtgaccgctatggccatgtggatatcgccgcgctggttgaggccctgccgcagctgcaggtggcgcagcaggtggctgctcagcaacactttatgcactgggcgctggaatttgtcgatgtgttcaaggcccgcggcggcttcgatgtgattctcggtaatccgccgtggatcaaggtggagtggaatgagcagtcgctgctgtcggactttgatccgcgctttgccattcgcaaactcagtgccaaacagacggcggatcagcgtgacgcggtttttgctgctctgccgcaggccaaggcggattatctaagtgaatgcgtggccaccgagggtatggggcagttccttaacgctacccagaactatccgctgctcaaggggcagcagagcaacctgtacaaatgctttctaccgttggtgtggcagttggggagtggggtgcaggcactgttgcatcctgagggggtgtacgacgatcccaaggcaggtgagcttcgtgccgctttattcccgcgtttacgcgcgcattaccagttcaccaatgtgaatctgctgtttcaggaagtaatgatttgggttcgctactccatcaatatttacggagctatatcgagcgaagttcgctttagaacaatggccaacctctttgttcccgcaactgtatcggccagcttgcagcatgtcggaggtggtgttgtacccggtatcaagcgtgatgaggggggctggaatacggcaggtcatgccagtcggattattgaggtggatgaaaaagtattggccaccttcactcagctttacgacacccctggcactccagcattgcaggcgcgcctgccggcagtgcatagccgagagctggtgtcggtgttggagaaatttgcctgtgttccacgtcgtctgggtgatttgaaaggtagctactctaccttggaaatgtggcatgaaaccggtgcacaaaaggatgggactatccgtcgtcgtagcgctaccgaacggagctttgtgggcgacccggctgagtttgtactttccggtccgcatttttttgtcagtaacccgctctacaaaacccctcgctctgtatgcgcaactccacgcgcctatgatccgcttgatcttgagcttctccctgacgagtatctggcgcggactaactatctgccagcctgcgacgttgtcgaatacacccgtcgcgtgccacgggtgagctgggtagaggagggagatcgagaggcgagagcggtgacaaagtattaccgcatggcttttcgcggcatgctgtcccagtcaggtgagcgtaccttgattggttcgattgcagcaccgggacaggcgcatattaacggcgtccaaagcaccgctttcaaaagcgttgagcatctgctttatcaagcattcttttcgtcatcgcttgccgcagatttctttatcaaaactactggccgaagcaatctgcactttatctgggagcagtttcccttggtggaaatgcagttatctgccgggctcagagcccttgcactgaactgtctcaccacccactacgcgaacctctggcgtgattgctggaaacctgcattccagcgggaccgttgggccagcaacgacccgcgtctgccgaagaatttctttgctcagctcacgcccgaatggcatcgtcactgcgccttgcgcagcgactacgcacgccgtcaggcgctggtagaaattgacgtgctcgccgcccaggccctcggcctgaccctggatgaactgctgaccatctaccgcgtgcagttcccggtgatgcagcagaacgagcgcgacacctggtacgacgccaacggccgtatcatctttaccgtgaacattgggttggccggcgtcggactgccacgcaagcccggcaagaaggacgaaccctgcaccctgatccatcccgacggccgccgcgaaagcaaacgcctcggctgggacgacgtgatgcccaaggatggcaagccccaactcgccgacggcaccgtcatcgagcgctgggtgttggacgacacccagcccggcggcccgatcaaccgcatcatccgctacatcgctcccttcaccctcgccgaccgcgaagccgactaccgcgtggcttgggccttttttcagaacaaaaactga

SEQ ID NO: 363193 - DNA, 1644 bp, Pseudomonas aeruginosa
atgattggcagttatatcgaagagaccttgaagtcggtatcggcagcaaacgttaccgacgcgttctgtctagtgatgctggcgatttttttcctatccgtctggcagggtaggaaggggcgacacgatcagtttcttgagcatgcgccagcagtactcgtctcgctcggcatcctagggacatttgtcggtatcgtgatcggtctgctggattttgatgcccatgacatcaagggcagcatcgagggtttgctcgatggactgcgcacggcttttatcaccagccttgtgggtatgaccctatccatcctgttgaaggcattcgatgcttggtggtttgcgccggctcgtggtcgtgcggagcaaccggatagtgtcactcccgagcatatccatggtgtgctcacccagcaggtcaagctgttggaggggctcaatcagtcgctggctggcaacgaggagggttcggtagcgggccaactgaagttgatgcgcaccgacgtgagcgatttccgcaatggtattgatcgcacccatcgcgagttccaggaaaagctcttcctgcatctgaccctgtttggggagatgctggcgaagtctgccaccgagacggtgatcgaggcgctgcggcaggtcattcaggatttcaacaagcacctggtggagcagtttggcgataacttcaaggcgctgaacgactcggtcggcaagatgaacgagtggcaggtgctctacaaggagcatgtggagaagcttgaggcgcgcatcgagctcgcgatcaacgagctggagcgcaccgccacggccaatgaggtcatcagccgtgcattgtccagttctgagcagtctatcggcagcatcgaggggcactgccagagcatccctacggctattggccagctggagccggtgctgcaggccaatcagaaacaggttggtgttctcgaagagcatctgggtacctttgtcgcgatgcgcgatcaggcgatcagcgcggtgccgcagatccagcagcacatggagacgctctccaaggagctttccgtcggcatgcagggtgttatctcgaccatgcacgatggtgcgcttgagttcggtcgctcggttgaccgtaccaacacggcgttgacggagtcggcacacgttgtcagcagcaagtccgagcagattgccgagaacatgcaggatgctgcgcaggaatttgttgcgtccgtgcgtgaaaccttggaaaacatgatgagcaattccaaagcgctggaacaacaaatggggcaggccgtggctcaggccgccagctctatggcagaagtgttccgccaagccactggccagattcaggaggggctgaccagttcggtagaggccacgatgaatacactgcgctccagcgtagaaagcagcttgagccagaccgagtcgcagatccaaggttctgccaatcgcaccatgggcgccgtggaagcccaggtgcgcgaagccactgagcgtgccagtgcctcactgcaaattcagctcaacgccatggaccaagccattggccgcgagctggaaaaggtgttcaaggaaatggggtcggccctggctaccatttcgaggcggattgccgatgaccatgccgagctggcgcagcgggtacgtgcctga

SEQ ID NO: 363194 - DNA, 1089 bp, Pseudomonas aeruginosa
atggaaatcagggttgatttttccgagctgtggggccaggtgaagcggcttagcgatgcttcagtcgagttcgactgggtggcagcggcgcaactcgatcccattgatatcgagctgttggaggggcgtgaggttcgccttgaggaccttgatgtcatcaatgggctgctgagcgtcgatgggcgccaggtgctgctgtatatccccgaccagttttctccggtcgatgtggttcaggcttcacccgataagggtaagcgattccatgtggcgaactgcaagacccttgcagatatgcgtgccaaggggcgcttcgagcgttacctggtcaccaataacctgaccggtatttttccaatcagtggcaagaacagccgtggtattccagaagagctggactcgcggctgttggtctgcaagaactgcctggaaaaactcaactaccagaactactgccacgacagtgcgcgccagcatatctggcagcgttttgaaattgctcgcttcttcgagacttacagcaccagctttacccatttgcctcgcaaccttgggcaacgcgccatcggtaacgattacacggcggactggactgaggtctccgctgatgtgcggcgacgctgtggattcaagtgcgatggctgtgagttggatctgagcgagcatcgccatcttttgcatgtgcatcatgtcaacggcgtgaaacaggacaacagcagtgctaatttgcgtcccttgtgcgcagactgccaccgcaaacagccgctgcatgagcacatgtttatttccatgaccgatatgcagttgctgacccgcctgcgtcgcgagcaaaacataacagcaggtgattgggcgcaagtgctggagctggccgacctttcagtgcatggcgctttgatgcatgcacggcacaaagggtttgaagtgccggaagtgggttatggactgatgaaccagaaccaggtgatcacgttcgaagtggaagtggcctgggagcagaggtgcattgctatcagtatcaccaaagctcccgaaatttctggttgggagattctgagtcctgccgagtttatggagaaattttattga

SEQ ID NO: 363195 - DNA, 1035 bp, Pseudomonas aeruginosa
atggctttttttaagaatgttaagaccattttctctgcatcagtgagcgcattgggagatgctacggagttaatggcgggactggccgaagaccttcggcgcgaaacaaagattttagccctccgagcagagattaagaatcttgagtcttttgtgcagaaccccgatatgcaccagagtcgtgatcgtgtggggctcaggaagcagctttttgaaaagtatgatgagctgtcctctttgctgggagagcacgggcaaaatgaggttgaggatagaaaaagttccttcctagaggcggagagaattgagcaggagcaagcgctagatgctcgaatagcaacaatggaggcaagggtcaaaaaaggaggttataagcttcctgttgaagaaaagcttgccctaagtaggctccttgatagctatgagcagctttttaaattaaatgagcgcaggcgaaccgctgagcttgttgggcgcactcatgagcttaaagtatctattgacgaacttgaagcgagccgtcgtcggattcaggaagatttttttccgtctggcagtaagaaaagtttaataccttttcttgatgagaaaaaagatggcgtatctgagtactggtatgagaatggggtgcggaaggcacagattgagttcaaatccggtctggcccatggaaagtgccttgtttggtatgaggatggtgcgcttgaactagatgccttgtatcgccaaggtcgaatatgctccccgtcaagcgtttactccagtaacggtgtgaaggtgctgggctttcaagaggattttgttaggttgaggatgtggaatggggcttaccttgggcgatatcggctaggtagtaatgtttttgtggccaagctttgtatgttgctgagagtgcttttcagctttaaggctctgcgaggattttatcgggctcagaaggggggctccgataatttacttttagtggagtgtaatagggttgtgcttgccttcagctctggtatggctgatgtttctgtgtggcttgaaagctga

SEQ ID NO: 363196 - DNA, 6321 bp, Pseudomonas aeruginosa
atgcaacccttgatagtttcccagcagctcacccaaggtgttgcagactttctatgcacggcctttccttcaaccacgaatggctttgagggcttgctggagcgcttccttgagcagcgcagcaatatcttcaaagggccgtacctgaccgttcccctgccgttccgtaagcaagacagcgcaggcaagcctgcattcccctggctgtttgcaggctttgtcccgcatgcccatcaggccgccgcctttgcgcgcttgagcggtgaggtggcgcagtccactctcgtggctaccggcacaggctcaggtaagaccgagtgttttctctatccgatcctggagcattgccgtcaggcacgtgctgagggaaagcgcggtatcaaggcgatcatcctgtatccgatgaatgccctggcgacagaccaggcgggccgggtggccaaggagatcgtcaaaacagccgagctttctgggatcagtgcgggcctgtatgtgggcgatgcgcctgctgagctgtcgcagacggttcgccggttggaggatggcagctattcggtaattaccgaccgcgacgcactgcgcagcaatccaccagacattctgctgaccaactacaagatgctggatttcctgctgattcgagctgctgataccccactgtgggtgcaccagcagccggatacgttgcgatatttggtcgtagacgaattgcataccttcgatggtgcgcagggtaccgatctggcctgtctgatccgtcgcctgaaaggccgcctgcaaactccgcctgggcaactggtctgtgtcgggacttcggccactctgggcgatgatggggtaggcgatctactggcgtttgcgggcgatgtattcggcgaggcgctggatgagcaggcggtgattgccgaggatcgtttgtccgttggtgagtacctcgctcaggccgtggtcgagttcacgcaaagtccgcagcccgcacagctgcagcagctggcgccggagcagtatgccgatctgtccgaatatttggctgcgcaggcgcaactctggtttggctcggcctgttcggttgaacaggtgcaggatttcaagtggcgctgtgatctgggagggcagctcaagagccattttgctttccagaacctgcttcgggatctggatcgattggggccgaagtcggtcctgctggatgatctgctggcgctgctgcagaggcgtctgcccgcttgcgatgatccgcgttttgccttgctctggctttccagtttgttggctctggtggctcatgctcgtcagccaggtcaccaggacttctttctacaggtcaaagtagagatctggctgcgtgaattgcgtcggatggtggccgtgctggatgagcacccccaactgcgccatttcgatgatctgcgcaaagccgatctgacccggctgcatctaccggttatccactgtcgggagtgtcatgccaccgggtggggttcaaccattcagaagaccagccctaaccagttgggacatgatcttcagggtttctacagcgcgttcttcgccgaggatgttgcgacacgcttcgttttccccgccagtgaacagcgcaaccttgcagtattcgagcggaaacaggtgtgtccggcctgcggtactttgcatccagaggcacaaagtcattgtgctcattgtgaggatcagccgctggtgcgggtggatattgcccacaacctgcgtgaaggtacccataatggcgccaagttcactaaggcgcatcatgattgtccttattgcgatggctacaagaccctgacgattgtgggttcccaggccgccagtcttgcggcagtcatggttgggcaactgttcgcgagccgcttcaacactgataagaagctgattgcgttttctgactcggttcaggatgccgctcaccgtgcaggttttctggcagcacggacctggcggctgaatctccgtccggcattggcgcaggtcatcatgcaggctgctcagcagcctttgactctggctgaactgccagcggcctttgccagccattggcgtacccagttgggtgacggtcattacgtggctaatttcctgcctccgcaactgcaatggctgcgtgacttcgaagcgctgatgcaggatgggagtctgccggcaggcagcaatctgctccaagagcttggcaaggttttgccctgggtgctgaaagctgagtttggtcaggatgccactatcggacggacgctggttgcaaccgctactgcgagcgttgtaccgcagccaggtcttctaaagaaagcagcggactggatgaaccctaggttgcgggaggcgctggagcctttggctgcgactgacagcgatgatttgactgtgtttctgcacggcgttatcggcatgcttcagcgcttgggggcctggcgtgatcctgagctggatttttatgcgcgtatgggcagtagcccttgggtgtacaagaagaaccccagcctgttcaaactgcttagcgggcccagaccgcctcgttttgtgaccctgactgagttccagcgctgtgcggctgtaggtgatagtcatgcgaagctcttccgtagctgggcattccagtcgctgcccgagctggatgggttggctctgggcgctgagcaattatggctgctcttgtatcgcctagcgttcgaagctctgaacgaagcaggcctggccggtttcgttgacggtgagggcaagcaagaaacccgcgtgtggggattgcagcctgaagcgtttgtggttgtcccaggaggcagttgctggcgctgtgatcattgtcatagcagccagatggcaggcccggatgaggacttgagtgggcagccctgtcggcgaatggagtgccgcgggcatttacaaggcgcaccccggcaaacggatttttaccgcaagttgtatctcaacgctgaagtctgccgagtggtggctagcgagcatacaggtttgcttccgcgtgatacgcgagaagcagtcgagcgtaacttcaagagcgatattgaccgtcctggtgcgatcaatctgttgtcggcaacaccgactctggaaatgggtatcgacatcggtgacctttccagcgtgctgcaatgttctatacctccgcagcaggccaattacatccagcgtgccggccgcgctggacgcagcacaggcaacgccttgctgatgagtgtggctaccagcaaaccgcatgatctatatttctgggacgacccaaggggtatgattgccggttcggtgcaggccccgggcgttttcctcaatgcttctgcggttcttgaaaggcaactgacggccttcaccctggactgctgggttcagcagaacgggcgcaacgcgcaaatacctgcggagattcgtcaggtgttcagcgctatcgccaaccagagcatgacgcgcttcccctatccctggctgagtttcgttgagcagaaccgggctttgctgctggagctgttccttgggctgttcaatcatggttcacaggcacctctaagtgaggctacccaacagtggttacaacgttttatcgagggcgatcagacgcaaagcagcccgttggcgctgaagatcatcaaccgcatgcagggcatcgcttctgatgttgatagctaccgccgtaagcgcgatgcgacggtcaaggagatagaaaagcttcaggcgctaccggtgcgcggcgaaaagcaggaggatgagctgagcaggctgactcaggatcgcaccgggctctcacggctgattggcagcatcgaaggtaaggccacacttaatgtgctaaccgatgaaggtctgctaccgaactatgccttccctgaacaaggcgttttgcttcgttcgatcatcgtgcgtgatcccaagccggggacgtcagcgccggatcctgaaaccttcgagtacgaacgccctgggtccacagcaattactgagttggcaccgaataacaccttttatgccgaagggcggaaggtggtgatcaaccaggttgatgtttccaaggttaagcctgagtactggcgtttttgccggcaatgctcctataccgagccgcttagttcaggtgaccaatacccgagctgtccccggtgcggtgatggtctctggaaagacagcggtcgcgttcacgagatgctgcgtctgaccacagtatttgctcgtactctggatcgtgaaagtcgtattgccgatgactcggatgagcgtcagcgcgggttttatgtccggcaggcgctggtcgatagtccgccagatgctgtgcggcaggctttcgttttcgatcagcagagttttccctttggctttgagtttctcgacaaggtgaccttccgagaggtcaattttggcgagcagtctgagcaaggggcgccgatggaaatcggcggtaaggagctcaatcgaccgggcttcagcatctgcaccgaatgcggcactttgcagcgcaagcgcaaagctgaagagctatatcgcaatcatgcgacctggtgttcccgccgcaagaacccggaagccaatacccagcagtgtgtattcctttaccgggagttcagtagcgaggggatccgcttgtttttgcccgaagttggcttcgccgataccaacgaggcgttgctgagctttgtggctgctcttgagcttggcttggccaaacgtttccggggagcagtggatcatctgcggattgccttggatatgcgcatggctgcgggctcggataatcctcgctgttatctggtgatctatgacagcgttcctggcggtacgggttatcttaaggagttgatgcgcgcgccagagccgctgcttgaggtgttcgagacggcactcaaggccctggatgcctgtacctgcaatcagaatcctgacactgacggctgctaccgctgcgtgtatcgctaccgcaacagctttgagcgccagtctatttcccgcagtactgcacaaaagcttctgggcgaggtgatgcagcacaagggtgggttgcacccagtcaataagctggctgatgtgcaacctgacaatcagttgctggaaagcgtgttggagaagcgttttgttgaggcgttgcgtcgtgagcatggcggtggcaagttcaagctgagtgaactgttgtttaaaggcaaggctggctatcagttacaggccggtgtacgtcgctggcgtgttgagttgcaggtcacgctgggtgagtcggatggtgtgatggtgccgtgcaagccagatttcgtgttctggcctgatgacaccgtcgaggatctgccgattgcgctgtttgtcgatggttgggagtaccacaagggcattatcacgaccgatctggctaagcgcatggctcttgcaaaaagtgggcgtttctctgtttggacactgacttgggatgatgtcgaagccgctttggcggggcagccttgcaagactgcttcgccttggccgagtctgatgcagccacagtctcagcaagtcgttgagcagctttgcaacagcatgggactgcaggcgttgtcagggttttctacgcatgagccgttcgcccaactacatcgacgccttgctggcgtgacatggacgcaattgcgtcagttgagtgtggcgcttgccgtaggcttgctcatgccgccgggtgatcagcagcagttgcaggcgatgcaagggcgggctttcatgcgccgcctcgatgagcttggcctactgcctgatcaagctgacttacgtcagtcgttcagggctcttggcgatggccttgcactaagtgtggcaatgcagcctgcacaactgaagcaggtgatgagcggcaagtgtttggctgatcaggagccttggctggtgcttgagtggcagcaggacaagatgggcagcgatgagcttaagctgcgttggcagcagctctggtgccttctcaatccgctcttgtcactgcaccgcgtgtgggctggtaatgcagatatgccggggctgccgtcgttgctcaatagtcccttgatgcaggagacagatgttcctgctgattggctggatgcactggagaatggcgctgccgaacttatgccctggtgccatgccttgtctgctatgggggtgagcgctcctgtgccgggctttgagctgcttgatgagaagcaacgtgtactggcagaagcagagctggcttggcctagtcagcgggtagctgtctttttgcctgagttcgcagagaccttgagcgtatttgagcagcagggttggcactgttttgttgctgatggcgaggaactgcctgagccactcactaatattttgatggagaccctggcatga

SEQ ID NO: 363197 - DNA, 2091 bp, Pseudomonas aeruginosa
atgacgctggcccctaaaattgcgatgtctgatgactttctcaaatcctttgcggcggtgccgcgtgcgcatcaactggctgtgctgaattttgttgccaagtttcgccagaatccgatggctagcgggatcaattacgagcgtattcgtgacgctgcagatgcgaacatgcgttcggtacgtatcaacgacaacgttcgagggatcgtgctcaaaccggacgttggcaatgtgtactgcctactctgggttgatcagcatgatgccgcctaccaatgggctagccgccatcgtgtagcgatacacccggatgtcggcagcattcaggtgtatgcggtgcaggacgcttctcctgcccaatcatcgccagcagagccgggtccgaaagtggatggtctgtttcattcactcaaggatcgggagatccgtcgcttgggggttccggatgatcgtctggctgcagttcgtgcagtcactgccgaggaggatctggaactcttgcaggacgtgttgccggatgaggccttcgaagcgctttacttgtttgctgcaggtgactcctacgagaagatcattagtgagcgcagcgctcctgaatcggtggatcaagcggatttctccgctgctcttgagcgcgcaggcagtcgccgccatttcgttgtgctaaccgatgacagtgatttggaagcactgctggccgcgccacttgagcgttggcgagtgtttctgcatcccagccagcgcaagctggtagagcgagactggaacggccctgtaaaagtgaccggcggtgcaggaacaggtaagacggttgttgcaatgcacagagccgcaagactggcgcggcaatatgcggcgctaccgggaaagcccgttttgttcaccacctttaccaaaacgctggctgaagatatccgccagcatttgcagatgctgtgtacgccgcaggagctggaaaagatccaagtggttaacctagaccaatgggctctgggtttgctacgccgctttggttaccgcaacgaattgctctacaaggagtcggatcgcaagcgctattggcaggctgccatgtccgccatgcctgcgggtatcgatctttcggctacgttcatgcgagccgagttcgagcgtgtggtcttgcctcaggggtgtgaaacggctgatcaatatatgcgcgctagccggatcgggcggggcggtcagttagcaagaaccatgcgcaaatcgatatggccggtgtttgctgagtatcgggcgcaactccaggctgccaatcttcgtgagcctgaggaagcgtttcgcgaagcatgccagctgttggagcgagagaagccggttctgggcatacgctccatggtgatagacgaagggcaagacattagcgctgcagcctttgccttgatccgcgtagccgttcctcccgctgacaatgatctgtttatcgttggagatgcgcatcagcgtatctatcggcacaaagtcgttctgagtcgagtaggcattgaggtacgcggccgtagtcgcagcctgcggatcaattaccgcacaacggatgagattcgtcagtgggcctgtgcgcagttggagggctgcagcgttgatgacctggatggtaacgccgacagcttgcgtggctatcgctcactcacccatggcgatgcgccagacctcattcgttcttcttcgttgcaagaggatggggaacatatccagtcggtactgaatcagctccgggctgatggtattgaactccgccaaatctgcattaccgcgcggaccaacgacgatctcgatgctctaggggaggggctgaggcgagtcgggatccccactttacgcctggataactcaacttcagatgatgcttcgtctgagggagtgcgcctggcaaccatgcatcgcatcaaagggctggagtttggcgtgatcatcgtggctgcttataagggggctgtggcctatgccgagcaatttagtcgtgatgaggatgcgggggtggccgaggataccgagcttgcagaacgttgtctgctgcacgtagccgcgacgcgagctaagcggaatttgtttgttctgaatcgatcttga

SEQ ID NO: 363198 - DNA, 2214 bp, Pseudomonas aeruginosa
atggcagatgcgcttggcctgcctgccgagattccaagattggatctaagcaatctatcgcatggccacccgctggcaacgcgctacttaattcatgcgctgttgcacgcggacgaagccggccgtaagcaccttctcagcggcgggatgccgttcgacggcgatattgagaccgtgtacagcgctgcttggcgcgagatcgcaagcgatgtcgatgccatggacgtgctgggctacatcgctcgtgctgaggcacctgtggacctgcggctgctggccacaatggtcaaggagtccgcgattgaacgcgctctgatcgttgcacggcacctgctccgtagttcatcccaggggtggagcgtcttccacaacagctttcggctgttcgtcatcgctcaacctcgagcccgcctcggaagcgtcgatgccgaatactcgcagcgcgtgtaccgcgacctcgcccagttggcgaagaacgcgccgcccgaatcggcgcagtactggcttgagttgcgctaccgcgcccgtgccggcgacggtgccgatgtacttgcgctggcgatgcccgctcgcttcaggcagcaactggctgacgggcgttctatcgccgagatccacgccgatatccgcctggctctgctggcagtgcgcggaacgcacgatgcgaccgccttctcacggctgctgctgtgtcgtgacgaagtggggcggcgggaaactgcccttgagtacgccaaccagcttccgctggcgatgctagcggttggggacattgatgcagctctggccttcgtgcagtacttccccggccagggctacgaggtcgtcgacgcccttttagcgcgaggggacttcgagcgggcgaaggaactgtttgaaagcctcgagccactgtcgcagctccatacgtccaagttccagaaccacgggcacgaccacaacataacggaattcgagaggtgggcaaggcgcgccgtccacttccgagataccgagcagatccagatagcgattgaccacctcgccgcagaggggctacgccagcccgaaaaggtggatccgcaaactgtcgccgcgctgcaactgcatctgaggagggaagccgcagaggcgatgctccttcagaaggttggcgccgatccacaagacctctgcagcaagctcggggtagccaacgaagacaaaccttcggtgatggttcacgcaggtcttgtggccagtcggcgtggcgacgttgcgcaagcgcttgccctgtttgatgttgccgccgcccttcctggcttcgtagaggtacccaacggctaccgacgccggatggcactaattgcattcgaagctgaccgtcgtgacctagccgaggccctgttcgacaagctggtcgcaccgatgatctctatgtgcgacgacgagacggacctggctgggctgggtaatctggtcggtgcggtgatgcatcacgcgaggctttgcacgctgctcaataagccgctgccaagcgcgacaccgtcgaagcacaccttccttcatccgttccagcagcacgcctcgacgataggcgtgcttctaggtcgcgccgccgtcgacaacgcgtccgtgccggccggcagcatccaggacgaagcccgcattgcccttgggtacgtcctacatctgacatcagaaggcggcagcgagtcatatcgcatccagcaggccttcaaagcggtcccgatgctcgtgccggcgctgctgaggctcggcgccaagcgcggcgagactgagtatcgtgcggtacttcgggaaattgacgcagccatcgcctcatcgacgctggggggcactgcgtacctgcgacgcagattggccgtcgatgcgtatcgggttgacggtgaccgggtggcggccgtcgatcgactcaacgcactcgtggcagagcttcatgagagcacgccgagcgagcagatcgacgggttggccgatctggccgtcgcgctggctgcggtcggggacttagagcgggccaaacagttgctggcgacggttcccgagcaatgccttggctacgcgttggcccccaagaaagacccgcagtacgcaatctggcgagacatcctggttcttgcgaacgccgctgacccggagacccgcaccacgtcggtgacttcatcgacatcgccgccgacgccgcaggacctagacagattgaaccgctcgcgcggatgtttttggcggtga

SEQ ID NO: 363199 - DNA, 990 bp, Pseudomonas aeruginosa
atgtttttggcggtgatcgaggtagccagcagggcacacgagagggtcagactgctccagcgccttcgcgccgctgccggaagacatgggttttcatctgccgagctcgacgccgcagtagcccggtggacgtcagaagcgccggaacctcgacactcgtatacgccaagcaagtacgactcggagaccactctcgagcagcttgagcgcgcgtttgaagcggatggcgacgaactgaactacaacgccccgtaccgtttcagagatctggccgagacggcccagcttcatctggcgcggaggatatttgagcgctggcaggtcttgcaagacgacgcgcgctgccgcttcctgatggttaaaaggttggctgcggcgggggaggtcgagtacgccaagaagctgatgcatggctacgagtcaagcaaggacccctggagttcctggagccagtggatgggtggcggtaagttcttctactttgaggcgaagaagctcttgcagggaccatccacatgcccagccgccttcgagaacattgtcgattcagtaacggcgggccaggagaacacccagtcactgctgacagaactggattcgatactgccggtaatcagcgcgacgccggattggccggccatctggtcgatacttgaggagcagatggcctgcactcgcgagttccagctggggcgacccttccagccgagcgagctaccgctcagcgacacggaacttttggaggatctgctgcactttgcctatcggctgcccgttgcagaagttcagcgacacgcacgcaattgcacgttgagcctggcaaggcaagccggactcggccaagctttgttcaagtcccttatgcggcgacttatggccggcgaattagatgcccccttgcaggcgctcggaacgctgctggctgctgacagcgcggaccttgccccccgagttgggcagcgccgtggctgcgttggtcagtcaccgtga

SEQ ID NO: 363200 - DNA, 1041 bp, Pseudomonas aeruginosa
atgacgtcaggacgaggtagcaaccctcgccccacagggactccgcatcgatatcaaccgggccggcatcacgccaccagcagagccttgcgacacagcgccgctcgggtcgaggaagacgctgggctcctcgtcatgcgcgctccagcgaagccgcttcacccagttcgggcacaaagcgaacgaataggccgctgcgtcaaagcccatgtccaccgagcaaacaactctccttaccagcgttggcgccagatcattgtcaaatgcgacgtactggccaagccaaacagcgatgggcagcctggcatagcagtcgtcgaagtcttcactgtcaatctctgtcgagggtgctctaaagcggtagaggcggtgctccgacagccgtggcttgagaatcttgaagcgggatacttcggccacgacttggccgtggctgtctgctgggaagggggcaacgtcaccgtcgacttcatcaatccacttccgatctcgctcggaccaacccgcacttcggttcaacagcggcattcgggtccactcggggcgccctcgcgggagcttcagcggtcgaggcggaagcgggcagcccaaacgttccaaaagcgtgggcatgtcgctgcctttcagtttgccggccagccgcagttctcccgcgacgtggcgaagtgcggcaatggcaatgtaggcgtggggcttcaggtaagtgatctgcatgtcgagcacgcgaagctgggtctcaagccttttgatcccagagggcccgaatgcatcaagtccaccccaatcctggatgaacatcgccgcgcgtcggcggactgtcatctcctcaatgcctgccgccttcgcgatgtgacgtgccgtcgagcgcaacatctcggtccagccaagcggcgactcgacgcgcattgcaccagttctttcgtccgtgaatgcctggtcgccctctggcgggtgctcgagttcaaggcgatagaagagcggcagtgttatcgcgtccaaggggacagcctgcctccaccgatgcgacaagagcgcggctga

SEQ ID NO: 363201 - DNA, 684 bp, Pseudomonas aeruginosa
atgtataaatttaaaaatggatttttagattttgaaaatatcgttaagcgtctctctaatgttcagggtaatgtttatagtggtgatgttatctcgaatagatttattaatgtttcttgggcgtcaaagtattatagagataatccggatgcgtttgtttttgtaaaggatattgttaagaagagtgaccttgggatttctgatattgagattcatgagtcaataaactcaaatggggataaagagttttttcctgtttttatgcataatacggactgtggacccagcgaaaataggtggcttactgcctgggatgagtcgcgtggaacaattgcactatataactctttgtgcatgtattgggatgttttgcagaccgggggactccttcttttagacgaatttgatgttcactgtcatagtatgcttttgcctcggttggtgggtctgttcttgaggaaagagactaatcctcataatgctcagtttatgtttactgctcatagtacggaaattatggatgtgctagggaagtatagaacgttattagtcgctaaggaaaagagtgagagctattgttacaggttggatgaaattcctggggaccttataaggaatgatcgttcactatctgctctttatcgtgaagggaaaattggggggattcctcattatgacgactaa

SEQ ID NO: 363202 - DNA, 264 bp, Pseudomonas aeruginosa
atgaccaccgagaacaacacgcagcagcgcgacgagctgctccacctgctggaaagttcgttccgtgcgctggccaaggcccaagacgtgcgcacctaccgtttcgatatcggctacctccagggcatgctcgatgccatggacattctgcgcgttgccgaggcaggcctgttcagtgctgaagagctgcacggactgttcgagcgcaaacgggtggttggcaacgagacggcaatgcggatcgagggcgagccgcccggctga

SEQ ID NO: 363203 - DNA, 186 bp, Pseudomonas aeruginosa
gtgaagcccgtcgagctcgagcacttccaggggatggccaccggtgccgagcaccttgagcacctggtggagcgcgtcgacctcgatcacgtccaggagatggccatcgccgccggcggcaccgagcacctggtgccgtggatccccgcccgccgcttatctagtcgacaagcggtcgcatattga

SEQ ID NO: 363204 - DNA, 636 bp, Pseudomonas aeruginosa
gtgagtgaccaacttgtttcgccgcaggatacctacggtcggctgatgaacgaggccagcgatagccgtcgtaagcgcagcctggaagccatcaacgaggcgtgccggctgctgcatgagcggcattcctcggacttctcctacaagaccatcatcacccttggcaaagaccgtgggctgccggttcccggcgaaaagtccatcgtcaattcgaccggcgcgcattaccgggaactgatccaggcgtggaaactctcgtcgctgcccaaggccagtaagacaaaggctgatccaaatgattggatcgaacacatccaagacccagtgctgcgcatgagcgtcactctgcttgccaaggaattgcgggcgctcaaagccaaagaggcccgaaaggcgaagcatagcgctgcccctataattttaggaggtggcacgaggcaagcttttccgaatcagcctcgtctcaatgatgctgagttggcagcgctcagagcagcaattgatccaaaagctctaaggcttgtcggattttctatcggtagtcgtggcgaagttgttgatgctcggggaaggatcatccacaagttcggttttcgcgatgctatcgagaaagttctagcggtgccggtgaggtaa

SEQ ID NO: 363205 - DNA, 3345 bp, Pseudomonas aeruginosa
atgccagccaaaaaaaaggatttctatacctacaccgagacccaggccgctgctcaggcgttgggcattaaaacccagtctgactacaacaagcgctaccgcgaagacccgaggctgccggcccaacccaatagggcctataccgacgccggctggatcgattggtatgacttactcggcaataaacggccaaatctctacccgacctacaccgaggcccaggcggcagcccgggcgctgggcattaagacccggtctgactacagcaagcgctaccgcgaagaccctaggctgccggccagccccaatatggcctatgccaacgccggctggagcaactggtatgacttactcggcaataaacggccaaatctctacccaacctacaccaaggcccaggcggcagcccgggcgctgggcattaagacccggtctgactacaacaagcgctaccgcgaagaccctaggctgccggccagccccaataaggcctatgccaacgccggctggatcaactggtccggtttcctcggctatgaacggccaaatctctacccgacctacgccaaggcccaggcggcagcgcaggcgctgggcattaagaaacagcctgactacagcaagcgctatcgcgaagacccgatgctgccggccaaccctaaacaggtctatgccgacgccggttgggtcgactggtacggcttcctcggctataaacggccaaatttctatccgacctacgccgaggcccaggcggcagcccaagcactgggcattaagaaccagtttgactacaacaagcgctaccgtgaagacccgaggttgccggccaaaccctgtaagatctatgtggacgctggctggatcaactggttcgacttcctcggtaatgaaaaccctagcgctgcgctagcggactacccgctgatgtgggcaaatgttgagcggtggctgaagagccaaacgaacatcaccggaaaaaaatccgcgatcaaggcttttctgggcggtttctatcagtttcaaaggttgcccgacgaacccaggcacctgctgctgcgcgcaacttcattccctaccgaggcctatcagcagttcatcgaggcccaagccgagtccctaaaaaggccttatcacgttgctatcacggccttttttggctggcttttggatgaacactgcaccgatgctgacgcggacgagcgcattgtgcttgctgagtaccggaacccctttcaaacggtgctcgccggctttgccgatggcttgcaggcctaccggtccagcgagtccaccaagccgccgctcggttacgaatacatcctccgggcgcgcaatttcctcgtgccgaacggagaacaggtattgcagacacggcctagcctgacggatttgccgcacctacaagacttctttgcgacccgcgccgactggttttatgtggatgagtcgttgatcgaccgcgacgatccgaactgcatctggcgtgtggttaaggctgaccgcaagatgaaagacaagcgcgaggtggtagacagctatcagatttggtcgcctgttcgctttgtggcgctttacacgctgctgcgttttccgctgcgcggccaacagattctctggctcgacagcggcgaggcggatgatgagattgccgttcttgatgctgagcatggcggtgttcgctgggagaagaacaccggccccctgactgggaaagggagcaagaggcgccgcccgcaggctgtggtacagcgcggcgataaggaagcgccaaagctctatgtgactaccaacaagaccggacgccaggaaggcggctacgaagttccgtggattcctgatgatctgctctattggttcctcttgctgcgcgactggcaagccaagtacaacccgctgaaagagccgacgcgctggtctgacatcaagcttcgcgccgaaaccaatgagaagattttgcaggcacgtggcacccaatgctttctgtttcgcacggacgcctcggggcagccggcgttcaccacaacggcttttacccacaccttgccagcattgctctacgtgattcagcgctccggcgaaaaccttgccagcgaaagcccaaacttcaaagccaacaatcagcgctatctcagtccctacacaccgcacagcctgcgcgtcagcctgattacggcgttcatcgcggacggcgacgcgcccattcaactgatctctaagctggtcggccatgcctcgctggtgatgacgatctactacaccaagctgaacaacgatcagatgcgccgcgccatgggcgagactgaaaagcgcgccgctcagattgccactcagcgccatgccgaaacggtaaggacgcagggattaaagccgcttctcaatcaactgattgcaacagccgataatcgctcgctgctcgaatctgacgtgccgaactcagcctgcatggtgttcgattgcggcatctgccctatgtcaggcgcggcatgcaatagcggcggcgaggctctcgctgagagaaaggttgaaagtctctatgcgcctgtcgaggcaggttatctcggtaagaggaactgtcctcgctgccgcttcttcgtcaccggagttccgttcctgggcgggctggtggcgctggctaacgaaatcgcattggagattcatgcggaaagcgcacgttttcaaaagtacacggaagaggttgtgcttttggagcaggcattctacgacctgtgccaggcgagtcagctaaacacccaaaaggagccggcagggcttaagcagtcaaaagccatccaggagcagagcgccgggaagctcgacggcctactggctgactatgtagccgtcaatcactacgtccagggctgcctgaaacttatcaatgaaggagagcagagcggcgagggcgagagtggggtcagactgatcgccggtggcgatcttgctgaggtcggagtcgcctttgaagaatccaagacaaactaccatttgctggccgaaatctgccagaacgcgactatctaccgttcggctaacccctctcgggccgtgccgctgatcgcccaagccatcgaccgcatggccgagaataacggcttggcaccggccatgttcaggctcgacgacgaacagaagctggtcgttgccaacgagatgaaccggattctccttcaacgtttggggtcctgggaagagatcgacgacctgttctcgggcgacctgatgctgctcgacattgacactcatgagcccgagttgacgagcatttcgaccgagatcaaacagcttctctccgatcccattcgcgtgtgccagttgaaccacgaggcttctatcagtgagtga

SEQ ID NO: 363206 - DNA, 1383 bp, Pseudomonas aeruginosa
atgccaacaatccttgagtcgtcccaccaagaatttagatcctttgtggtcgatgcgactggcatacagcatgtcctgccagtcatcgtgaccgagcatggagttctggatcagtttgctcgatacatgcatttgaatcacagaaagagccgttcttggcaggagtcctcggtttttgcagtgcggttgctgttggagttcatcgaggccaaccatggtttctatgacgagccgcgtgcgctgttcactgcgttttcagatgcattgttctcgggtactgtctcgaacatcggcgatccttctggtctgtggtggcagcccagacagccggatgacgctggtaagctgatcggccatattacgaagttcaccgattggctggcgctcgtcaatgaggacgccatgcttcagcttaatccctggcgacaagcgactcggcatgaagaaaggctgaattgggctgcgtattcgcatcgtagggataaagcctttctgtcccacctgtggcgttccaaaccgcagacgagccagtccagagcagtgcgctcaagaacgctgccggtggagcggcaaacgcctgccaaggcatttccagaggaatgcttcgatcagctggtatccgagggcttccgtagacgggcgcgagattcacgcgggccgacagatcttcgcaatgtcctaattacctacctcatgcactatggcggagtgaggctgtccgaagcgctgtcgctgtggagcgatgacgttagcgtagaggctggggaggtcatcgtccgtgtgcatcaccctgaatatgggctggcaactgacggtaaaaccaaccgcgccgcttaccttcaaagccaatacgggctacaacctcgcaaccggctggtgaaagcaaccgacccgctgtttctcggctggaagaacggactgattaccgacccgcagcgtcgctgtttcgagatgttcttttatccctatgatgctgggcaggcttttgccggcctgtggcgtgactaccatcttaaacagcgggtgaagccgaaggttggcgaagctcacccttatgccttcaccaacagggccggccagccctattcgcaccggatgtttcgcaaggcccacaagttggctgttaagcggatcgggttggtgtacgagaagatggagggcaccaccccgcacggccaccgccatgcctatggccagcgcctggctcggggtggcgccgacccgctgctgatcaaaaacgccatgcaccatgcgtcgatcacatcgagtcagacctatacacagcccacgacttcacaaatgcgccagagtctccgcgacttggacgctcggctgcggttgcagcatgcagacgattcccacgacctgttgactaaagactga

SEQ ID NO: 363207 - DNA, 813 bp, Pseudomonas aeruginosa
gtggcaaaccttattggttccatggggcaggtggactacttgaagaagaacgaggctttgttagtggatcagattaatgattcgctaaaagggtacgctgctgagttggatgttggttatgtcagctataagcctccgtcaacggatcagcattttagagacctagacaggtattgtggtgatatcgtagctgcaataggtaatatttccgctttggtcctggaggtaaaatttaataatagtggaagtttgaatgacctcaattccgatcagcagagtggtctgattgagcttcaggggcgcggcgtgccagtgttctacagctataatgtggatgagttcagtcgtttgcccaagggggcggcacagcaattgagattcatgactgcgatagagccggcactccaaattaataagaaagcgatcactgtccctgaatataatctcaaggctgcggtcgatcacctgattaatatgccggctgagcacgatgggttggctgtggctttagcgagcttcgtggatgccgaagaaagcatattgaactcaggggttgagaagctaacgacaaaggcacttttgcttatatacgatcacagcacatgcaggttggcatgcctcagtaaggaggctgtgttgtatgtgatacagcgcgttatcaatggtgagtatttggctgagagtaagaagtcagctcatctggctgtaactattaacaggctgctcgctgcttggtggaatgagctagataactcggaagaaattgaccagcggaatgaccatgggtctggtcctgggatgtcgttccgatag

SEQ ID NO: 363208 - DNA, 903 bp, Pseudomonas aeruginosa
atgtcctttctcgacatattgaacgattcacttaccaaagagagaggtggaaggcatggcggaaaaggccatgagtttcaacgctactgggcgctttgccacctgttacaagtcgatcttgagaaagatgactatctaattcttctggaatttattgaagatgtcgctgtgcttaacagcgaaatcgctcccgaccggatggagcttttccagttaaaaaagaaagagggtagctctagcaaatggacaaaaaccaccctagctaaacctccaaaggacggtaagtccataattgcgaagttacatgactcgaagtccatcgcaaaaagcgagacaacagctattgcctttgtgagtaatgccccagttgatctcaaacttgatagtggtgaggactcaacggggctctctgagttttctgctgctcaggttaatgcgggtttagtatcagaccttaagtcgtcagtagctgcggagttaggctgtgatatcggtgatattgattttgataatttgaaatttatccggagccatttggcgatggatgacttggagaatcatacaacaggcagggttgcgaaatttcttgctgaaaaatttcctgatcattccactcgtgctgatgtgttatgcaaggcaatttatagtgaactaaaagttaaagctacgtctacagaagaggcagccagctttggcgacctcaaaaggattcgaggaatcgctaagcaacaattttcatcgatggttgctcttacactgtcgcgtaaatccgatagcgatgtacttgatggctttttggcaggccttgcgcaagaaaatgtgccctacgttcagcgcgatgccataaagcaggcagaagtagtggtctattgtctctgctgcagcgccatgtggaggatctga

SEQ ID NO: 363209 - DNA, 318 bp, Pseudomonas aeruginosa
atgcctacagaaaacaaaatcgattgcccggcactccacaatcgaagcagtagctacccgttcggcgatcgagtgccgcgcacggtacggatgctgaagacagtgaccgccgactcaatgcctggcatcgggctcgcctacatcaagggcgatgcgccagttgcaaaagcgggtcaaacctatccagtgtggacgaatagccacggcgccgtcacagcggtcatggaggacggcgcccgccttggactgcgcccggcagaattcgaggtcgacagctggcaccaccttgcaactgcgccagccccgcagccccaatga

SEQ ID NO: 363210 - DNA, 282 bp, Pseudomonas aeruginosa
atggcaatccacatcagctatgaagaaatgcttcgtcaatcgcccatggcggtgcatgacatcctgctgcacaccgtttctaacatcgacgcgattctcggagatggttacgccaaggagcatccagacctgattgcagcgtgtgtggctgctgccactgcagagttcaacaatgggtccatgatcgtcgcaatccaggaagcatccgaacgagtcgcaggagcgttggagctcgctggtcgggctatccaggctgggctggagcgccagaacgatctgtag

SEQ ID NO: 363211 - DNA, 186 bp, Pseudomonas aeruginosa
atgctcaacctcgcgtcggtgctcggtatcacggaaattcacaaggctcttaccgccggatcgagctacatctatgagccgcaggggaaggcggttggacattacttcgcgtaccagagcgctacgaatacgatcctcgatctgtcacgtaaggttctggacgctgagagggctagaaagaactag

SEQ ID NO: 363212 - DNA, 192 bp, Pseudomonas aeruginosa
atgagcaaagtcacgcgaattcgccatgagcttccggtaagcatggatatcgtccatgcggtggcagagttcgatgcggctccggtgaaagcgattgatgccgcgaaggaagccggacttccgcagggactgctggttggcctgcttcaagggcacgtgcacgccgagacggacaagatggtggcgcggtaa

SEQ ID NO: 363213 - DNA, 330 bp, Pseudomonas aeruginosa
atgagtgcgaaaatggacgagcaggcgcttctggcgttgctccgcgagctggccatcgacagccagcgggtcgagcatcccgcgatcgcctccatcgaggaatattacgcgcagggcatcgaattgcccgaccagggcatcaagaacctgttcctgcgcaaccgcaagggtactcgccactacctggtgctgctcgacgatgccatccgccaggaccagttgctcggtttccacccgttggtgaataccgccaccgagtgcatccgctacgcagacctgctggctttcctcgcccacacggggcatgaaccgcgcctgatccgggtgtag

SEQ ID NO: 363214 - DNA, 1206 bp, Pseudomonas aeruginosa
atgaaccagaaaatttccccgccttcacagaagctcgacggcctgttcctgctggccctgtcgatggccgtattcttcgtcggcgtgaccgagttcatgctgtcctccatgctcgggccgctggcgcaggcgttccacaccactaccagcggcgccgcctggctgatctccagctacgcgttctcctatgcgatcgccgcgccgttgctgggctacttctccgaccgcatgcaacgcaggaagctgctgctgctcgccctgatcctcttcgcggtcgatactctggccatcgtcatcgccccgaccctggaaattgccgtcgtcctgcgggtgatcgggggcatcgcctcggcaatcatcatcccgaccaccttcgccctggtcgcggaggtggtcgccccgcaaagacaggccggtgccatgggccaggtgatgctcggcatgaccctcggcattgccgccggcccggcactggccggcctcctctcggacttcttcggctgggcgacgcccttcctgatggtctcgtgcggttgcgtgctggtcttcctgatggcgcgccagcgccttcccgtgcaagccgtggcaccgcgcgccgagggccacgcgctgggctggtgcaggcaatggagcatcctcaggccactgatcgccaagggtgcctggaacggcaccggggtcgccggcctgcttctctcgggagaggtgctgcgccagcgctacggcttcagcaccgcgcagataggcgtcagcatcgccgccttcggcgtgggcctggccgtgggcaacctcgccgcgggttacctgcgacgttatctgaagcgcgacgaagacatgctcctgctggtgctggcgctcctggtgctatcgatgtcgaccttcatgctcctgccgctaccgttgcccgtggcgctctgctgcctgggcgcctggggcgccgcgctgggcctgggcgcgccggcgggcacggtggtactcgcctcgcgctccgggccggacaagggcatggtgctgtcgttcgccgagacgttcaacaacatcgccattctcgccagcgtgcccctggctgtgcgactgctggagctgaaggggccgcccgccaccctgtgggtattgggcatcggcctggggatcggcgcctggctcaccgtgctggactggttcgccagccgcaggagcgacgaggcgctgccgttgcgcgattga

SEQ ID NO: 363215 - DNA, 186 bp, Pseudomonas aeruginosa
ttgaacaagatcaatcccctgttgatgccgctgctgatcatcacactggtcggtatcggctctgccatcatcttctacgcagtaggcgagaggtacaaccgtaacggcgagttcggtttcggctgctcgctcctcactctggtgtatttcctgcaccgcaggtgggcccgtcatacttctgcataa

SEQ ID NO: 363216 - DNA, 567 bp, Pseudomonas aeruginosa
atggacaagcatctcaacggtatcgatgtcgctgctctgcaagcattcgcacaggacgtcgctgaagatccatccaagcgtcacgcacgcttcaagatcaacaccaagtgggagcatcagacccgcaccgtggccaccatcgaccgctttcacctgagcggtaccgactacccacgaaatgtccagatcgcagctgatgagccgttggaactgctgggcaccaactctgcccccaacccgcaggagctgctcatctctggtctgaacgcctgcctctctgttggctatgtggtgaacgcgtcagtcatgggtatcaccatccacagcctggaaatcgagaccagtggtgaactggatcttcgtggcttcctgggcctggacgaaagcgtcaacccaggcttcgacgagatgagctacgtggtgcgcatccacactgatgcacctgccgacaaggtggaagaactgcatcgcatcgtcaccaagacctccgtgaacctcgccaacttctcgaaggctatccgcatggtgcccaagctggaagttatcgctggccagccagctgcctga

SEQ ID NO: 363217 - DNA, 672 bp, Pseudomonas aeruginosa
atgaagaaaattacggttgaggtctggtccgactttgtctgtccctggtgctggatagcaaagaggcgcttggagaaggccattgatgatctcaaggatgaggtcgaagttgaaatcgtgccgcgtgcataccgcttggccaaaggcatgaccccgatctctttcaaccaggctttggtacagaaaaccggtagccaaggtcgagcggacgtgttcatggaagccgtgcaagaaagtgctgcacttgaggggctggactaccggtttgacgtcatgcgcttcggggatacctccgccgctcaccagtacgtgaaggcgatttctgacccggctctgcaggcacgctatgtcgagcggctttatctggccggaacgactgagggcaagaatatcttcgacgaacgggtcttgcgggacctggcgacagaggtgggggcaacagacctcgttggttttgattcggcggaagccgcaatcctgagtgatgaagcagcagtgaacggactaggtaccggcattccgttgttcgtgatcaacggcaaccgctacatctccggtgcacaggagccggcagtgtttatcaaagtgctccgtgctgcgatggaagagctttcgagtgatgaagaggcaatcagtgccaacagctgttcaatcacgggctgttcgcactaa

SEQ ID NO: 363218 - DNA, 366 bp, Pseudomonas aeruginosa
atgctgaaagccccattagaagaagctctgggggtgccgctcacattcactctaggttatgtcgagtacaacgggcacaatgttttccatagcgatacccgtgatctcaagacgatgctgaaaaagggcgtaccttccctagctctgaatctgcatgcgtggctcacgctgccaagccatgaggtaattgatatgacatttggcacaacctacggcgtggtcaatgaagtgccggatgtcattggccgcatgtgtttcctgcatccggatgatatgaccgccgatatgcagtatcacccgcagctgattgggtgggattacctggagcggatcggtgctactcacatcttgctgatgccgtcttga

SEQ ID NO: 363219 - DNA, 1035 bp, Pseudomonas aeruginosa
atgagccaggagccaagcctccccgagcagtacgcacagcttcgccaacttagcgacagcgctcctgcgccgttgaagcgtaagcgggggttcgacttcgaacgcgtgttgaagcggctactggacgcggatggtctggagccgcgctctagctacaaagccaagggggagcagattgatggctcgttctacctggacgggactttcattctcctggaagcaaaatggcacgcagatccgatacctgcttccacgctttaccagtttaaaggcaaggtggatggcaagctcgtcggaacgcttggtgttttcatctcaatgtctggctattcagaggatgccgtcgatgcgctgactgcggggaagtcgctgaacctgatcctgttcaacaaagaggatatagacgccgccatcgcaggcaaacagggcttcaagactattctgaaggccaaactgcgtaaggctgccgaagaaggcttggtgtattacccgacagcaattgagctggtggaaagtgctggaacggaaggtgtggcaatcgaacgcctccacttcgaccgtatgacagacagggtgcttggccgaccaggcccgtcatcagctgacctcatcattgtctgcgagggggactcagacagagaggttctagctcatctcgcgcagcgaatcctggagaattcaccgtcatcgaagaaaatcgaggtgatatcagcactgggcaaaataggtgtacccaaaatcgtcaacgcccttctgatgaatcagcccgaggtcagggttttggctgtggttgatagtgacgatgacatcgaaggcacccagtcgatgctggataagatcatcacctctaccaactgggcgcccatcatcatccatcccagaatcgaacaatggctgggcctcaccagggagcaggtgagacgctatccgcgcctcgaggtctactccaaagcgcttttgacattggacatgagggcgctgcgggcgacagaccctgtgttccagcggttctatgacgaagtcagctcaatctga

SEQ ID NO: 363220 - DNA, 1719 bp, Pseudomonas aeruginosa
atgaagctctccgatgagcagaaagacataatcaatgcacctctagagcctatcgctgtcacggcctgcgcaggtagcggcaagacagcaacagcgatcaggcgcctgattgccgtccggcaaaaaatggaaaacagccggggtcgagttgtccttttgtctttctcgaatgttgcggtcaataccttcaacaaaggctacgcccagctcgcttcaaacctaccagatgacgccaaccgcaaacgtgtggaagtggacacgctcgatggtttcttcacccagcatgtactgcgcccccatgcttaccggacaatgtcctcaggccaggctgcgtaccttgtgtccggtacagagccgttcctggctaactttaaatactggcctgaggaaggacgtccgacccccattaaggacgtcaaagtgggcctggagcatgggaacttctacttctttactggtacccacgatgatttggtgaggctcgatactgccaaggcatcagatacgatcaagcgtctgggccgcatcggggcctacacgcacgagcttggccggtattgggtataccgtactttgatagggcaacctgcagttttgcgagcgcttgccgtccgctacccgcaaattttggtcgatgaggcccaggacttgggcaccgtgcaccaggccattttggaattgctcatcaaggctggagttcaagtctcgctcatcggtgacgttaaccaggggatttacggcttcgcaggagctgacggttcattcctgagcacctattacaaccgtgcaggggtgaataattataagctcacgcgcaattatcgctcactgcctccaatcatcagcatcgctaattcgctctgtggccgcgaggatgaagccgatcgggagcctgaaaacggaggggcgtacttcgtcggatacaacgactccgagcttcctaagctttttgaatcgttcaaagcgcaaattgatgacctaggcatgcaatatcaagatgcggtgatactcagtcgggggagtgaccgggcggtagtactttccggcaaagccgctccccccggtcaaggtacggttgctctgttcaccgaagcagcattgctccgagaccagcagggccgctatcaagagtgctttaagctagtatgccgagcggtggtgggtttgatggagcagccgccgcatggtctcagcacccatctccagggttccccgcaggatgtatcgttgcttgggcttagacggttactgtggagcttcatccgcaacgctgaggccgggctaccttcatctactctattggccaaaaccgagtggcaccccaaattactgaccaatatcaaaaagcttctcgcgacgaccgaagggctatatggcttgaaggccgcggacaagctgggcaacaagctggctaaaaccggattgttggatcttcccctgactggtgcggtggaggagaaagatcggagccccggaatcagggtagaaaccatccatcaggtgaagggcgagtctatcggtgcggttctgtacgtagccaaaaaaccgaacgtcgacgccttgcttgccggcacccttaccgaagaaggtcgcatcggatatgtcgctgtgaccagagctcggaacctgttctggctggccgtacctcatacctgcctgaaagcactgcgcccaaatctgattgccgctggtttcgaagagtttcctgcccgtaggtag

SEQ ID NO: 363221 - DNA, 1881 bp, Pseudomonas aeruginosa
gtgtatctcgctgagctgaccataaaaaacttccgcaagctgcgggaagccacgctgaagtttcagcctgggttgaatgtattggtggggccgaacaacgttggaaaaagcgctgtagtggatgcgctgcggacattgctggctgggcatgacgagccctatccccgtctcgatgtgtcggaccggcaccgcccggccgaaggcgacccggctggcgacattaccttccattttgtcttccgcgatctaagccacgacgatgaagcggattttatcgcggcacttaagcctgctgctgacaagaccatggaagcccatatccatatccactataccgacgcagaccctacaggacgtttcagggtgaaacgttggtgcggtgatcaccaggacgtggcccttacttcagacatgatggaaaaccttcggggcgtttatctccagcctctgagggatgccgctcagggacttcgacccagccgcaacagccaattggcacgtctgcttcacctccttacggatgaggctggccgcgacgcgatcaacgaagcattaaaggaactggacgaaaagctccaacagaccgaagcgatccagaacacccataccgcgatttcgtccagacacggcctgatgatgggcgatcaattggcacaaacactcgctgttgggcttagcgcgacggactttcagcggttatctgctcggctctccctcacggctcaatcaatggaaattgagcagaatggcctgggtttcaacaacctgatttttatggcggtagtgctgagtgagctggccaagaatccggacgccgcgtatcgcagcctgattgttgaagagccggaagcccatttgcatcctcaactgcagcgcgtgttgttgcgctatcttgcgggcgtgccaacgagcgaaggtgaaaaggcagtgcagctgttcgtcaccagtcactctcccaattttgccagtaactccaagctcgaatccctggtgtgtttggtagagaacgatgctggcgtagagaccttcttcccgcgcgacatcaaattcggtaagggcaaacgcgaaaagcttgagcgttacctggacgtgacccgtgccgagttattttttgctcgccgggtcatttttgtggaaggcgccgccgaactcatgctcgtcgatgcccttgccaagctcatggggcttgatctgcgagagttcggagtcagcctgatcagtgttgagggactgaatttcgattccttcctacccctgttcggtgaaaacggacttcggattcccgttgccgtcgtaaccgacgccgatcctttcgaggaggaagaggctcaggatcctacggaacgtccgctggatgcaggagacatcgaagacattctcgctgaggccgcgtacctcgaagaaacagatgcccctgacgctgaagatccattggctgagcctgcgaagaaaaagaagaagctcaaacggaaagaagtctatccgtcgttgggcgacgaagtgaggctgtcgagcaacacccttaagatgaaggaatcggaagacgctttcgtcaaagtgttccacggtttgaaaacgctggaatacgacttggcattgcttgaggcgaaccgtgacccgatgctcaaggccttagctgaccctcacccgatcatttcggcagcgctacgcaagatcgtcgaggttcagccagacaacactgcgaaggcgaagacactgttttgcggcatgttcgagcgtaaagcgagtagcggtaatctgcaaaagggtcggtttgcccaggctttggctgaacagattgccagcacgccaacgtgcgaagtgcctgactatctccgcaaagcgattgagcatgtctgccagggagtgatcaaaccatga

SEQ ID NO: 363222 - DNA, 321 bp, Pseudomonas aeruginosa
atgtctggttctggcgtcagctacctggggccttccaccccgaccacttcctgcaccactctccaatttgatacccagctggcctcgccgaaagcagcggtggtcactcagttgaaaccgaacgacatcctcgacgtcgtcttcgcccaggccaataacccgcagatcgtaatcgccctgtggaacggcgcggaggccggcagcattgtcgacccgcacctcacccaactgcgcaattgcatgggccaaggcgagatgtacaaagccaaggttctgcacgtcggcggcggccaggttcgcctccgcatttaccacgtctaa

SEQ ID NO: 363223 - DNA, 1212 bp, Pseudomonas aeruginosa
atgatcaccatcgttggtggcgtgtaccgggagaggtgcatgcgtccggcttgggacgatatttacgggtctgctggccgggcagccgccgctatcgcccgcttcggcggccaggctgagctacacgcgtgcatggacgattacacccatgtcgttgtcgaggctcgcgcgactgctgaaggtttcaagttcaaagccacacccgaacccgccagcgtcacctttgagtacatccatggcctctctacgcccgacatccgccggggcgtacaaggccaatcggacctgaatgtcagcgccgacaaggttctgcgattcggcatgatcgacggaacggcggtcatcgaagccgactatgccgttttcgacccgcagaatgccgacgggccagagtcctttgcctccaacggctcccgtgccaatcacctggctctggtcttgaatcgtcatgaggcgaacctgctggcacctggttacgcacacctcaaggctgaagaccttgcaactgccttagcaaaacaggaaaacgccgaggtggtcgtcatcaagatggggccgctgggtgccttggtgtatgaccgcggcactctttccacagtccccgcttaccgtactgaaaaagtgtggaagattggctcgggagacaccttcgctgcacatttcgcgctggggtggatggacaatggcctgtcggcccataaagctgcagagatcgcctccatagcgactgcgttctattgccaaaaccagggctttcccgacccggctttgctcgccgactttaaaccgcagccactacaaccttcggcccgctaccgggatggctatgtcccgaaggtgtacctcgcaggaccgttctttacgctcgcagaactgtggatggttggccaagctcgccgcgacctcttggccatgggcctggatgttttctctccctatcatgatgtgggcctcggcacggctgaagatgtggtggcgaaagacctcgaaggcatccaccaatgcgatgcactgttcgccattggtgatgggctcgactcgggcaccatctacgagatcggctatgcccgcgccctgaataagcccgtggtcttttacgccgagaacgagtcagagcaggatcagaaaatgatggagggctcagactgtgtcatcaccgatgattatgtgaccgcgatctatcagacggtttgggaagcggtggtgctatga

SEQ ID NO: 363224 - DNA, 924 bp, Pseudomonas aeruginosa
atggattccaccgcgacggctcccccgacttcatgtcggccatcagcaaactgctctctctgcaagagggcggtatggaggtccaagcgcctgcaatcggccttacgaccgccgagctcgtccgtaaatcaggaatccctgccagcctcttggcgtgggctcacagctgtcacaaatcccacgttgcgtgcggcgattgtcgaggctgcaacaagtacatggaagtgttccgtgaggtggggtatgacctggatcgacctcggtgatccggtacctcgctcaacgcccgagcgatacacgccgatcgactggagagtcggagaagttcatcagttgccgacgcagacacaagccctgaaccgccctttcggcgaagtcctcgatacacgcgccactcaccggaccttcggggtggttgacgatgaacaactcggcgcttttctctggtccacctgcagaacccgcggctctgccgcgtcgcatcttggctttgaccttgagcaccgtgcagcaccttccgccggcgcgacgcaccccgttcatgtcgtggtgagccgacctgcggataggcgctggtggttgtatcaacctgaccagcaccgactggctgaactcaaggacgccgacgtcgtgctcgcaggcctgtatgagctcagcctgcaggtcctcgccggaggcgacgccacacgcttgctgctcctggccgaacctgggaagacgctgggaaaataccaaaacggctgcagcctggtatggcgagatgccggtgtgctgctcggcgtgatgtcgctcaccgcggcagcccagggacttcatttctgcccgctgggcatcacgggggatccctgggccagggctctagctgatcagggccaactggccggggttggacttgctcttcttggtacggccacgggagcctga

SEQ ID NO: 363225 - DNA, 834 bp, Pseudomonas aeruginosa
atgcaactgggcgcaatttgcttggaccaagtggtcttcaatgtcgaacttcccaaggcggatgccgaggtcatacccggcgtgccgtggggacctgtggaggctttcccgtcaccggcttactgggcttatcaggtttatgcccgtcggttgatcggtgatcgaatcaactacaagcttggcgcgaccttgaaagaagaagtcggtgcctgcttgctgggtgggcacggtatcccagccagtgttggcctggctgcgtttcatcacctcaaggagcacggtgctttcggtgaccagcctccatccgaggaaacgttgtttgagtggcttagggagccgctgactgttgaggaccgccaagtgcggtaccgttttgccaagcagaaagcccgttacttgagcgcggcgctgcagaagctttccgtcgagcgcgcaccgctcgagtcgggaagagctttacgagactggctgctagacgttccaggcattggttataagacggcctcgtgggtcgcgcgcaactggctggatgcagatgatgtggccattctcgacatccatatcctgcgagctggcttgttgggcaaattcttcgatagtcacctgaccgttgaacgtcactacttggagctcgaagatcagttcatccgcttcagcaaggggctgggtgtacgcgcctccgaactggatgccctgatgtggctggagatgatggcttcgccgagcacggtgcacagcataatgggcatgggacaccatgcgccgacatcaggctcccgtggccgtaccaagaagagcaagtccaaccccggccagttggccctgatcagctag

SEQ ID NO: 363226 - DNA, 576 bp, Pseudomonas aeruginosa
atgcgcaacaagaaagccgcgcagcgcaacatcggattggacctggacgacaaagtcattgcgctttggcacgcacagcatccaggcatttgcgagcttcaccaagtcgatgcgatcgctttcctggaagggtatgcgttcgagggtcatgaactggtctatgtcgacccgccctatgtccctgagacgcgccgccgagccaaggtctatcgctgcgactactcggaagatgatcacctgcgtctgctgcggtgcttggccgcgctaccttgcaaagtgatgctttcgggctatgactgtgatctctacaaccgtgagctcgttggatggcgcaaggtgactttcccggccaagacccatgtggaggtgcgtgaagaaacggtatggatgaacttcgatcctcccgaccgtttgcacgacagccgctatatgggccagacattccgggaccgccaaaccattcagcgtcgccaaaccagactccgcagccgcatcgagagcctggacccaattgagcggcacgagctactgcaatggatgcaggaacactacggcagtgccgaggaggccgcctaa

SEQ ID NO: 363227 - DNA, 306 bp, Pseudomonas aeruginosa
atgagaatcactggtcctgtagaaactgaagctgtgatcgacgtacgttgcgacgtatgcgactcctctactcgactagcaagcggcaacctgcaatatggaatgctgcaggcgcattggggctatggtgctcttcacgacggcgaacgctatgaggtgcacctttgcgagagctgcttcttcgcgaccattgcttacctcaagcaagagcggcgcgcgaccaacatgtttgagaaggcctcgcagcaactcgaggaagatttcgggctggctgcaaagaatgacttcttccgggatggctgctga

SEQ ID NO: 363228 - DNA, 1347 bp, Pseudomonas aeruginosa
atgaacagagccatcgaaactcgtttcgactgttatatggacattgaaagcatccgtcgacgagttatcattcgaccggagccggtaaaggatttggaagtattccctgctcacgttgctgctgaggttttggctgagagattgaaggagatgtatatccctaatgagttttctctcaatttcattcatgaaatgatcggctcggcgtacctacacaacctcaaactcttccccagcgaagtgggctacgccgcgagagtcttcaaacctccagaggtggaggtgtcgccgatctgtctgaccggcttggctggggtaggtaagagccagacgatcgctgctctgcaaagggctttgccaccaccggtagagctcacttgtgacctattcgaaggctcggttgaactgacttctctgtggtatgcaagcgctcgcggcaaagccggtggtaagcagttgctcctggattttgttcatggcgttggccatgacgggcgcggaagcaacttggcgaaactgcttgatgagtgtcggcggcgtgtcaatcgtgacggcgtctgtatggtcgtcctagatgagacccagcacatcaataccggcatgggcgcatcaaaagtgactgacatcctgctgacgatggctgccatcggaccaccgatgatttttgtgtctaactacagcctcgtgcacaagctgcttcgtcgtaacagtgaggataagcagaggctgctttccgatccacggatcatgctgcccgaggacccaacgagccaggattgggcaaagtatgtagacgagtgcattaggattagcggtggtcgtgtcaaagcaggcaagaatgaatttgcagctgagctttaccgctccacctttggcatcaagcgtctcgccgtacagttgctgaagcaagcttatatcgagagtcgtgctgccgacaggaaacagattgagctcgatgacatacaccgtgcctaccggtccagtgcatacaccagtaatgcgatggaggtagaagagttgcagctgcagaccatcaagaagggatccagcggggcgcacttggatctgtggtgcccgttcgacttacccgttcagtataagtccaacgtgttgagcttcagtcgcgctgagcgtgatcagcgggtgcgggccagggttttcgattcggcagctaccgagacagagcgctcagtgctcgaacatatcgcctcgtcagaggaaccccccctagctaaatccgcccgacgagcacccgcccctaaggcgaccgacgaggatttgactcgggcctttcatcagttcatggaatcgcagtcgctgtcatctaatccgaaaaaacagaagtga

SEQ ID NO: 363229 - DNA, 2013 bp, Pseudomonas aeruginosa
atgagggcgggctcgcggatcctcgccccagaaggttttcttaaccttgcccgaggcactgtctaccacttcttggccagcgatggccggcgaaatcgagttcgcctgatcgaattcaaagacgacggaaagcgaatcagtactcatctggttcaactgtcccagatcgattttgaggaagcggtcgagaatggatggctagtggaggatggccaagctgattcgacgccaccctggctgacaccggtcgaaggtgtggccattaaccatcttgagaaccgccgaatctctcccaaagagagctacgagcagaaagtgaacaagcgtttcgctgcaatctcaagtttggtagagcgtcaagctcaggttttcataagcgatgatccagacgcttttatcaacgctcacgcgaaggctctgcggccgcaccagaatgcagccagaatcaggctctggttctattcttatgttgtattcggccaaaacaaatggtccttgctgccccctctccatcgaatcgggggctggaatcgtgaaggacctggtcataccaagaagtttggccgaccgtcccgtaagggaaaaagacatggatatcgttgtgactgtaccatgcagcagaaactcttgaaagggttccttgcttacaaatccccgcataaaactcaaaacaagatttatagtgaaatccttaccaaggagtttggttgcgttgcattcaagcagagtgacgcgacggtagactttaagcatccagaaggtaagccgtttccttcattcgctcaatttaagtattggatatcaaaaatgatcagctcgaaatcacttcgagttgctttgagaggaacgcatggtgctcgtgcacaatctggttcggagggaagcttttccgaaaatttgatcaatgtgaaccagcgggttgagtttgatggctattacatctccgagaagatttctgggctgacggaaggcagcgctgtcgacagcttctgcgttgtccgtgcagtttgtgcgctgtccgggatggtcttgggaatcggcttctccgaaggcaaggaaaatatggctgcttaccgcatggcgatctattccatggcctgtgataaggtcaaattctgcaaacagtttggtattgaaatcgctgccgaagaatggcccagtgccggattatcgggaaacatggtgattgatagaggccccgctgcaggttacgaaggagcaccagacattcactggttgaagtcggtcgagttgacgcctgtttattcaggtcaatccaaagccaccgtcgaatcctcccatcctagggacaagcagacgcctgggcagcctacctattttcatagcagattggattttgtccaaatggccaagcgtgagatcttgcgggttttgaaggataaccacacttcggacgctggacgacggttggacgaggagatgattctggccggtattaagccgaccccgcatgccatctttacttactggagcatgcgtgggcgagactcctcaattggtgtcccattcaatacggcggtgagggaatttcttgctccatgtccagtttcgataaggaaagagggcgtctatttatatgggcgtaaatataattcccgtgcgctaaaggaaaccgggatatttgacatggttgcgcggcagggtgtcatcaataccaccgcatatgttttggtcatgtgtgttcgccagatatggattgacgttaaagggagtttgtacgagctggattttgtcaggccaacccgcagttcgctaggtgctatagatatttccctgggcgaccttaaggagattgatctgattcgtcgaggcaaagctgcagatcttcgcgaagagcgcccagctcatgagcaacattatacagacagatttgaaaaaaatacgggcattgactgggacgctggtgaacgaaggattggacggccctctaaagggggcgctgccctgcgcgacactgccgattataatcgtttcagaggggctacgaaatga

SEQ ID NO: 363230 - DNA, 960 bp, Pseudomonas aeruginosa
atgaaaccgcaagaacgattcgccttgatcatggagcgccagagccggttcaaatggggtggggagtacataccgtccacgctggcgattccccgggaggctccaaaagggtctcgaatcagcaggctgcacagtcaaaagctgagacgtacgcttcatctcctttcctggccggagaaggtgttcgcgcagctagccctttaccatcctgatctgtttgagatgcatgagcagaaaatgctctggcctatcaatagatgccacccactgcaagggcatccgctgacgaaggggacctttccgccacctctgcgcggtacggtcgatatcgcaactgagatcggttttaagcattatgaaatcgtaatggaagatgcgagtggtaggcacagattgccatacccctatcagggggacctcttgctgtacctccttgatagccgaggaaatccttacgccgtcaactggacggtcaaggatcatgccggggctttccgtgagcgccggagcacttacccgaagactcctttgcaacagcgaaaagatcgggatcatgccgagcttaggggcgagatggagcggcgttattatgcgagcgctggcatccgaaccgtggaagtttctcgagatctgataacgcccacgatccaagccaatctggatctcttgtttggcatgcacggcttagatttctcccttgaagctgctctgcttgaggacttcagtggcgcagttgctgatgccgtgcgagtggggaagcctgtggcttacgtggcgatggagcacagtgctcggtggggcttccgtgaccaattcatcgctaagatctaccaggacatttgggatcgaagactcctcgtcgactttagcgagcctatcctgatcgatcggccactcgttactggcgggtgtgacctgcttcaggaattcgcgtcatttttcgatgagatggcattatga

SEQ ID NO: 363231 - DNA, 2013 bp, Pseudomonas aeruginosa
atggatgcgcagcagtttttggccgagtttgagcatattgcgaatgcgccagggggcgtggcgcggttgcggcagttggtcttctcgcttgcatcagaagggaaattgcttgccgactgtgagcaactagagtctacccaactcgacaaagttgccgacttcgtgatggggcaagctccccctggcaatgaatgcaacacaacgggcaatggaactgtcttcgtcaaaacaggcgagttcggggagctctatccagtcgttcgtgaatggacaaccaagccattaaagatggcgaagcaaggtgacgtgctgatttgcgttgttggggcaacggttggcaagctgaaccttgcaattgactgtgcaattggccgaagcgtagcggcgattcgccctcgtgccggcctggccaccaaatatttgtacttcatgttgatgcccttcaccttgcgacttcgcagtgattcacgtgggtcggcacaaggcgtcataggcaaggccgagctttcggcggttaagttgcgagttccgagcgacgaagagcaatcccgcatcgttgccaaagtcgatgagctgatggccttgtgcgacaagctggaagcacagcagcaagcccgccgaacactgcaaaacaccctgcgccagtccaccctgcaagccgtcgccagcagccaaagcccccacgaactgcaaacctcctggacacgtctggccgacaacttcgggcggctatttcatgcgccggaggatgtggccgatctcagaaaaatggcatcggaacttgcaattcgcggtgcgcttgacgtcttcagcgaaccaactgatacatcaacagttgatgtttacttggcagagttagcgaggaagaaatcgggcaaaagattcgcaaaatctgttcaagtggatgaggacattccacttcctaacggatggcgctgggttctgctagaagatttgctgtctgactccgattctggttggagtccgaaatgcgaagcgcaacctcggcgtgacggcgaatggggtgtgctcaaggttagtgccgtgacatggggcgctttcaatccagatgagaacaaacgccttccgctgtcacttgaggccaaacctgagtgcgaagtaaaaccaggcgacttcatgctgtcccgcgcaaacactgccgagttagtggcgcggagtgttatcgcgcctgatgattgcccgaagaaacttttaatgagcgacaaaattgtccgtttgatttttctggatgatgctcttaaagcgtgggtgaatttggtaaataactcggattttgctcgtacgtactacaaggaacgagctactggaactagtgattcgatgcgcaatgtatcgcgccaagttatccacgagttgccgattccgcttccttctttgaaagtgcaggagcgtgtcttgctcgccttaagtcgcctacttcaatattgcgactcattggaacaacaagcggcttatcgtataaggctgagtgctcaactttcggcaagcgccatcgccaccctcaccggcatcgctatcgaacaagaagaggaacccatgaaagccccgcaaaccgagttgatcgccccactgcgtttgggcgctgcgcccgacatcaaggtgcaagcaccattggccaccattctggcgcgccaccacggcgagatgagtgccaaggatttgtggcagcgcttcggcggcgagatcgatgcgttctacgcgcaactgaaaaccgaagtggcccacggctggattttggagcccgtcgttctacgcgttcgaagtgatttggaagagagcttcattcccaatgaactgaagccgaaagccctattgttcaagttactaaaaaaaagtggtggctcgatgtatgagaaggaactgcgcgagagctttgccgaagcaaatacttcttttgaagctcagctaaaaatcgaaatggattatgcatggattacgcgctcttcagcggctgtaatccgacctatttcagctgagtcagaggacgtttga

SEQ ID NO: 363232 - DNA, 294 bp, Pseudomonas aeruginosa
atgagtggaccggatagctacaacacgctggcgcaatacatgtgtatagaggatgaacacaagaaatgggataaaaggcttaacgatgcctataaaaaagttctctcttcacggatgaacgctcccgcatggaagatagcccagcgcaaatggctccagtttcgtgatgcacagtgtggtatctacaacttcaaagagcgtggttccgggggaggcgtcgatcaggcaatttgcgaactcaatctgaccatcgatagggcgttgcagttggaggacgacagctggccgtcttag

SEQ ID NO: 363233 - DNA, 912 bp, Pseudomonas aeruginosa
atgtccagagaaatgactcgacgcaacttcgtcaacaccgccttaagtaccggcaccgccctgatggctgcctccatgatgccctctgccttcgccggaagcgcccgaccggcaccaatcgaacaaggaaacatcaccaccccggacgggctacggatagcctacgagcggcagcgtaacagcaagcaggcggtcctgctgataccgggtaccatgtgcgacaggggtatctggcgtccggtgatgaatgccttccagggattcgatagcatcctgattgacaatcgcgactccgggctgagcagcctgagcccgagcgcatacagcctacgcgacatggcgaaggatgccctggccctcctcgacgagctgaagatcgaacaggtccatgtcgtcggccactcgatggggggacagatcgctcaggagctcgccctgttggcgccggaccgcgtcagccgactgctgctggccaacacctgggcgcggacggacaagaacatgaatgccatgttcgatagctgggaaacgctacgcaatcatcaagacgatcaagccttcgcgaaatccatgactcttttcggcaacggatcgagcatgctgtcgcggcgtaccgtcgacgaactgatcgaagccgcagcgcagatactcgccccccaggaaccagcggcgttcctacgcaatgtggctgcagacagaaaggccgatactctggaacgcctcggtgatatcagggcccgcacactggtgatctggagcgatgaggatcgctgcctactccccccacatgccaagcagttagaaaagggaatccccggcgccaggtcggtctgcatcaagaaatgcgggcacgacagcatgggtgaaaagagcagaaccttcatgaagatcgccagcgagttcctccgctag

SEQ ID NO: 363234 - DNA, 927 bp, Pseudomonas aeruginosa
atggcgatattgggaaaatttctagaatgcaccggacggttttccttgctgctcccagtctacgcgctcgccgacacagtgagcttgccttcattgacgctgggaaacaccagtttcgtcgacggcatattaggccctggcctgatctatgagcaggtgctcaaccactatagcgccaacagcctgcgggatgcccgaggacacgagatccccggctcgcagaaggttcgtgcgacggcgctggtctcgcatgccgccttgatcaccgagcagcgtatcctgggcggatactacggcttcgaggccatggtgccggtggtacatacacatctggatttcgatggcggtccctcgggctcgaagactcgactcggtgatattgccgtcagccccatgatgttgcagtgggatcccgtccgcctgctggggcgacctttctggcagcgactaaacctaaccttcaccctgccgacgggaagctattcgaagaacgcttcggtcaataccggagccaatctatggcaggccaacccacattacgcctttacctgggaactgaccgatcgtcttgaattcagcgggcggctgcactacgcctggttcagcaagaaccggcgccccgccgacgccctgcaagccagcgatatacaaccgggggcggcttggcacggcaactactccttctcctattccatcacccccgaatggcgagtcggcattgctggctacaacctgcggcagacccaccctgatcgcattgatgggcatcgacaaaatgactcgaaggagaaagtttgggggataggccctgggatcatgtatcgcaaggctaaagacattatttatctgaatgcctacaacgagcatggggcgacgaatgccagtgagggttcacgcttcaacctgcgctatatccacctattctga

SEQ ID NO: 363235 - DNA, 774 bp, Pseudomonas aeruginosa
atgctgcaaggcaaacgtatcctcatcaccggcgtcagctccggaatcggtgaggaaaccgcccgactcgtgcaatccctgggcgccaaggtcattggcgtcgacattcatcctccacgactcgatcttgagcagttccatcaagccgacctcggccggaaggactcgctcgaccgcttgctgaccgagcttccggatggagtcgacggcctcgccaacatcgccggcctgcctccaacccggcctgcggcgcaggtcgtcgcggtcaacctggtcggactgatttacctgacccagggggttctgcccaagctggcggacggcgcctccatcgtcaatctcgcctccctggcaggcatcggctggcccgaggcggtggacaccatcaagcaggcccatgacctgacgttcgaaaaggttgccgaattttgcaagaccttcgccatcgatgacgaccgcagctatttcttcaccaaggaggccttgctggtctggaccatacagaaccgttggacctggcgctctcgcggaatccgcatgaacgcggtaagccccggaccggtggatacgccgatcctcaaggacttcatcgaaacactcggcgaacgcgcggaagaagacatgcgcaccatggaccgcccgggaaggccgagcgacatagccccggtcgtcgccttccttctcagcgacggttcgcagtggctacgcggcatcaacattcccgccgacggcggcatgcacgcgcacatcctagccaacacctacggcctctag

SEQ ID NO: 363236 - DNA, 1467 bp, Pseudomonas aeruginosa
atgtctacgtcctacatcgacttgcacttacaacctttgggcgggacgtggagagaggggagttccggccgaatcctgaaggacgtggatccatactcaggaaaggtgctgctggaactgcagatggcgactgccgaagacttgcagcagacctatcagactgccgccgacgctcaacgggaatgggaggcccgcagcccggcacagcgcgccgaagtgctacttaaagccgtggatatctttgatgcacggcgggatgaaatcgtcgactggatcattcgcgagtccggtgggacccgcatcaaagccgagctggagtggatggctgcacgcgccatcacgctggagtcggcctcatttccaagccgggtccacggacgcatcgccagctccaacattcccggcaaggaaaaccgcatctatcgcgaacctctcggtgtagtcggcatcatcagtccgtggaacttcccgctgcacctgacccagcgttcgctggcaccagccctggccttaggcaacgcggcagtggtcaagccagccagcgacacgccggtaagcggcgggctgttgctggcaaggatatttcaggaagccggactacctgaaggcgtgcttggcgtgctagtgggacctggcagcgaaatcggcgacctattcgtgagccaccccatcccttccctcatttccttcacaggctcatcctccgtcggcgcgcacatcggcgttttggccagtggcggcgcccatctgaagaaggtagcgctggaactgggcggcaacagccccttcgtggtgctggccgacgccgacctcgagcgcgcggtcgatgccgccgtattcggcaagtttcttcatcaaggtcagatctgcatggctatcaaccgcatcatcgtcgaggcgacggtgcatgacagcttcgtcgaacgctttgtcgagcgcgtaagcagattgaaggtcggcgaccccgcgttggcggataccgccataggccccgtcatcaatcaccagcaatgcgacggcctgctggaaaagatacgcctggccaaggctcagggcgcccatgcgttgcttgagggcgagccccaaggactggtcataccgccacacgttttcgtcgatgtaagccccgactccgatttggcctatggcgagatcttcgggccgctggtagggatcatccgcgcgctcgatgagaatcacgcgctgaagttggcgaaccaatgcgaatacggcctttccagcgcggtgttcagccgtgacgtcgagcgcgcaacgcgcttcgcccggcaaatccgggccggcatgacgcatatcaacgatatcccggtgaatgacgaacctcatgtggcctttggcggagagaagaactcgggactgggccgtttcaacggcgactgggctatcgaagagttcacccgcgaccactggatcagcgtgcagcaccaaccacgtccatacccgttctag

SEQ ID NO: 363237 - DNA, 189 bp, Pseudomonas aeruginosa
atgaccaggcagttgaccactctcacgctgtgcctgctgctcgccagctgcataacccacaaggctgagccagccaggccagccttagacagcagccgcaatccagaactgcgctctccggacctgtacccaaacggtgtacagctggagaaagaacctgtggtgcgctacggagactacccctggtga

SEQ ID NO: 363238 - DNA, 840 bp, Pseudomonas aeruginosa
atgataggcaattcagaaaaaaaactgctacttattaacaataagctagccaccatcctaatcttcgtcatctcaatattaagcgcaaaccaaacctacgctacagggctaactacattagacttcatcgttcctagcagcgacgggagcacagccgcagatcagtacacgaacacactagtagacattcgcgacaactgggctcctgtaatagttgcaggtgacgttcaccgattagaagacaatccaagcgtaccatattttatactcggattatcggttgacgggaaaagagtagacttctatatatcatcgagcaacctatatgttgttggattcagaattgaaaacacctattatgctcttcaaggagaaggctatggaacccccaactttcaagaaagtgaaggagttaccattaacaaccttggatttagtggcgactatctctcactagagcgcacatcagggacatcaagatccagcctaaactacaacattggaaccttaaccagtgcgctatattctgagataaacacacccaatgatagcaatgcagcaaccttgcttttaacagtaatccccatgttcatcgagggggcgaggttcatcccctctataggacacgacatcgctgagaatatcagaaattcaaccccagccccaataagtgcaacagaccaggcaattatgaattcttggagccttcttagcagctactatgaacatgcgttgaacgatcctaacacttcatcagtgaacgttggaggaacgacatacaccacggcagcacaggttgccgctctaatcagcataatcctggttagtcacccaaggtaa

SEQ ID NO: 363239 - DNA, 444 bp, Pseudomonas aeruginosa
atggcccggctttctccccgcctgcaacaaatgctcgacgcgctgccgctgcggcccgggctgcgcgtgctcgaagtcggctgcggtccgggtgcgctcgcgcgggcgatcgccgcgcgcgtggcaccgggacaggtgctcggcatcgaccgctctgcgcacgccatcgagcaggcgatggcctcgtccggcgaagcgatcgcagcggggcatctgtcctttcgtcaggtcgccgcagaggacttcgtcctggggcctggagaagcgcccttcgatctgatcgttgcggtgcgcgtcggcgcgttcgacggccgacacccggatgccggcgcgcgcgcatggccgcggatggcggctgcgctcgcgcccgggggacgcctcgccatcgatggggtagagcaaatgatggtcgcaccagccgacatgcatcgtgcgggggcctga

SEQ ID NO: 363240 - DNA, 1404 bp, Pseudomonas aeruginosa
atgtccaccggcactgcctccaccggcctgtgggccgacgttcgcgccgcgctgcgcggcacgaacgccgattacacgcgcattcccctgaagcgcgcggtgttcctgctggccgtgccgatgatgctggagctggtgctcgaatcgaccttcgcggtggtcgacatcttcttcgtggccaagctcgggccgtcggcggtggccaccgtcgggctgaccgaaacctatctgttcctgctgtattcgatcgcgatcgggttggcgatggcggtcaccgcgatcgtcgcccgccgcatcggcgagcatcgcggcgaggaggctgcgctgtccgcggtgcaggccatcttggtggcggtgctggtctcgctgcccttcgcgctggccggaatcgtgtgggcgcaggagctgctgcggctgatgggggcggacgcctgggccatcgagcacggctatcgctatacccagtggatgctcggcggcaatgtggtgatcctgctgctgttcgtcatcaacgccatctttcgcggagcgggcgacgcagccgcggcgatgcgcgtgctatgggtcgccaatgcgctcaacatcgtgctcgatccgatcctgatcttcggcctcgggccgatcccggcgctcggcatcgagggcgcggcgatcgcgaccaacatcgggcgcggcgccggcgtgctgatgcaggtgtggatcctggtgcgcggcagcgaacacctgcgcatccgccgcgccagcctgcgctggcatggtgcgacgctgctgcagatcgtgcgcacctcgttcggcgggatcggccagatgatcgtgtcgatgaccgcctggatcttcctgatgcgcatcctcgccagcgtctcgaccgaggccgtggcgggggcgacgatcacgatccgcatcatgatgttcaccctgatgcccgcctggggcatgtccaacgccgccgccacgctggtcgggcagaacctcggcgcgggtcagcccgcacgtgccgaggcggccgtgtggcgcatcggctggatgaacatggcgttcaccctggcggtgtcggtggccttcttcttcctgcatgaccagctcatcgccctgttcaccgacgacgcgcaggtgatcgccatcggcggcgagtggctcgccatcctcgcgtattcctatttcgtgtacggctggtggatggtgtcggtgcaggccttcaacggcgctggcgatacgatgacgccaacctggatcaacctggtgttcttctggctgatccagatcccgctcgcctgggcgctggccctgccgctgggttgggcgcactcgggggtgttctggggcgtgttcgtctccgaggccgcagtcggcttatttacgctgtggctgttcagccgcgggcgctggaaggccgcacgggtttga

SEQ ID NO: 363241 - DNA, 387 bp, Pseudomonas aeruginosa
atgaaacccaatcccgtcgtctggtttgagatctacgtgcaggacatgccgcgcgcgcgcaagttctacgaaacggtgttccagtgccagctggctgagctgaagtcgcccgagggcgaagcccaggacatgcagatgctgtcctttccgatggacatgcccggcccgggcgcaggcggcatgttggccaagatggacggggtgccctctggcggcggtggcacgctggtgtactttggctgcgaggattgcgccgtcgaacaagcgcgtgtcgaaatagccggtggcaaggtgttcaagcccaagttctcgatcggcgagtacggccactgcgcgctggtgacggacaccgagggcaactgcatcggcctgtattcgatggcctga

SEQ ID NO: 363242 - DNA, 477 bp, Pseudomonas aeruginosa
atgcacaagaacacgatctgcctctggttcgacaaggacgccgaggaggccgcccgcttctacgccgcgaccttccccgacagccgggtgacggccgtccatcgcgcgcccgccgattacccgtccggcaaggccggcgacgtactgaccgtgcagttcaccgtcgcgggcatcccgtgcctcggcctcaacggcggcccggcgtacccgcagaccgcggccttttcgttccagatcgcgaccgacgaccaggaagagaccgaccgctactggaacgccatcgtcggcaatggcggcgcagagaatgcctgcggctggtgccaggaccggtggggcctttcctggcagatcacgccgcgcgtgctgaccgaggcgatagccgcggggggcgaggaggccaggcgtgccttcgaagccatgatgacgatgcacaagatcgacgtcgcggccatcgaggcggccgtggcggggcgctga

SEQ ID NO: 363243 - DNA, 435 bp, Pseudomonas aeruginosa
atgagcgacgcaccccaccccgccgaccccgccgtgatgaacggcgtgattccctacatgaccatggctggccgtgccgccgaagcctgcgacttctacgcccgcgccttcggcgcgaaggagctgggccgcatgcccttccccgacggcacaccgggactgatccacgcccaagtcgagatcaatcgcggcgcgctgatgatgaccgatcacgccggatgcgccgacggtagcaacgcggcggcgcagcgcggcgagttcggccacctgcaactcgtggtcgccgacggccacgcctggtgggatcgggcggtcgccgccggctgcaaggtgctcgctccttacgagcgccagttctggggcgacgactgggggctgctggaagacccgttcggcctcaagtgggcgatcctgcaacccggcgtgcaggcgtaa

SEQ ID NO: 363244 - DNA, 456 bp, Pseudomonas aeruginosa
atgagcgcgcagcgcccgacgctagtgcctgccctctgctatcgagatccgaaggcggctttgaaatggctcgaagccgcgttcggattcgaaaccgccatggtgatcacgaacgccgagggcagtctcgagcattcggagatgcgcttcggcgacggcatcatcatggtcggcaccgaatggacggccgaccacacgagcccagcctcgatcgccggcaagaatacgcagaccgttcacgttcacctgaccgaggacatcgacaagcactgcgcgcgagcgaaggcggcgggcgccgtcatcgtacagcccccccagacccagttctatggcgaccggacctatcgcgcacgcgatcccgaagggcacatctggacgttcgcgcagacggtgaaggtggtgacgcgcgaagaggccgagaaggcctccggtctcaagatcgaaggctgggtgtga

SEQ ID NO: 363245 - DNA, 159 bp, Pseudomonas aeruginosa
atgaccgacatcacctcgacgaccccgccaggagcgcaggtccgcgacctgattcgcgcttggaagagagcgctccagaccggcgacatggccagcattctcgactgtcacgcggatgacgagctcattcacgaagcgacgagaggcccatggtcatga

SEQ ID NO: 363246 - DNA, 444 bp, Pseudomonas aeruginosa
atggacaccgcatccaccctcgcacgcactgaaacagagcttcgcagccaattggaagactgggcgcacgcggttcgcgccaaggacatcgatcgcatcttcgcccactacgcgccggacatcgtcgccttcgatgcgatcgcgcaactgcagttcaagggcgccgacgcctaccgcaagcattgggaaacctgcatgacgatgtgcaccggtccgatgatcttcgaactccatgagctgcagatcaccgccggcgacgaactcgccttcgcccacggcctcaaccgctgcggcggtaccggaccggacggcaaggagatgtccggctggatgcgcatgacggcctgtttccgcaagcagcacggcaagtggcaggtcgtgcacgaacacttctccgccccgttcgacccgcagagttacaaggcgctgtggctcgaaccttga

SEQ ID NO: 363247 - DNA, 393 bp, Pseudomonas aeruginosa
atgaaatacctgtgcctgatctgtgccgagaaggtgatggagcagatgccgcgtgccgatgcggacaagcacttcgaggagtaccgcgagttcaccgacgccatccggcagagcggccattacctcggctgcaaccggctgctgccgcccgatgccgccagcaccgtccgggtgcgcaacggccgggtgtcggtcacagacgggccgtggaccgagaccaaggaccagctcggcggctactacctgatcgaggcccgggatttgaacgaggcgatccaggtggcgtcccgcatcccgggagcaaagctcggctgcgtcgaggtgaggccggtcgcggaggatgcgcagacgctacaggcgctcggtttcgccgcgccggaagccacccgctga

SEQ ID NO: 363248 - DNA, 381 bp, Pseudomonas aeruginosa
atgaaatacctgtgcctcgtctacctcgatgaacaacgcctcgacgagctacccgacgaagactgtgtcgcctacgacacggcgatccggtcaagcggccactgtctcgcctcggaagcgctccaatcggtccataccgccaccacggtgcgcgtgcgtgggggcaaggtgtcggtcaccgatggtcccttcgccgagaccaaggagcagcttgccggcttctacatgatcgaagcgaaggacctcgacaaggcgatccgactcgcggcgggaatcccgccagcgcgtgtcggcagcatcgaagtacggccgatccggccgatccgcgaaaccgtcgccagagctgacgtgctgcggcacgcgaaccctgaagactgctga

SEQ ID NO: 363249 - DNA, 1293 bp, Pseudomonas aeruginosa
atggacgaccgtaaggtttcatcggacgaatcgcaccagcccttgccggaaacgtctcccggagcggcagggacagtgcgcgagcaattggaggtgatctaccggaccgagtcgcgccggctgttcgcgacgctgattcgcctgctcggcgacttcgatctcgcggaggaggcgctgcacgatgcctttcgtgtcgcgctcgagcagtggccgcgagagggtgtgccggccaatccgcgcgcctggctggtgtcgaccggccgcttcaaggcgatcgacggcctgcgacggcgggcacggttcgatttcgttgacgacctcgatgaccggcccgacctggcgagcaaagagaccgacgacgacagcgtcgaggatgaccgcctgcggctggtcttcacctgctgccatccggtgctgtcgcccgaggcgcaggtggcgctgacgctgcgcgaggtatgcggcctcaccaccgaggagatcgcacgtgccttcctcgtcgcaccgcccgcgctcgcgcagcgcatcgtgcgcgccaagggcaagatccgcgatgcgcgcgtgccctatgaagtgccgcagccggccgcgctgccggcccggctcgacagcgtactgcgcgtgatctatctggtgttcaacgagggctactcggcctcggccggcgagtcgctgacgcgcgccgacttgtcggccgaggcgatccggcttggccgtctgctcgcccaactgctccccgaaccggagtccgtcgggctgcttgcgctgatgctgttgcaggagtcgcgccgcgatacgcgcacgaccgcggagggcgatctggtgctcctcgacgagcaggaccgttcgcggtggaaccggacgctgatcgccgaaggcacggccctggtcgagcacgcgctggtctcgggccgcgccggcccctacgcgctacaggcggccatcgcggccgtccatgccgaggcgcccaccgccgccgccaccgactgggcgcagatcgtcgccctctatgacctgctgctgcggctcgagccgtcgccggtggtggaattgaaccgcgccgttgcggtggcgatgcaccacgatcccgcggcggggctggccgcgctcgacgcgatcctcggccgcggcgagctggccgactaccacctcgcgcacgccgcccgcgccgacctgtgccgacgcctggggagaaccgaggaggcgcgggcggcctaccgatgcgcgctggcgttggtccggcaggcgcccgagcgtcgcttcctcgagcggcggctcgccgagttgtccgggtga

SEQ ID NO: 363250 - DNA, 1065 bp, Pseudomonas aeruginosa
atgagtctgcacgagaatatcgcgagcactccaacaccgttgcacgcgattgaggtcgctagaattggcaatgaccgacagaacataagggcggagcattgccgggtagacagtccaccggccgacgaagctattgtcaccctgaccccgtgcttcggtttgcgccatattcgctatttcgtcgtggccgcggaggttggaagtttcaggaaggcggcggcggctctctcggtccgcgagtcagccgtgagtcgccgtatccgcgatctcgaagatcagatcggcgcatcgctttttcaccgccacagctccggggttacgctcacttttgccggcgagcgatttctgcagcgtgctcggaaggggctcaaggccattcatgacggaacgcgcgacgtcgcgaagatcggtagaggcgaagaaggaacactccgcgtcggaatcttttcgtcgcttgcctcgggcttcctttggacccttttccgaacgtttggggatcgccatccaggcgttagaattgattttgtcgagggcgaaccgcattcccacataggggccgtgcgccaactccgggttgatgtagcttttctcaccggaacgtcgctttgggatggctgcgacaccgcacacttatggtccgagcgtgttttcgccgtcctgcctgtctcccacccactgacatccaaatccgaaatcgactggcgcgaccttgctacatccacattcatcgtgagcgacgtcgcgcccggacaagagattcacgactatttggtacagcgcctagccgacctcggccgccaccccgaggttcaagaacagcgcgtaagtcgggacaatttgctatcactcgtagcgcttggccgcggcttgactgtaacaagcgaggcgatgaccgcgtcccattttccgggaatcgtgtttcggccgatcacggccgagatccttccattctccgccatctggtcgccgcgcaacgacaatccggcccttcgccggctcctcagcttagcccgatcgatggcgaccgatctgaatcagagccacccttctggtgaaagcaactga

SEQ ID NO: 363251 - DNA, 474 bp, Pseudomonas aeruginosa
atgccggtaataaaatcagacgagatgctccgcgaggaagggccgcccgacaatccatgcggtcccaacgtagtgtattggatcagcgaggtcggtggtttgacgcaattcggtgcgtttatcgaagaattaccgcccggttctcgttcctcgatcaagcactggcacagcgccgaggacgagttcatctatgtgctcgaaggctcggtcaccctggtcgagggtgacgctgaggccgttcttgcacctggcgacgcggcgacatttcgagccggcgacgctgtgggtcactaccttgagaaccggagtgcgtcgacgacacgatgccttgttgttggcacaagagcccccgtcgacataatcacttaccccgactacggcgttgtctgccatcgggaccgatcccttccggacgacatctggaccgacagcaaagggaatccggcccgagcgccttatcagttcagcgagtag

SEQ ID NO: 363252 - DNA, 408 bp, Pseudomonas aeruginosa
atggatgtcgcgaagatgttggtggtatactttcgccgcccgggaaatcagcatcaattcagcaccagcctgtcgcttcaggcttcgacggacaccgatttctccgatctcctcacctgggccgcgggccatctaaaggagaatctctccgttgaggtactggcgagccgctctggcatgagtgtgcgttcctttacccgcaagttccgtgtggccgtcggattaaccccggctgccgcaatcgagaagatgcgttttgaagaggccaaacgtctcctgtccgagggggatctacccctgaagcgagttgcgagcgtatgcggttttagagatgagcaaacgctgcgtcgagccttccagcgaatcgcggacgtgtcacccagcgagtatcgccagcggttcagctga

SEQ ID NO: 363253 - DNA, 399 bp, Pseudomonas aeruginosa
gtgaaacgattttcatggctgcgagcgcttctgttcgccgtcttcgcagcatcgctggtcggaaacttcttctcgctcgggtacgtagtgaaaagccagcgtgacgcaccggcgatgtctatcctcgccgagagtgcgttctcagcttaccctgacgaggtccgctccgaattccgacgattgctccgcgagaacagaccgcggactgtcgcggcgctcggcaagctgagagaggcgcgtcgcgaattggcctcggtcgccggttcgtccccgctcaacgaggcggatgtgacgaaggcgatgaccgacgtgcgcaacgcgacagatgcgctccagcgcctgatgcaggacctgcttttggaggcacttcgctcgacggaacgcacaaggtcgtcctga

SEQ ID NO: 363254 - DNA, 621 bp, Pseudomonas aeruginosa
gtgagccaagcgcgtgccccggaaatcgcaagactgccggagcgcctcgacgacgaggtgctgctcgcccgcgtggctgcgggcgagcagcttgcccttcggcagctgatagacaggcacggacgcggtctacgcctcttcgccgggcgctatcttggtggttccgatgaagccgaggatgtcgtgcaggacgtcttcattgcggtctggaagaacgcgaagcgcttcgatcgttcgaaaggacgcgcgacgacgtggatctatcggatcgctgcaaatcgatgcatcgacgtgaggcgctggcgcaaattccgcatgttcatcggcttcgaagaggcgcacgaaggatttccttcggaagaccccgatgtcgactcgtggatgggcgctcggcaggagttggccatcgttcgcgccggcctcgaaaaactgccggaacgacagcgaatggcgctgctccttcgagcagtcgccgacctcgacgttcccgcgattgccgaagtgatggatgcaagcgccggatcagtagagcaactgcttgtccgagcgaggcgaacgttacgcgcccagctttcggaggtcgggaaggctgaaccacaaaatggaaggaaaacaagatga

SEQ ID NO: 363255 - DNA, 432 bp, Pseudomonas aeruginosa
atgaaaaaggcttcatacgcgctggtctcagcgctggtcgccgctctctccctgccggggatctcggctcacgcgcaaacggtatcgccgattcttcagcggctcgatgcgaataacgacggcgctgtctcgcgcgacgagatagtcgccgcgcgggcgaaactcttcgctcgcctcgacgtgaatagcgacggagttatcgatgaagacgaaactgaaatgctccgcgatgcgatcatggatcgcgcgacggccatgcaggcgcgtctcggaaatcagatgcggcggctcgacacgagcggcgacggaaaggtgtcgagggacgaatttcgtgctcgcacgctcttcttcgaccttgccgaccgggatggcgacgggaagctgtcggccgccgagtttctcgtcatccgcggcatcatgttcgaccgctga

SEQ ID NO: 363256 - DNA, 309 bp, Pseudomonas aeruginosa
gtgcaagaagtcgcccaccggcacggcttctacgtggtccgcggcgtccactactataatggatatcgcggtgttgtcgtcgcgcgtcctggctaccgcttctatcgaggatactggtttccgcccgcagccttcgctgccggcgtgatcgtcggccgaacgctggcccatcccgtgccaccggcgcgccgtctgaccgccgcccatatcgagtggtgcttcgatcactatcggtcatatcgtgcgtacgataacacctatcagccgtacgacggtccgcgcgaacagtgctggtcgccctacaactga

SEQ ID NO: 363257 - DNA, 828 bp, Pseudomonas aeruginosa
atgaatcgagacctgaacttcacccgccgcgaagtcttttctgcgctaacgtttgctacaaccagtgcactactaaccaacgattcggccgcgcaaaccgcggcgaaggatcaatcgcagctggtcgcccgcgactccgaaaagcccttgacctgtgggcttctgctcttcccgaatatgaccgccttggaccttgttgcgccccagctggtgatgtcgaaacttccgaattcagtcgttcatctgatcgccgagagccaaagcccggtgatgtcggacagcgacctggcaatcgtcccgacgatgacttttgaacagtgtcctgacgaactggatgtcttctttgttcccggcgggccgaagggtacattgaccgcgctccagaatgatcggcttctcgatttcgtgtctcatcgcggatcacgtgcgcgatacatcaccagcgtttgcaccggctccgtccttctcggagctgccggtctcctcaaaggttacaaggcggcgtcatactggggcacgctcgacatgcttccagtgttcggggcgacgcccgttagtgatcgcgtcgtcaaggatcgaaaccgaattacgggcggcgggattaccgcaggactcgactttgggcttgaactcgcagcagagctacgtggcgagcagcgcgcgcgcctgcagcaattgatcatggaatacgatcccaagcctccttttgacagcggctcgctaaacacggcatccgccgaaacggtcgctcatgcgcgtgagcttcttggtccttcgctgcttgctattcgcgcggaggcggagcgggcggcgagacgacgcggataa

SEQ ID NO: 363258 - DNA, 1137 bp, Pseudomonas aeruginosa; identical to SEQ ID NO: 6112

SEQ ID NO: 363259 - DNA, 4065 bp, Pseudomonas aeruginosa
atgtctactagcccaaggatcatgccagccacgcttgaccgtgagatatctagtgccgatcaggatgcatttggacatcgacattttgcgcagggtctacaaagccttattgaatccgaacagctgacacctcccttcagcattggccttctcggtggttgggggacaggcaaaagcagcatcaaggagttgtacacaagggggctgacagatgatgcggtgaaggtggatggaaaacatcggaaggatcgataccactgcatcacttttaatgcttggcgatttggagggcacgaccaagacatcaagcgagccctattgcgccatgtttttctggagctagggggcaaggaagatcagctctacgacaagctatttaggcagaccagcgagaccactcaacgccccaagggatggtggcaagtcaccctggagacgcttagagcatgggcgctccctatacctgctttagtggctgcaatggccctgctgtttgcgatttgctacctcgtgttgatgcttttcaacattcaaagtgatctgctgaaaagcgtcgtttttttgtgtgtgacaggggcgtatacctacctcctgaagcatgtcaaaccaccggctattgttcctgccacaccaatcacgcgggtggagttgcccaacactacttccgaacagtacgaggatcttctccttgagcaggttcgccgttacaaatctggggagtgtaaatccctagatggccggacggggaaggcatgcgaaagattggttgtctttgtcgacgatctcgatcggttgtcagcggaagagatggtcctcgggctggacgccgtacgcacatttatggagatccctgcgacgaggctgccggccggtctgggcttggtatttgtcatttcttgtgatgaggccaaagtggctgatgctttggctcgcggtcggcggaacagcgaccttcctggcacggtggtgacacataacgatgcacgaagatacctagatagaatcttccagttccgcttggaaatacctccgcccccgcgccacgacatgcgccagtttgcgcgcgctcatctagagaagttgcctagcatcactgcggatctagaagcccacaatattccgctagctacgatcatcgaccggatgattcatgttggcgttcaagatccgagaaacgcgcttcaaattgtcaacgcttttgctcaggcttggtggttggccagaaagcgggagtctgaaggccttggaaccaatagagcaggtgggcttcacgaaggtgctgtgacgttacaccccatatcacttggcgctttgtgtgcgatgaaagtgagcttccctgatttctaccgtgatcttcaggacgaccctacgtttctgcagcgcttcactgatgttgtgattcgagggcacaagctgagcgatcagccgctccaaacgcaggatcgtttaaaggagcgctatctcaaggaggttggagaagagttcgtcctgaaagcggatcaccgcccgcttaggcagtttattgccagcctggttggcttaaggtggccgtcgtcactgcagagcctactcctcctttccgaggaccatatcactcgccgcctaggggcaaagattgcaccgatctacggcgactttgtttctggaaacacgcagggggtgctcgagggctttgctaggcacaatgacacggcacctctccacgagaacgaagctagagctctttaccagatgcttgaggatttgaggcatgaactgccagagctcagggcgcgtgcatcaagggtgattgccgacttggtggatcgcctgcctgaccctcctgcctaccaactcatcagcatgctctgtcgtgagatggctgactccctggatctacgctcgcagctcggcctcgataagatcagcaagatcctacaagcagccgcagaggtggatcagcgcgccattgcatcccggctggtcgacgatctactcaccggctccagtccagtacggcttctccgcgagacaatggaagctcctagcttagatgaagctgtcgagatggtgcgctcagctgttccgatgattctgactgtgcgaaagggttacggattggagcgacaagcggacgagcaattatgcaattggttgcttgaacggacggttgctgtcggtaaaaagagcacccaactagcctttggggagctggagcaatggctggatgagagcgatgagttactggttgccgacttggggctcaactacatcaacgcgctagcggatgagcttgagaaaaagcagacgccccaattcgaagctaccgcgggcgtgggtagagccaggaaaattctccaccaaatgatggctcaagggactgagtcacgagagctcttgtgggctccactggcacgatatgtgtcgctctatgaagagaccgcaatccgcatggcttgggagattgtcgttgaaaatcatcggtacgctagcgacgacgatgtatgtcagttcttccgtaacttcgtagagcggctgtcgcgtgcatattcggatgagcactcgacactcgatgatgcggccgcagcagcggctctgcttgcactgacccgcgagcgagtcgaagcgttagatgcggagtccgtagaggcaactgccgacttggccgatctatggggcaaaagtggcttcctgcctgaggaggcgtgtgcgctgctctctgaactaaggcgaaatgatgagacggatttcatgcgagtcatcggtgggtgggcccccaaactccttgttgacctgcccgatgcatgcgtgagcctaatcgcgacccagttctctgacttgccgacagaagcgaaaagcgcggtagccagttcgctctcggcgtttcttgtcagtgagcctatcgcggactcgaccctaaggagattcaaggcattctgtggcagcgcgcctgaatcaatttgggatagcgatccattgcagggcttcctaaacaacctaatgcagcatatggccgctcaggtcagtgcagctccatacctgaagtctgtgcttccggggacggtgcatctactacaccatgctacgccaagcacctttgggggctatctgcagcaactctttgttaatgggaaaggttatcccaatcattattcgtggctgcattttcaactagcagaccattggcctgacgagtctgacagcctcacaggctacgacccacagatcatttttgatgaggccagtgctttcgcagcctcacacccttcctacacaaggcaggggattctgcgatcgatgcgtcggatgattgaacaaggtcttgtcgggggcggggagcgtagcaagctgatagccgcagcttgctcggcctggtcagcgaaccctctcaatgccgtagatatcttcgaaatgggctatgccgaggtcactccagggcaagcagctaatctcgttgcctccattgattgggctaacgaaaagcacattgatgcattacaaaaagcttggaaagcgatcgctaccaataaagcagggccgcaagaccaagaaacgatgatggccatccttcagaaaggccagctggggagcacagacagtcctgatttggcagttcgaatgtgggcagaggctcaagtggactctggtcagaggttgatgcgtcagcttctaattgaaaaggctctcgatgatgggtacaggaggagactgtgggccttcactataggacacgctaaagaatttggtgctgaatttctccttgaggtagtccctcaaataagtgctctaagttccgtcgatgagaccgttaaagcggtctttgatgacttctctggcatcttggatgtagtgagtacaaaagagcttcaggccgacatggcaaatcgcctgatgagccagttcactcatgccacctccagcaccacgaaaggccggattgcagaggtatgcaatcggatgattggtcaagaggcgctaaagagtttcaaatcagagagtcttcataaatatgaatatgaaattttggtagggcattttggagtgcgccccatgaagaaatttgaaaagctactcgttcaagaatga

SEQ ID NO: 363260 - DNA, 405 bp, Pseudomonas aeruginosa
atgggctgggcgatgtccgccaagcccgatgccgacctggtcatcaaggcgctcgacagggcttacgagatgcgtggcaggccgcatggtgtcctgtttcatagcgaccagggcagccaatatggcagccgtagtttccgtcagcggctgtggcgctatcggatgacccaaagcatgagccggcggggaaactgctacgacaatgccccaatggagcggctgtttcgtagcttgaaaacggagtgggtgccgacggcgggttacatgacgacagcattggccgagcaggacatcggtcgctatctcatgcaacgctacaactggacaagaccgcatcagcacaacggtttcgtaccgccggctgtcgcggaagaaaaactcaattctgtgtccgggagttgttga

SEQ ID NO: 363261 - DNA, 309 bp, Pseudomonas aeruginosa
atgagcagacaacgacgtactttcaccccgaccttcaagcacgaagctgccagcctgttgctcgatcaaggttacagttgctccgaggccgccaaatcccttgatgtgggtaagagcgtattgcggcgctgggttgcccagttgcagctggagcgcggaggcgttacgcctgctgccaaggcgctcacgccagagcagcagacaatccaggagcttcaggcccgaatcaaccggctggagcttgagaaaaaaatcttaaaggaggccactgcgctcttgatggccgaggagcacgggcgcagacgttga

SEQ ID NO: 363262 - DNA, 1371 bp, Pseudomonas aeruginosa
atgcagattcaatctcatcagcagagtccgtctttcgtcgctgaattgccccaggctgccagtgggcgcctggggcagatcgaggcccgccaggtagccacccccagcgacgtgcagcaactggcccagcgtcaggatgtgccgaagggtgagggactgcttgctcgcctgggggccgcgctcgcccgtcctttcctggccatcatcgaatgggtgggcaagctgctgggctcccctgcccatactgcgacccaggtgccgcagcccagccaggatgcgcagcctgcgctcatgtcctcgcccgtcgtgttcaagcagatggtgctgcaacaggcattgcccatgaccttgaagggactcgacaaggcgagcgaactggcgaccctgacagcggaaggactgacccgggaccactcccgcctggccagcggcgatggggcgctgcgttcgctgaccaccgccctggccggcattcgcgccggcagccagatcgaggactcccgtacccaggccgcccgcctgctcgagcggaatgtcggtgggatcgcgctgcagcagtggggcaccaccggcggtgccgcgagtcaactagtgctcgacgcaagcccggaactgcggcgcgaaattaccgaccagttgcatcaggtaatgagcgaggtcgcactgttgcgccaagcggtagagagcgaggtcagcagagtatcggccgacaagacgctggcggatggcctggtgaagcggttcggggcggatgcggaaaagtacctgggcagacagcctggcggtatccatagcgacgccgaagtgatggcgctcggcctctataccggcattcactacgcggaactgaatcgcgctctgcgtcaggggcaggagctggatgcggggcagaagctgattgatcagggcatgtccgcggccttcgaaaagagcggagaggcggaacaggtcgtgaagactttccgtggcacccgtggcggggatgccttcaacaccgtggaagagggccaggttggccacgacaacggctatctctccacctccctgaaccccggtgtcgccaggagcttcgggcagggcacgatatccaccgtgttcggcaggtccggaatcgatgtcagcgagatatcgaactacaagaatgaaaaagaaatcctctacaacaaagagaccgacatgcgcgtgctgctgagcgccagcgatgagcagggagtgacccgtcgggtcctcgaagaggcggctctgggagagcagagtggccacagtcaggggttgctcgatgctctcgacctggcaacccagccggaacgttcaggcgaggcccaagagcaggatgtgcgcctgaggatgcgcggcctcgatctggcctga

SEQ ID NO: 363263 - DNA, 153 bp, Pseudomonas aeruginosa
atgttgggcgccagcgatatccgcgtggtggacatggcccaggggcagaagcagagccgcttcgtcgcctggacctacctcgacaagaagcagcgccgggcctggcgcaaggagcgctggaacgcagcccccctggaaccgctgagcggataa

SEQ ID NO: 363264 - DNA, 903 bp, Pseudomonas aeruginosa
atgagcaagctcgtcaaaagcgccgatcggatcctgaccaaattagagatgaacaaccctggtggcagccacaagtatcgggctgccagcttcatcatcgaagcagcattgcgcaatggcgacataattccgggactaaccaccgtcatcgaaaagaccggtggtaacttcggattcggcttggtagccgcctgccataaacacagaataccggtggagttggccgtaggcctgggtttcagccaaaccaagagagacctgctggagtgcttcggtgccacgctgatcggcaaggatatgctggctgccggcgcgtcgccgaaagaggtgatcgatcactacctcgagcatcaagccgtcctgggcaagacctactacttcaccgatcagttcaacaatgcactcggagtcgaagcccatcgctaccagaccgcccctgagctagcccgccaactggccgaggcaggagccagcaaaaagctgctgttcatcggcggtgcaggcactggtgcaagctttaccggcataaccctgggtctcagggatcatcagtatgacgtttcgacagtgatggtcgaccccggagggtgcgactccagagaaggcagattctcggaacaccgcctcgaaggaatagcggtgggcgtccgtccgccctttctcgactggtcgttggtggatatccagtgtcatgtggaacacgacgaaatgctcgccgcgcaacgctggttctatatgcaaaacggcatcttcgtcggcaataccgccgcagcctgcctggcggtagccctgcgtctggcagagcttcccgagtacaaggaaaacacgctggtgaccatcgcctacaatgccggactgtggtattcggacttacaaaaatcgctcatgggcagggccgcttag

SEQ ID NO: 363265 - DNA, 1212 bp, Pseudomonas aeruginosa
atgacacatgcacttccccggcgcacatacctgtacttcatcgctcagtccatcaatctgaccacagccgtcatgtcggtgacgatggcagccatcgtcggttcggcactggctcccgccgcctatctatcgacggtgccgtatggctgccagtttcttttcctgatgttggcgacctacccagcatccatgctgatgaaccggatcggccggaaaaaagccttcatgctgggctcgactccgttggtgatttccggcgtcagtggcttctgggccgtcgaacatcagtccttctcgatactagtgatcagccatgcagccctaggggtgtacatcgcgtttgccaacttcaaccgtttcgcggcaaccgacaacctggaccatggtttgaaaccccgagccatctcactggttgtggcgggtggcatcattgccgccctgatcggcccagtccttacggaactactgagggacctgggaggttattccctgttttcgctgtgctatgcctcgttcatagggttggcggccttgtcactgctggtttcctcttgccttcccaacgattcggcagtgaccgccgctccagccggaagcgaaccatccgctcaagaacagcgtcccccgattaccgcaacaggtgcaattgccatggcagttgcagcattcggctacggaatcatgaacctgttgatgatccaggcttcgatgcacatgaaaaatatgcacgaagacttctcggatgtgcgtctcgccattcaatggcatgtcgtcgccatgtttgctccttctttctttactggagcgatcatcaacagactcggcatcaagaccactatctgtgcaggtctgatcatgttggctggttgcgccgcaatcaatatctgctcgaacagctacgcggcaatgagcatgtccctgatcatcttgggactgggttggaacctgacctatgtcggaggtggtgcattgctggcccaagccctgcagaacacacctggagccatccaggtgcagggcaagaacgatttagccattgccgtcttcgccacgattggcgccttcagcccttcactgctgctcgccacggtgggttgggagggcaccaacatcatgtgcatgctgctatccatcgccttgctggcagcgactgccggtctactcgctaaaaatccacagccggactatcccatggaagggagcagggaatga

SEQ ID NO: 363266 - DNA, 795 bp, Pseudomonas aeruginosa
atgaacaatacgataatttcttacgaaaccctgcgtagtacggaaaaactttactacagggatcagtacttgatgtcggccaggaccaaagttgcccgtgtgcactccgaagccatcgaactggatagcaccgtcgcctatccggaaggtggagggcaggaagctgacctcggcacgatcgaactgcccatcggttcagtacgcttcgtctgggtcaagaagctctacggcgccccgattcgcctggagggcttcaagggtggcaaagtgggcggcatcatcctgcatatcgttcaccctgacgatctgcacttgctcggtcagataaccgaaggcatgacggcccaaatcagtatagatatacggcggcgcgaacggctgactttgtctcacagcgccagccacttcctttatgcagcggccaccagtctgcgtgaagagctgaaacagtggaccactggctgccatatcaaagaagactctgcacgctttgacttcctcgtcgaagagcccttcagcaacgaagaaatcgctgaaatagaacgacgcgcaaatgcgctgatcgccagcaacggaaagatcgaaaaccacgcagtccagggaatcgaagacgctcgcctgtggacctatcaggggatcgagattccctgcggtggaacccatctggcctcgccttacccgataggccccttgaacgtacgccgcaaacgactgggcaaaggtaaagagcggctgatctgtgagtttcccgaggcggaaatcgacctgtcctcttatcacgagtctcaccaatga

SEQ ID NO: 363267 - DNA, 441 bp, Pseudomonas aeruginosa
atgcattaccgactggcgcactgggtgcaccagtacgccccaccccccaacccgctcacgcaaccactcgctgccatcatttcaaggcgggggaaactgctttccggcgcggaaatccacttccgtagcagcatcggtgcccggttcgttctcgaccacggcgtcggcaccgtaatcggagagacttccatcattggcgacgactgctacatcctcggcggggtgacgctgggcgcccggggtatcagcggcaacctcccgaccgtacgccatcccagaatcggcaaccgcgttcagatcggtgcatttgccaatgtactaggagccgtgaacatcggtgacgatgcctttatcggaccaggttgtatcgtcactcaggacgttcctcccggcgctcgcgtacagatcaaaactgcattacaggtattactcccggaatga

SEQ ID NO: 363268 - DNA, 1341 bp, Pseudomonas aeruginosa
atgagtccagatctcctctatgaagcgctgaaggcccgcctggttgccggcgagtggctggccggacaacgcttgccatcaatcaggaaattcgtttccaggacggggggcagctatcacaatgtcgtgtcggcatatgcccgcctggtgagcgaaggcatgctggtggctcagcctgggcgcggctatttcgtgaccaacctggctggccaggtgctcagcccgcatgactccgaatgcatgattggcgatccgttattcaagcttctgcaaggtggcccgaactacaccaagctgggttgcggctggttgccgccggcatggcgcgatacagaactactggccaaggctattcggcgcacggcgcggctggagcagagttcactggcggagtacggcgatatttccggctatctgcccatgcgcaagcagttgtgcgtgcacatgaaacgcatgactcgcatcgacgttcggccaagccaggtactcacgaccctgggagcgacacaagggctggacctggttgctcgcctgctgatcaagccgggcgaccatgtatttgtcgacgagccaggcaatggaaatctgataaagctgatccaattggccggtggtcatgtggtcggtgtgcggcggacgcaggacggcccggatattgccgagatggagaactacctggccaagcacagagtcaaggccttcttctgcaatagcacgttccataatccgaccggaggctgcctcagcccacacaacactttcacaatcctgcgcctggcggtggagcacgagttctttgtggtcgaggacgacgtctatggtgacttctgtccaactgttcgccagactttcgctgagctggacaacctggagcgggtgatctacatcggcagcttttccaaatgcctctcggcatcgctgcgtgtgggctacatcgcctgttcgcaggagttcatcgagccactgacgcacttgaaactgctgacctgcgtcgcagttccggccttttgcgaacggttcgtcaatactatcctggccgatggcacttatgccggacatatgaaggatgtccagcagaatctgatcatgcaacagattcgaacccagcgatctctgcataggcggggttggcgattcgacatcgctccgcagggcgggatgttcatctgggcctatcatcctgatcttcccgacctgcggcacttcgtgagaaaactcgagcagcggaagatattgatgatgccgggttcggcattctcggtgacgcgggactaccagcgtttcgtgcgtatcaactgtacgcatttttccgagaagctggaggaacacttttccgtttga

SEQ ID NO: 363269 - DNA, 378 bp, Pseudomonas aeruginosa
atgcctactggcgtcacggttcgaatccgcctgctggtcctggcgctgctaccgctgacgatgctcgtcacggtcatcacgatggcgccggccaacgccagtcgactcgatgccagcttccaggaccttttcaacaaccggatgaagcccatcagccagatcaagatcgtagccgacgccgttgccgtcagcgtggtcgacgtcctgcacaagtatcgtgcgggggtcttcgatgaagagcgcctgcaacaggagttgagtggagcgctgtcgcgcatcgagaagtcatgggccgattactccgcagaccaccggactgccgccgagaaggaaatcgtcgagtcactggtccccccctggaacggctcgagcggatga

SEQ ID NO: 363270 - DNA, 189 bp, Pseudomonas aeruginosa
atgctcgatatcctcgaaggcactcctccctgggggtacgcggtattcgctctgatctgtcactacggcctgcgtgccttttcccccacccgcgaaagccggcgctcgctgctacttatgccctcgattctgctggcgtcccaggtcgaaggccgtattcatgtccatggccaccgcctcttaatgtga

SEQ ID NO: 363271 - DNA, 927 bp, Pseudomonas aeruginosa
atgaacagcaccccgagcattccggtgaccgtggttgcaggctttctcggcgccggcaagaccaccctgctcaaccgcatggcgcagcgcgccgacagcgggcgattggcagtgatcgtcaacgacttcggcgagctgaacatcgatgcggcgatcattgccgaggtcaccgacgcggtgtacagcctgcagaacggctgcatctgctgcaccgtgcaggaggacctgctggcgcaactggtgagcctgtccaagctgcgcccggccttggagcggatcgtcatcgagtgcagtggcgtctccgacccgcagcgcatcgtgcagaccatcggctacccgcaactgcgcaaccgcctgcacctggacgcggtgatcaccctggtggacgccagcggctaccaggacctggaaggggaaatggcccggctgtcccgggcccaggtggcctgtgccgactgggtgttgctgaacaaggccgacctggtgagccccgagcagttgcagagcatccgcgccagcctcggcggccgcgccccggtgttcgaaacggtgcaggccgaactgccgcccgagctgctgctgacgccgccggtgcgttccaccgaagtgctgttcaaggccttgccccaggcccacgaccagttgttcgaaagctgggtgtggaacagctcgcggccgctgcaaccaaaggctctgcgggactggctggcgcgcttgcccgccgagctgctgcggctcaagggcctggtgcgcttcgagggcaatgcgcagtcctactggttgcagcatgtgggcgatcgcagccagttcgccccggctgccggtcaagccgccgaacatgccgcgcaactggtgttcatcacccgccgcggcagtgatctgcgccaggaactggaggccggagtctgcgcaacccaggtgccgtga

SEQ ID NO: 363272 - DNA, 1749 bp, Pseudomonas aeruginosa
gtgaccgcttccgaccaattcaactccacccatagcgccgtcgatcaatacgccgaactggtgctgcacaacggccggatgtacaccctcgacccggcccagccctgggccgatgccgtggccatccgccagggcaagctgatcgcggtgggcagcctcgcctccctggcttcgttgatcgggcccaacacccaacagcacgacctggacggggccttctgcatgcccggcctgcacgacatgcacacccacccggatctggccctggcgccgcgctacgccgacgacctggacgtgggcatcgaagacccgactcccgagcaactggcggcggcgatccacgcctacgccgacagccaccccggcgacggctggatctacggccagtactgggtccgctacaccttccgcgaagccggcctgacgccgggccgcgaatggctcgacagcgtcatgccggatcgcccggtggccctgctggaccgcatgtggggcaccatgatggtcaactccaaggccctggaactggccggcatcgaccgccacaccagcgacccgcgcaacggctacctggagcgcgacgagctgaccggcgaacccaacggcctgctgatcgacggcgcctacgccctgatccacgccgccatgccgccgacgcccgtcccggtactgcgccgcgcctaccgcgatggcgtgcacttccagacctcgcgtggggtcacggccaccaagtacgtgcatgtctgcgagaaccgcctgcaggctctcaaggagctggacgacgccggcgaactgacccttagggtggaagccgccatcagttggcaggacgacatcttcccggtgcgccggcgctgggagctgctcagcggcgagcggcatttctatcgcagcgcgcgcctgagcgccaacgcggtgaagttccacttcgacggcaccgtggaacccaagtcgtcctacctgctgaccccctggccggaagaatcgagctggcgcggcaagctcaacctgaccccggaacacatcaccgacatggtggtggacatggacaaacgcggcctgcgggtgatcgcccactgcaccggcgacggcgcttccgacgtgttcctcgacgccgtggccgaagcccggcggcgcaacggcaacagcggcatccgtcaccaatgcgcccacagcaccttgctgcacccaggcaacctcgagcgcttccagagcctggacgtgatcgccgagttctccccggcggcctggtacccgacccccttcgccagcggtgcccgttccggttacggccaggaacgcctcaagcgcatctatgacttcaagggcgtgctggccgccggtggcatcgcggtgttcggcaccgactggccggtggcgtccatcgacccgtggttggccctggaaaccatggtcacccggcagaacccgtggaaccaggaatccgacaccttcggcgaccccatcagcctggagcaggcgctgcaagtggcgaccctcaacggcgcccacgccatgggcctggaacacctgaccggcagcctgcaggtgggtaagtcggcggacctgatcgtcctcgaccgcaacctgttcgcccaggacgcgcgcaactacatccaccacacccaggtgcaactgaccttcgtcgaagggcaactggtctacgaccgccggggcatcttcagcgacacgccgttgcaggcggtgtgggaaggcctgccaccggtgatcgagggcaaggaacaatga

SEQ ID NO: 363273 - DNA, 1182 bp, Pseudomonas aeruginosa
atgcgttattcacctttcgttcagcgcatcagtggcgaatccgtcagcgcctgggacatccactacgcggccatcgaggcccggggccgcggcgaggacgtgatcgtgctcagcgtcggtgatccggacttcgccaccgatgaacgcatcagcgccgccgccagcgccgccctggaacaaggcgacacccattacacccacgtcctgggtcgcccggccctgcgcgaagctattgccgccaagcagcggcgcctgctgggaatcgaggtcagcgccgacaacgtggccctggtggccggagcgcagaacggcctgttcgccacttcgctgtgcctgttcagcagtggcgacgaagtgttggtgccggaacccatgtacctgacctacgaggcctgcatccacgcctcgggggccaagatcgcctgcgtgcagcagccggcggccaacggtttccgcctgaccgccgcggcgctggaagcggcgctgaccgacaagacccggggcatcgccctggccaccccgtgcaaccccaccggcaacgtctacagccgcgaagagctggaagccgtggccgaagtggcgcgcaagcacgacctgtgggtgatctccgacgaggtctacgggcaattgacctatgaccgcgaccacctgagcatcgcttccatgccgggcatggccgagcgcacggtgatcctcaacagcctgtcgaaaacccacgccatgaccggttggcgcgtgggctgggtgatcgctccgcccgccctggtcgggcacctggacaacctgctgctgtgcatgctctacggcctgcccgggtttatccaggaagccgcgctcaaggccctggaactggatgaagaagtgatcggcagcgcccgcgaggtctatcgccggcgccgcgatctggtggtggccgggctcaagtcggtgcacctgctcgattgccgcgagcccgaggccgggatgttcatgctggtggacgtgcgccgcaccgggttgtcgagcatggatttcgcctggcagctgttccgcgccaccggggtttcggtgctcgacgcccaggcctttggggccagcgccgagggcttcgtgcggatctccttcaccgtcgccgacgaggtgctcaagaacgcctgccagcgcatcgccggctttgtcgaagccctgggcgcacaacgctga

SEQ ID NO: 363274 - DNA, 705 bp, Pseudomonas aeruginosa
atggacttttcctggatcgacagtttttccgccgaactgctgcgcggcctgggcaccaccctcaagctcctgctgctgagcggggtctgcggctttgccctggcggtggtcgtgggtctgggccgggtgtcgcgcaatccgttgctgcgtgtgcccatgcagtcctacatcagtgtgttccgcggcacgccgctgctggtgcagatctacatcctctattacggggtcggcagcctgttcgccgcctacccgccgatccgcggcagctttctctggccctacctgcgcgaaggtttctggtacgtggccctggccctgaccctgagtgtcggcgcctatgtcggcgaagtgctgcgcggcggcctgcgggccgtgccccggggcgaactggaagccgcccgcgcctatggcatgggctactggctgaccctgcgccgggtctggctgccccgggccctggaactggtacgcccgaccctggtgggggaatgcgtgctgctgctcaaggccaccgccctggcctccaccgtggcagtcaccgacctgctcggcgccgccaacctggtgcgggcccagaccctgaaggtctacgaaccgctgctggcggtggcgctgatctacatcgtcctggcctttgtcatcgaacacctgtgcgcacgcctgggcaacgcctcgcagactcagcggccgcagcgtcaggcctga

SEQ ID NO: 363275 - DNA, 714 bp, Pseudomonas aeruginosa
atgatttctctgtccgacctttcccaactgttcgtcgccgacggctggctcggcgccctggcccagggcgcgctggtgtccttgcagatttccgccggggccttcgtccttggcctgggcatcggcctgctggtggcgatgatcaagctcaagggcccgcgctggctggtgaagctggccaatgtctacaccacgctgtaccgggcgatgcccgagctgctgctgatcctgctgctgtactacgccggcaccgacctgttgaacatggccatggccgccatggaccggccaagtgtcacggtcaacggcttcattgccgcggtactggtgctggggattgtccagggcgcctattcggcggagatcatccgcggcgcgatccaggccattccccacggccagatcgaagcggcgcgggcctacggcatcgagcgctggctgctggtgcggcgcatcctgctgccgagcatgctgccctacgccatggccgggctgtcgaacctgtggctggtactggtcaaggacagcgcgctgatcagcatcgtcggctacagcgagttgctctcggtgggcaagcaggcggccggttccaccaagcattacctggtgttctacctggcggtcgcggccttctatttcatcatcaccctggtgtccggccgcctgttccgtgtgctcgaacgtcgcaccaaccgctggctgccccagcactag

SEQ ID NO: 363276 - DNA, 774 bp, Pseudomonas aeruginosa
atgaaaaacctgctcaaggtgctcgccaccggttgcctgttcagtgcattggccagccacgccgtggccgccgacaggatcgtcttcggcatcgccctggaaccctacccgccgttctcgatgaaaagcggcaacggtgattggagcggcttcgaaccggaactgatcgaggccctgtgcgaacgcatgcaggcccaatgctcgctcaaggaagtggcctgggacggcttgattccggccctgcaatcgagccagatcgacgccatcctcaactccctgagcatcaccgaggagcgcgagaaggtcatcgatttctccgtgccctactaccagaccccggccatgtgggtcgccgaccagagcctggacctggtcaccacccccgagggcctcaagggcaagctgattggcgtgcagggttcgacctccaacgccaccttcgccaagacctactacggcaagacctcgaccctgcgctactacaccacccaggacgacatgatcgccgacctgcagagcgggcggatcgacgtgatgctggccgacgctctgaccatcgagccgatcctcaagaccgctgccggcgccggcctggcggacaagggcctggcaccgagagacccgctgttcggttccggcatcggcgtcggcctgcgcaagggcgacagcgtcttgcagcagcggatcaataccgccctggcctcgctcgaggccgatggtacctacgacaagatccgcagccgctttttcagcgtcgacatttctgccaactga

SEQ ID NO: 363277 - DNA, 795 bp, Pseudomonas aeruginosa
ttgcaatcgcagcccaactccgtcaatcccgtggtggcgatcgatgatctgcacaagagctacgccgatcaccacgtgctcaagggcattgccctgcgcgccaatgagggcgaagtggtgtcgctgatcggctccagcggctcgggcaaaagcaccctgctgcgctgcatcaatctgctggaaattccctgcagcggcagcctgcggatcaatggcgaagaagtgcgtctgaagaccgaccgcgccggcaacccccaggttgccgacccggcccaggtggcacgcttgcgcacgcaattgagcatggtgttccagagcttcaacctgtggccccatcgcagcgtgctggaaaacgtcatcgaggcgccggtgtatgtcctcggtgaacaccccaaggacgccatcgaccacgccgagcacctgctggaaaaggtcggcctggccaacaagcgcgatgccttcccgtcctttctctccggcggccagcagcaacgggtggccatcgcccgggccctggccatgcgcccccaggtactgctgatggacgaaccgacctcggccctggacccggaactggtgggcgaagtgctcaaggtcatccagggcatcgccgaggaaggccgcaccatgatcctggtgacccacgaaatggccttcgcccgggatgtgtcgagcaaggtgatgttcctccaccaggggctggtggaagaggaaggcccaccgcagcaagtgttcctcaacccggtcagcgaacgctgccggcaattcgtcatggctcaggaaaaccgcgtctga

SEQ ID NO: 363278 - DNA, 921 bp, Pseudomonas aeruginosa
atgcgttatccctccatgaccgctctgcgcgcgctggatgcggtggcccgcctgggcagtgtcgccgaagccgccaaagagctgaacctgacccccagcgccatcagtcaccagatcaagagcctggagcaggccctgggtttcgccctgaccgagcgccagggccgtagcattcgcatcacctaccagggcgagcgttatgcccgggacattcacctgctgctggccaatctcctcgaggccggccagcgctcggacggccagcaggtcagcgggcggctgtgcatcagcagcccgccggggttcgccacctattggctgtgcacccatatcgccgagttccaggcgctgtatccccaggtcgaattgcagctggtttcaccccgtacgccaggcgacaccagcgacagcagcgtcgatctgttcgtcgcctacggcatgggcgactggcccaaccagcatgtgcagaagatcgtctccctgcgctatttcccggtgtgcagcccgagtctggtcaatgccatgggtggtttgaaaatcctcgacagcctggaccaccccctgctcctgcacatgatcgactactccgactggcgggtctggctggcggcggccggggcgccgaatgtcgatgtgcgccggggcatcatcttcgccgatgcgcacttcgtgcagtcggcctgcatcgccggccagggcatcgccatgggcgacaacctgatcagcggcgaggccctggccagggggcagttggtgcaacccttcggtaccgagatcgaatccaaccgcggctactacctggtggccgacctgctcaaggccgagcgcccggtggtgctggccttcagcgagtgggtcaaatcccagttgcagggcatcacccgcttgcacccggaaccccggcgcaatggcaaagcgtga

SEQ ID NO: 363279 - DNA, 1608 bp, Pseudomonas aeruginosa
atgaccacctgtgcccagtccctggttcgtttgctggaaggttatggcgtggacacggtgttcgggattcccggcgtgcacaccgtcgagctctatcgcggcctgcacggcagccgcctgcgccacgtcagcccacggcacgaacagggcgccgggttcatggccgacggctatgcccgggccagcggcaagccgggagtgtgcttcatcatcaccggtccggggatgaccaacatcctcaccgccatgggccaggcctacgccgattcggtgccgatgctggtgatttccacggtcaaccgtcgcgagcacctgcgcctgggccatggccacctgcatgagctgccggaccagcgcgccatggtggccggggtctgtgccttcagccacaccctgcaagcgccagcggagctgcccgaactgctggcccgggcctttgccgtgttcaagtgcgcgcggccacggccggtgcacatcgagattcccctggatgtactggacatgcccgccaccgacctcaacctgatgccccgcagcctgcccggtgcaccggcgcctgccggggcttcgatcgaggcggcggtggccctgctcaatagcgctcaccgcccactgatcctggccggcggtggagcccgcggttgcgccgaggtcctgcggcagttggccgaacgcctgcaagcgccggtggccctgaccaccaacgcccgtggcttgctgccctgtggccatccgttgctgctcgacggcgtgcagtcgtcggcccatggccgggccctgatcgacgaagccgacgtggtgctggccgtgggcaccgaactgggggaaaccgactacgacttcttcggcctggggcccctgcgcttcaagggttcgctgatccgcctggacatcgacccgatgcaggtcatgggcatgcaacgggcccacgtcggcctggtgggcgatgccctggaaggcttgcaagccttgctcggcaaagtggcgcaacccagcgttcgcggtcgttgggcgctggacagcgtccagcgcgtgaatcaggccgaacgcaccggctggacgcccaagcaacaaggtttgcagggcttgctcgacctgctgcgcgacaccctgggcagcccgatcctggtgggtgattcgacccaaccggtgtaccagggcgccagcggctaccaggccccggccccggccagttggttcaacgctggcagcggttacggcactctgggctacggcctgccggcggccatgggcgccaagctggcacggcccgagcgtccggtggtggcgctggtgggggacggcggcttgcagttcgccagcagcgaactgatcgccgcccgggaagcgcagatcggcgtgatcctgctggtgtggaacaaccggtgctacggcgagattcgcgactgcatgcaggcccgggacatcgcgccgctgggagtggatatcctaaccccggacttccaggccatggcccggagcttccatgtgacgcaccatcgcgccgacaccccagcgcagttgcaggaactgctgcagaccctcagggatatccatcagccagtgatgatcgaagtcgacgccggcgcctatctggccctgggctga

SEQ ID NO: 363280 - DNA, 1953 bp, Pseudomonas aeruginosa
atgacaaaaatcacaacaccagcgcaagagagcctgcaactatccacgtccgacggcggcaccaccaacgtcgagaagtacgagttcgaaccgatcaagggctacccgatgctcaactggcgcggcaagcgtccgttcacctcgacgcagtactacccggcgcagttgaaggaagtccacggcgaggaggtggatggctggcgcaacaagatcttttggggcgataaccttcaggtgatgagtcacttgttgaaggagttcaggggcaaggttgatctgatctatatcgatccgccgtttgattcgaaggcggattacaagaaatcaattcagctaaaaactgtaaaggccgttggcgatcagtcctcctttgaagaaaagcaatataccgacatctggaacaatgatgagtacctgcagttcctctatgagagattagtcctgttacgagagctgctttccgaaaatggagcaatttttgttcacgttggaaccggggtttctcactttgtgcgctgtgtgctggaggagattttcggaaaggagcgctttgttaacgagatcatctggcgcaaggctttcgcgcacaacgatcccgggcgctgtgggagtattcatgactctatctactacttttcaaagtcgcctgaccgcacttggaacaaggtgcttcaaaaaatcgacaaagagtatgttgagacattcttcgactcgttcgatcctgagcgcaacgagaggtacaaccgattgccaatggatgccccccgccacggcgacggtggaaatctcgtatatgagtggaagggcgtctggccatcagcaggacggacatgggcgatcaccaaggacaagatggaggcatatgaccgcgaagggcgcatccattacccgaagtcaggcggagtccctcgcctcaaacgctatgaaagcgagcatgagggcacggtaatccaggatctctggacggatataaataagcttcacaacctggccattgaggcggagggatatccgactcaaaagcccgaagcgttggttgagcggatcgttcgagcagcatcgaatcctggcaacttagtgcttgattgcttcatgggatctgggacgactcaagctgtcgccatgaagcttggtcgtcgcttcatcggagcagacatcaatctgggtgcaatccaaacgaccaccaagcgcctgataggcgttgctgatggcctgcgccagaaaactcttgatggcgagaccaagtacttcaccggcttcgagctctacaacgtcaaccactacgacatcttccgcaaccccgttcaggccaaggagctgctgatcgaggcactggaagtgcagaagctggagttcagcaccgtgttcgacggcgaaaaggacgggcgcatgatcaagatcatgccggtcaaccgcatcgccacgcgcgccgacctgaacgagctgatcgcaggcttcgattacaaggcatgggaacgcaagcagaacgagtctccgaaccgtccggtcgaaaagattaccctcgtctgcatgggccacgagccggacttggccgcgcaactggagctggccgccaagcccttcaaggtcgacgtggaagtggtggacatcctgcgcgataaagccgatctggagttcaagcgtgactcgcaggccaaggtgtccatcaagaagggcgagctggttgtcgagcgcttctacccgatgaaccttctgcaaaagctctcactgcagaaagagtcggtcgaggactggaaggagctggtcgaatcagtcctgattgactggaactacgacggcgcggtgctgcaaccggcagcggtggatatccccagcaagaacgagatggtcaaaggcacgtacaaggtgcccgaggacgcgggcaccatccgcgtgaagatcaccgatctgctctcggagtcgtgggaagggagcgtaagcaatggcgactaa

SEQ ID NO: 363281 - DNA, 186 bp, Pseudomonas aeruginosa
atggagagcttcttccgttcgctgaaggctgagcgggtgtacctgacgcgctatgccagctaccacgaggcgaaaaccgacctgttcgactacatccgcttctacaatcaccgccgtcgccactcgacgctgggctacctcagcccgatggagtttgagcggcgaaatacgagcagtagctcttaa

SEQ ID NO: 363282 - DNA, 267 bp, Pseudomonas aeruginosa
atggcgagaggtgcgatacggctgggcgacggccattccggcggtggccgcatgatcgaggccagcggcatgctggtcaacggtcggcggcaatgcctgctcggagacaaggcggagtgtctattgcatgcgggcatctttcccttggtatccggcggtgagggctcggcccagcatgatcgccgccccatggtgttcgaaccggcgcatttggcctgcggctgccaggtgttttcgtcgtgcgcagccgcctgttcaagatcctga

SEQ ID NO: 363283 - DNA, 588 bp, Pseudomonas aeruginosa
atgctcggttctattgcactggggcttcccaatattgccaaggttatgtactcgacaatcgtagccgcgcttgaaagcggctatggagtgaatgacggccataatctggatatcggtacgacattgcgctacgccgccttcggtctgagcatcatcggtaactggctcgaccagccattggacctggacaagtacgccctgccacgcgatccggcctgggggccgctggtctcgctctggcgcgatcccgaccccgacaggctgttgcccgccctggtggcggcttgcgacctccatgtggcacgcatcgcactgaccgagcgcgagtcggaatccggcaacttcgaattcgatacgccgctgctcgccgtgtaccccgcggaaatcctcgccgtgctgcggctgcgcgagcagcttggcctagccaatcccactggcatcgaacatccgttgatgcaaacgccttatgcccagatcacctgctcgccgaccttcctcacctcgcgaaatagtcgcgacgaactgctggaacggtttcttactaccgtgcggcagagagatcctcaggtattaccccaaggtctgtag

SEQ ID NO: 363284 - DNA, 1905 bp, Pseudomonas aeruginosa
atggctgacgccgcatacgacctgctggcgcgggacgccgccgacggcaccttgccggctcccgcgggcatatgcaccgcgtgcagtgttcccggcccggtgttctcactcaaccccgacggcggcccgcgcaacgccgacctgttgctcggcatcccctcccagggcgatgccgcgagctatgcctggttcatggacaatccatggatacgcgacaagacgcgcaatcagcgcgacaccttcctgctgcgcgtgctcgaccgcttcgccgcggaccagggcgatgccgtgatgaccgaactctggaccttccttgccgtacaggattgcgagatcgtctgcctcgatgacgagatcgccgaggactacctgcagccgcccgtgctcgacaatttcggcgagcgcagcgacgacgggctgggtttccgcatgcgccgcagcttccatttcgccggtggcacgctgtattacctgaccttcaccgcagtgacctggaaagaggtgccccgtcgcgaatatgtcgacgcggatgggctctacgaaatcggtatgccctttgcctggaacgagcccacgggattgttcccggtcgatcttgccgcccgccaactggcccaggaattcgcccgcgccaaagccaacgcgcgcatctgggaagcgatcaaggggttcttcgaagtcgccgccgccttgctggtattcgtgccggtggccggtgaagttgcccttggcgcgcgcggggccgccgccgctgtgcgctacctgttcgtcgccatggagcgagccttggcgctcgatgcgatggtcgatggcagcagccggatgatcaagggcgaagggctgagcatcggcgagaatttctgcgaagccctggccgcgctggccgacccgaagaccgccgaagagcgcggcaagcaggtgttcatgagcatcaacctgctcatgctcagcccggccatcttcggcagggcacgctggctactgcgtggcttgggccagaagaccgtaaagctggatgaggccgcgctggatgccgaggaactgctgcgcctgagccagcgcaagcacggccagccgctggccctggagaccgtggtggagacccgcgaggggactgtgggcggcacggccgtgcaagtcaggcagcgtttctcggcggataccaataaaagccagtggatcgtcagcgtcgagcacggcaacgccgatttctcggtcatcaccaacagcctgcgcgaacgacatgccctgcagatccatctgatcgccaacgcccggaaggcgaagaacctgaacaatgtggtcggtaacgcgggcgaagagattttcgccgcaggcatggtcagccactggggcgtgaagcccgagaatatcctggggtataacctcgcgagcggtggcatcagccgcttcggcttgaagaacaggagcggccatgggctcgacatgctgctcaaggttccgccgccgccgcaattgcagattcgcgtgccaacggccgaggctcgccatcacatggatggcctgcgcggtccatcggagtataagacactgaccttcagcgaagagacgctactggtggtcgaggtcaagacaacattggggaaaaccaaaacgccagggttttatgcgaatacgcagggtaaaggtggggacatcaatacccgtaggatattaagaaatatagaagaacatgggcgctggtggaaacgagacagcgttctgagtgtcgaccccggtgcaatgcagaaggttgctgccattaggaaagcccaggcgacaaatagagttgaatacatacacgcccaagttttccttgatagccagggacagataaacgccttggctggaaaaggtatcggacaaggatctggaattcaaataaacgactggcctgggaaatga

SEQ ID NO: 363285 - DNA, 846 bp, Pseudomonas aeruginosa
atggccggcctgctgaacattgatcgggagcgattggcgcacgccgccaccctcgaaaccgaccggcaattggtccgctatatctgcggtccccttgcaccgctcctgccgcgactgccgacccaacccgagcggatcgcgccgttcgtccagcgggccggaccggaagcaatcgccgctggcttcgcggatggcgggctttacggctggcacatcctcaccgatctcctgctcggccggaactgggagcgctctccgttccatgcggatcgtcgcttcgaaagcattctcgatgcgcccggcctgcgacaggaggtgcgcatcgtcctggccatgaatgccgtcatcgacgcgcggcaagctctggaggaagcactccccggaatgatcgatgccgcgctcgtccccttgagtctccatcctgaagtcctgaccccgaaagatacctggctggccttcgagcgaatcgccagcctgcgtggtctgcgctggttcgagatcgagtctttgttcgaaacctacgaggcaggcttccgcaaagctcatggcctgcctccgatagaacgaagaaagctctctggctacgacaggatgggatacgaatccatgggcatcccgttgccgctcccctacgacgacatccagttcagccctttccagactgtctgcttcaacgccgcgctcctgctggaacttctgtatggaccaagccgccacgagaacccgttgctggaagacctcacccgtcttgcggcagacaccagccacctcggcgttctccagaaccagctcaagcagttcctgctttcccatagaaaggccttgacggaggacctcaatggctga

SEQ ID NO: 363286 - DNA, 579 bp, Pseudomonas aeruginosa
atgggcatgcagaactggctggcggcccgttgcatcgcccccgtctcccctgagatcaacgtctattgcctatgcgaactgtcggcgcattccgagttgcgcgcacgcctggagttccacggcgtagcctatcgctccctgtggcaactggaagcgcacgaccagctgcagaaacatgctccctgcctgttccggagtccgcccggggatgccttcgatgaatggctgggcgggattctcgacgagctgcctctgagcttggtgctcacgcgcctgagcgacgacggtattcgcgggcacctacgtcgtttcaccaaattccaggatcgcgacggtcgctacctgcttcgcctgggcgatccggtgtcgctgcgtctctacctcgactccatcgcgggaaccgccgcaacggtggcgaaactgttcggcaagcgtggcgtcgaggcgttctacctgcacgctccgcgtgctgcgttgacccgctacgtccagccgctgttcgagcagggctgggacagcccaggacgcgagggctaccttgtctggcgcgagaccgacacctcgatggaggtttcgtaa

SEQ ID NO: 363287 - DNA, 366 bp, Pseudomonas aeruginosa
gtgcgcaacgaggtccgcagcgtaggcaactcgcagcgcgaggagatcgcgtccagccgtcaggttcggatcggcgaaaacgattccgtagtgatcgaaggcgtccaatccatcgaggccaggacctcgctgcgcaacctgacccccgactacgtactgcaaggcaccgagcgaatcctgatccgcggtcccgctggcagcgtactcatcgacgccggcggcatcacgctggacgcaacgaatatccggctcaagggcaatgtgcaggttttggtgcccggcgccaaccaggtgcaggccatcgaggccgcggtacgtgagggcgcgccgttgatcgaagcctgcccgctggacaaggagcgctga

SEQ ID NO: 363288 - DNA, 1164 bp, Pseudomonas aeruginosa
atggctcagcaaagtgacgtgcgcttcacctttgctccggcaaacaaggatatcggctttgacgtcatcgagttcacccttgatgaaggcttgtccgaactgtacgaactcaagctggaactctccagcttcgatccatcgatagattttggcgccatactggataagccggcgctattcaccatctggcagcaggggcggccagtcaggtatgtaagcggcctcgtatcgcacttcgagcagagcgataccggctttcgccgcacccgctaccgggcggtggtacacccagcgctggcccggctggcgctcacttcggactggcgaatattccagcagcaatcggttccccagattctgcacgcgctcctgaagaagcaccacatcctctattacgatcagcgcgtcactcatcctcatgcgaagcgcgagtattgcgtgcaggccggcgaaaccgacctggatttcatcaaccggctggccgcagaggaaggcttctaccatgccttctcggatgacggcgagacgcagaccctgatccattgcgaccgcatctggattcatgggcgcgttggcgacgaaccggtcttgtacaacgggctatctggcggcgacagcccgggacccgcgctgcgtcgcttcagctatgcggaaaaggttcgcaccgccattcaggttcaacgcgactataccttcacgaatccgcgttacgatcaggagcacaaggttgaatgctcgaagatcgaactgggcaaccagtcagaccactacgagcgctttgactacccgggacgctacaagcgcgacgcagcaggcaaaccgttcacccgcacgcgcctgctcggccatcggcgcgacgccagggtagcccatgtggaaggtgatgatccgcgactggttccagggctttccttcgaccttcaggggcatccgcgggaaaccttcaatcgaggctggcgtccactgcgcatgcaccaccgtggcatccagtacaccagccaggaagaagagaacacctcggatcggggtacccactacagctataccgccgaactcttaccggatgacgtggactggaaaccggagccaccgcccaaaccacgcatcgatggcccccaggtcgccacagtggtcggccccccggggggaggaaatcttctgtga

SEQ ID NO: 363289 - DNA, 1308 bp, Pseudomonas aeruginosa
atgaagctagtatctctcatccgcctcatggcggtgatgggcttgttatgcgcgatggccgcgcaggcgagttcgctgattgacgacggcaagaccacggtgaagtacagcaactattacttcaaagagaatgacggcggcgcggtcggcccgaaccgcgatgaatgggtccaggccctacaactcggattcagctcagggtggttcaaggacttcctgggtttcgactacacccatgcgctcgccgatgacctcttcgtcggacatgctgcgacaagcctcaccaatctcgccgcgggtagctcgccgcgcgatgcgcacagcatcaacaagccgctggaagcgtacctgcgcacccagtggcaggacgacgggaaaacgttgaccgctggctatggcaagaagtcgcggcgctatgccatctatacagacgattcgacccgaattcttccgggcgcaacgatgggttgggacctgggcttcgccacggacgcgttgagcttgcgctacagccgcctgcatgcctttagcccacgcaacgcgactggctggggagaagcactggagaacttccgcgggcagcaggtcgataagctgcaaatctactccgcaagctacaagacgccatttggcacacggctcctcggcgagttcgccgagtcacaggactatctgcgcagtgggtttctccagttcgagcagacgttccccatgagcgcctcgcaatcactggccgtcagtttgacccacggtcagcagaaggacgccggcaagctcttcgagtatggcggtgtacgtgggctctatgagccggaaaacagccacgatgcgcgctatctggacatgacgatgcgctacaacgtaggaggccactcggttgcgttcagctggaacaaggttcgcggcgacgactttgatcgcctgttcttcgctcaagaccacggcacatggaacagcagcgccaagctctacttctggttcggccttcgcgatgaggagatgtacaaggtcagttcgacggtcgattttgcagccctgggcgcacccggcctgaaaatgttctcctactacgcgctatcgaaccaggcctatggctacgatggattctcacgccgagaattccagaacgtcttccagtacagcttcgacggtccactaaagggattgagcctagcgtggctgcatgaccgcttccacaccaagggcacgccggacggggttcacaggacgatggcctctagaggacctgccggcatcctgaccgagcactcggaacggttttacctgacctggcaacgatctttctaa

SEQ ID NO: 363290 - DNA, 1308 bp, Pseudomonas aeruginosa
atgcgtgcctcatctcaaggcgcatccaaatcgcgccaagtcgtggcagcggtaattggtaatgcgctggagtggtatgacttcatcgtctacggctttctctccagcatcatcgccaggctcttcttcccctcaggcgacgagtacacctcaatgctcatgacgctggcgacgtttggcgtcggcttcttcatgcggcccgtgggcggcatcctgctcgggctctatgccgacagccgtgggcgcaaggccgccatgcaattgatcatccgcctgatgaccatcgcgatcgcgctgattgcttttgcgccggactatgccgccatcggcgtcgccgcgcccttattgatagtggttgcgcggatgctccagggctttgccacaggaggcgaatatgccagtgccaccgcatttctggtcgaatccgctccgcccgacaggcgcggcctctacggtgcctggcagctcttcggccaatgcctggcggtctttgccggcgcaggcatgggggcattggtcacgcactggctcagtcccgaagcgctggacagctgggggtggcgcgtgccgtttgtgctagggctgctgatcggccccgtcggactgtggatgcgccgacacctgcaagaaaccgatgagttccagagtgcccacagcataccaaacgtgccgcggcaacctctgctcaacgtcatcaagcagcattcgcgcggcgtactggtcagcatggggatgacaatcttcggaacagcatcgttctacgtcatcctcgtacacatgcctaccttcgccaacaccgtgctaggcctgccgttgtacgaagtgttccttatccaaatggctgccgtgctgatgatgaccctcatcatccccatcgctggcgctctctctgatcgcatgggccgtcgcgccgtcctgttcgccgcgacctttgtgttcttcataatcgtgtacccgctctttgcctggctcacagccgcccccaaccttgaacgcctgttggtcatgcaactggtactgtgtgccaatctcggtgtttgcttcggccctgcgcccactgcacttgccgagcagttccccacgcatgtccgctccaccggcatttcggtcggttacaacgtcgcggtcatgctgtttggcgggttcggcccgttcatcgtgacatggcttgtacgagcgagcggcacacccgtggcgccagcctggtatgtgttgtttgccaccctgttgagcctgatcgcgacagcctgcctgcgtgagaaggaaccgccggcacttgtagcgcagagaccggaaataccgacctag

SEQ ID NO: 363291 - DNA, 684 bp, Pseudomonas aeruginosa
atgttcaatctggcagaggtctgggggctccgcccggacgagagcaatccttgtcgccacgttccgatgtacccggcaggcaaggcaacacacctcatcagcgaccaggatatgggcaagctgttccggcagttggacaagatcgaggccgaaggactggaaaactacgtcattccgctggccatacggctgcagttcgagttcgccgcccgccgctcggaaatcgtagggctgcaatgggattgggttgatctggcgaatcgtcgggtcgtctggcccgatagcaagaccggcggcatgtccaagcccatgagcgaagaagcctaccggctgctctccacggcaccgcggcagaaaggaagctcgtttgttctcccatcaccgacccatccggggcagcacctgaccaccggcgagtattacgggggatggtgccgcacgctcaaagctgcgggagcgacgcacgtcggtacgcatggcgtgcgtcaccgatctgccacggatatcgcaaactcgggcattccggtgaaggtcgggatggtgctgaccgcacacaagaccgttgcgatgttcatgcgctacgtccacacggaggacgacccggttcgtcaggccgccgaactggtcgcaaatcgtcgcagggcgattgcgggcaggcagcagtccgaggaggcatcggcatga

SEQ ID NO: 363292 - DNA, 273 bp, Pseudomonas aeruginosa
atgagtttagaatttgttgaactggcaaaaaaatttttggatagttcatttggcggaaaaattttcaccgagaagttctttgaaacgtggcgtagcgaaggtgcgtcaggcttgctgaaaaaggatgatgataatcttggtgcttgcctcaggcttatgtttggaatggcagattgcttcacgcatgacccgaaggataatgatggtgagataaatgaagaggagctaaagcaggaggttagagagcttttgaagaaatataaatatatctag

SEQ ID NO: 363293 - DNA, 1383 bp, Pseudomonas aeruginosa
atggcaagccccgaactgcgccgaggcctgacggcgcggcatatccgtttcatggccctgggctcggcgatcggcaccggactcttctacggctccgccgccgccatccagcgcgccgggccctcggtcctgctggcctacctcatcggcggcctggcgatctacctgaccatgcgcgccctcggcgaaatggccgtgcgcaccccggtgccgggttccttcggccactacgcgagcacctacctgggtcgctacatgggcttcctgaccggctggagctacgccttctcgatgatgatggtgtgcctggccgacgtcaccgccttcggcgtgtacatgggcttctggtttcccgacgcgccccgctggatctgggtactcggcatcgtgctgctgatcggcgggctgaacctgtgcaacgtgaaggtcttcggcgagctggagttctggctgtcgctgctcaaggtcctggcgatcctggcaatgatcggcggcggcctgatcatcctgctcttcggcatccaaccgggcggcgccggcgccccggccatcgataacctgtggcagcacggcggcttctttcccaacggcatcgaaggcatgctcgcctcgttcgccatcgtcatgttcgccttcggcggcatcgaggtgatcggcatcacggcgggagaagcccaggacccgcggcgcatgatccccaaggcgatcaactcggtcccgctacgtatcctgctgttctatgtcctcaccctgctggtgctgatgacgatctacccctggtcgaagatcggcagccagggcagccccttcgtacagatattcagcgggctgggcatcggctcggcggcatcgctgctgaatatcgtggtgatctccgcggcgatctccgccatcaacagcgacatcttcagcaccggccgcatgctctacggcatggccgaggatggcctcgcgccgtccgctttctcgcgcctgtcacgggtcggcgtgccgtggatgaccgtactggtgatgggtatcgtcctgctgctcggggtactgctgaattacctgctgcccaaggaactgttcctcaccttcgccttcatcgtgaccttctcggtagtctgggtctggttgacgatcctgctttcgcaggtcgccatgcgccgtcggctcagcccgcaggaggtcgagcggctgagcttccgggtgccgttctggccctacggccaggccttcgccatcgccttcatgctcttcgtcttcggcgtcctcgccgcgtttgcggatacccgcccggcgctgtacgtcggactggcctggctgctcctgctcagcctcgcctacctgatctgggtccgcccgcgcggacagcgccaggaacaggccgaagcgacctga

SEQ ID NO: 363294 - DNA, 828 bp, Pseudomonas aeruginosa
atgacgcttgcagcattcgaattcgaactcgaccggcacaccgtcgaagccttccagcgcgacggcgccgtgtgcatccgccagttgttcagtacggaggaagtccgcctgctcgaggcgggaatcgaggccaacctggccgcgcccagcgaacgggcgaaggtcgccagcagcccggacgatcccggctggttcttcgaggacttctgcaactggaccgacaaccagcactaccggcgcttcatcctggagtcgcgggtcggatcggtcgccgcgcagttgatgggctgcgcaagcgcccggctgtaccacgaccacctgctggtaaaggagcccaatacccgccagcgcacgccatggcaccaggaccagccttactacaacgtcgaaggccgacagaattgcagtatgtggatgccggtcgacccggtggcgcgggagtcgaccctggagttcgtcgccggctcgcaccgggggccatggctgatgccgcgcaccttccgcgacaaccaggcgcaatggttccccgaaggcagcctggccgaactgccggacatcgacgccgaccgctcgcgctggaacatcctcggctgggagctgcaaccgggcgacgcagtgttcttccacatgctcacgctgcacgcctccggcggtgtcggcggcgaccggcgccgacgggcgttctcgctgcgcttcctcggcgaggacatgcgtcatgcacccaggccgtggaagacctcgccggaattccccgggctggtcgatcagctccccgccggcgccacgctggaacacccactgttcccacgcctctggccgcgcgactag

SEQ ID NO: 363295 - DNA, 1200 bp, Pseudomonas aeruginosa
atgatcaagccggtattgccgccggcctgctacaccgagcaggactggtacgagcgcgaacagcatgaaatcttcggccgtttatggctgctggcgggattgacccagcaactggcggccgaagacagcttcatcacccgcgacttcagcgggacgcctgtgctggtacagaacgtcaagggcgaactgagggcgtttcgcaacgcctgtgcgcatcggggtatgccgatccagacgacggagcatggcgtgcgcaagatggtctgtccctaccatggctggggttatcgggaggatggcgccgtgcgggggattccgaatgcgggaatctacaacatatgcaaggccgagaaggatggcgccagactgcagcgctacgcgctcgaggtggtgggcaactttgtcttcgtcaacctctccgagcagccgttgcccatcaccgagcagttctcccgcgagattctccaggtgttgacgcgcagctccgcatattttgcgtcccaggtctcgtatacccgcttcgtcaaccattacaactggaagctgaacttcgagaatattctcgactggaaccatgcccaattcgtgcatccacaaaccttggctcctctgttgcaatattctagcgatgggaccttcgatgctcctgccaaggtggtttcgctactgttcgataatgaccggcaaggcagcgatgccgtaatacatgagaaaaacgctttcagcatccaggccgccgcggcggtagccgatagcaatgcgggtttgaaagatatttcgtttttcggccgctcatccatgccctatgcgccacgctggttttcctcgctgctggactcaccttgcgatcagggtgctttcttcgcctgcaatcttttccccaatgtgaacttcggttcgatccacggagagcatttctatctccagcagtacgtgccactcgcgccggaccgcatcgaataccactcgtgggtcttcacttccaggctcaagccggaagtgccaccgcagccccatctgctctggggcatccatcacgcggaaaagcgggtgatcgacgaggactcggtattgctgaccgaattgcagcgtgcgctgaagagcgctaccacaatcggcatcatgggcgaccatgaagcccccctggctgccatgggcaagtggtacatgcaacgactggctggagaggacgcatcatga

SEQ ID NO: 363296 - DNA, 438 bp, Pseudomonas aeruginosa
atgatagacctgaccgtgaatgaccgggcgttgagcttcgacggctatcccgaaatgccgctgctctggtatctgcgcgacgaagccggcctgaccggcagcaagttcggttgcggtatcgccctgtgtggcgcctgcaccgttcacctcgacggtgtcgcggtacgctcctgcgtaacgcccgccggcgccgccaggggcaagcgcgttaccaccatcgagagcattggcgctaccgcgatagggcaggcggtccagcgggcctgggtgaagctggacgtggtgcaatgcggctattgccagtccgggcagatcatgagcgccgccgcgttgctggcgcagcacgccaagccaagcgatgccgacaacgctgggcggatggccggacgatcgccgccagcgacacccgggcgacagcgtggccggctgggaagataa

SEQ ID NO: 363297 - DNA, 366 bp, Pseudomonas aeruginosa
atgaacgcgcacaccagcaaaggtttcgcctcccgggccggtttcggtctgggcacgtttgtgcgcttctgcctgcatgatcgtcggcctgtagtgcgctgggtcaagcgagttaccctcttggtggtgttgttcgttatctttgctgagaattttacctggctggccagcgccttcatgactttattgtcgtttgggttgattgggttggttctagtaaagggtgacctttcactgctacctcaggtcacccatgcgaatagtagtagttttgatgatgacggggttgagagtcgggctccattccgtggtgagtatgagcaccctgattatcatctttactataagcccgacgagagtcaatga

SEQ ID NO: 363298 - DNA, 687 bp, Pseudomonas aeruginosa
atggtgaaaacgtatgcttgttgcaggtgcatttcctcccgtgcgaccagatcgcagtctcaacaacctgttatagcccgggtcatccagagtatccagatagaaagtattttcagaagaggggcgttcatgcaaaagctcttgaatgcaaagggcccaaagaggcctgttcggctgatttttttgatggctggatttttatttttacacgcatgccaggccggccccgatatggtgtccattcctatcggaggatacaatcacacttcggcagctattaacaagtttagtgtgaatggggccggagggccaaatatcggtccatttcaggggggcggatcgcaagtgtgttgcggtaccattcctagagtttggaagccgggcttgaaggcaaccgtggagtgggaggtagatcctgagccaggagcttataacgactggccggaaaagacattttcagatggctggcgaaaacgtatgagagagcataggatcttgtatgttcgtcataaggaaactgtcgacatacctccctatgatagtaaggagatttgttcgttaaaagtgcattttcttccgtgtgataaaatttatatttcaactacctgttatacgccatctcatcccgattatccacacaaggacttttttcagatgaaggattctgcatcatgcacggggcgatga

SEQ ID NO: 363299 - DNA, 357 bp, Pseudomonas aeruginosa
atggcgaatcggagtctgagcaaggagatccgcaccatccaccacgaggtgaacgggatctatggccatcgccgcatcaaggccgagttgactgccatggggcatgcgtgtggtcggcaccgggtcgctcgcctgatgcgcgaagccggactgcgagttcgttcgcgcaagcgctggcggctggtttccagcagtcgtcatgctctgccgattgccccgaatcatctggatcgccagttcgcctcggatcgcgccaaccgacattgggtctcggacatgacctacgtgcggacagcccaaggctggttgtacttggccgtcgtgctagatctctattcacgcgccgtcgtcggttag

SEQ ID NO: 363300 - DNA, 990 bp, Pseudomonas aeruginosa
atgaagatcccattcaaactattgctcgtcctggctgtagcgattcatgcaggccctgccctttccaatacctgtgcttggaacggaggagctccgcagtcctcatattcagtacccagccttccctcttccatgaacctcaacaaggttgagattggcggagttcttgcgaaatccgaactttgggtaagtgggttagccggatccttctcatgccagaaaggtgcgaaagttgatttcaccgcaaaagtggataatttcccttatgggagtggaaaaatctttgcaaccaatgtggagggcgtaggggtccggataggactagccagtcagaacagcagcaccgccagttggtatgcaaacaatgaaacagtttggcagtctagcggcatcacctatcccttgatgaatactctacatatcgagttcattcggacaggaatgtcggttggctccggagacgtcacgctgtctttcacggcaaccacaaagtatgcaaacctgaatccaattgagtttcgttatgccgcccgcaccaccaagctcgtgaataaagtattcatcgagagctgcgagcccaccaggaaagtagtcgaagtccccatgggcaaggtgcccgcctcccaggtccgccagaatggcgcgccctggagcgacttctccgtagacatccagtgtaaaagcgaggagttcaagcagaagccgccggtaaaaacctacttcgaaggcaatgtatcgggcggattgctgaccctctccggcactggcgatccagaggtcgcatcgggagtaggcatacagctgaccgacgaacaaggaaaagcgcttccctttgcccgggcaaatgcaatggcgttgccatggatacgcagggatcccacggcggaggtctataagctctctggaaaagcgcgctatgcggcaaacggttctgaaatcaaacccggcaaggcggacgcgacactgacctatgtgctcgaatacaactga

SEQ ID NO: 363301 - DNA, 519 bp, Pseudomonas aeruginosa
atgttcgaattgaaagacctcccctctcgagaaacgctcgcccgcttcggcgagctttacggcaaccctgacgtcgaagggctctacacttggttggtatgggcgtccgcgaccgatgaaatgttgtcggctttcaacagcaacctggcgcgtgaagggctcgcccaaacgcctttcttcgtgctgttgttgctcaagcgcaacccggatgggctgaccataggggtattggccgatggcgtcgcggtgacctcgcagacgatgacgcgcgccgtgaagcagatggaggcatcgggactctgtaccaagcatccggatccgcacgacgggcggcactggattgttcgcctaacgcccgagggagacagtgcgctaagccgtgttctgccgaaacactatgcctgggtggccagattcatgagcaacttcaatgacgatgagcgggaattattggtgaagctgatgctacgggttgccccggcgttgcatcgtatccgattcgaagatgaactcggctaa

SEQ ID NO: 363302 - DNA, 1215 bp, Pseudomonas aeruginosa
atgcacaaatccagcccaaacacaccccaggagcgctcgaccagcctcttgctgcaaatggtcttctgtgccctgacggtcgtttcactgctgtatatcccggttccaatccttcccttgctcgcgagcgcctatcagttgccacaggcacaggcagggcttgcactgggcgccttcggtattgcctatgccacggggttcatgctgttcggcccattgtcggaccgcctgggtcgaagggccgtcctggttggaggcttgaccttcctgacgatcatcacattggcattggcatgggtagatacgccgggactgttcatcgctggtcgagcattgcagggattcgccgcggcgtccttcccgccggtggcgctggcgtatctgtccgagcgcggaacgccgaagcaacgtgtctgggcagtagcatggatgagcacggcattcctgtcggcaggccttctgggacagatctacggcagcgtagtggtctctcgctggggcttcaactgggcgctggttccgttggccgtggtctacgcgcttaccgctctgcggctctcggctgcgcccgagtgcgttgaggcgcggcgcccgcaatcttcactgtgggcaggctatcggcacatcttcaccttgcttgccgacccagcgctgcgccgggtgtatctccccgccctgatgctgctcatgtcgttcgttgcgttctacatcgggctggacatgcacctgggggcgttctttgaagggggcggggtcagcgccatgcaggtccgcctcgtcgctttgcccgcatttctcgcccccttgctcgcccccaggctgataggccgctggggtccccaacgggtcgccaccacgggtgtgatgatcgccgcgataggtctcgtgctgtgtgcgggggccggagaaaagcatgttgtcccgttgctggcggcgagcgtgatctacgtcgccggcgtggcgatcagcgttccgggattgatcgcgtgtattgccgcgtcgaccttgcctgaagtgcgaggtttggcggtgtcgttctacaccttcgtccttttcgtcggcgcgagcctggggccgtggcttgccaacaatagtcgcgcctggtcggtggagacgttgttcctggttctggctgcaggactaggcgcagcagcgatgtatagcacggttcgagggaacagggggagccccgttcgcgctagtcgagaggcctga

SEQ ID NO: 363303 - DNA, 807 bp, Pseudomonas aeruginosa
atgggaatctatgtagtcgttgcaaatcagttcgttggatttgctcgtcacggacacgtgatgtcctacagcgcactgctccaggcgttgaaagagcaagggaaccccggaatgaagggaagatctttcattgcgggccaggggcttgggcgaaaggaaatccagcatgcgtacaacctggcagtcgccaatggctttgccgacgaattcgaacactggctcctatggtcgaccgaagaacgggcgggccaggaactctcccataagcgccagcacaagaatgtgctgatctccgtaccggagcaaagcgatgaaggcatctatacgtccagcctgctgatccatgctgaaaacgaactgatgctcgaccacctcaccgggcagcatgtgcagggcatggttctgctcgaagcctgccgccagatgttcctggccgtgacggagcgctttcacctcgaaggctacgagcctcagaaccgctacttcgtgctgaacgagatgaacgtcaagtacaccgcgttcgccttcccgctgccggcacagattcgataccgcctgctcgaacgtgaccagccgcgagccgatcgcgtggacgtgtgggcagaaatggaagtgtggcaggcggaaaaacccgtcaccggcgtcgaggtgcgcttcacggtgatggacggtgagcgtctgggcgcgcgcgaggcctcgcttgcatcgcgggcgctgtcacatcacgtcaattcgctgcgccgccatttgcagatggcttcgcactccgatgctcaagcgatgaccgagccgatttccgcctgttga

SEQ ID NO: 363304 - DNA, 699 bp, Pseudomonas aeruginosa
atgaaaattcagagaattgcgttcttcgatgtcgatgaaacgctcatcgatctcaagagcatgttcagcttcagggcgttctacttccgctttctgtggggaaacgaaaagggtggcaaggcagaacttgcagcggcaaggcgaattgaacgccacgtccggcaaggctgtgatcgtagtgccatcaactcgctgttctatgaggcgtttcacgcgcaccagcccgagcaattgagcgaggccgctcaggcctggtacgcgcaggaaagagcgctgcccggcttcttcatcgaacccaccctggaagcacttcaggcacatcagcgcagcggcgacgcggtggctttcgtatcgggtgcggcaacgcagttcctcgcgccgctggcggcggagttgggcgtcgcccatgtcctggcgaatcggctggaaacctatcgcggacgcttcacaggtcgcctccttcccccgcagaccatcggtaccggcaagcggcaggccgcgctggcattgatgagcgaattgggagcggcagcggaagactgctacgcctatggcgaccacctgtccgaccttgcgctcctggagagcgtcgggactcccatcgtggtggcgcgcgatccggcattgatccggcatgccgagcaacagggctggtcgatcctgcagccaactgcagccgcaccgcgaggagagcgatga

SEQ ID NO: 363305 - DNA, 561 bp, Pseudomonas aeruginosa
atgtcgtttcacgcgttctcctttagccgcttggcggtcctgggcggtcttgccttgtggctgagcatcgccgtgctgaacaacctgagcgatccggacaccaaccgcttccatattggcaacaccctttccatggtgttgttggaagaggaagaactgctgggcagcacactgcgctggcgtgcctggcctgcccaatgggccgaggcggtgctgtatggggtggccggcgtgcaggtcttggtgtcgctgctgctttggttcgccaccttcagctacgcgaaggcctggcggcgcggcagtgtctccttgctcaacctcgcgcgcaaccgcgccgtcatcgcgctcacctgtttcctgctgctgtggttcagcttcatttgcggtggattgtggtttggctactggatgaagcaaggccccatgcagtcggtgcatatgactctcattctgatcggcttgcttgccctgctgttcgtgcaaggcgagccgcaaccgctggctcgtgccgagcaagccgccgaacccggcgactcaccgttccacaggagtcttccatga

SEQ ID NO: 363306 - DNA, 675 bp, Pseudomonas aeruginosa
atgaccaaagtgcgctacctctcgatttcggccctcgccatcgtcctggcgatgaacgccgccaacgccaacaccgaatcagcccaggagacccaggccatgaaccagatcactgcccccatcgttgccattccgtccacccatggggagtccactcgcaggacggtggcgctcgacgaagggactgcggtgctcacccggtatgtgcgcgccgatggccgcaacgatgccctggggggcgagcatttcagcaccgtggtttcggataccggcgtgctcaagggtttcgccagtatgtcgcaggacctggtcggcaagccgctgccctctcgcgaacgctccgaagaaatcgccagggcatttctgcagcagcatgcgcctgacctgctcgagcggatgaagatcagctggattgaaccccacgacgaacccctgacggtgatgcgcaatggccgggaagaggtcgtcacgctgaccggcatgaaggtcaaagcccgcaacctggcggacggacgctggttctgggtcatcgttggcggtgacggcaagcccatggtgttcgagcgcgacatcgtgtggatcaccttccctggcaagcgcaagaccgagaagtggctgcatgacagttggctcgccgagcagccgcaaggcggggcgaagtcgcgggcgctctaa

SEQ ID NO: 363307 - DNA, 1239 bp, Pseudomonas aeruginosa
atgcgtcgttccattttcagcatccaatgcgtggcaatcctctcggcaaccagcatgctggttgcctgcggccctgccgagaaaggctcggcggcacaggctccgcccgtagtcagcgtggcggaggtcatcgttcgccccatcagcgactgggacgaattttccggcaggctggaagcgccggcgaccgttgagctgcgcccacgggtttccgggcatatcgaccgcgtcctgttccgggacggcaccctcgtcaagaagggagacctgttgttccagatcgatccgcggccttttcaggcagaggtcaatcggctcgaggcccaactgcggcttgcccgcgccaaccaactgagaacggccaacgaggcgcagcgcggcgaacggttgcgggccagcaacgcgatctcggtcgaaatcgccgaggcacgcaagacggcgcaccaagaggcaaacgcaaccgtggccgcgattcgggcagagttggaggccgcacaactgaacctgggcttcacgcgtatcacggcacctatcgatggccgcatcagccgcgccgaggtgaccgccggcaacctggtcaacgcaggaacgaccttgctgaccacactgctgggcgcacaggaactctatgcgtacttcgatatggatgaagcaacctatgtccggcaacttcgccggctgcgccatggcaagacgacagagccaccctacgtgccggttcgattggcactgagcacggatgaacgcccggaatatgaagggcgcctggatttcgtggacaaccaggtcaaccctcgcacgggaaccgtgcgtgcccgtgcggtggtcgacaacacccagtaccagctcacgcccggactctacattcgtcttcaactgccggccggggatgcctacccggccacgctggttcgggacgaggcggtcggcacgaacctgggcaaccgcttcgtgctggtgctgggggatgacgcaatggtgagctatcgcgccgtgcagctgggccccaaggtggaaggcctgcgggtcgtccgggaagggctcaaggaaggcgatcgcatcgtggtcaatggcctgcagcggacccgccctggagctaccgttgcgccggagtcggtagccatggcgggagacgaggtattggcccgccttgctctgcccaagcccgctgccaagaccgcgcctatcgccaggtcggttcaggaccacgagccggtgcgcgctgcgccgcagagttga

SEQ ID NO: 363308 - DNA, 3183 bp, Pseudomonas aeruginosa
atgaatttctcccaattcttcgttcggcggccggtcttcgccattgtgctgtcgttgctgatcctgatcgccggcgccgtctcgctgttccagttgccggtcagcgagtaccccgaggtggtgccgcctaccatcgtggtccgggcgcagtttcccggcgccagtccggatgtgctcggcaagaccgtggcctcgcctctggaacaagccatcaccggcgtggagaacatgctctacatgtcctcccagtcgaccgcggacgggtcgatgtccttgaccctgaccttcgccctgggaacggatctcaacgcggccctggtgcaagtgcagagcagggtttcccgggcaaccacgcagttgcctcccgatgtgcagaggcttggcgtgacggtcgacaagacctcgccggcactggcgcaggttgtccatctgtactcgccggacgggcagtacgacccgacctatctggccaactacatgtcgatcaatgtcatcgacgaactctacaagatcgagggggtcagcgacatccggttgctgggcatgggcaactacgccatgcgggtctggctggacccggataaagtggcatcctacgacctgacagcgacggatgtggtccgcgccatccgcgagcagaaccgggaagcggccatcggctcgctaggcatgccgccgaatgcgagcgacagctccttccagttgctgatcaacgcacgtggcaggctggtcgacgaggacgagttcgaacgtatcatcgtgaaggttggcgaacgtggcgaggtcgtccggctgcgggatgtcgcgcgtatcgaactcgggtccagccagtatgcactgcgcgctcatttggacggacgcccatcggcggcactgcagattttccagaatgccgatgccaacgctatcgacctgtccgaccgcatacgcctgcggatgggcgaactcgcgcgcgacttcccgcctgctgtcgagtattcgatcggctacgatcccacgatcttcgtgcgaagctccatcaccgcggtggtgtacacgctgctggaagccgtggcgctcgtcgtgctggtggtcatcctcttcctgcagacctggcgcgcgtcgattatcccactggccgccgtgccggtgtcgctgatcggcacgttcgcggtcatgcagttgctgggcttctccatcaacgcgctttcgctgttcggcctggtgctggcgatcggcatcgtggtcgacgacgccatcgtggtggtcgagaacgtcgaacgcaacatcggccttggcaagtcgccggtcgaggcgacgcgccaggcaatgaaggaggtgacgggaccggtcatcgccaccgccctggtgttgtgcgcggtgttcattccaacggccttcatttccgggctcacgggacagttctatcgccagttcgcgctcaccatcgcgatctccacggtgatctcggcgctcaactcgctgacgttgtcgccggcgctggcggcgttgctgctgaaggagcacggtgcgcccaaggatcgcctgtcggtgttgatcgagcggctgttcggcggctggctgttccgccccttcaaccggctgttccagaaggccagcgatggctacgtgggcttgaccaagcgcctgctgcgcgccggctccgtggttttggtgctttatagcggcctggttggcctggcttacctcgggctggagaagacgcccaccgggttcatcccgcagcaggacaagcagtacctggtggcattcgcccaactgccggagggcgcgaatcttgaccgcacggagtcggtcatcctgcggatgtccgagctagcgctgaagcaccccggcgtggccaatacggtcagcttcagcgggctgtcgatcaacggcttcgtcaacagcgccagcgcgggcctgatgttcattccactcaagtcgttcgatgaacgaaaggatgcgtcgatgtccgacgtggctatcgctcaggcgttgggtgccgagtacagccagatgaaggaagcgttcgtgatggtggtgccgccgccaccggtggaaagcctgggtacgatcggcgggttcagggtgcaggtcgaggatcgcggcagcctcggccacgaagaactgttccgacaggtgcagcgcgtggtggacaaggcgagggcactgcctgagctggacggggtgttctccggctaccaggtgaacgtgccgcagatcgatgcggagatcgaccgggacaaggcgaaggttcagggagtagcaatcgacgatctcttcgacacgctgcaggtgtacctgggttcgatgtacgccaacgatttcaaccgcttcggccggacctaccatgtgaccgttcaggccgagcaggcgtatcgcgaggggccggaacagatcggcaggttgaaggtgcgcaaccggcacggtgaactcgttcccctggcgtccttcgtgcaggtccgggcgtcatcgggccctgaccgggtgatgcactacaacggcttcctgactgccgagatcaacggcggcccggcgccgggctacagctccggccaggcccaggcggccatggaacggttgctgcaggaagagctacccaacgggctgacctatgaatggacggagctgacctaccagcagatcctcgcaggcaacacggcggtgttcgtgttccccttgtgcgtgttgttggccttcctggtgctggctgcgcagtacgagagctggagtctgccgctggcggtggtgctgatcgttcccatgacgctgctgtctgccatcggcggcgtgctgctgtccggcggggacaacaacatcttcacccagatcagcttgatcgtattggtggggctggcgtgcaagaacgccatcctgctggtcgagttcgcccgggaaaaacaggaacaaggcctgggccgcgtcagcgcggtgctcgaagcctgccgtctgcggcttcgcccgatcctgatgacctccattgccttcatcatgggcgtcgtaccgttggtgttgtcgaccggtgcaggtgccgagatgcggagagccatggggatagccgtgttttcgggcatggtcggggtcaccttcttcggcctgttgctgaccccgatcttcttcgtgtggctgcgcaaggtcgtggagcggcgcgccgtaccccgtgccagcgcgggccggatcgtagtggaggacaagcgatga

SEQ ID NO: 363309 - DNA, 1401 bp, Pseudomonas aeruginosa
atgagcgaccctgttcgcggcctgggcatggcctttgttgtgctgtcgctggccggctgtgcggtcggcccccgctacgaccagccggcgctgcccgcggtggccgtcatggcgttgccgcaggaggagcgctacgacagcgcgcgcttcgaactgctctggtggcgacaattcgaggacccggtcctggagcggctggtcgaacgttcccaggagggaaaccgtgacatcagggcggccttcgctcgatggagagtggcgcgcgcgctacgcgacgatgtcgccaatgatcgctttccaacggtcaccagccgcgccagcgcagacatcggcaaggggcagctaccgggcctgaccgagacgcggatcaaccaggagcgctatgacctgggcctggataccgcatgggaactggacctcttcgggcggattcgccatcagctggagtccagcgaggcgcgaagcgaggctgccgaagccgacgttcagcaactgcaggtgagcctgatcgccgagttggtcgatgcttacggcacgctgcgtggtgcgcaactgcgggaacgcattgcccagtccaacctcggcaatcagcgcaactcgctcgatctgacgcaacagcgccgggcgtcaggagtgggggcggaactggatgtgctgcgggcgcaagctcgtctgcaggctacgcaggcacagatcccggggtttcagtccgacgcggcccgcgcgcggcatcggatcgccgtgttgctggggatgcgtccggacgaactcagcgagaatctgtctccccaagcgttaccggcgattaccaaggcgctgccgatcggcgatccggcagacctgctgcgtcgacggcccgatatccgtgctgccgaacgccgattggcgggcagtatcgcggaggtcggcgtcgcgacggcggacctgtttccgcgcgtcagcctgagcggctttttcggcttcacggcgggacgtggctcgcagctcgcctcgtcggcgtcgaaggcatggagtgtggcgccagtcctgacctggagcgccttcgacctgggcagcgtgcgggcccgcctgcgcgccgcggaagccggttcggaggtggccctggcgcaatacgagcagcaggtgttgctggccctggaggaagcggccaatgcgttcagcgactatggcaagcgacaggaacgcctggcagccctgatgagccgcagcgatgccagccgcggtgcggtgcagttggcatcgatccagtaccaggagggtgtcgtggatttcctcgtgctcctggatgccgagcgcgagcagttagccgccgaggatgcccaggctgaagcggaggtggagttgtaccgcggcatcgtcgctatctatcgagccctcggtggaggctggcaagccacctga

SEQ ID NO: 363310 - DNA, 378 bp, Pseudomonas aeruginosa
atggtcagcagaatgaactatccgaccctgcctgagccggcaggtccttactcggtttcggtccggcacaacggcaccttgtatctatccggcatgaccgccttcggtacgccggcccaaggcaagaatatcgcggcgcaggcagaggcgatcttcgaccagttgcaacgagtcgcacaggcggagggcatcggcatgcgcgacctcatcaaggtgacggttttcgtgacctctatggacgatatcggctcgctgcgcagtgttctctcgaagcactatgatggtgcgtacccggcgagttcactggtcaaggtggcgggcttgttctcgccggatgtcgacatcgagatcgaggccatgttcgcagtgcctctttga

SEQ ID NO: 363311 - DNA, 945 bp, Pseudomonas aeruginosa
atgataagaaaaaagatattgatcgatggatatcgctacgaagtgtggggcgatacggactaccttggactcatgggggatgctttcgagccagatactgtcgatatcctgcaggctttctgtgcttccggcagtactgtgatcgacataggtgccaatatcgggcttacatcccttgccctctccggcttgtgcgaggaaggccaggttgtcgccatagagcccgtccccgttacatttcgcttgctcgagaagaatctgtccctccttccacggagcaatgtcctggcgataaacaaggccctgggcgacaaggacggctcggttgccatgtatgtcaacgaaagcaacctcgcaaccgccttcgtggtcagcgaggaaggttgcggggatctggaaattcccctgaccaccctggattccctggtggccgattgcagcttggcgtcggtggatttcatcaagatcgatgtcgaaggccatgagctggatgtactgcggggggcgaggaagacgctggggaagttccggccgaatgtattgctggaaatgaaccactggtgcctgaacgtattccgacgtacttcgttgcctgagttccacgagacattgctcgaagtctttccttttgtctttgcggtggaaaaggggaggtatctcgatttcaccgaacgagacaatgtcggcgacatttttcagcaacatgtctttgcgaacgagtacatgcatatcgtcgccggattcgatagggctgatctgctacgccggctggagtcgctggagcgcacgccgcttgccgagcaagccttgccagcgtcagcgacgccctcctccgagatcgactatcgcttgcagcttgaggcggtgcttaactccaccagttggaagatcaccgcgccgttgcgcaagctggccagcctggttggctggaagagagccgattga

SEQ ID NO: 363312 - DNA, 1449 bp, Pseudomonas aeruginosa
atgaccgaagtagaagccaagaagccgcaggaaagcctgcaggaccgcctagcgcaggtggtcgagctgctgcatcgccacaaggtggtggaagacctgacccatcgtcaggaaggccagcaccatgaccgggtggaaaacctcgtccaccggcagaatctcgtagagctccagcgcaagctggaggaactgcaccccgccgatatcgcccacatcctcgaatcgctgccgttggacgaccgcctgacggtctggcagctggtcaagtccgaggacgacggcgacatcctcctcgaagtctccgacgcggtccgggaaaccctgatcgcggacatggatgaccacgagatcatcgccgcgaccaaggacctggacgccgacgaactcgccgacctggcgccggaactgccgcgcgacgtggtccatgaactgatggaaagcctcgacgcgcagcagcgcgagcgagtgcgttcggcgctgtcctacgaggaggaccaggtcggcgcgctgatggacttcgagatggtcaccatccgcgaggacgtcagcctggaagtggtgctgcgctacctgcgccgcctgaaggaattgcccgggcataccgacaaactgttcgtggtcgactacgacggcgtgctcaagggcgtgctgccgatcaagcgcctgctggtcaacgatccggacaagcaagtgctggaagtcatggccaccgacccggtgaccttccacccggacgaggacggctacgacgccgcccaggcattcgagcgttacgacctgatttccgcgccggtggtggacaagggcggcaagctgatcggtcgtctgaccatcgacgagatggtcgacctgatccgtgaggagagcgaaagcgaagtcctcaacatggctggtctgcgtgaagaagaagacatcttcgcctcggtctggaagtcggtgcgcaaccgctgggcctggctggccaccaacctgatcaccgccttcgtcgcctcgcgggtgatcggcctgttcgaaggctccatcgagaaactggtggcgctggccgcgctgatgccgatcgttgccggcatcggtggcaattccggcaaccagaccatcaccatgatcgtccgcgccatcgctctcgaccaggtgcagccgaccagcaacagtcgcaaccgcctgctgcgcaaggagcttggcgtcgcgctggtcaacggcctggcgtggggcggagtgatcggcgtggtggccttctatctctacggcaactgggaactgggcgtggtgatgaccgccgcgatgaccctgaacctgctgctggcggcgatgatgggagtgctgatcccgatgaccctgcatcgtttcggacgcgatccggcgatgggctccagcgtgatgatcactgcgatgaccgacagcggcggtttcttcatcttcctcggcctggcgacgatcttcctgatgtag

SEQ ID NO: 363313 - DNA, 261 bp, Pseudomonas aeruginosa
atgcttgtcaaactccccgatgaatcccccgacttcgtagagaaactcaaggaacagaccggtgcgaccacggctgccggtgcctatcggttcgccgctgagcggtacgggtcgctgacctatcagctcaagcaagccatggacgaactggcgaggttgcagactcggtgcaacgtccagcagcagatcatcgacaacgcccgcgcttctgcctcttcgttgcttgaccacgtcgcccagggcgatcttctgcaaagctga

SEQ ID NO: 363314 - DNA, 327 bp, Pseudomonas aeruginosa
atgcaatatctatatgctgcacagttgatcctgatgattgttatgccactggtgcgcatggtgctgcgcttcctgggcgtgggctttgttacttacatgggcgttaatctacttgtggacactgcgaaagatttcattacgtccaagattagcgcgtcctctgtagagatacagatgattcttgggctgggcaatgttgatatagcgatcaatatttgcatggcggctgttgtgactcgcgcgattctttccggctgggacaagcgaactgatcgcaagcgcaaacaagtctggaacaagccgggtggaacttcgattgaggcttaa

SEQ ID NO: 363315 - DNA, 1320 bp, Pseudomonas aeruginosa
atgaataggttgcttctagttttattggtcgccttctccgcgaatgcctctgccgattattattactggtacatgggttattttaataagaaagttccatcccctgcggctggttgtgatctttatttcagtagtattactgataagtctggcctgacttttgttgttgagccttctccaaatgaccccggcaaaactttttattgcgttgcgagggctacatctactggtcgagcaatatggactactgatgtttatttaaaaggcgatagatgccctgaaggcagcaatcttgatctgtctaccggtgttgccatgtgcaagcctgacaatcaatgccgggataaggccggacaaactacgtcctggtcattgattcgcccggacttgaatggtctcggctcgattgaaaacgtctgcaaacagggctgccgggtcgccctgggcgcttcgacgtgcggcccgatgaataccgacccgacgaagggattttgttctggcacgggcacattcaccggcgatgaatgttcacccacggatgagagttcgggtggcaacaatccggaccccacagacccgactgaccccaccgatcctacggacccgactgaccctaacaagcccgacgagcacggttgtatcccgcctgcgaagtggtccggcacgacgtgcgtgatgcctgatccgggcaacggtggagacggtggggatggtgatggcggcgacggtggcggcgatggcaacggtaatggaggaggggacggcaatggagatggcggtggtgatggagacggcaacggcaacggtgatggggacggtaatggcgatggagacggcaacgggaacgggaacggcaatggcgacggggacgaagatggcaagtgtgacccggccaaggaccccagttgcaagccgtcttcggtctctggtgaggcgtgcgaaaccccgttgcagtgcgaaggcgacgccattcagtgcgccatcttgcggcagcagaaacaggcgcgttgtgacgctcaggaaatgaatgatttcgagaagaacaaagagaagatttcgaagttgttccagggtgaagagttcaaagaacagcctgaccaggaagtggaaatcccctcgttcatttcgcagtctggtcggtttctaccgtcgggttgtccgcctgataaacagttcagtctatctactggtggcggtcactccttcacgttctcttataagccgttgtgtgcgtttgcttctgacctgggcgtgctgattgttgtggcggcaagtatttttgcgacgctctatgtcggtcgcggttttggaggtgagtga

SEQ ID NO: 363316 - DNA, 363 bp, Pseudomonas aeruginosa
atgctcgctctcatcggcctgtgccagggctattactgcgaaacccgcaccgtcaacggccagaacggccagcagcaaatcaccgagcactcagtgcttgtccaggtcgagcagccgaacaagttcggtctgatcgaacagaaaattatcgccgtgcggatctccaagcggcacatggatggcggcttgaacaacgcctggaatcagcagaagggcaagacggtttccgtgccggtgttcgtccaggcctgggcgagcagggcgggtaacgccggcttcgacttctggttgtcgggtgatggcttgccgctccagctccaggccgtccagccggccgcgccgaaggcagcagcttcggcatga

SEQ ID NO: 363317 - DNA, 255 bp, Pseudomonas aeruginosa
atggataaggcgacccaccagcaccttcgtttcgacctggagcaggacatttcccgcgtgctcgatgatgagcacctggtgcgccaggtcctggacctggtcatgcgcagagtcgtccaggaacaggcggccgaggccgttcgccggcagcgcatcaaccgagacttcaagacgttccggcgccggagcgtgacgccgcccgcctgggcatttcgtgaaccgggcacaagcccacaagttgaacccctgaggtaa

SEQ ID NO: 363318 - DNA, 228 bp, Pseudomonas aeruginosa
atgaaagcgcctctgcggtttctgctgggctgggttgtcttcatcgccctgttcgcgatgttgacgcccattgtcgccgcgattttcgagttctgcgcggcgttccctgtgctggccatggtggttgccgtctgcgccctggtggcgttcctggcgttgttcttcgcgttcttccggcgcttcgtgcgctggctcgacgagccgaggagggcgcgcagcgatggataa

SEQ ID NO: 363319 - DNA, 1233 bp, Pseudomonas aeruginosa
ttgctcgacaaactgcacctgttcgtcccgttccgccttgagcacatcgaactgctcggggtggaagggcgtgcggacccggtgcatgtcgtagacctggagagcctgggcgtaccactccaggggcagatcagcagaggggagtgcggagagctacaggctgactacctgcggcacgcctgggagtcactgagtacgggcttcacgcctttggcgttcaaggtgtttcaccagtccctgggcaagcgcctgatgcccggcgtagagctgaaggccagcccggcgaagttgctccagggacacaacgtgttcggcccaacatgcatcgagaagggggccgaggtgatgttcaagtggctagccggaagctacccggacctcttcgcgaagctcgatgtgtcagcgacgcaggtctacgccctggactgcacgtactccagcaggctgcctgacgagcgcacggcgctccaggtcatccaggcgctgaccaacgtcagcaacggccacacaaagagtcgcggcgacaactaccagacgtccgcgtactggggcgcgaaagaatcccgcctgaagcgtctgaaggcgtatctcaagcacaccgagtatcaggcccaactggacgaattgaagcgggcggggcgggctgatctctcggctgctcggtctgctcgggtcatgtctgacccacgtttgcaggagtgggtgcgctacctgctccgcatggaagccacggtgatgcaccggtggctggaacgccggggcattccgtctcggcttgttgatctgatcgcctaccagcagcggctccaggaagaggggcgctgcctgattcaggagtgctggcaagcggttacagcggatcttttcgcggcctttgagggtatccagatgcgtgtgattgatgatgaaaaagtgctggccgcactgactaagcgacacctgaagtacgaccggaagggcaagcccaacgatagccacgctcggaacctgtttcggacgtaccgcagcctcaaggactacgggtggcaggaaacgatggagtcaatggcgcgccggactttctacaagcatgtgaacgatatctgcgaggccggcttgtcgaaagccgccctgcagaagctccacgaagccgaccgggcgaacaacgtcgtaccgctgctgcggttcgtccaggtcgatttcagcgcccagcgccccgactggtacgtcgagccgacagtggaggccgcgtga

SEQ ID NO: 363320 - DNA, 192 bp, Pseudomonas aeruginosa; identical to SEQ ID NO: 341781

SEQ ID NO: 363321 - DNA, 261 bp, Pseudomonas aeruginosa
atgcttgtcaaactccccgatgaatcccccgacttcgtagagaaactcaaggaacagaccggtgcgaccacggctgccggtgcctatcggttcgccgctgagcggtacgggtcgctgacctatcagctcaagcaagccatggacgaactggcgaggttgcagactcggtgcaacgtccagcagcagatcatcgacaacgcccgcgcttctgcctcttcgttgcttgaccacgtcgcccagggcgatcgtctgcaaagctga

SEQ ID NO: 363322 - DNA, 1299 bp, Pseudomonas aeruginosa
ttgcgtcccggccagccgcgctggctggagaactatcgcttcctggatgatccggtgaagcgcacagaccccttcgacagtcttcgcttccagcgcctgacggagtcgtcctggctgcaactggggggagaggtgcggtatcgggtggacagcatcgataaaccggttttcggcctgcgtggcgtgaatgatgacagcgcctggatgcagcgcttgcaggcgcatgccgacctccatttgttcgacgatgccgtgcgtgcgttcgtccaggtcgagaacagccgcgcctgggacaaggacctgctcacgcctaatgacgaaagcaagagcgatgtccaccaggccttcctggacttcaatcgcgatgtcgatagcgcgcgcttcacggcgcgaataggccgacaggagatgggctatggcgcactggcgttcgtcacctaccgcgatacaccgaacattcgcctggccttcgatggcgcgcgcctgacctatgccggcggcaacggctaccgcgtcgatgcgttcgccgtgcgtccggtcagcccaagtcgggattcgttcgacgatggttcgaacaacaatgtcaagttctacggcctgtatgcgacagtccctctcggcaacctcggcagtgccgacctctatgggttcgggttggagatcaaggagcgtgccctcgcgggagtgaacggcgcggagaaacgctacaccgcaggtacccgactgttcggtaaaaacgggcgctacgactggagttgggacctggctggacagttcggccacctggccggcgcgcagattcgcgcctgggccttcgtcaccgatacaggctatagcttcgatggttcctggcgccctcgtgtaggttttcgtgccgatggtgccagcggagacaggcgtcgaggcgatgctcgaatcggcacgttcgatccgctgttcccccgcaatggagtgtatggggaggccggcctggtaacgctgtcgaacgcattgattgccggaccaaccgttgccttctggcccttcagccgagttcgcctggagcccggtgttttccagatttggcgccagaccaccgatgacgttgtctacctgccgggcctgaagtcggtgcccggtactgccagcagctcaggacgacatgtcggcactgtctaccgcgctaacgccaggtggctggccaacagtaacctcaccgtggacgtcgattacagttactacgatgtcgggcgcgcgatctccgaagcgggtggggtcgacagtagtttcttgatgacaagagcgacattccgcttctga

SEQ ID NO: 363323 - DNA, 426 bp, Pseudomonas aeruginosa
atgcccgaagacacagtgatgcgcctgaccctggtcgccacaccgcaggacgtgctcgaggcccacttcaacaacctgagcaagaaagccgtcggtgagacgctggcatccgagcagacccggcaggacgttcacgaagcgcgcagcatcataggccgctcgcacaagctctaccgtggcgcgctggccttctacttgcgcggaaaagacttggacgaactcgacgcacgcggcctgcagctggcgaacgtgatgctcgacgccggtctgcaaccggtgcgcgaagaagacgaagtagctccgctgaacacctacctgcgctggctaccctgcgtgttcgatccggccgaggataaacgccagtggtacacccactcacgacggaactggagctgcgccgccccctggcagcgaactcgccgatga

SEQ ID NO: 363324 - DNA, 318 bp, Pseudomonas aeruginosa
atgttggatttaagctttagcaaacccagtgaaatcgtcaaactgctgtgcgagcgtcttcgcacggagcgactggcgttgcagatgactcaaaccgatgtggccgcgcgcgccggcgtcggcgccaataccgtgtccaacctggaggccgggcgtaatgtgagcctggagagcgtggttcgcgtggccatggttcttggtcgaagcaaggagcttgagggattgttcctgccgaaattggacagcctggaggacatcattcgctacgagaacagtgctaaacgtcagcgctccaagaggagatcgaaaaatgattga

SEQ ID NO: 363325 - DNA, 1260 bp, Pseudomonas aeruginosa
atgattgaacgagtagacgtctactacgatggctggggggagcactggctgtggggttcaatggtttctacaacggccatcacgggacgcccgttggttgtctttgagtacagcgatgaagcgaagaatagagggttggagctgtcgtcgtacgccctccctttggatgggccaaagttgcgcagagactttccgctccatcagttgggactgccgggacccatctatgactcgttgcctgatggttggggtatgttgctgatggatcgtttgttcaaacgccgcggtctcaatgcagcgcgaatcgggcctctggaacgtcttgcttacattgggggcaacgcgatgggagcaatgtcgtttgaacccgtggcgcctgagctccaggagcaacaggagcatatctctctcggtctgctcgcagccgaagtgcaggatgtcctcaatggtgaggggggagcattcctagaacaactgttgcaggtgggaggttccccgcagggggccagacctaaagccttggtctatcgtgatcgcaatacgggcggtttttctacagttgccatgcctggctcggaagcttggctgatcaagtttcccgccaaggaagaacaccctgaggtgtgtgctgttgagatggtctatgccgagtgtttgcgtcagtgtggcattcagacaccagacacgttgtattttgatttacccaatggaatggcggcattctcctccagacggtttgaccgacagggcgaactgcgcgttcccatgcaaagcctcgccgcgtttaccggcgccgactacagaagtccgggggttttggattatgtgaatttcttacgcgccactcgcatgtgcaccaacgatgtgcgggaaatgggacgggcattcgaacgggccgtcttcaatgtcgtgttcaataatcgagatgatcatcccaagaactttgcctacgtcatgctgccgtccggcgaatggaagttggcgcccgcctacgacgtgactttctgcgaaggacccggtggttaccaccaaatggatgtgatgggcgaagcgctggaaatagaccgggcagcattgcttgacctggcaggggaagcggaagttcccgcgcacgctgcggacgacttgatcgacagaatgtgtggtgtggccagccagtttgcgagcatcgccagaaacggctatgagggcgtcatcaccgaagacaccctaaggtacatccagcgtcgaattgacgagaatgtcgccctgctacgctag

SEQ ID NO: 363326 - DNA, 666 bp, Pseudomonas aeruginosa
ttgagcgccgcctacgtcgaaaacacatcgctggtcagcgagcgcgacgcgctggacaaagaaacgcggcgcgcctggatcgccttgcgcaccgtgcttcaccactatgctgccgtctgcacgggtggccatcgatatcgcggcgcgctcgtcaaaggaggaaagtcgctgcagatcctgcttggccaatcgacaaatgccgaggcgtggaccgatggcagcagttacatcgcgatcaacaccagcgtggtgcaccgcctcaaatcgcgcccgctcaagaccgtcatgcacattttctctctcgtcgaacacgagatcgctcatgagggcgacagtctcgaatgcggtcacgacgaagccttttatcaacgcttccacgacatctcgctcaaatacgccgaagagcgtcagtggtacatgcacctttggctgatgcggtacaccacaagcctggagaacgagggaaagcgtgcccgcggtgaagcatggcgtgagcgcttcctggtcgaccgcgccagcattgcccgtggcgaacgggaattggagcttgcgctcgagaatgccaaagcgcattccgtcgttgtagcgcccgatgtcgcagaggacatgcccttcatagataagcagaatgcgcgtctgggccctgatgacctcctgcctgagtaa

SEQ ID NO: 363327 - DNA, 1182 bp, Pseudomonas aeruginosa
atgagcgcaccgctcaccctgcgcgtactcggtacctcggtcaccctgctggaacccattcgcctgcgcgccgagcaggacctgggcatccgcctggagtaccggatccacgacacgcagaccgcgcagcgcatcgccgtgatgcggccggatagctacgacctctacgaccaatggttccataatgtcgacttcgtctggccggcgcgggccatccagcccatcgatacccgacgggtcgcgctgtgggacgagatcaacgacctgcccaagcgcggccgcctgcatcccggcgatcgcctcgccggcggtagcctgccctgcgatcggctgttcgtgcaacacgacggcagcctcggcagccagccgagcgaacggatcagcatgctgccgctgacgcacaacgccgacagcttcgcctaccgccccgagcgcctgccggcgaagctctccgggcgggaagaaagctgggcctggctgctcgacgaaggctggtgcgggcacatcgccctgcagagcgatgccgccatcggcgcgctggatgcggcgatggcgttgcaggccaggggcctggcgcatttcgacaatatcggcaacctgcgcctggacgagatcgaccggttggcggccgcgctgatcaagctccgacgtcacggccacttcgccgccttctggtcggacgaccgcgacgccagcgaactcatgctcggaccgaacgtgcacatccagagcctctggtcgcccaccctgatgcaactgcaccgggccggtgtgcgctaccgcctggcggtaccgcgggaaggctaccgtgcctggttcggcggcctgtccctgtcgcgctgcgtcgagggccgaaccagggatgccgcctacgcctacctcaactggtggctggccggctggcccggcgcgctgatggcgcgccagggcttctacatctccaatcccccccgcgcccgcgaccatctgagcgccgcggagtgggactactggtacgccgggaaagcggccagcgaatcactgccgggcagcgacggacaaccgctgatcgaaccgggcgaggtccgcgaaggcggctcctacgcccagcgcatggggcatatcggcgtgtggaactcggtgatggacgagcacaactacctggtgcgcaagtggagcgacttcctgagggcgggccgctga

SEQ ID NO: 363328 - DNA, 990 bp, Pseudomonas aeruginosa
atgagtctgccgctgaacgtcatcaccggctttctcggcagcggcaagaccaccctgctgaaacgcctgctggccgaccagacgctgggcgacaccgccctactgatcaacgaattcggcgaagtgggcatcgaccacctgctggtggaggaaatcgccccggacaccctgctcctgcccagcggttgcgtgtgctgctcggtacgcggagacctgaaacaggcgctgctcgacctgcatggcaggcgcgaacggggtgagatccccgccttccgccgggtgctgctggaaaccaccggcctggccgatccggcgccgatcctcgccaccctgcagcgcgatgcgcagctacgcgggcgcttccacctcggactgctggccaccgtcgtcgacgccctgcacgccgaactgcaggaacgcctgcacccggaatggctcgcccaggtcacggcagccgatcgcctgttgctgagcaaggccgacctggcgggcgccgagcgactcgccgcgctgcgcacgcgcctggaatcgctcaatccgtccgccaccttgggcctgtccgacgacatcgccagcggcgaccacctgctgctcggcgaaggactcggcggcgccgacgcggatgccgaggtcgccggctggcgcctgttcgcgccgctacgccaggctcggcacggcgccgtggaagtctgctgcctggaatccgaacggcctctggactggatcgccttcggcgtctggctatcgttgctgctaagatgccacggcgagcgcattttccgagtcaaaggcatcctcgacgtgatcgattccccccagcccgtcgtcatccatggggtgcagcactgcctgcacgcgcccgtccacctgagcgcctggcccggcggcgagcgacgctcgcgcctggtgctcatcgtccgcggactggatagcagcctcttgcgccgctcgttcgacgcttttctcggccgcctcgggcgcacggcatga

SEQ ID NO: 363329 - DNA, 303 bp, Pseudomonas aeruginosa
atgtgtggactctgtggcctgctcggcgaagacgcgcactggagcgatccgcttggcggcgacggcctgccgcggcggcgcgaacgcctgcgccggatcgccacgatcaaccgggtgctggtgccatttcgcctgagcgtcagcgatgtgcacggcagcgcctacctggtccagggcgcgaccggcaagcaggccgtcgccacgggactggagcagctctggcaggcggccgagagcatcctcgggcgctcgcccgatcccctcgacccacgcttgctcgagcacctggagggctccccatga

SEQ ID NO: 363330 - DNA, 750 bp, Pseudomonas aeruginosa
atgaagtgtttgcaggaccgtcgcgccgtggtgaccggcgcagccagcggcattggcgccgccatcgcccgggcctatgccggggccggcgcccgcctggtgctatgcgaccgcgacgccgtgcgcctggcgcacgtcgccgcggcatgccgcgccgagggtgtggaggtacaggaatgcgtggccgacgtcggtacccgcgaaggcgcccgggccggcgtcgaccgctgcgtggaggccttcggcggcatcgacatcctggtcaacaacgccggcatgctcacccaggcgccttgcgtcgaactgagcgctgacatgtgggaggacctgctgcgggtcgacctgaccagtgtgtttctcgccagccagcgcgccttgccgcacatgctcggccagcgctgggggcggatcatcaacatcgcctcgcaactgggcatcaagggtggcgccgaactcagtcactacgcagcggccaaggctggcgtgatcggcttcagcaagtcgctggcgctggaggtcggcaaggacaacgtactggtcaacgcgatcgccccgggccccatcgagacgccgctggtggacggcatcagcgcgcagtggaaggtcgccaaggccagggagttgccgctgggacgcttcggcaaggccgaggaagtcgctcccgtcgccgtgctgctggcctcggaaccgggcggcaacctgttcgtcggccagacgctggggccgaatgccggcgacgtgatgccgtga

SEQ ID NO: 363331 - DNA, 762 bp, Pseudomonas aeruginosa
atgactcatcgcgtcgccttgatcaccggagccgccagcggcatcggccaggccctggcactggcctacgcccgccagggcgtgaaggtcgccggcggttacttcgccggcgaccttcacgaccacaccgagaccctccgcctggtggaggaagccggcggcgaatgcctgatgctgccggcggacgttaccgacgctgcgtcgctcgacgcgctggccgctgctgcgctggagcggttcggccgcctcgaccatgcggtggccaatgccggcctgctgcgccgcgcggccctgctggagatgaccgacgagcgctggaccgagatgctcgacgtcgacctgaccggcgtcatgcgcaccttccgcagtgccgtgcgacacatgggcgacggcggctcgctggtggcgatctcctccatcgccggcgcgatctacggctggcaggagcatgcccactacgccgcagccaagtccggcgtacccggcctgtgccgctcgctcgcggtcgaactggcaccccgggggatccgctgcaacgcggtgattccgggcctgatcgaaacgccgcagtccctcgatccacggaactccctcggcgccgacggcctggcccgggcggcccggacgattccactagggcgggtcggccgagccagcgaagtggccgacctggtgcgctacctgaccagcgaccaggccagctacatcaccgggcagagcatcgtcgtcgacggcggcctgagcgtacgctggccggactga

SEQ ID NO: 363332 - DNA, 1359 bp, Pseudomonas aeruginosa
atgaccactacgcatgccgcaacaccggcgcacgccgtcgagcccgacacctgggcgcccgtccgcctgacctcggcggacgtcacctacgccacctggatcgccttcttcgcctgggtcttcgccgtctatgacttcatcctgttcggcaccctgctgccggtgatgggcgggcacttcgcctggggcgaggccgagcaggccgaaatcgccacctgggtggcggtcggcggcgccatcgtcgccttcgccatcggcccgatcgtcgaccgtatcggccggcgcggcgggatcatgttcaccatcggcggcaccgcggtctgctcggcgctaaccgcagtatgcgccgggatgggcaaggcaccgctgatcctggtgcgctccgtcgccggcctcggttacgccgaggaaggcgtcaacgccacctacctgaccgaagtctacgccgcctccgacgaccccaggctggtcaagcgccgcggcttcgtctacagcctggtgcagagcggctggccggtcggcgcgctgatcgccgccggcctcaccgccctgctgctgccccatatcggttggcagggctgcttcgtgttcgccgcaatccccgccctggtgatcgccatactcgcccaccgcctcaaggaaagcccgcagttccaggtgcaccggcgtatcctccggctatgcaaggccggtcgggacaccgaggcccgtgcgctggctcgcgagtaccaggtcgactacgacgagcatgccaaggccggcgttgccgccgccttccacggcagcgcgctgcgcccgactctggtgctgagcctggcgattctcctcaactggtcggcgatccaggtgttcagcgtgctcggcacctcggtgatcgtcagcgtacacaagctgtcgttccagaactcgctgtggattctggtgctgtccaacctggtcggtttcatcggctacctgttccatggctggctgggcgatcgcatcggccggcgcaacaccgtcgccatcggctggatgtgtggcggcctggcgttcttcgcgatgctccaggcaccgagcgaactggcgctggtgatcgccctgtacagcctcggcctgttcttcctcaccggcccctactcggcaatgctgttcttcatgggcgaaagcttccccaccagcatccgcgccaccggcggcgccatcgtccacgccatgggcccgatcggcgccatcctcgccggcctcggcattaccggcgtgctcagcggcggcggcgagtggcacaccgcggcgctgtggttcggcgcgctgccctgcttcctctccgggctggtgatgtgggcggcccggcacgtcgaaccttccagcgtcaaatga

SEQ ID NO: 363333 - DNA, 882 bp, Pseudomonas aeruginosa
atggcaaaagaaatattcgtctccatcggcgtggacgtggacgccgtggccggctggctgggttcctatggcggcgaggattccccggacgacatctcccgcggcctgttcgccggcgaggtcggctccctgcgcctcctgaacctgttcaggaagtatgacctgcgcaccacctggttcatccccgggcattcggtggagacctttcccgagcagatgagggcggtggtcgaggccggccacgagatcggcatccacggctacagccacgaaaaccccatcgccatgaccgcggaacaggaggagatcgtgctcgacaagtccatcgagctgatcaccgccctctccggcaggcggccgaccggctatgtcgcgccctggtgggagttcagcaacgtgaccaacgaattgctgctgaagaaaggcatcaagtacgaccacagcctgatgcacaatgatttccacccctactacgtgcgggtcggcgacagctggaccaggatcgactacagcgcccatccggacacctggatgaaaccgctggtgcgcggcgaggaaaccgacctggtggagatcccggccaactggtacctcgacgacctgccgccgatgatgttcatcaagaagtcgccgaacagccacggcttcgtcaatccgcggcatctggaagagatgtggcgcgaccagttcgactgggtgtaccgcgagctcgactacgcggtgttcccgatcaccatccaccccgacgtttccggccggccgcaggtgctgctcatgctcgagcggctgatcgagcacatgcgtggccacaccggcgtgcggttcgcgacgatggacgagatcgccgacgacttcctgcggcgccagccgcgcaagcgctga

SEQ ID NO: 363334 - DNA, 1353 bp, Pseudomonas aeruginosa
gtgtttaccgatgctctctccctggcgcaagccttctcgaccggcgactccgacccactgagcgcgcttgaaacggccctggccggagcggcgcgcctgcccgcggccttcatctcgctgagcgaggatcgggcatatcgggaagcccgggcggcacaggcccgctgggcggccggccaaccattgtcgccgctggatggtgtaccgctcgcctggaaggacctcttcgacatggccggcagcgtgaccaccgccggtgcccgagttcgcctgcgctgcccggtggcgtcgagggatgcctccctggtggcggccctgagccgcgccgggatggtcaacatcggcaagaccaatctcagcgaactggcctattccggcctcggcctgaatccgcacttcggtactccggtcaaccctcgcttcgagggagcgccgcgggtaccgggggggtcgtcctccggttcggcgatcgccgtcgccgccggcgtggtaccgctggcgatggcgaccgacaccgcgggctcgatccgcatcccggccgcgttcaacggcctggtgggtttccgcagcagtcgcaaacgctacgccttcgacggcgtcttctccttggcgcattcgctggacgccctcggcccgatagcccacagcgtccgcgacgtggtcgttctcgaccgcctgttgcgcgctgacttccgcgtcgaacgactgcccgccggcctgccattgcacggcctgcgcctctgcctggatcccgcgctgctgagcgatgaacgactacagccggcagtacgcgacaacctctacaccgccctgcagcggctcgccgatggcggagtcaccgtggaagagcggacgctcccggccctgagagcaaccctggagttgatcgagcgcgacggctggctgggcagcgcggaggctttcgcattgcatgaaaccctgctcgacagcgccgatgccgaacagctcgacccgcgcgtacgccagcgcctggaaagtgcccggggcttcccggccagccggcagatccttctgtaccaggcggcggagcggttgaaacggcaattgccggacgaactcgacggcgccctgctggtgacgcccaccgtcgctcatgtggctccgccgctggcgcccctggccgccgacgacgcgctgttcgcgcgaaccaacctggccaccctgcgcctgaccatgcccggcagcctcctcgacttgccgggcgtggccctgcccagcggcgtggacgcccagggcctgcccaccagcctgctgctctccgcccccagcggcgccgacgcccgcctgttgcgcgcagccctgtcgctcgagccgctggtgcgcggcgcctga

SEQ ID NO: 363335 - DNA, 1005 bp, Pseudomonas aeruginosa
atgcccgctgcaacccctcaggaagagcgtttggcttcacgctacgaaatgatccgcaacacgctgcgcgaggcgatcctcgctggccaggcggtaccgggactggtcctggtggaaggcccgctggcgcagttgttcggcaccagccgggtgccggtgcgccaggcgctgaacctgctgcacgaagaggggttgatccgccggttcgaagggcgtggctatctcatcgatccgcaaggcagcggcgagctaccgcagcgcctgccgctgacccgccaactgctggggctggagccgcgcgaggaactgatcgacaaccgctcgttgggcgagcgcatccatgacgagctggccggctgcgtcacccgcttcatggtgttcggtcattaccgcctcgacgagcggactgccgccgaaacactgagcgtcagccgcagcgtagttcgtgaagccctgatgcgcctgcgcgacagagggctggtggagaaggaaccgtatggccaatggctggccggcccgctgaccgcccaggccgttacccaggactacgaattgcgcgccttgctggaacccgacgcgttacgccagggcgcggagggtatatcgcgcgacgcgctcgaggcgatgctggagcgtatcgccagggcccaggcggcaggggcaggcgtgacccgcggcgacatcgaaagaatcgagcaggacttgcatgtcacctgtctggcgggcctgcgtaacgcgcgcatggcggcgatcatccgccagtgccagattccgatgaacgtcggccgcgtgctgcacgaggcgctcggcaccagcaccgacgaggcgatgttggtggagcacaggctggtcttcgagtcgttgctctacggcaccgtcgaatccgccgcttcctgcttgcgtgatcacctgctgcgtgcgcgggacaggaccctgcagcggctcaaggtgctctcggtcctgcccgagccggaactgcccgcctacctggaacggctggcgtaa

SEQ ID NO: 363336 - DNA, 1311 bp, Pseudomonas aeruginosa
atggcgctattgcgctcggaactgatgcgctcgaagttcacccgggacctggggcgcctgaacgacaagaacctcacctgcacgacgatgctgggagtgttgccaacccctctcgcccccaggcggccaggcactcctctggacggcggcctgctgctctactgggccgagccgctgctgctggatccgatgtcgcgcggtatgatgatccggacgaaaagatccagcctgctggtagacctcgacgacctcggtgggccggcacctcccggcctgggtgctgtcatctcgctccgcgacagcccgacgacctgggtagtaggcctgaacaagcgtggcttgcacgattatgtcgaggccatggaggagcaggctggcgaaaaagaaggagagaggttctgctccgagcgctttccgctatgcgccacggtcgtgtcggcgcggaccgcacaggtacgtgccatgcgtaacgcgacctggctgctggccgcggccggtgtgctgctgggtagcggcctgggagccttggccctggccacgcatcgtcgttggagcgccctggcatcgaggattcggcgagccctggccgatgggaggttcacgctgaattaccagccgatcctgtgcctgggcgaagccccgcagatcgtttccgccgaagcgctgatccgctgggccgacggaccggtgtcgccggaagtgttcattgccgaagcggagcgttcgggcatgatcgccgagatcaccgccttcgtgctcgacaccgtgctgaaggagatgcgcagcctgttcgacacgttgccggactttcgggtggccatcaatgtcagctcgccggagctggtggacggcagcctgatggcgacccttcatcgactctggcccgcgggcctggctcgccaccacgtcggcttcgaactgaccgagcgctcgaccgccgagttgcaggatatcttcccggaactcgaacgcctgcgcgaactgggccatccgatctacatcgacgacttcggcaccggctattccagcctggcgcagttgcagcacctgccggtggactacatcaaggtcgaccgttccctgctcccacgctcggcccggcaacgcaactcgatcattccggaaatcctcgccatcgcccgcagactcgaagtcggcctggttttcgaaggactcgaaaccagggagcaggtgcaattgctcgaatgtaccgaacaagaggtcttcgcccagggctggtatttcggccgaccggaaacggccgataagctgaaggaacacttggaccgcggcatagccgaaccggaatga

SEQ ID NO: 363337 - DNA, 576 bp, Pseudomonas aeruginosa
atgcgagtcgcgacgctcctttgcgggagcctgctccttcactccagcgcgatggcatgggccggcgatttcatcggggatggcacggccacgctgaagtacagccagtactactggagagagaacgatggcggcggctacgggcccaaccgcgacgagtgggtccaggcgttccaactggggtttgcctcgggctggtggcaggacctgctgggcctcgactatcgccacgcggtggcgaagggactgaatgtcggcagcgacgcgaccagcgttaccaatctccggagcgggcgtactgtgcaatcgccccgcagtatcgacaagccgctggaggcctacctgcgtgcccgctgggtgcgcgaggagggcatcctgtcggccggctacggcaagaagtcgcggcgctacgcgatctacaccgacgataccagtcgcatccttccggctgccagcatcggcctggatctcggttatcagagcgattccctgaccttggctcacagccgcatccaggggttcagcccgcgcaacgagagcggctggagcgagcgcctggagagcttcggggggtag

SEQ ID NO: 363338 - DNA, 687 bp, Pseudomonas aeruginosa
atgccctccgacacgcgcctgtcgttcgaatatgccgagtcgcgggattacctgcgcagcgcattcgtggcgctggagcagagcatcgagttggcgtcgcgccaggctgtcgatttcagcctcgcgcacggccgccagcaggatgccggtgcgcgcttcgaatacgccggggtgcgtcggctgtacgaggcggaggcgcgtcatgatgcccgctacctcgacctgacgttgcgctaccggctcgccggtcattcattggcgctgagctggaacggggtgcgtggcgacgatttcgaccggttgttcttcgcgcgcgaccatggcacctggaacagcagcggaaagctgtatttcttcttcggcctgcgcgacgaggaaatgtacaaggtgagcggcacgctcgacttcggcagtctcggggtgccgggcctgaaagcgacgtcctattacgcgttttccaatcatgcctacggctataacggattttcccggcgagaattccagagcttgctccagtacagcttcgagggggcgctacggggactgagcctggcttggctgggcgaccgcttccatacccggggaagtcccgatggcgtgcatcgcctccgggtctcggcaggtccggcgggaatcatcagcgagcattcgcagcgtttctacctgacctggcagcgttcgttctga

SEQ ID NO: 363339 - DNA, 933 bp, Pseudomonas aeruginosa
atggacaagctcaccgcaatggccaccttcgccacagtgctcgaagccggcagcttcacccgcgccgccgaacggttgtcgattcccaaggcccgcgtctcgcagcgtgtttccgacctggagcggcatctcggcgtacggttgctgcaacgcactacccgttctctcaagccgaccgaggacgggcgcgcctactacagcaagtgtgcgtcggtcctccagcaggtggaagaactggaagcaacgctgaagggcgccacgctcgagccgcgcggaagcctgcggatcgaggccctggcgtcggtcgcgcgctggatactgggcccgcgcctgcacgaattccagcgccgctatccgcagctgtcgctcacgctgtgcgccagcgaccgcatcagccatctgctcgaagacggcatcgactgtgccatccgcggcggcacgctgccggactccggcctgatcgcacggcatatctgcgacgtccggctgggcctgtacgccgccccgtcctacctcgaagccgaaggcgtcataggccatccgcgtgagctgcgcgcgcatcgccggctgtcctggttcaccggccaacgcaatcctttcgcctggaggctggagtccgccgaggaagccttcgacgtcggcgtcacgcacggtctgcgcttcgacgatcccgacgtcgccgtcgcctcctgcctcgccggcagcggcatctgcccggcggcgcccttcgcggtggaaaactgggtccgctcgggcgcgctggtcccgatagtaccgcagtggagcttcacgccccgcccgatccacctcgtctaccccggtgaccgccacctttccgcgcgggtgcgctgcttcgtcgactggacccttgaactgatgcgggagctcccggggctgcgcctgagtccgcttgacctggcccgcagcacctag

SEQ ID NO: 363340 - DNA, 447 bp, Pseudomonas aeruginosa
atgttcaaatccccgctgcttgtgtttttcctggcaacgccggtctgcgtctgggcggaggaactcccgcgctcgcccgacgaggttccgcgcgccctcgagcgctatttcaatgtcggaaacctcgacgggctggcctcgttatacggagcgggaagcgctttcgtgagcgcgcccggtcgccaggtccggggcgcgctcgagatacgcaccgccttgcagcgattcatggcgaccggtgtgccgatccgattcagcgtgcgccagatctaccaggccggcgaggtggcgttgattctgggcgactggcggatcaggggcgagggaaaggacggcaggccggtggacatgagcggcaccgcgaccgacgtggtgatccggcaggccgatggcagttggatatacgcgatcgacaatccgtttggcgtggcgcaacccgcgcagtga

SEQ ID NO: 363341 - DNA, 720 bp, Pseudomonas aeruginosa
atgatgacctgcgatcccgtcactggcgcttgcctcctgcctgaacctgccgcctcggcgagcggcgcgcagcctgttgcccaggctaagccgtgcgtccactacattggcgatccgatgtgctcctggtgctggggcatccagccggtggtcagcgaaatggcggccttctgcgccgccgaggggattgacttcgcgctgacggtgggcggcttgcgcgcgggcggtggcgacctctggaatgcggacttcaccgattttctgcgtgccgaatggcgtcacatcggcgaggtcaccgggcagccgttcggttccgccttgctggacgcgccgcatttcgactatgacaccgagcccgcctgccgggcggtggtcaccgtgcagatgctcgggacgggcggcaacgatacccgtgcccggcgttttttctccgcggtgcagcgcagattctatgtcgagggtcgggacccgaaggaaacctgcttctacgccgacctttgccgtgagcagggcgttgacttcgaggtcttccgagccctgttcgaatctgccgaagcgaggcaggcgacacaggccgccttcctgcgttgtcggcagtggggtgtgcgctcgttcccgacgctcgcggttgaatggtgcggagaaatgctgccgctcgccgtcggtttcaccagccgcgagcttgcgctctcgcgacttcggcagctcctcgctgggtag

SEQ ID NO: 363342 - DNA, 540 bp, Pseudomonas aeruginosa
atgggttttgaacaacttgccgagctgagggatcgcctgcgggcgcaggcggaacaggcgaaaccggccaaatcggctcaatccgaagccaaggcttcctctgggcgcacagcgaagaaacgcgaacccgtggagccggaagtcgaggccatctggcggctgcaacggcattttccgctggcgtttccgaagaatcccgcgccaaaggtgccgcttaaacagggcattctcgaggatgcgcagcagcacctggagagcctcggcatcaccgccgagcaactgaagcaggctatcgccacctggtgccagggcaatcgctactggtcctgcatggtcgcggacgcgccccgtctggatctgcaaggccaggtagcgggcaaggtcaccgccgagcaggcgctttacgcgaagcgccaggcctcgcgtcgccagcgtgaccagatgcgcgagaagcgcgccaggcgggcgcagggcgcggcggccgagagcgtcgcggacaaacccgaggttggcgagcagcccgattcgaccccatcctga

SEQ ID NO: 363343 - DNA, 225 bp, Pseudomonas aeruginosa
atgggcgaattggtcataggtcgcaagagtggtgccggaaatcctcgtgcgctcgtcgggggtccagatggattccagtcgattgcatggacaaaggttttccacgtcatagacgcgcagcccaaccagacgatccacgtctggctgcccgtgacgctgcttggcctgtttgtggcgatcatctggcacgagaacggcgcggtgtgccgtacccggccgcggtga

SEQ ID NO: 363344 - DNA, 315 bp, Pseudomonas aeruginosa
atgagcgccttcattcagctgtccccaattctagagcgcgccgatgaccagttgttcttcctatgtccaggctgccagatgctccatggcgtcaacgtcaaccgaggcaagcctggcccagcttgggactggaacggtgacgtgaaccagctgaccttcagcccttcgatcctggtgacgttcaactggggcgtccagcgcgaggaacgccgctgccactccttcgtcaccgatgagcgcatcgaattcctcggcgactgcacacacgccttggcggggcagacagtcgacctgccagagatcggagactactga

SEQ ID NO: 363345 - DNA, 744 bp, Pseudomonas aeruginosa
atggtctggatgctgccggatctgggcttgaccccgttgctcaatggcacctccctgcagccgttcatctctcagctcagcagccgattcaacgatgaattgcttcggcagttgaggactgtcgatgccgaagtcattcccctcaacattcccgctctgctgaaggaaggcttcgccaatccggctcagttcggcctggccaccgaccagaatctgatgacgacctgtttcagcggcaaaggctgcactgaaaacgagcggtatggtattcacagcgccactccagatccgaccgagctggtctacaacgatatggttcacccaatcgaagccgggcaacggttgatctccgactacgcttattccctgctggcggctccctgggaaataacccggttgccggaaatggctcatggttccctgcttgcgcatcagaacgagttgcgtaaccagtggcaggctgactggggaaactggcaggccattgggcaatggcgggccatcgtcgccacaagcggccaacatcaggattacgatagccagcgccgggagcagcgccgacggcaacgacttcaacctgaatccggggggcagctatcggctctcggagtcctggcgggtcggggtattggctggcgccggccggcagaaactataggctggcgacaacgactcgaactacaagctcaatacctacctgggcactgtcttcgcccagtaccagcaagatcgttggtgggctga

SEQ ID NO: 363346 - DNA, 588 bp, Pseudomonas aeruginosa
atgttgaaatcgataagcagatttgtattctttggcatcctactggctgtttcccagaagggctttgccttggcttgtttgaaggatgccaggccatgggactggtacccctattttgcggggcaaggcagtgccactagcactatcaatacgactatcgcagtgcctagtgtgctgccaaagaataccgtactctggcgctcgcccgacgagcacataaccgtcacctgctggcaggataagttctgggatgctcaatatgcctatatttatttgagcccttccgacccaggcggtgccgctctggggtccgatctggaactcggcgtccgcgtcaatggagtcgactactattgtgataaccagatggaagtgttcgaggggcgctgccggaaaaggctggatttcttctatcttcagggctgctacgtgggaagctgcagggagacggccgtgacccgctccttgacggtgagctttttcgttgccaagaagtctcaaccctctcccggcaaggagggcagtctgtccggtatcagtggtacctatggtgctttccagttcgatggtgtgtacgggacgggatga

SEQ ID NO: 363347 - DNA, 1578 bp, Pseudomonas aeruginosa
gtgctctcctccgaggagtcggcggccaggtctttcgcctcccgcgtgccctctccaggccgttcgacggcgcgacctccgaccaatgcctggcgctcgccaacagtctcagcctccggtgcgggtctggaagaagaggaagaggaggaggaacagaccggcatcactctgcgcctggggctgttcttcgacggtaccggcaacaaccaggccaacagcgccgccgccgctggctgccatcccctggcagtgggcctgagcgacaccgccgccgaggacatccgccagcactgcgccgcctatggctacgatggcgagggccgggtgccggacaacagctatggcaacgatgtgaccaatgtggcgcggttgtacgatctgtatccggacaacaccctcgacccgctggaagcaacagctgacgaagcctatatcaaggtctatctggaaggcgtcggcacccacagcggcggagaagactccctctacagccaggggacgggccagggcccgaccggggtgctggcgcggatacggcagatgcccgccctggtcataaagcaggttgatcttttacgcagcctcaatcctcatctcttggtcgagcgcatcgaaatcgacctgttcggcttcagccgcggcgcggcggcggcgcggcactgcgccaacgaactgctcaaggggcccgacagcctgctggcacaggccttgcccgccgggtcgccgttgttcgcccggtgcttcgcctggcgccgcggagccgacttcgcgctgaacttcatcggcctgttcgataccgtggccggcatcatcgcgccgctgcgcggcgacttcagcccgcacgacgggcgcaacgccggtctcgccctgggcctagcccccggctgcgcgcggcgggtggtgcaactggtggcgggcaacgagtaccgccacaacttctccctggtccgcactgacgacgacatccgcctgcccggcgcccacgcggacatcggcggcggctacctgcccgaggccgtggagaaggtcctgctcagccgaccggagagcaaccgggtcagccagggccaggccgacgacaataccgaagcttactggcgcacccgccagtgcctggagcgcgagttgccgcgctggcggccctatgtgcagcgcctgggcatcgccacctggtcggtggcgctgcccaggcggcgcggcgaacttccggagaagcgggtctatgcggcgctcagcagcgaacggcgggtgcgcggcgagctgtcgcgggtctacctgcggatcatgcgcgaactggcggtgcgggtcggggtagccttcaaggtaatcgaagagcgcgacccggcgttgtctatccctgatgaactgcggcccatcgccgccaagttgcaggcctacgccctgggtgaggacttcaccggcctcagcgaggaggaaatcgccctgctgtgccgccgctacatccacctgtccgcccactggaacgccgccaagggtaagcacaacagcgcgctggcggtgatgttcatcaaccgccccgcggagggcggcaagcgcaaggagtatcccaatgcctag

SEQ ID NO: 363348 - DNA, 903 bp, Pseudomonas aeruginosa
atgggggatacgctttccacggccagggggcactaccagaaagtcgcctcgatgcagagcaccgttcgcaaggacgcagcaccgaagccggtcgcggtcgatgccgggctgacagtgttcctcggtggcgcgggcatggtcggcgactacaacgaagacatcgtcgcctcgctgacggagagcggcatcggcaacgccgtctatggaaactactcgtcgttgttggaaggcctggaccagtacgttcccggtgtcctggacaccctgagcgacgccagtgcggtggtgttctacaaccaagacgaaagcgacccggtcgtggcggaatacggcaagttcgccgactgcacctatagcgaaacctatgccgagaaggaatacctcttcggtctgatcaaggttcgtcactacgacagctacgaatgcacatcgtccggtgacctgcttgccttcaagatcagccgcgacgtcgatgcgctcaagaaaagcgacttctccctatcctgcataggggttggcaaaccgctgccgacgatcggccagttcaatctgatcggctactcctggggagcggtcattgccgcgcggtcggcaatgttccatgccaggaacggcgtgagggtcgatcatctggcgcttatcggcgcgccgatcaaccgcagcctcgtcgaggcggtcagaaaccatccgaagatcggcaaggtcctgatcatcgatctgaaggacaagggcgatcccatatatgccggcatgacggaccaggagattgtcgaggcggcagctacgctcggccagcagatgctcaagggagaagggcatttctactactccggttcggatgccgaaggacagaagcggcaccgggagctcgcgcgacgcctgtacggcgaggggattcgttga

SEQ ID NO: 363349 - DNA, 1764 bp, Pseudomonas aeruginosa
atggcgacactcaaggaaaagttcctcgaggaaatggactacctgcgccggctgggtaaggtctttgtccgcggcaaccccgccctggagcccttcctaggcgcctcggccaaagaccccgacgtggagcgcctgctggaaggcttcgcctttctcaccgccaaggtgcggatgaagatcgaggacgacctgccggaagtcacgcagccaatgctgcaggtgctggaccccacctgcctacagccaacacccagcatgaccatcatgcgcttcacgccgatagagggcgccatcgccgaatcccacgtcataccacgcggcacggtcgtgcagtcgcgcccggtgcagggtgtacgctgccagtttcgcacctgctccgatgtaagcctgctgccgctggccatcgagtccatcagcgacagtcacagcaatgatgccagcaccatccgaatagctttggcggcctccccgggctgctcactgcacaacctggcttgcgacaacctggaatttcatctgagtggcagcgaggaaaccgccttgacgctctatggctggctggggcgctatctgcaatgggctcaggtggacaggctcggtcggacgttcagattgccacccgattgcatccagttctccggattcaaacctgaagaagcactgctaccccaggcgccgggtaagctcgatggctaccggatactgcaggagtacttctcctatcccacgcgcttccacttcttccgtttgaccggtctgcgccagatatggccaaccgaaccctgtcagcgagtcacgttagagtttcgcttccagcgccccatgccactgggtagccgcatcaaaacgggcgacctgtcgctgttctgtgcgcctgcaatcaatctgttcccgcaccctgccgagcccatcagcctggacagcccgaaaatagctgttccattggtgccggacacccagtcgcaccgtgagccctacgccatcttcagcgtcgataccgttacttgcgcccggcgaaccacggtgcgcgagggtgcgctgccggtgcaagcatttcatccgtacaactcgttgagaatccacgaccctgagaagttcgatggcgtctatgcacatgacgtcgaagtccctctggtacccggcgagcccgcccaccgcatctccttccttcgtggcgatacgaccgcctacgtgaacgagaacgagatggcccaggtggaactgacctgcaccaatggagagcttcctcaagcgttggtgcccggcgacatcacctatccggtcgataccacgaccaacgtggcggacttcaccaacatcacgtcgcctacgccagcctatccgcctcaactcgatggcgacacccagtggggttggatatccaacctgacgccgactcttctaacgcttcaaagcgtgccagcgctcgtcagttttttgcgggtctatgacctccctgggttgtgcaacatccagttggcgcgggcaacgcaacgcaagctggacgccattcgctcaatcaaaacttcgcctgtggaccggatgttcaaagaactagcggtgagagggacccaaacgcatttgatggtggaccgggacgcttacagcagtgaaggcgaaatgcacctgcttttcagtgttgtcagccatgccctggcagttttcttgagtgcgcattctttccacgttctatcgatcagtaccgctcctgacgagaagccttaccaatggccgattcgcccaggtacgcagcccttgatgtga

SEQ ID NO: 363350 - DNA, 2598 bp, Pseudomonas aeruginosa
atgagccatcagggcgatatacgctttacgttctcgttgattgacggagaagaattcgaggtcatcgaattccagctcaccgaagcgttgtccgagacctttcgcctggacctcgaacttgccagccgcagtccggacgtcgatttccgtcgaatcgtcgaccagagcgcccgctttaccatctggcatggagagcgaccggtgcgctacgtcaccggccgcgtcagttcattcttccaaggggagacaggcttccgcaggacccgttaccgggcgctggtcgaaccatcgctggcgcgcctggaactgtcttcggattggcgcatcttccaggaacgcagcgtcccgcagattctggcggcactgttcggcgaacatggcatcactcacgaccagcaattcctcaccgaagagcatctaccccgcgagtactgcgtccaggcaggcgaaaccgacctggacttcgtcctgcgtctggcaatcgaggaaggtattttccaccgctttatccataccgccgagggtagcagcctggtcctcggcgaccgtctgtacatccatggcgtcatcgatggcgggccggtgcgctacaaccccctcccagggggcgaccagcctgaagcgtgcctgcgccgcttcacgtatggcgagcatgtacgcaccacccggcagacccagcgcgactacaccttcacccatccgcgctatcaacaagagcacagacccgtgggtgagggcatggcgcatcatgacacggagtacgagcgctacgactaccccggtcgctacaagcgggacgccgccggcattgctttcacccgcgaccgcctgcgcggcctgcgccgcgacgcgcgtctggccgtggtcgagggcgacgacccgcggttggttcctggtgtggccttcgacctcatcggccacccgcgcgaggaatggaaccatggctggcgaccggtgcggattcatcaccgcggcatccagcacaccagccaggccgaagacggtgctgatgcccaacgcggcacccactacagctacgttgccgacacagtgccggaccgggtcgagtggcgtcccgccccgcagccgcgcccggtcattcccggtccccaagtggccactgtggtcggcccggccgacgaagagttcttcgtcgacgagcacggccgggtgcgcgtgcagttcccctgggaccgccaaggcaagaacgacgagcgcagttcctgctggatacgcccggcccatgcctgggccggcacccgctggggccacatcgcgctgccgcgcatcggccaggaggtcatcgtcgactttctggatggggattgcgaccagccggtcatcaccaatcggctctaccgggtcaccaacccgacgccctacaagctgcccgaacatcaggtgctttccaccatcaagagcaaggagcacaaagggcaccgcgccagtgaattacgcattgacgacaccacgcagcaaatcagcgccgcgttgatgaacgaccacggcgccagccacctgcatctgggctacctcactcacccgcgtcccgatggcggcaagcccaggggggaaggcttcgagctgcgcacggatctgcagggtgcgcttcgcgcggcgcaaggcctgttgctgacgaccgagactcaaaccgccgccgagggcggacagctcgaccgcgccgaaatcgttgccgtcctggaagcggcgctgcaccttgcccgcagcctgggcaactacgccgctgagcatcagggcatcgcccacgaccacgagccgcgccaggacttgaccgaagcggtacgtgacctgggccacggcgccaatgaccaggccaacggcgtgggtgaaggcacaaagccggtaatggcctgctccgcaccagcaggaatcgccgctggcacgccccgctccatcgccttcggcgctggcgagcatctggatgcggccgcccaggggaatctgcaactgaccgcaggcgaacgtgtggtcgtcaacgccggcaatggcctggggacgttcgcccaacgcggtgacatgcgccatatcgcccacagtggccaactccttctacaggctcaacacgacagcatccacatcgaagcggacaagagcgtggaggttcgggccaacaacaaccatgtcacggtgtccgccgaggagcacatcaccctgctgtgtggcggcgcctacatcaagatggccggcggcaatatcgagatgggcatgcccggcaccttcaccgtcaaggcgacggaccacaacttcaaggggcccggcacgatggtacccaccttgggcaaattttcgggtttgcctggtcccttccaggagtacttcgtactgcgcgacgcgaacaccaacaaagtcctgccgaatcacgcctacgagattgtccgcgcaagtggcgacatcgtgcgtggacgtaccgacgagcagggccgcacacaactcgtcaccagcgaagaacgggaaccgctggaggtctcggcgataccggatccggatgacctcttgcacctgaatgccgcctattgggatggcgcgggtgactatccgctggatttccttcgcaaccccaccaaggaggaaggctga

SEQ ID NO: 363351 - DNA, 1323 bp, Pseudomonas aeruginosa
atggccccccaagccccccgtaccggaaaaaagaacccgggaggtggcgtccgaggttccaccaaacctgatgcgtcaggccaagtgctgccggtgaccaaccccctcgacctttggtatctgtgcgagaaagcgcgctacgccagcgccaatccatacaagcgctctggcgatggggcccccatgtatcaacgcacggttgcgctgatgattcgggtagataatgaactgttcgagtaccgctggccttattgcgccgaagtgggctacgacatgacgaagacacctcctgcgcccataatgagcaagaagcatcctcatcggccaagttcctttccgctttcgcagtacaagcgaatcagcagccatcgatttccacagtacagcagtcttgaggtcatcgtggacatattgggtctggatgagcttgagcagatgattgaaatgcctttgccctcaaatgctgaggacgggatttggcaggatgttcaggtaggacggaagggattgttgcggattcctgatgtggtgagggtcatcaaccatacgatgggcggtaagccccaatacagtcagcccaatctggccagcgtgattgaaatgaagtttggtggggactcgctctctgatgatcagaaaaaggcctatgagcgtatcgctggaaatccattcaaatttcgcttgctgcataccgaccgatgtgacaaggcggacaggcgccagcgccgcgaatggatgactgctgcacagaaagaacctgtctacaaacccgtatcgcaggttctgtcagttcccttgcgcgcttcggccgatccccacggcctggtggtcggcctggttgacgccgagcatcaggccgcccggcgtgtcctggaagtccagccacccccgccgggaactcccatgatgagcgcaagccccgatatgcgagaggccaatgcccaggcggcacgggcgcgcgcccagattgaactttccctgattggcccgtttgtcgccgtgggcggtgccgggctgggggccgggattgccgccgctggcggcggcgccagctcgggggcaatgctgagcgcccgggcaggccctcaagttgtccgctatagccgccttatcgactgggcgcgcctggcgggcggggctggcgcggcgggggcctcggtggcctatgccaccgcggaagatggcagctcggctcctgtgctgtccccggaccaacaacgcctgtgggacgcctatcaggcctgggaggccagccaacgtcatcaaccacgcacggaacaactctacctgttctggccggacgcgccggagaccaagcaatga

SEQ ID NO: 363352 - DNA, 1179 bp, Pseudomonas aeruginosa
atgactgatttcttcaaagagttcgacgccgaacgctggtacttcaccttcatggatgaagatgacaatacgctccccgtgcagcaagtgggggttgtcgccatcttccatatgatggatgcctatcttccggcgcgccgcaaaggcattgcggaggctttctcgctctaccacgagttgtatggcgacaagttgaagggcggatatcgtgaagacaagcgcatgatcgttcgccccttctccaagatggggttcgaagcttaccgggactacatcgtggataccagtccaatggatgtcgtcgagttcaaaaccatgtctcgcctcagccttaagcatgtcagcgattatatgtttggggtctattctccggctggatggtttgaacaggtccacaagacctttacaacggtacgtctttatttacccgtcgaggagcttcaaggggacggaaaaaaacagttcgaaaccttcctactaaagtgttgcgctttgcttcgtcccctgcatggtgcggcaggactaggcattcaggaatgccacgattgggaagactaccagaccatcgaatacgagaccgcttgggcgtacagagggatcgatgtttgtgggccgacaggaaacgagagatggcgcgagggctattcaaatctcaactggtacaccttcctggcccatcactggatggccacgctgggcatgcccgaagagttgcgagccaagttggacgacgaacgcatcgcgctgcttccctatgagtggggcacggccattcgtgccggggattggccagcgctcggaaaggctcaagtagacccgcgccccgaactgtacgtgaaggtcaacaacgccattcgttcatttcgcgtgcaggacatcggttcgctgcactatggctccatcgccggcgaggtgcgcttcaatcccctgaccagcaacctctggctgcgccgtttcgacacgccagaggaaatcagagaagtcatcgacgcctctggcaacgttaagacgagtgagcgctacttcatgcggatgccttcgggcacgccctgtccatggccgggcgtgtggatatgcgaagaggtccctgcgcaaggacggcagaccttcatgcacaacgttcccttgccggaagtgaatgggcaaatggttacctggcgcctggtcaaggcgttgtag

SEQ ID NO: 363353 - DNA, 255 bp, Pseudomonas aeruginosa
atgcgggaagtcggcaataaaaacaggctgcgattggaagaggctctgcgcgtggccgcggagcggggtggacagtacctgtcgatatcctatctcaacacggctgtgaaaatgcattgggtgtgtcaccgagggcatagctggcatgcccccttcgccaccattcgagccggtcactggtgccccgaatacgccaacaaggcgcacctttccaaccgcaagtccaaggccaggctgcgttacaaagcgatctag

SEQ ID NO: 363354 - DNA, 1185 bp, Pseudomonas aeruginosa
atgttcgatcaaaccaacccctcttgcactgattcgcttggctcggacagctcacgctcacctggcaacgtcactgttccgcttgcgctgctcctcgatgagcggctcacgccgctggagcgcaacgcctggatggtctttcgtgctcgtgtggatggaggcggcaccagtgcgctgcccaactacgagcagatgcgccccttcttggcctgcaaagcgggcaaccagaaggcggcttacgagacggcctcgcgtaccgtctgcgtgctacgcatgacgcggtgggtgcatttggttggtcaccgtcgtgatccacttacgggtcaggtgcagaacacgctctatgccgtgcatgacagcccgcagtcatgccaggaggtgtgcgcttcagatcgcgactacatcgagttgttggaacgctcggttgggcatcccaatcaagtcgttcggtcggtggcggtcagcgttctcaatgaacttgcggcggatcaagacttgccagcaagcttgcgcgcgcagattgcgttggctcgcgctcgcttggggttaggggatgacgacaaccctggtggtccaccctctcccccaaaagagaacgcaccttcgccaatttcccatgatgacgagacttcgaccacatcgaagactgattcggcagtacgtacgtataagtattctttaaaagaagtacgtacgtaccgtgcgagcgagaaagaaagctgcccaccaaaattggtgaacccgctgcgcctgccgccgtgcctgggcaggatggcgccagaccaacaccgcgatgtgcaagcagcgttgcggcgtctgccccggcaggtaggccaagaggttctgcaagagctggaggcgcgccaccgggacggcggcgtgcgcaacgtggtggcctacctgtttgccctcatccgtcgtgtcggtcagggcgagttccggctctgggctggcaagaggctggccaacccagcgcagcaggccccgcagcttgactccagtggggaagcgcaggcatcgccaagtgtgcctgctagcgtggcgctggcgttcaagccggcctcgccggcagctgtgcgctcgcacctggatgcgatccgctcgatgttgcacatgccagcgaaggtaggcgacctggcggcggagcttttgcaaagcggtcactgggagccgggcagcgcctag

SEQ ID NO: 363355 - DNA, 864 bp, Pseudomonas aeruginosa
atggatgatttgacctacgggttgcggcagctgtgccggcgcaacaaagatggcagccatgccacccagggcgaccggctgggtgggttgacgctggtggctcgccagttgggtgaggcggggtttcggcgtatgtcgccgaactcgctcaagggcaagcatgtggcagcgctggtggagcgctggcaggccgaaggcctatcggccggcaccgtgaagaaccggcttgcgcatgtgcgctggtgggcggagaaagtgggcaaggccggtctcattccagcggataacaccttgctgggggtgccgcagcggcagcatgtgaccaacgcggacaagtcaaagacgttgggggatgcgcttgatggcgtgcgcgatgcgcatgtgcggatgagcctgcaattgcagcaggctttcgggctgcgccgtgaggagtccatcaagttccagccccgctatgcggaccggggcgaccatatcgcgctcaagggcagttggaccaaaggcgggcgcgagcgcaccgtaccgatcaccacgaccgagcaacgccaggtgctcgacctggtacacgagctggccggcgcgggatcgctgatcccggcgcacaagagctttatccagcagcgcaacacctacgatggtcagtgcaaagcggctgggctaagcaacatgcatggactgcggcatcggtacgcgcaggaccgctatgaggtgctgacggggtggaaggctcccgctgccggcgggccttcggcgcggtcgctgacgccggcacagcgcatcatggatgcgcaggcccggcaggcgatcagccgcgaactggggcacgagaggacgcagattacggcggtgtatctaggccgatga

SEQ ID NO: 363356 - DNA, 693 bp, Pseudomonas aeruginosa
atgacccaacgcattctttttgtcctgaccagccacgaccgcaaagggccggcaggcgctgccgatgccgcgcctagcgggttctacctatctgaagtgacgcacccgcacgaagtgttgagcgcggccggctacgccattgacttcgtcagcccccagggcggccaggcgcatgttgatggcctgaatctggacgatccggtcaatgccgcgttctggaacaacccagcgctgcgaagcgccaccgagaacactttggcgccagcgcagatcgatcccgatgcctatgccgcagtcttctatgcgggcggtcacgcaacgatgtgggacttccccggcagcagcgaactggccgccatcgcggcacgcatttacgagcgcggcggcgtggtcgcggcggtctgccacggcccggcggggttagtgaacctcaagctgtccgacagccgctatctggtcgcgggcaaagacgtggcggccttcaccaacgacgaggaacgcgcggttggcctgtacgacgcggtgccgttcttgctggccgaagccttgcaggaacgcggcgcccggcatgtcccggcaccgaacttccaggcccaggtggtcgtgagcgaacggctggtgacagggcagaaccctgcctctgccaaaggcgtggccgaggcgatactgccgttgctggcagagcgggactga

SEQ ID NO: 363357 - DNA, 351 bp, Pseudomonas aeruginosa
atgaagtacatgttgttgttgaccggagacggcgatgttcccgcgtgggacgggctgaatgagtctgagcaggccgcactcatggaacggttcgaacagttccagagtgagtgcactgcccgaggcgtcgaaattctggcgggggaagctctcgaaaacggcgaatctgccaccaccgtgcgtagatcgggcggagcgagggtgatctctgaaggaccgtatgccgccgcctacgaaggactgggtggttttttccttgtggagacaccgagtctggacctacttctggaactctcggacattctgccgccgtacgacatggagttccggccggtcgatccgatggggtga

SEQ ID NO: 363358 - DNA, 1200 bp, Pseudomonas aeruginosa
atggcactcaccgacaccgccctcaaggcactcaagcccagggacaagacatacaccgttagcgacgatcgcggcctgtacctggaggtatttccaaccggggggatggtctggcgttaccgctaccggctgaacggcaagtacgaaaagctcacgctgggcaagtacccggcattgaccctcaagaacgccaggctcatgcgcgatggcgcatcacagatggccgcagttggcgagtcacccgctcagaagaagcagcgcgccaaggtagcgggtccagaggacaccaccctcaagcagtttgccgagcgcttcttcaaggagatccagcagcgcgaccgcaaggacaccaccatgccgcggcgctatctggaaaaggacattcttccgcacatcggaatgaagccggtgtgcgaactcacgaccgaagacgttcgggcagtgatctggcggaagaaggaacagggctttgacgccgccgcaggccaagtacgtgggctgcttaaacgcatactggactacgcggtgacttgtggtctgatttcagccaatccagtcatggcgctgcccatgcgccacgtctacaaagcggtctcgcgtgaacgtgcgctgtcgaccgaggaaatcaagaagttcctgaaggctgcccacctgtccaacatccggcgccagttcaagataagtttgcagctcatcttgctcaccttggttcgcaaatccgagcttctgctggctaagcgcaaagacttgcaccttgaagaagcggaatggcacatccccgaagaaaactcgaagacagggaagccgcatatcgtctacctgtcgaaacaggccgtaatgctcttcgaggaattgctggtactggcgggcaacagcgagtgggtcctgcctggtcggggctctctgaccaagcctttcgcacacaatgcgcttaacaaggctctcaaggtcgcactgcaagggcaggatatcccagccttcaccatccatgacttgcggcgcacggcatctaccctgttgcacgagaagggttgggcatcggatgttgtggagaaggcgctaaatcacaccctcggtggcgtgcgcggagtgtacaaccgggccgaatattcagaacaacgcaaagccatgcttcaagcgtgggctgacgtcatcgatgctctcgtgccggcctcaagtcttgtcatattgcgggattga

SEQ ID NO: 363359 - DNA, 645 bp, Pseudomonas aeruginosa
atgaaaaagcaattggcggcatttggcctcgttaccggtacgttccttgccgcgggcagtgttcatgcggcgcagaccgcggaaatcaaggtcatcggcaagatcctgcccgatgcctgccaactggttatcggcggaggtggcacctatgacttcggcagcattggttcggacaagctgagccaggatgccgttacccccctggagggcaaggcccagaccctgaccgtgacctgcaacgccgcggccaaggtggccctgaaggcgaccgacaaccgctcgggttcggtggttggtggcaagggcgacggctatgagttcggcctgggaggaaccgatgccggttcgaagccgggtttctatagcctgcgcatgagcaatgcggttagcgaaggcaacactctggacgtgctcagcgatgccagtggtggcggctcctgggtcaccggaagcagcctcttccatgccgacagcggcgagcgcaagtccttcgccggcagcggcggcaccctgccggacgctttcaagaccatcagcgcggacctgaccgtaaccccgaccataaacaaactctccgaactcgacctttccaagggcagtgtcgccctggacgggtcggcgaccatcgagttggtctacctctaa

SEQ ID NO: 363360 - DNA, 636 bp, Pseudomonas aeruginosa
atgaaaaatatgctggggatggccgccattgccggcgccctgctggtcatggcgcaagtggatggtgccgctgccgccgacctgagcgttgccgggcgtattcagcagaccggggcttgtagtatgacgttggggaatggaggggttattgactttggtacgttgacatcccgagatttgcatcaggatagggaggtatggttcaggaatccatctatttcgctttctatcgactgccaggctccgaccaagttcgcaataaagggcttggataatcgtgagggtacgagtacgaggagtgggtatgggttaggcgcgattggcggcaagaagacggggtactactacttgattcctggggcgcggatgggtgatggcaaagcgcttgtgcaacttttcaaagacagttggacgtggcctgatgcttgggaagtttggggtatagaaaaaacccgaaatatctatcctaatgatctctcatcttgggctgaaccagggcagaccactccacaggcattcaaaagagttaccagtgaactagccgttgttatttggattgcccccgcctctaaactcgacctcagccaggaaatcgccatcgacggttccgccaccctggaactggtttatctctga

SEQ ID NO: 363361 - DNA, 642 bp, Pseudomonas aeruginosa
atgaagctgaaacagatggttcagggcttgttgtatatctccgctctggccggcgccgcacaggtcatggctgccgatctgaatgtcgccgggcgtatccagcccagtggcgcctgtagtctggcgttgggaaatggcggtgtcgttgacctggggacgttgacatctcggaacttggcacgggacggatacagagagttctatagacagatttcactgtctatcgactgccagactccgacccgggtcgccatcaagggcctggacaatcgcgagggcactgttcttggcggggaaacggggatcgttggatttggcatgggggcggctggcggcaggaagacgggccgttactacttgcttccccttaatcgttggggggatggacagcggcttgttcatctggtcaagaaaacttggtctggatctgggtggcaggtgagcgatgtgggcagcacccggtatacctctgccaatgacatctcctcctgggccgagccggggcaggccaatccccaggccttcaagaaaattaccagcgatctggagtttgtgattcagattgctcccgcctccgaactcgacctcagccaggaaatcgccatcgacggttccgcgaccatggaactggtctatctctga

SEQ ID NO: 363362 - DNA, 651 bp, Pseudomonas aeruginosa
atgaaactcaaacaggcgctccaggggctgctatgtctctccgccctggtcggcgttgtacaggtcatgggcgccgacctgagcgtcgccgggcgtattcagccgaatggtgcctgcgagctgaccttgctcgatggcggtgtcgttgacttgggcacgctgtcggcttcgcaggtagagaaaaggccaaaggcgatggtcggcggaaacctttatcccatcatcggcgaaatccgcgagcgcctgtcgatccgctgccaggacgctacccggctggcgcttcgcgcgctggacaaccgtagcggcacggctaacgagcgtgcgccttactactacgggctgggcctgagcgagggggcgaaggtgggcatgttcgatctgtctgcggatggctggttcggcgatgggcggtggcttgcctcgttgcagagctgggattcgggggcgacgtggagcgagcgcggtttcccgggccagttcggcggcgaggttaccctggttgcctgggccgagccggggcaggcgctgccacaggctttcgaaacgatatcgggcgatcttcgcggaacggtcatggcgtcggaccagttggatagcggggctgtgatcgatatcgacggttccgccacgctggaactgctctatctctaa

SEQ ID NO: 363363 - DNA, 645 bp, Pseudomonas aeruginosa
atgaagctgaaaaggatgaccctggggatgctatgcgtctccctcctggccgccaacccgccggtcggggccgccgagctgagcgtcggcggtcaagtccgcccgggtggtgcctgtggcctggcgttgggcaatggcggcgtcttcgagctgggcacgatttcgcgcaaggacctgaaagaggccgaggaaacctacataggtcctccgagcggcctggagatttcgctgggcatcctttgccaggcacccaccaaggttgccttgcggatgctcgataatcgcgccggaacgtcgatctcgtcggtggcgtgggccttcggcctgggcgcatctggtggcaggaacgtcggctggtacagcgtctggattgagcggatcaacggcgatggcaagcccgggctgcccgaaatgcgccaacctcccggtcaggcttgggagcatccccagcagggctggggttgggcgacacgtccgtcctggctttattcgtgggcggagagggggcagacctcaccgcagggattccaggacattcgcgcggtgctggaactcttccctatgatcgctcccgccaaggacctcgacctgagccaggaaatcgccatcgacggctccgccacgctggagctggtttatctgtag

SEQ ID NO: 363364 - DNA, 687 bp, Pseudomonas aeruginosa
gtggcactcgcctgtctctgggggatcgatgcggcccaggcttccggcgtgcttcccgagtcgtcggtggtgatcctgaacgaggccgatggcgaagccagcatgaacgtcaagaacaccgaggcggttccgttgctgttgcatacggtcatccagaacctgccggaagatccggagctgctggtggtggccgtgccgccggtaagccggatcgacgcccagggcacgcagcgggtgcgcttcctgttgcaaggctcggagccgctgaaggtacagcgcctcaagcgtgtgaccttcgagggcattccgcccaaggggccggacggcaaggcgcggatcagcatgacgatccgccagaacatgccgctgatcatccatccggcgacgctggagaggaatccggcgccctggacgttgctgcgctggtcggtttccggcgaccggctgaaggtgcgcaacgacagcccctatgtggtgcgcctggggcagggcgtgctgctgctgccggtcgggacggcggcggacctgggcaagccatatatcctgcccaacagcgaggcggaagtgagcctgcctgccggaaccggggccaaggtccgctcggtgcggatctcgccagccaccgcatacggttacgtagtcgacagctatgacgcacccttggccgacggtacggccgtgcaatga

SEQ ID NO: 363365 - DNA, 2541 bp, Pseudomonas aeruginosa
atgacagcggtcgctttccgagcggggtggcgtttccgctcgtcggggcgggggcggttcgctgcggtttcgctgttgctcgtcgtcggcgcagaggcgcgcggcgttgccggcgaggtgcccgccacccctgggcaggctgccccggcgcccgcggcgagcacggccttcgataccgatatcctgcgccagcgcgggttggacccgcagatcgcggattactttcgcgagacgccacgctttcgtccggggcgggggacggtcgacgcctacctcaacgacatccgccgggggcgcatcaatgcgcgcttttccgagcagggcgagctgtgcttcgacaaaccttttctcgacgccgtagggctggtcctgcccggcgccgacttcatcctgcccggtggtgctgccggcgagccctgctacgactatgcgcgcgcctttcccggcacgacggtggtcctccgccccggtcaggaagaggtgcgtctgctggcgccgacgacggccctgcggctggcgcacacggattactccggatacagccggggcggtaccgcgctgctctacaactatgacctgatgggcatgcgcaacgaaagccagggcttttcgtcctcgaacttcatgttcctcaactcggaggcgggcctcaacagtggcgactggatcctgcgcagccgctcctatgcccaacgccagggacagacggggttccgcaaccgtcatctctatgcctatggacaacgcacctggccgggcatgggggcgaccttgcagggcggacagatcaacatcgccaattcgctgctcacgggagcgcctttgaccggactccaactgttccccgataccgccctgtcccgccaggatcgcaatatcgtcatggtcgagggcatcgcgcagtcgcaggcccgagtcgaggtgcggcaggcgggcgcgttgatctattccaccgtggtgccgcccggtcccttcgtgctcaccgacctgccgctgctgaaccacagcagcgatctgaatgtcagcgtgatcgaggcggatggcgcgccgcgccatttcgtggtgccggcggcgtcgatcaatgccggttcgctcgatcagcgtccgggctatgccttcgctctcggtcgtagccgcagccaggatggcgatgatgcgcgcgaaccctgggtcggtagcgtcagcggaagccgggcgctgggccggcagaccaatctgggcctggccgcgttgctggcctccggctatcgggctggaagctgggggatggatacgcgtctggggcagaggaacagcctgaaactgcagcagcgcttgtcgcaggcgacccagggcggcgggaggcgtgggacgcagatcgaggtgtccgggatagtcggcagcctgggcgaaaacctcaacctgagcttcagcagtgcctatcagaccagtggctaccgcgccctggaggacttcacccaacggatcgacggttcccaggtggctgcgcgttaccgccgccagcattccttgtcgttgggttggctcgatcgcagcctgggcggtttcacgctgggctattcgcaggccagcctgcagaatggcgaacgttcccggcgcctgaacctctcctggggcaagtccttcgccttcgcttcggtgtcgctgagcgccgagcgcgatctcggccatcgacgccgggacggctatggctacggagaaaccgaggcctcagccagcgcctactatctctcggtgagcatacctctcggcaagcgcagcgtgcgttcctatgcgcggaaggcgaacggctatacgcgctttggcgccagctataacgaacaacgcagcgaagcgctgaactattcgctcagcgcggagcgcgatactcgcgagcgcaacaatacggtttccgcccaagtggcggcgattccgaagtacgcgcaactcaacctcggcttctcggataccgccaatgaggtccgctcatattacgccggcgcttcaggggggctggtggcgcatgccgacggggtgaccctgtcgccttatgcggtgcaggacactttcggcatcgtatccgccgccggcatgcccggagtgaaggtcgccaccccgcaagggagcgtctggaccgatccctgggggcgggcggtggtttcgcagttatcggcctacagcagcagccgggtcgaagtggacacccgaaccctgccgcgcaacatcgatatcaacaatggtttccgtctggtggacgccgggcgcggctcggtgaactggatcgacttcgacctgacccaggttcgccggctgttgctcaatgcccatgattccgacggcaaggcgttgccggctggcgcctatgtgctggacggccagcagcagtacgtcggcacggtactggaacagggcctggtgtttcttggcgacggtttggagaaggaggcgctgacggtcgcgctgcctgatggccagcagtgtgtattgcgttatgaactgccggacgagaccgatccggacaagttgttcgagcgcgcagatgccctctgcgtgcttcagtga

SEQ ID NO: 363366 - DNA, 573 bp, Pseudomonas aeruginosa
atgcgctttcttgggttttgtctgcagaacatgccgcctgccttttgggccgtgggtctgctgggtagcgcgatggccgcggagaactgccagttgcacatcgctccagcggtcgccgactacggccagcagtatcggcaaacgatactcggactgccgcccgtggggggcggccgctcgctggggcggcgggagatgacggtgcaggtggcttgccgggaaccggtcgagctcgctttgttcctgcagggggacgggggcgctgggcgcggctaccgactggatccccagggactgctggaactgaccgccgagcaagccatgctggatggccgtgcagtggctcttggcgtcgtcgagcagagagggcaggttccttccgagtcggtggcgagcgttacattgcagccgggcaaagggatcgcgatagtggaacagggcttgcccgcccggggcagtcggttgacgctgcggctcgtcatggatgtacagatgccggtggagagcctgacggccatcggaggcgagatggcctgggtgggcaacccgatgctggaactggtggagcgctga

SEQ ID NO: 363367 - DNA, 567 bp, Pseudomonas aeruginosa
atgaacatgttcaagcgtagcgttcttgctcccctcgccgtttccggcgcgctcatggccgtggcttcgccctccgcgttcgccgccgacggggtggtcaacttcatgggcagcatcaccgatgtgatgtgcgacatcaacggcaaggccccgggcgaaggcaacgttacccaggtcaacctgggcaccgttgatcccgctatcttcaccgccgtcggtaccgcttcgactttcgagaacttcgacctggtcctgtccggcccgggctgcaccaacgacaagaaggcctccatcgccttcgatacctcgaccaacgtggatcaggctaccggcaacctgaggctggtcggcaactcttcggccagcggcgtgcagatccagatctacaacaatgtcggcgctggcaccaagattccgctggacagggtcgagacctcgccgcagcaggcgaccatcgccaacaacaccgcgaccctgcgctacaaggcgtcctatgtctccaccgctgccaccgtcaccgcgggtagcggtctgtcccacatccgctacgtggtggcgtacgactaa

SEQ ID NO: 363368 - DNA, 756 bp, Pseudomonas aeruginosa
atggcttcgctgatacaccgtcgtttcctctctttcgttgttgcggcgggcgtcgtggtcttcgccctgggcgctggtccggcgcaagccggactggtcgcccagggcacgcgcctggtgtttcccgacaacgagcgcgagatcaccctgcgcgtcaacaatacttccgatacgccgttgctggcgcaggcctggatcgacgatgggcgccaggacgtaccgccggagcggttgggcatgccgttcagcatcacgcccagcgtgacccgggtggagcccggcggcggcatggtgttgcgtatcgcctatctcggcgcggccttgccgaaggatcgcgaatcgctgttctggctgaacctgctggaggtgccgccgagggacgagagcgacgagaacgccctgcagttttccttccgttcccgcctcaagctcttcttccgtcccagtcagttgaaaagtgtcgagtcggcacccggaaaactccagtggaagttgctcgaaagttcgtcgggaagttccgttgtccgcgtcgaaaatccaacgccttattacatttctttttcaggcgtggaactgctggtcggggggcagaaaatatccgttggaaaaggcatggtctcgccgctttcccggaaagacttcaacttcgactggaagagcagaaccccgatcgatcgcaagagcgcttccgtccgttatgaagtgatcaacgactacggtggccggccctcgttcgaacgaacgctcggcccatag

SEQ ID NO: 363369 - DNA, 1233 bp, Pseudomonas aeruginosa
atgagtacaacgtatcgtctgttctcccaggaagtgctggatgacttcgtgggcatgctcaaggagtggcccaattcctattatgaaatcgatggggcggagtacaccatcagccctttcctgaccttttatttcacctacgcgccagataaggcagtggaaacttcattggccatgatagacatccatgaggatttcgagcgcctgctcggccatccgtacaaggtgcagactcatcctgattcttcacgtccgcacccctatggttccaaacggctcggagacttgcgtgggtgggcgcgcaagggccgagttgataagagcttcgttttcaactttacagacgacaagaactatcgaaactccccgacccatgcagggtatttctggcgaagttcctattttagctggagcggaattgactactcatcaatccagttctattaccgatggcaatggtggctggacaaccaagatgcctggcgccgcttcgtacagaggacgatagagcgcctacggcccgagcaggtctatagcggcttcgccatggccaacccgctggagttcggcacccgttccgaggtcacggtatgggaccgggcattgactccacacttctatgggctggataccgactatccatacggtatgactctcgccccagacctgccctcaggtctgcgcccacccacctgggggttcttcctgtccgacacctggcgcgagaagctcgccatcgaccgccaggcggtgcggaccgcattggacgacccgcgcattcgcatcgatgagctgaacggcggtcagtggattgaactggggccgcaaccggagctatatcccgtggaagacggtgtgcccgaactgccggtcttgctgaaccgcctgttacgccccttgcgccatacgcgcctggacctgctcggtttcggcgaatgggatggcgaccccaatgagcgcttcaacctgcccgatagccagcgctggctggcgcgcttcgatgagggcagcgactggccgagtgcggcacagcgtcaccttggttcggcggctccgcgcagcgagccagcgccaacccatatcgccgccggcgaggtctgcccgcgcgctggcttttggttcacgcggaccaagcacggttcacgccggcacttcgagcagggcgagaggttccccgccattcccagtgaaactaccttcggacagaccctctgggaatgggacccaaactaa

SEQ ID NO: 363370 - DNA, 846 bp, Pseudomonas aeruginosa
atgccagctccagtcgctgcaggtgctgcaattgtctggggctatcgtgcctaccggacctatcaagcctacgagaccgcgcagactgccaaggaagcgctggaaatggtgcgcgatatcgccaagcgtaaagaagaagtcaagcaggttctcaagagcaccattgatagtttttccagggaaatcgacgaaaaaagctcaacctttgccaaggtcgatgcggggggacgcagcaccgtttcgcgccgaggcaaggaaggaacgacctacaaggagtacatcgagcgcaaggtgcctttccggtctgccatcagcatcgcgtgcaactgggcgttgtcctcgcccatcaaggtcccgcgacggatccgcaagaagattcccggcaacgtcgtcgagaccaccatcgaggttgctctgaagcaaaccacggcctcgctgatattcgaatccatcgacgacgccctggaatggcgcagccccctgaaagccgaaccgaactacttgggcggagcccccttgctgggagagccctccacccgtccaaagcggatcagcgagttgttcccgttctggccgcggccacgcggcagcctggcgccggacctggtgattgtcgaataccggcagcagccgttccatgtgtccaatgtgtttgcggcggtggaaatcaagttcccgagggattgggtaaatccagatcaattgaggagctatgtcaatcttatggggcgagacaagaggaaagtcgctttgctgcgtgtcccagaggactgcacaggctaccaagccggtgatggcgatgattccaaacaatcgggccgtaccggtggcaaaggaaggaagtag

SEQ ID NO: 363371 - DNA, 2631 bp, Pseudomonas aeruginosa
atgcccacccagtccgatttgcgcttcaccttcgccgtcggcgccaccgacttcgaggtcgtgtccttcaccctcgacgaagacctctccgagacctaccgcctgaccctggagctggccagcttcgacgccgccatcgacttcggccaggtcctcgaccagcccgcccacttcaccctctggcaaggcgggcggcccgtgcgtcacgtctggggcctggtctccgtgttcgagcagggcgacacaggctttcgccgcacccgctaccgcgccgtggtcgaaccgcgcctggcccgcctgggcctgacctcggactggcgcatctaccagcagcgcagcgtcccgcagattctccaggccctgctcgccgagcacggcatcgaacactacgcccagaacctcaccgaagagcacctgccccgcgagtactgcgtccaggccggcgacaccgacctggacttcctgctccgcctggccgccgaggagggcctgttccaccgcttcgtccatgacgaccaaggcgtgcggctcatccacggcgaccgcctctacatccacggcgtcatcgacggcggcccggtgcgctacaaccccacccccggcggcgatgcgcccgagccggcgctgcgtcgcttcacctacaccgagcaggtgcgcaccgcccgccagacccagcgcgactacaccttcaccaacccgcgctaccggcaggagcacgccctcctgggcgaggacatcgcccaccaggacctggcctacgaacgctacgactaccccggccgctacaagcgcgacgccgcgggcagccccttcacccgagaccgcctgcgcggcctgcgccgcgacgcgcgcctcgccgtggtcgagggcgacgacccgcgcctggtccccggcgtggccttcaccctggacggccacccgcgcgcggactggaaccacggctggcgcccggtgcgcctgcgccacaccggcacccagcacaccagccaggccgaggagggcgccgacgcccaacagggcacccactaccactacatcgccgaactggtccccgaccgcctcgagtggcgcccggccccgcgcccgcgtccggtcatccccggcccgcaggtggccaccgtggtcggcccggccggcgaggagttccacgtcgacgagcacggccgcgtgcgcgtgcagttcccctgggaccgccagggcaagcacgacgaacacagctcctgctggatacgcccggcccacgcctgggccggcacccgctggggccacatcgccctgccgcgcatcggccaggaagtcatcgtcgacttcctggacggcgattgcgaccaacccgtcatcaccaaccggctctaccgggtcaccaaccccaccccgtacacactgcccgagcaccaggtgctctccaccatcaagagcaaggagcacaagggcaaccgtgccagcgagctgcgcatcgacgacaccacgaaggaaatcagcgccgcgctgatgaacgaccacggcgccagccacctgcacctgggctacttgacccacccgcgcccggacggcggcgccccgcgcggcgaaggtttcgagttgcgcagcgacctgcatggcgcgctgcgcgcggcccagggcctgctgctgaccaccgaggcgcaggccgaggccggcggcgggcagctggaccggcaggaggtggtggccaccctcgaagcggcgctgcagttggcgcgcaccctgggcgactacgccagtgaacaccagggcctggctcacgacgccaagccgcggcagaccctgaccgaagcggtgcgcgcgatgggccacggcgccaacgaccaggccagcggcgacggggacggcagcgagccgctcatcgcgctgtcggcgccggccggcatcgccgtgggcacgccgcgggccatcgccctgggcgccggcgaacacctggacgccgtggcccagggccacgtgcaactgacctcgggcgaacgcaccgtcatcaacgccggcaacggcctgagcaccttcgcccagcagggtgacatgcgccacatcgcccaccagggcgagctgctcctgcaggcccagcacaacagcgcacggctggaggcggagcagagcgtcgagatgaccgccagccaaggccacatgttatgggccgcgggcaagcgcatcaccctgatgtgcggcggtgcctacatcgagatgcaaggcggcgacatcgagatgggcatgccggggctcttcatcgtcaagggcgcttcgcacaatctggatggtgcctctacaggtagcgccactctgcccctgttcaaagcgccgactgttggcgatttcgaagcccgctatcgcatgcgcaagacggacgaacgggcctttcaggggtaccgctacaggcttttaagccagggacaattggtcgccgaaggctggactaacgacgagggagaaaccgaatccatagagactgagagcccacggttgctacaggcctacaagaccatcatgcgcgatgaccagcgcatcaccgaagactggttgtcgaatatagaagttcttgatgagtccagaccgcacaaggacgccccatcacccttcgccgacgacttcttggatgaatatcagcaggaggatatctaa

SEQ ID NO: 363372 - DNA, 702 bp, Pseudomonas aeruginosa
atgtacgctgtcttcggactgaaaaaaattctcactttcattaccggattgattgttctggtaatcatcgggttaatgttcaaggaatcccctaccgatattttagagtttggcaagacggcctggaaggttgcctctggcgttgtaacagccttcatccttatcggaagcataccgttctgctatcgatgcgtttggaaatgctatgaatttgtctttagaggtgcatatccagacctgtctggagaatggaaaggtactgttgaatctaattattcagttcatcgagctattcaagcagcagcatcctcaagtgatacattgaatccgtttgatcctaaacaaatagactcgataccacttgaatctttcgaagcaaagctgaccattaaagctagccttctaaaaatcaacatcctcatggaagtacagggtctgaccgataagtccgactcatacagtattgctgctgcaccaatcgttgcacaaaatgacgaaccgcatcgacttgtatacatatacaaatccaagcactttaagaaagcttccgatgatgagtcgaatcataccggcgccgcagaggttcaagtgagatgcaacgcagatggaaagctggagatgactggctactattggactgcgcgaaattggcgccgtgcaggaaacactgcggggattctgagcttcgttagagaggactaa

SEQ ID NO: 363373 - DNA, 1200 bp, Pseudomonas aeruginosa
atgccgagcctcaatctgcacagcctgcttgatacgcgggtcgaaggccgggtggccttcctcgataacctgactcttgcccctgaagaacggaagctgatgctcagtgcacgtactgacatccggcagcgcctaaaggcccgcctgccaaagcggatccagaagaaggccgaagacgctggccaaggtcatattgaagtgcctgaacccaggttctttacccaagggtcttgggcttacaagacgctcaatgccccttgccgtgctccccaacaggctgacctggatgacggcgcctacctgccgtttagctacattgaaagccagccaccggcacagatgagcgcactactcttcgaggcagtcgaggagatcctctcggagcttgcggacgataaaggctgggagattgacaccagcaatgacaattgcacccgcctgatcattgaccgtaacaagcatattgatgttccggtttacagcatttccgataacgaattcgagacgcttgtaaaagcaagcacggagatgtatcgcttcggtttggagcatgcgaccttcgatagcgccgattttgcagagcgtgccgacgaacaagagtggcaccttatgccaaccgaaggtgtgctgatggctaccaaaaatcgtggctggcaggattctgatcctcgtcctgtacgcgactgggtggttgaacaggttgagctgaagggggaacagcttcgccgagtcatgcgctatctgaaggcttggcgtgacttccagaaatgggacaaggatgatcccaagtcgatcctgctaatggttgccgcggatgctgctttcgatatggcaaccgaaaagcgcgatgaccttgcgctgctgaaggtagtccggaggttgccggacatccttcgcggacaagtgatcaatcccgcctccagggacaaacctctgaacgagcaggaagatttggcaaaacgcttggacaacaagggcattcgagaagacgtcatcgccagaatcgaacattttgccgagcagcttgagtatgcgatcgacacctgtggaatcccgtctaaggcctgcgagattttgatcgagcttctgggcgatcgtgttccgaatgatccggaccgggtgactcagtcgacagttcagagccagcctgtccagaagaccgccgcggttcctccccttgggaaagctacggcgggctga

SEQ ID NO: 363374 - DNA, 1719 bp, Pseudomonas aeruginosa
atgactgagttaagttccgtccacacggctctgactgaaaggggcttctcgcaagttagaggccccctaggtccccggtatgttgggaccatttcctttaaaggacggcagatcccaattcacctagacatctttgacaagaccctcaagcggctgcctgctatccagctgcttgaacgccctacagagataccctcgatctgcgcccatataaatcaccttggctatctgtgctatctgcgcgacgaccaggcccaccttcctcgacacaaccttgggggagccgttttaggttgcctggaggttgctgagcagctattggaaaggctcgccaatggtgatgctctaacagatttccaagacgagtttccggtttactggggcggacttccgctccttatcgatattccggaggaaaccaagcctggcctcctcagggacgttgctctgctggagcgccccaaaacgcctgaaagcgactaccttttcttgctaggccgagacgcttccgaacttctgggcttgtactctcgttggggattcaaggttctaaggccttccctgaagatgagggtggtagattctgacaaaccgctcggtgccatggcgtcgacgtggcctcccaagacacttaccgatctcaagatatggctgctgagtgacaaaaactctgcagtcaagggcctttatgagtccgtcaaagacgcctttgagcagaaattagacaggctgcttcttctaattcgagctccaaacacgagctgttgcgttctaatcgacattgagcatgtcagaaagatgctaccgtgtcgaaatgcagctgatttcatgcgttcagtttttagatcttcagaaaagactaatcagtttgggaagaaagtaatcaagtctagggctgataaagccacagttaccagacttgagccgattcctgccgatccaagatcttggcttacgcgcaacatgcctgactcaaaagccgggcttgcgggcaagaatgtcctcttgatcggatgtggtgcaatcggtggtcacttggccgatctcctcgcaaagagtggcgctggatttctaggtggaacactgatgctttctgacccggatacattatcagtgggtaacatcggtcgtcacgtattaggctttggcgatctcgaacgcaagaaaaccagtgcaatcagacagcagctatttggccgctacccaagaatagaagttatagaggtcacggaccaggacgtgattcgagcagggatggcggggatagacctagtggttgacgccacaggaaaccaagcgctttcgctatatttgaacgagcttaagctaaaagaaaaattcgacgcacctattgtcttcgcttgggtggcaggagcaggttgtggggcgcaagcctaccttttttcaaacgccaaggatgcatgcctaaactgcttggactatagcgttccaggcggctcctcttctgtgatgcggaaagagtacgaaatgacgcttaagaactctgccggaagctgtggagactggcttgtaccattttcggcaacagcagctatgcacgctgcggcattagctaccgatttagcggttggatgggcgaaaggtaagccgaaccctcgttttaggagcatcacgttggactacgagggtggaaaaactgtgaagcccatctcaccaacgcctaacctcaagtgccccgcatgcgccataagtcactaa

SEQ ID NO: 363375 - DNA, 258 bp, Pseudomonas aeruginosa
atgactacgaccgagcgcttggcgcgctttgaagctgcgcaagaggtccttggattcctaatggctgttcgcgctgaatggatttacatcgaaagcaaaaaggctcaaccggacgctagcaaaatcgcccagtgggaggccgagcaagaagctttcttcgagatcgaggatgggctgcgttttgatgatctggacggcatcgagcaggtgatcacaacgtatggaccggtagcgcggagaattttcgaggcgcgatag

SEQ ID NO: 363376 - DNA, 939 bp, Pseudomonas aeruginosa
atgcatcaagtggatataggttcgatcgacctcaatctgttgaagctgttcgacgcgcttatgcgagaacgcagcgtcacccgggccggcctgcgcctggggctgagccagcctgccgccagccgggcgctggcgcgcctacgcctgatgttcgcagacagactggtggtgcggggtcgacatggactggagctgacgccacgcggcgaacaactggcggggccggtgtcgaggctgctcgaagacgcacgcagcatcatttcgcccgcgaccttcgagccggcgatggctaccggacaggtgaggatcgccgcgcatgaccacctgggcctgctgatgctgtctggactgatggcgcgactggaacgccaggcgccaggattggctgtgcatgtcgagccgccggctggcgacaacatccagttggtcgagcaaggacaggtagacgttgcccttggggtctacgagacactacccggcagcctgcaccagcgaatcctataccaggaccgcctggtgtgcatgctcggttcgaggcatgcaacgtcgatggggcacctgaccttgagccagtacacggcaatgcgtcacgtggtggtgaccatatccggaatgggcgaaagcgcggtggatatcgccctgtcgaacctgggtcggactcgccatatcgcgttgcgaataccccacttcctggctgcggcgatgatggtcgtggacagtggcatgctcctgaccttgccgggccggttggcgcacctcctggcgaagtccctgccactggcagtgttggaactaccgctgcaggtagcccccctttcgccgtcgatgatttggcacgaacgcttccagggcgacccagcccatggctggctgcggcaacagttggttgaagtggcgggttcgctggcgacaggaaccaagcttccgcgcaaagcgtga

SEQ ID NO: 363377 - DNA, 942 bp, Pseudomonas aeruginosa
atgagcacttatccttatgtcgttttcggcgtgagcgggcgcacgggcgccgctgccgccgatgcgctactgcatgcggggcaacccgtgcgcgttgtcgttcgcgatgccgccaaaggcaagccgtgggctgagcgcggcgcagaggtcgccgtggccgacgtgacggacgttggctcgatgaccgaggcactgcggcgggcccgtggcgcctatgttgtcagcccgcaacactacactcgcgatgatctgttcgtgctggcggatcgagttgccacgacgattgcacgcgccgccagggctgccgacgtacccagacttatagcgctctcctcgataggcgcggaccggaccagcggaacgggctggattgcaatgaaccgcctgctcgagcagcgattgcaatcctcggcaatacccaccaccttcctgagggcggtctatttcatggaaaactggacttcgttggttgcgcaggctctccgcaccgggactttgccgagcttcctggggccgttggagcagcgtttccccatggtcgcgacacgggacgtgggccatgtcgcggcggatctgttggtagaggaggaggccgcgagtgacgtcgtcacgctcgaagggccgcaacgctacgctcccgccgaggtttgcgcggcgatccaggcggctaccggtcggtcgctgggcgtgcaactgctcccggagccggcttggcccgatgccctggcgcaaagcggtttctcgcaagccgccgtcgccgggttcagcgaactgacccgtggcatcaacagtgggcacatagtcccggacagcgacccctatgcggagcggcgggtcgggacgacggcgctcacggaggtgattgccaagctggtggctgatctcgccggccctggcgcgcatgcccgccgggcatcggcagggagcgctgcggccggctag

SEQ ID NO: 363378 - DNA, 351 bp, Pseudomonas aeruginosa
gtgctgcggccgggcggcaagctgctggcgagcttctacaacccggcgctgttcatcgaggactgctcgccggaactggcagagcagggcctgatccggccgcgacatcgcctgccctactccgacctggaaagcctctccgccgaaaccctcgcggcgaagcgcgagaaaggcgaagccctggtgttcggccatagcctgacccagcagatcgccggccagctcgccgccggcctgctgctgcaggatttctacgaagactggcaaccgcacccgcgcttcgtcatcgaccgcttcatgccgaccttcctcgccacctgtgcgctcaagccgtaccccagcgcggcatga

SEQ ID NO: 363379 - DNA, 378 bp, Pseudomonas aeruginosa
atgcgaagcttgatcgttgcctgcctggcgctgagtgccaccggttgtaacaactggtcgctgaacagcgacctgaacggggcctaccgcgcctacgacaaaggcgattgcgcacaggtgatgctcgacctgtcgcgggccgaacggcggattcgcgcgcggccctacctgcagccggaaatctcgctgctgcgcggccagtgcctggaacgccagagcctgttcgtcgacgcggcgcagacctaccacttcatcatcgcccgttaccccaccagcgaatatgcctaccgtgccaaggcgcggctggagacgttgcgccagttgggccggctgagcgagacgccggcctcggccagcgtcgtgccgacccgcctgtag

SEQ ID NO: 363380 - DNA, 1401 bp, Pseudomonas aeruginosa
atgaaactcacgctcacccctcccctgacccccagccactggatgcgctcgaccgacctggccgacgccgcctgcgcgcccctcgtcggtacccactcggcggacgtggcgatagtcggcggcggtttcgtcgggctctggaccgccatcaccctcaagcaactggaaccggacgcacgggtcctgctgctggagcaggacgtctgcggcggcggcgcttccggcaggaacggtggtttcgtgatgtcctggtggccgaagatcggcaccttgctgggcttctgcagcgaggcgcaggcgcgcttccttggcgaaagcgcggagcgggcgatccaggaactcggggagttctgcgcgcggcatgacatcgatgcgcacttccagcagaagggctggctgtggaccgccaccacggcgcgccacctcgacgcctggaacgataccctcgccgcctgcgaacggctcggcgtcagtcccttcgaacgcctcgacgccagcgaagtggcacgccgtaccggttcgccggtgcatctcgccggggtcttcgagcgcagcaatgccaccgtgcaaccagccttgctggtgcaaggcatgcgccgcgtggcgctggccctcggcgtggaaatccacgagcgctgtggcgtcagccagatcgttcccggccagccggcgcagctgctgagcgccggggcccgggtccaggccagggcggtggttctcgcgaccaacgcctggtcggccgccctgcccaggctctccaggctgatcgtgccggtgaacagttccatcgcggttaccgaggcgataccgcaacggctggagcgaatcggctggaccggcggggaagccatcaccgattcccaactgatggtggactactaccgcaccacccgcgacgggcgcatcgccttcggcaagggcaccggcgccatcagctacggctcgcgcatcggccgggtattcgacgtcgaccgggagagcctggccctgaccgaggccgacttccgccgcacctatccctcgctaggcgacatcccgctggtcgacggctggtccggcccgatcgaccgtacctacgacagcctgccggtcttcggccgcctgcacgagaacatccactacggcatcggctggagcggcaacggcgtgggaccgagccgcctgggcgggcggatcctcgccagcctcgccctcggccgcgacgacccgtggagccgttgtccgctggtggaacgccgctgccggagcttcccgcccgagccgctgcgctacctgggcggctccctggtgcgccacgccgtcctgcgcaaggaacgcgcggaactcgccggtaccgagccctcggccaccgaccgctttctcgcgcgcttcgcccccgccggccttgaagacaaatcctga

SEQ ID NO: 363381 - DNA, 687 bp, Pseudomonas aeruginosa
atgtccctcccccctctgcatgtcctgacgattggcctggtcatcttcgcccatctccccgtcgcccaggccagcgacgacggtccgtacctcagcctgctcggcggaggcaactgggtggccgaccagaacctgcggcagaactccctcgatttcgtccagatgagctacgacaaccccctttcgtccggctacgcgctggagctggcgctgggttggcgcaggccctcgggcctgcgcccggaactggccctgagctaccgcaagaactccctcggccgcttcgagcaccgggtctacgagaacggcagcagcattaccgggaaaggacaggaggccgccagcagcctgatggccaatctctggtacgacctgccgatgccggacgccctgtcccgcgtcaagccctacctgggcggggggctgggctacacccggctgagcatcgccaacctgtcggccaacggcgtcgccttcggcgccacccatcgcgacgacgtgcaaacctggcaactgggcgcgggcatcgtcgtggccctgggcgaacgctggtcgacctcgctggactatcgcgacctgcgcacccgccaggcccggtttggcgaagtccaggggctgcccaacggagatgtcagcacccgttaccatgcccgctcggtactgctcggaatacgctacgtcccctga

SEQ ID NO: 363382 - DNA, 456 bp, Pseudomonas aeruginosa
atgaacgatctcgccgtggaaatccgcgttcaggcccccgacggggtcatctgggcgctctggagcgaccttcccgcctctcctcgctgggacaccgatgtccgccagtgctcactgtacggtccgttcgaggctggcagcgaaggcctgtgcatcctccgcaacggcctgcggatgccgctgcgactggaagaggtggtgtatcgccaaagctatcgcaacagcgcccggctgctgtggatacacctcagcttctcccaccatttgtaccgcgtggctcccggggtgacacacgtggtccatgccgcgcgcgtcacggggcgtttcagcatcctctaccgctggctgctcgtcggcgtgctgcgcacggccatgggcaaggcgctgcgcaacctgcgcaacctggccgagcagcccgccggcgagaccgtgccgacgccaccgagcccccgctga

SEQ ID NO: 363383 - DNA, 3393 bp, Pseudomonas aeruginosa
atgacccgcagccacgacgaagcgtatgccatcagcaccatggcgggccgctttcccgccgcagcggatcccgaagccctctgggacctgctgtgcagcggcggcagcgcgcccagccagtccctgctgccgcgctggcagatcagccgcgagagcatctacagccccatcccgggcgagcgcgatcgcgtgtacctgtatcacgcccactgcctcgaggacgctggtgctcttccgccgccgaacgcaggccggcagttggagatcggcgaacaggtgatcggccgcctgctggaacaggccggcgaactcgaacgccagcgctgcgcgctggtggtcgcgacgtcctggagcgacgagagctttttcctcgccagcgtcgcccccggccccgccgacgccgggcatacgcccgccgagcagatcgcccggctggctggcaagcattgcctgggcggtcccgcgctgagcgtagacaccgcctgcagctcgtttccctacgccctggacacggcgtgcggcctgctccacagcggccaggccgagcaggtgctggtcatggcgctgaacaccttgatgccgccggcgctgttcctgggcttttcccaactgaccgcgctgtcgccccgcgctcgtctccaggccttcggcgccgaggccgacggcatagtccccggcgaatgcgcggtagccttcctcgtcgaatcgacctctcgcgccctggccgccgggcggcagccgctgggactcctgcgtgcgataggcgtatccgccaacggcgccgaaggctcggtcttcgcgcccggtgaacaggcccagcacagcgcctatcgacgcgcctggaacggcctcgacccggccaccgccagctacatcgaaagccacggtaccggcacgccgctgggagacgccaccgaactggcctcgctgcacggtttcttcggtgcctacgttgcgccaggagcgagcctgcccctgggctcgatcaagagcgtcatcggccatcccctggccgcggcgggcggtcccgccctggccaaggtgctgctgatgctccgtcaccgcagtctgccgccgcgcctcgactacccctgcgcgcccggactcgcgaaaacctgcctgcggccggtcgacacccgcccggagccgctgcccgagcgcgaccatgcccatctcatcggcctctccagcttcggcttcggcggcgccaacgcccatgtggtgatcgaggaatatcgcccgcgggacgaacccgcggcaatgccgccggccgtcgatccggtgctcaggctcgacctggcgatagtcgacgccgaagccgtactgagcggagccgcctcgctttcggactggcaacgccagctggaaggcacgagacccgcgctgcgcgccttcccccaagggcgcttcggcgagagcctggcgggacagcccgagttgcaagggtatttcctggcggaagagcggacgatagacatcagcggctacggcatggggccaaaaccgctgggccatgtcgatcccttcaagctgctgctcgccgaccgcgtcggacagctgctggctcgcctgccgggcgtggccggctcggacagcagcgccctggtcatgtgctgcaatatgggtggagaacgcttcaccaatgcctacagcgccgccgagcgcgcctaccgcacgggggccggcggcggccccggcatcgaagtggccgacgtcgcgagcatgctgccatgcatgctgtccggctacccggcaaagctcttcgacctgcgcggtttccaccagaccctggcgggcaacgccgggttgctctggcaggttctgctgctcgcgccgcgctggcttgagcggggcatcgataccctgctgctgggtgccggccgcttcatgagcggagcactggaagtacagcgggcacgcgccagccgggtgatgcaaggcgaaggcctgggactgctggcgctgcgccactaccgccacgacgctccgcagccacccttgctgcgcctgcacgcggcgttgcccggcgacgccgcgggcgatgccgggcaagccggccgcctgctgggcacggcaaccggtgtcagcgtgacggtctgccagctacgggaggaccgcgccctgcaggaggaccccatgcaggccgccaccggttacctggccgaagccagcggcatcgccaccttgctgcaggccatgctggccggggcggccgagcgcctgatcgaagtgcgcgacggccaacgggtggtgctctggctgcacgccgagcgtctcgcccgctggagccaggcggaaacatcggctcccgccaaatcccccctgaccctgtgtttcgccccaccgacaccgcgccagccgaacgccgtccctgccggaaaccctgcggcgccaacccgccgggccggacagggcttcgacccggagctgctgagcgataccctggcgcggacctgcctcgccagcctgcaactgcgccaccgcgccctgcaggccctgctgcaggcgggtagtcccggcacgcccctggtggcggaccggcagtggcaacgccagccacgcaacatcctcatcaccgcggtccaccgtgacagcccacagcagttacgcgcgaccctgctggtcgacgagacgcatccctatttcttcgaccatccgctggaccacgtgcccggcatcctcctgctcgaagggatcctgcaattgctcgagcatgccctgccgggcatctgcaccccggagtggttcgtcgacagcctggaaacccgcttccagcgctatgtgctcaaggaacgcccggtgctcgtcgagctgtggcagagcgccggagcgcagcgctaccacgcacggatcacccaggacggccagtcgatgtgcacctgcgagctgagcgttgcacgcgccccgcgtcagacggcggccgggcgcttcgcccgggaagcgccatgcacgcgccgcgagtggctgcacaaggcccgcgaggagaacgtcttggttggcgacatcgaccggcaggcgcgggtacgcaccctcccggtgcccgcgggacagttcttcgaggatgggcaccggcaataccactcgatggtgtatttcctcgaggtggcgcgccaggcgtacatgcagatcgctcatggaatcctggcgataccctgcgggacgccgatgaacctgctgatcctgagcttccgcctggacagcccgctgctgcgcgaccagccgcttaccctggcgccgaaggacgggcccggcgacctcgtggccggcaagaccaagcgcatcgtcatcgaactgcgcgccgccggccgattgctcggcgaggcccgcctgacagcccaggttctcgacgaagaggccaggccggtccagcctgccgacgaggtggacgcatga

SEQ ID NO: 363384 - DNA, 1041 bp, Pseudomonas aeruginosa
atgcctatgcgtacgacaacatccgacaacgtggtccgggacttccttgtctccaacagccggatagctcagggctacttcgaactgtcgggaaagatcatcgactccctgggcgaagcgccggactaccgggaagcactgctgacccggctgctcgatcagaccatggcgatgaccgagcgctacctgctggtccatcagcaggtgctgcacgacctctatccgagccagaccgggacccccgcgcacctgccggcacctgcgcctgagccggcggcgccagcccgggccgccggcgacggccagcgctggctgcgcgcggaaatcagtgcgatcaccggcgcccagcccgaggcgctcgacctgcaccaggcgttcgccgacctcggcgtggactcgttgagccgggtcgacctgctcgacgcgatggccaggaacttcccgccgctgcgcgaacacgcggacgcgttcttcgacctcgtcagccctgccgacgtactggcgctgctcgaacgcccggcggcatcctcgggcaatgaagtacggacacgcgtactcacccacctggccagcctcaccgggttttccatcaatgacctggatccgcgacaggcctacgaagaacagggcctggactccctgatacgtctggacctcctcgacctgctgcgcggcgaatggccgcaactgaaggggcacgacagcgtgctggccgaaaaccgctgcgcagagcagaccatcgaacagatcacccggctgctggcggccgagcgtgtgggagaaaccgccctggcgaaggcgccgcccgtctcgccccagttgcaacgggcgcttaccctgatccacgagggcgatgccaacgcaacggacgccgaacgctctttcgccgaactcggactcaacggcttcgaccgcgccgctctgtgcgccagcctggcccagcaaggccaggccggcgagttcgccggcgaggccctgatgtcgcgtcgcaccccacgggaagtcgccgcgctgctcgcgcgcatgagtgaaaccccatga

SEQ ID NO: 363385 - DNA, 1773 bp, Pseudomonas aeruginosa
atgacccaacggcccccagtcaccccgccaacggccgcgcagcaccggcctctccccgtgctgatcgtcggcgccggccctgtcggcctgaccctggccgtcctgctcaggcagcagggcgtggagtttcgcctggtcgagaagaataccggcccgtcgcaggagaccaaggccatcgccatccactcgcgcaccctggaaatattccgcgccatgggcgtcgccgaacaggcggtagccaggggtttctccatcggccggttttccgtgcaggccgagggcaagcgcctcctcgactacgacttctccctgctgcaatcgccctatcgcacgctgctgagcctgccacagccggaaaccgaggcgcttctgctggagcgcctgacggcgctggggggacaggtggaatggaacaccacgctcaccgagctggcacaggacaaggatcacacccgagtgacgctggtcggtcccgacggccgcgaggaacacactcgcgcccgctgggtggcagcctgcgatggcgcccgcagcacgctacgcaagctgctcgggatgaccttcgccggggcgttctacgagcgtttcttcatgctcgccgacgccgacatccagtggtccggcagccagaacgagggcgcgttcttcctcggcgccgcgcagggctacctggccgtcgcgccgatcgacgagcgctcccgctatcgcctgttcatcgaaatgccctaccagttgccggacgacgagcgggaccgccctgcactgaccctggagaacttccagcgcctgtgcgagggccgcgggcagaacatgaccctgtccaacctctcctccaccaccctcgccgccttccagcatcgccgggtacagaagatgcgccagggctcggtattcctggttggcgacagcgcccacatcggcagcccgatcggcggccagtggatgaacctgggcattgccgaagcctacaacctcgcctggaaactggcgttcgtggagcaggggctcagccacccgacactgctcgacagctatcacgaggaacgctacccggtggcgctggaggtggagaacacggcgcaccggttgacctcgctgatcaccacgcaacagcgcgcgctggtctgggcgcgcaaccacctgctgcccctgctgacccgcggcaagaagatccagcgcctcctgccgaccctgatctccggccacagctaccgctaccgccccagcgcatacatccagtcgtcgctgaccggcaggcagcgcaaccgctggaaacgcaaaggctacccgcaccgctggcacggccgcgcgccagaggcgggagaattggcaccggacctcccgctctggcaagccgccgccgacgcccctgcgccgcacctgctcgacctgtttgcccaaggccacttcacgctgctgatcttcaccgcgaccgaccagttctcgccgcgcctgccggagtaccgcgccctggccgcaagcctggagggcgactaccccagcctgcgcgcgttctgcatcgtcgatgccctggacagcaccgacttcgccccgcagcagcgcaccctactcgaccccgactggcgcctgcaccagcgctaccacgcggcggcaggcagcctcatgctgatccgaccggacggctatatcgcgttccagggcctcgaaccgtcggccctggtcggttacctgcaactccgctcggggctgctcaagaacgtgaagccctcgcctgccgcagcgatgccccccctttcgcccctgcccgcctga

SEQ ID NO: 363386 - DNA, 612 bp, Pseudomonas aeruginosa
atgtccgctagccgctcgcgtccgacactggcggtattcgacttcgacggcaccctgaccgaccgccacaccttctggcgctacatgcgcttcgtcagcggcgcgccgcgtttctggctgagcctggcaggcctgcttccagagatcgtcggcgtgctgctggggacgactccgctgatgcaggcccgccggtcgctcatccgctgccacttcagagggctggccagcgaccgcgaacgtgcccacgcacgcgtcttcgtcaacgaacaactgccagcgtggctgcgccccgcagcgctgcgccgcctccgctggcaccaagccaaggggcacacgaccctgctcatcagcaacgctccggaaaactatctgaggccgtgggcgaacaccgtgggcttcgaccatgtctgcggtacccggctggccggcgggccgcacaccctgagcggcgacatcgaggggcacaactgcgtggacggcgagaaagtcgcacgactgcgcgcctgcgtcggcgacctcgcggactacgacatctatgcctacggcgactcctccggtgacgcggccctgttggccatcgccaccttccccttctatcgcaactggtactga

SEQ ID NO: 363387 - DNA, 1521 bp, Pseudomonas aeruginosa
atgccctccaacgcctcaatccagccgggcttcctgcaccgcttcgtcgctcttgcacaagcgcacccggagcaatgggcgattcgccacctcgatgatcccgactccgacctcacctacgcccaactgctcgaccgggcccggcgccacaagggcgccatgcagggcgcgccgggcctgcatgacggtgagcgggtagcgctgatcctgcccaacggagtcgacttcatcgccttctacctggcgctgctgggcagcggagcggtaccggtcattctcaattgcacgcttaccggccatgaaatggccgccgtgctccaggcatcgcaggcaagtctggtcgtcacccttgcggcaacggcgcggcggcacgcctcgatcttcgccgcccagggcatccgccactgcctgctgctcgacagccccgaggagagcaccggcttgccgggcaacgccgtcgaactgcgtcacctcgacgatactccggcagagctggtgctgcccgagggcaacccgctggccgccatccagtacacctaccgcggactggggcgtccgctgggcgtccggcaccgctacctagacctgacgctgtccagcgacggcctgcacgagcacttccacccccagggcgtgggctccgtgcacctggtgacgctgccgctgtacgcgatcttcggcctgtcggtgatgctggtgttcccgctgagcatcggcgccacgctgctgatgaccaacaccctgctcaagcgcgacctgccccggctgctgtccgagcaccaggtcagcttcgcctgcctggtaccggacgtgatccgctatttcaacggccgcctggccaagcgcaagaccgagcgcctgccgctgcaccctcggctgatgctgtactccggcggcagccatctgccggcggaagaaggggaacggctggcggaactgctcggttgcaaccccgtgcggcaaggttacgggctgaccgaaagcctgccggtactggtacagagttcgctgctgccaacctcgcgcggcgccatgggcgagccgatacgcggggtcgagctgcgggtggtcgacagcctgggacgcgacgtgcgccctgggcggatcggcgagttgttgctgcgcgggccgatgctgatggagcaatacgacgacgagccggaggtcactgcccggttcgtcagggatggctggctgcacaccggcgacctggtctggcgcgacgaagccgggcaggtgttcttctattgccagcgcctgcgtatctccaagatcaaggcgcagatgatcgacttcagcgagatcgagtccatcgccctgctccacccgcacgtcagtgcggccagggcctatgtggtcccggacggcagcgggacgaacgtcctgcacctggccatccaatgccgcgaggcggtgagcctaggcgagctgaacgccctgctggcgcagcatctctccggcttcaagctgccccgcatcatcgagctcgccgctcccgccgaggtgcgccatgtccgctag

SEQ ID NO: 363388 - DNA, 1035 bp, Pseudomonas aeruginosa
atggaatgcgtattcgtcacgggcgccacgggtttgcttggtagcaacaccgtacatgccctcctgcagcgaaagataaaagtcaaggccctggtccgctccctggaaaaggctcggcaacaattcaagtatcttcccgtcgagctcattcagggagacttgctggaaccggacacttacagccaacacctcgaaggttgcgacacactcttgcatacggccgcttacttccgtgaaagctataaaggcggaacacactggcaggcactctacgacaccaatgtgcagggcaccgaacgactgctgaaggctgcctatgctgccgggattcgccgcgcggtacatgtttcttcgattgccgtgctgcgtggccggagggatcaactcatcgatgaaagaatgtcgcgccgggaacaggatgccgacgactattatcgcagcaagatactttcggaaagagcggtgctcgcatttctgcaacaccaccccgacatggccatcagccaggttctgcctggctggatgttcggccccggcgacctgggtccgacctcgtctggacagttcctcctcgacttcgtccagcggaaactgcccggcatcctgcccggtaccttctccgtcgtcgatgcccgggatgtcgccgagcacctgctggcggctgccgagcacggccgcagcggcgaacgctacctggccgccgggcagcacatggacatggacggactgttcaaggtgcttaccggcgtcagtggtgtgccggccccccggcgcaaggtcccgctctggctgctgcgcctgatcgcaacggccaacgaattgcaccaccgggccacgggcaaaccggtgctgattggcacgtccaccgtcaagctgatcgcccgggaacagggctgcacccgtttcagccacgagaagagcctgaaggaactgggctgctgcttccgcccggtggagcgcaccttgtccgacaccctccgctggtacaaggaaaacggctatctccaggccagtcaaccaacgacagccgagtga

SEQ ID NO: 363389 - DNA, 600 bp, Pseudomonas aeruginosa
atgagattgggccgggaagaaaagcagcggctcacccgtgagaagctcttcgaggcggcgacggaactgatggtacggaagggctaccatgcggccagtatcagcgacatcgccgaacgagccggtttttccaagggcgcgttcttttccaacttttccagcaaggcggagctgctgctggccctgacgcagcgcttcaagagagtcgagatcgagcggctcgagcaggcgctggtgtcagccggcagcacactggcgctgcgccagggcgtggcggcctacatcgacagcctgaagcacaacagggcgtgcatgatcctcgaggccgaactgcggttgatcgccgcccgcgacgacgcattcgctcgccattaccacgcgcttcaccaggaaaacagcagagtgctggggaggttgatcgagcgcatcttcaaccatcgcggcaagcgttcacctttgcctcccgaggggctggccacgttgttcaccgccctatccgaaggcatggttctgcagggacacggcgatcccgcgcgggaaatcaagctggtgctggaggccctgatcgagcaggcgccggcgctgccgctggaggcatag

SEQ ID NO: 363390 - DNA, 915 bp, Pseudomonas aeruginosa
atgaccaccttcgctgcggtagtggaggcaggcagctttacccgtgccgccgaagcactggcgctgccgaaggcgcgagtgtcccagcgtgtctctgacctggagcatcatttgggcgtgcgactactgaaccgtacgacccgggccttgaacctgaccgaagacgggcaagcctatttcgccaagtgccgggtcatcctccaggaaatcgaagaactggaagaggcacttggtggcggttcggtggagccccgtgggcggctgcgggtcgaggcgctggtgtccgttgcccgttggctgatcgctccgcgtctgcatgagttccaggcccgctatcccggcatccaggtacacctgggtagtagcgaccggatccgtcatctactggaagaagggatcgactgcgccatccgcggcggggtgcttgaagactccagccagatcgcacgccatatctgcgacgtgcggttgggactgtatgccgcgccggcttatcttgaagccgcgggcaccgtcagccatccgcaggaactgtcccgtcatcgtcggatctcgtggtcctccggccaacgtgccccctttgcctggagagtggtatcggacagcggagtttttgaattgcccgccgaggacggtttgcaattcgacgaccctgatgtggcgatcgcctcctgcatggccggaagcggtatctgcccaggagcaccttttgcggtagaaggatgggtacgttccgggatgctggtgccggtgttgccctgctggactttccaggcccggccaatccatatcgtctatccaagcaacaagcatctttccgcgcgagttcgctgcttcgtcgaatggctcatcgagcttatgaagagtgacccaagcgtgcgcatgagtcctctagaactggctgaaagcctctga

SEQ ID NO: 363391 - DNA, 453 bp, Pseudomonas aeruginosa
atgctcaagtccctagcaagcgccgctgtgctttctctggctgctatcagcagcgctatggcccaggatcttccgcgctcccccagcgaggttccacaggccttcgagcgccatttcaatgcaggcgaccttgatgcgctcgccaagttgtatggcgaaggcagcgtcttcgttcccactcctggcgtgtcattggcgcagagcgctgaaatccgcaacgccctgacgcaattcatggcctcgaaggtcccgatcaaactgactattcggcaggtctatcaggctggcgatacggcgcagatcgtctttgactgggtcatgcaggggaaagcgcaagacggcaagccggtggatatggccggcacgggcgccgatgtggtgacccggcgggccgacgggacctgggtctacgccatcgacaacccattcggcgtggcgcagtcggcgcgttga

SEQ ID NO: 363392 - DNA, 732 bp, Pseudomonas aeruginosa
atgatggaatgcgatcctgttaccggtgcgtgcctgctgcctgagcagcagcggccggccgatactgtcgtgcccgctgcacgaaacaacctggccgtgcgctacatcggcgatccgatgtgttcctggtgctggggcctctcgcccgtcgtcagggaggtggcggccttctgcgaggccgaggacatcgaattctcgctcaccatgggaggactgcgcgccggtagtggtgacccatggaacgaggggttcaaagacttcctgcgcaacgagtggcggcacatcgctcaggtgaccggacagccgttcggcttcacgttgctggatgccgcttacttcaattacgacaccgagcccgcctgccgggcggttgagacggtgcaactgctccaggccagacatcaactggcgagctcaatagtcctgagcttctttacgcaagtgcaacgcaaattctacgtcgaggggggcgatcccaaaatcacggatttctatgccgggatctgctcgcgcctaggcctggatttcgaagagttccagatggcattcggctcttccgaagccaagcatgccgtggaacaagcattcatgcgttgtcgccaatggggggtgcgctcattcccgacgctgttgctggagcgtggtgcagagagattgccccttgccgcgggttttgtaccagcggagcagatgctctctcgattaaggcgggaactgcttacgccacgctga

SEQ ID NO: 363393 - DNA, 4392 bp, Pseudomonas aeruginosa
atgaaacctcgtgatatccacgatgaatggctgtcgctgattgaggtctcgggccccttcctcgctacgcccgtgctcgagcgggtgttctccaccggcctgccggcggtcgaaccgcgcatccgccagtacctgcgccaggcgcatgacgaatggtgcgaggccagggataacgaggacccacgcttcgccgaactgcatcgtgcctggatccacgaagtgctcgcacgctgtctggaatacgacgaggacgatagcggcgaactgctgcgacgaggcgagcgactgcctgactccgtgcgcgtcaccctgcccgaacatggcatcacgctggagccagactacgcactggtatccaaccacaagccgctgctgctggtgcagagttacccggccggaaccgatctcgccgcgaccatgaatatcgatggctggatcgccagccccgccgaacgcatggagcgcctgtgccgggccagcggctgccgactcggactgatcaccgatggcgagcgctggatgctggtcgatgcgcccgtgggcgcggtggtgacctacgccagttggtacgcacgcctgtgggcccaggaacgtcagaccctgcaagccttcatcgcgctgctgggcatcgcccgcttcttcggcgacgcggacgaaacgctgccggcgctgctcgacgcatccctgcaacaccaggaagcggtgaccgacgccctgggcgagcaggtacgccgggccgttgaagtgctgatccaggcactggacaaggaagatcgcgaccgctcccgcaccttgctgcaaggcgtcgagccggccgaactctacgaggcgggcctgacgatcatgatgcgtctggtgttcctgctctcggccgaggagcgcggcctgctgctgatgggtgatgagacctacgagagcgactacgccatctccaccctgcgcatgcagttgcgtcaggagaccgaggcggtgctggagcaccggcacgatgcctgggctcgcctgctggccaccttccgtgcggtctacggcggtatcgagcatgagaccctacgtctccctgctctgggtggctcgctgttcgacccggatcgtttccccttcctggaaggccgtgctaagggttccgactggaaggtcgatatcgctcacccgctgcccatcgacaaccgtactgtgctgctcctgctggaagctattcagcaataccagggtcgtaccctgtcctatcgtgcgctggacgtggagcaaatcggttacgtctacgagggcctgctggagcggaccgtcgcccgcaccacgcgggtgaccgttgagcttagcgccggcaaggacgccaagaagaccctgtatggcctggacgacctcgaaacgctgcaccaccgaggtaacgatgccttggccgatgaactctccggtgccgacgccatcaagcgtagtgccagtgccattcgccgggatctcgagcgtgccgtcgatgccgcggaggccaatcgcctgttgaccgcttgcggtggggacgaagttctccgtgagcgcgcactaccgttcttccatctgctgcgcaccgatccctggggctatccgctggtctacccggagggggccttcatcgtcaccacgggcagcgaccgccgtgagactggggcccactacacgcccaaatcgctcaccgaaaccatcgtcaccgagacgctcacgccggtcgtctacgtcggccccgcccaagggttgccgcgtgcggagtggacgctcaagtcgcccgccgaactgctcgacctgaagatctgcgatccggccatgggctcgggtgccttccttgtgcaagcctgccgctggctggccgagcggttggtggaggcatggacgctggccgaggatcgaggtgagacgatcgacgccgatggccaggtgacgggcgctggtgcctgtcaggaaccgctggcaagcgatatcgaggcacgcactaccatcgcacgccgcctcatcgccgaacgctgcctctacggcgtcgacctgaatccactggcggtcgaactggccaagctctccatctggctggtgacgctggccaaggggcgccccttcggcttcctcgaccacaacctgcgctgtggagacagcctgctcggcatccaccgcttggatcagctcacagagctgtcgatgaaccccactggtgggggccaactgcggctgttcggccagaacatcgaacaagcagtgcgcaaggccattgagctgcgctcgcgcctgcgtgaaatgcctatccgcgacatccgcgatgtggaggcaatggcacatctggacgccgacgcacgctgcagactcgaagtgccggaaagcatcgccgatgcgttcatcggcgaggtgctcgcctcgggcggcaatggtgcagggctggagagctcgctagcgtcgctgaccatccaggccggacagctcatcgacggcaagcgcgatgtgctcgcttcgatgcggcaaagatcggttgcagcgctctcgaccgaacgacccgtcgataagcctacacgtcgtccgttccattggcctttggagtttccggaggtgttcgcgcgcgaacgcggcggcttcgatggcatcgtcggcaatccacccttcctgggaggaaagcggatcactggcgtcgcgggaactgctttccgcgattggttggttgctcacatcgccaatggacggcgcggctcagcggatctggtcgcctattttttcctgcgagcgtggaacctgctacgtgacggcggtggatttgggctccttgctgtgaacacgatcgccgaaggcgacacgcgacaggtgggactcgaagcgatggtcgctgcaggcgccacgattcacggggcgtatccgaacgaaccttggccagggaaggccaacgtcgtcacgagtcgtgttcacgtgcgaaagggcgcatgggacgggcagcgttctctgctcggtaggtcagtcacgtttatctcggcatatctctcggaacgagaggagtggagccctcaacgcctaaaggtgaacgagcgcatcacgttccagggctcggtcgtggtcggtatgggcttcgtcctcacgaccgcccaagcgcaggacatgcttgatgccgacccgcgcaaccgggacgtcgtcttcccctatctgagcggggatgacgtcaattcgagccccacgcaggagccgagccggtgggtgatctgcttctgggattggcccgaggagaaggcgcggtcgtatgagaagccctggcgatggattgaagagcgcgtactgccagagcgccaacgtcgtgatgagaacggcgagtatgtgcttcggaagcctctgcctcagcggtggtggcagtacggagataagcgccccggcctctatcacgccatcggacggggaggtcctttcgaccagcacccctacgactgggactcaacgaagaaggcccaccaagaggtgttgatctcagcgctcgtcggcaagtatttcaatccttctgtcgttccgaacgatgccattttcaatcacaagtgcatcgtgttcggcggccatcgcgccaacgcattggctgccttgttcaactcgtcgctagtgcaggcatgggtatggaagcagtcggctcgattgaagctggatcttagcttctcgccgtcggatgccgtcgagaccttccctttcctgcccgacacgacgatcgcgagcatggagcgccttggggttaagtatcttgaagcacgtcgcgagttcatggcccgccactcgctcggcgtcacgaagctctacaatcggtttcatagtcccgctgaggtagacccgtctctggtgcggctccgagagatgcacagcgagatcgatcgctttgttgcacacgcatacggctgggacgatctcgacttggggcacggattccacgaagtcccgcttcacgccgagggggaccggatccgcttcaccatcgccgagcccgtgcgctttgaggttcttcgacgcttcgcggagttgaaccgtcagcgttacgaggaagaagtcgcccaagggctgcataagagtggcacagcgcgatcttcttcccgtgcgccgcgtgccggtcgcgccacagaggctgccccagcacaaccctcactcaacttcgacgccgctccggtcaatgaaggcgcctacctctcggtcgccgagccccgcgcccgctaccagactagccccgcccttgccatcgctgaacacctgaaggcgcataccggctggcacgccaagtccgacatacttgctgccaccggcatctcagacggccagtggaacgccgcgatcgccaatctaatagcttgcggcaaggtcgagcgccaaggcgagaaacgcggggcacgctatagctatgtggggggtgaggaatga

SEQ ID NO: 363394 - DNA, 2130 bp, Pseudomonas aeruginosa
atgacttcgctctcagccgaccgtcccagcattgacccgaaagatgatctcttcgggcatgcaccgttcgcaaagagtctagccgatagcatctgtcgctatcccggcagtgacggcctggtgctcgccctctacggaccatggggctccgggaaatcaacggtcttgagctatgtgcaacactacctggaacaacccccgccggacgagcagcccgtcctagtcaagttcaacccatggtggttctccggacaggaaaacctggcgcgcgcatttcttggccagctgcaggccgtactaccagctaagagcgagaaatttaagcaacttggtgacctgttggccgacttcgccgagggtgtgggtggcttaattgacctgaccggggtttcgggaggtgccggtgggctcatcggcaagttgctgggtcaagcgaagcgcaagcccaaggatgtcccggcactcaaggagtcgatcaccggcgtcctgcaaaaggccgataaacgcatcctggtgatcatcgacgacatcgatcgactgacgccggaggagacccgacagttgttcaccgtcatcaaggcactggcggatttcccgaacgtcgtttacttgctggccttcgatcgcgatgtcgccgcacaagcgatcgaacaacagagtggattacccggcgagcggtacctggaaaagatcattcaggtgcctttcgaattgccgcccgtcgatcgtgtggccctgcgcgcagcccttttcaagcgtctcgacgagatattgggtgacgtaccagaagggtcgttcgatccgtcgtactggacgaacgtctatcacgacggaatcgacgcactgattcaggtgcctcgcgacgtggttcgattcacgaacaccttggccgtcacctatccaacggtccgcggcgaagtgaatgccgtggatttcattgcgcttgaagcacttcgggtgttcttgcccggcctgtatgacgtgattcgtaccaacccggacagattctcgggccacagccgcgactctcgctacgacgccgatgagcgaaccaaggaggcctttcacgctggatgggaaaaagcgctgccagaccaattgcaagagagttccaaggcgctgatcgaatgtatctttccgaaaactggacgcacgggctacggctcggactggttggcggaatggcggagaaacctgcgggcctgccatccagatgtattcccgatctattttcgcctcactattcctctcggggccatacgccgtagcgagatgatggcgctgctgaatctggccgcgtcaccatccgactttggcaacgcactcgttcaagccaaggaagaacggcggcccgatggcatgtcaaaggcgcgggcattgctcgaaagactgatggaccatgtcgagaaggacatcccagatgcgcatatcccagcggtcatccatgcgcttttcgacgcaggcgacgcgttgatcgatcccgccgacgaacgtggcatgttcgatttcggcaacgtctctcgcgcttcgcgccctgtctatcaccttctgaagcggctgtcggccgatcaacgcgccgacgtcttggaggaggcgatgcgggctggtagcgctgtagcagtccagtcgtggctattgaaggcattggatgaagaagtcacgaaggcacaagaaaccacgctgctgacggctgatgaagtcacacgactgaagtctgtatggttggaacgaatacgggttcttgcaggtgagtccggctttatggaccacccggaattgccgagactactcgccacctggaagcactgggcagacagtaccgaagtacgaacatggtgcgaccgcgttacgacgtccgacgagggactgctgatgcttctgccgaagtttctgcagcacacgagatcccagacgatgggcgattgggcggttcgccttcaacctcgcctcaatccgaactggctggagagttacatcgacaccgtcgccactgcggtccgacttcagcgcttgcagcgtgacggcaaagtgcctgacggcgcgcgggaagccgtatcgcagtacctgacagagttcgagatgctccagtctggcaggaatccagatggcatcgatgcgtttgacgactaa

SEQ ID NO: 363395 - DNA, 765 bp, Pseudomonas aeruginosa
atgcaggaactgcttaaggcgatctctgcactggtatcgatcgtctcctctgaccgggtcgctgcactggcggctcggctcagtaaactagatgcctcgaaaggtggaagcttgactaccagcgcactgtcctcgcaggcgagcgaagcgctcaagacgctgatcgaagcttggaaggtatccaccatcgacggccgaacgctagcagccatgctcttggctgccaacgacgcctatcgcgtagccgagaacaatcagcaggtcgagctggtatggacaggcccgaccaccgaactggttcctgcacgaaggaccgagcaggcgctgatccaggtgatcgatgctgcgcggcaacggctgttcatcaccagctacgttgcttatgacatcgaatccgtcgccagggcactgaagtcggcggccgagcggtatgtccagatcgatttcctggtggagatgtcgagcgcgcagggggggaaggtcagtacggatccgatcgccaacctgcgtaagatcgttcccgatgcgagcttctacgtctggaaggacaaagcagcggctttcatgaatggcagcgtgcatgcgaaggtcgccgtcgccgaccggacgctttgcttcatcaccagcgctaacctcaccggctatgcaatggaccagaacatggaagcaggggttctcgtttcaggaaagccgctgcccgaccaactgcaccgacatctggaggcactagtggtcacgggtgtggtcgagccagtcgggctctga

SEQ ID NO: 363396 - DNA, 423 bp, Pseudomonas aeruginosa
atgtcacgcagcgatatcatgcgagcggtgaagcgggcgcataccgcaccagaaatcatcgttcgccagacgctgcatgcactggggctcaggttccgactccaacgccgggatctgccgggctcgccggacatagtcctgccacgatttcgtacagccatcttcgtccatggctgtttctggcatcgccatcccgactgccgctatgcgaccacccccaagacccgccaggaatactggctgcccaaattcatggcgaatgtcgagcgggacgccagaaaggaatcacagctgcgcgagctgggctggagggtgctgatcatctgggagtgcgagacacgcgatcgtagagaactaatgatgcgtctcaggcgtgaattcgatcttcatgatctggccgttgatcagcaccacactccctga

SEQ ID NO: 363397 - DNA, 633 bp, Pseudomonas aeruginosa
atgatgtcaagagtgtttaaaaaaatttcctctttgcttcgcgcagtcatcctttttgttaaagggctgagaaaaggttggctattttccccttttgcatcggtttcggctgcggggggaatcagtttggctcaacacgtttctgttcgaggggcaaagctcaatgcagagtacggtgagattattctgtctgagggggtttgggtgaacgaccatgtggagataaattcaactcgcagagtttctatcggaatgggaacgacgctgcagcgtaatgtgaccattaatggcgaggtaagcattggtgctgaatgtctttttgcgccaaacgtttttatttcatctacgtcgcatgtttatgattatcatccaatgctcagtatacgagagcaggaacgtcgaatctccagggaggaattcttgcagaggtataataagccgattttaattggtgacgatgtttggcttggggcgaatgttgtcctgatgccaggagttaccattggctctcacgttgttgtcggtgcaaattcagtggtcaatattgatatcccttcgggggtcattgccgcaggtgtgccggtgcgtattatcaaaaaacgtccaggatatgaggggcttgcagatgcttaa

SEQ ID NO: 363398 - DNA, 1212 bp, Pseudomonas aeruginosa
ttgtttaaattgacgcgttggtgttacttgatttatgccgctttggcggcatttatcacggcgcttaagggcttcttttacgcccatcttctggatgaggttcagtatgccggcgtgaattattatctcttgatattaggtgttggtgtactgctggttagttccggcgttatggtgcgttgccataccgagatgccattgctcgcaaagagggccacgctgaatcagttgaccgattttgtccggaggataaaaggaacaggttttctctattggttggttttttgcggattggttccatttgcagggcgtgttgttgctattgacctgtcgcttcaaacgctctctgctgttcaggtgctgatattcttcttgtttactgtcgatttgatgttggtaaagagtcggctcgactttttgggctacgcgaaacaactgttcttgaggaacttggtcattgctgttgcaggttttgtatctgcctattttacagtgaatgccgttactacagttgctgctgaagtatgttgtgctgctttgatttactatcggggcttgctatcgttcgttcgagggctacagataccagactttgagtttctacatcaatctataagctatatgccggtcacattggtaggggcacttttacagtttgtcgacaggctgctagcttcatctgtgctgggggctgaggaattttctaggttttcttacttttcactcattgtaatggctggcttgtctgttcagcagttggtgaatacccgagtaattaccatcttgccggggatctgtgaaaggggagggcgagaagggtatcgctacgtcgttaaaatttcacttgtgatgggggcttttttattagtggcattaacgatgggaatgctcttgctacaaagcccgtggtttgcagccgattggttggaacgggattactcattaggtttagcatttgtatttatggccttagtcagatcggttgatttttattcggcctaccttttagtaatgggtcgtaaggttctgctattcaaagttcagttttctgtgcttttactattttttattggaataatacctttaaagctgggttttatttcgatggatctgctggattttatagccacgatgtcattcggatttttggtgttgttgttagctttggctatcttggcgtggagtatacgagatgatgtcaagagtgtttaa

SEQ ID NO: 363399 - DNA, 897 bp, Pseudomonas aeruginosa
atgatctccagatataagctgatgcggggtcttctaaagcgtaagtctgctaggcgacttgcttggaatgtgctgagagttttgaatcgacgcaagttggttaattttaaggcggagttgttggcgtcgtcaatggaatcttatacggaatatgattctgcctcgattgataaagttgtagccgggcttgagttaaatggtgcggtcgagggaccgaagttgccagagcgctatgtcgattacctggtggcgtttgctgagcgtacaccgtgttatgccgatcgtgttccgtcccagggcttttacttacgcgatagagaagcggctgagaaaaaattgggcaagaagttgttgctggcccagtattttaatatccagagtgataaagtgattagcgatctcgcacaggatcctttcttgctttcggtcgcggcaaattatttaggcgcccctccccagttgatgagcgcaaatatgtggtggacatttccagtagatgcttctgacgaagatagggcaaagcatgcacatgtttttcactatgacttggatgatgtaaagtttgttaagttctttttttatttgacgaatgtcgatgaagactctggacctcatgtctatgtcaaggggtcaaaccggaaggttaagtacaagaactcaatgttgaagtccaagcggttcacggatgaagagattatccaagcatatggcaaggaaaatattattcatgtgttgggaaagcctggaacatgtttagtcgaggatactattaccttgcacaagggcgtcacacctaccgagcgagcaagactaatattgcagtttgagtactctattaatacctatccggagattagttgcgtagtcaaagagtcggagcagaagttatttgtttaa

SEQ ID NO: 363400 - DNA, 1221 bp, Pseudomonas aeruginosa
atgcacggaatgaatttttcacggaatgcaggtgggttttcgttttttccccgggcggcaatttttctcactgctctactggtgctgtgtaattactactatctttatttcatggacttctctcaggggagtacatcgggtgccggtgtgtttggtatcttgcgggttgtggcaatagtcttgctgtgttcgctgctctttaagcctgtgctgcgtaggtcgtttagactggaagaattattgcttctagttttttttgtgtttggcttttttgtgatttcgctaaaatcagtaataattagcgaaggggactggatgtatgttaataccttgatatgtgcggttccgttgctttttttgagattacgtgaagatcgacagcggtttagttttttttgggagtgttgtttgcttattgttatactgcaaattattggggagttttttatttactttaaggggatgagtctctgggagaatagagcattcattggagggcttgggaatccttccagttttgggattctctgtaatgtgctggttgcttacgtattgcttttgcgtggaaagtcatttttctcattcttggctttttctctattgtgtgcgggtatctttatgactagtagtatgttgcctacacttttattggtgatggtaacgactatttggggtgtccttcgttctggtgtgaaattttctttgctttgcattttttcgatatttttgctttttttattttacgatcagattttgagtgatcatttgcgttataagttggcttcaatggttggggctgtcgatagtgggcaaggtggaacttctgcgtctgtatctattagggttcaaatacataaagactatttagaatctctcgttcaggatttttctggttttttgttttatggtttttcggagcgttactataaaggtgtggacagtcagttgatcacttatctttcaagttttggtttgttagctactggggggttctggctttattctattgcgtctttctttcgtgctcttactcagcgtacagttttttctactttctttgcgacgtccatatttatctttatggtgtccttcctgttcaatcgtattctagattattatccaatggcgttatttttcttcttgctctgtgtgtcttcctcctgttttggtgtcgagagagctcagagctatattgatgatgagggggctgcgaggctttaa

SEQ ID NO: 363401 - DNA, 228 bp, Pseudomonas aeruginosa
atggcacgcgataccacgccgaaatacgtcccgcagctggccagcttcttccctaaggagcaccccggcgtagaactttggtacgtcaggatgaagaccgccgcgggcgagtacgtaattcttaccgaaaactacgcgagcaaacgaaacgctgcccgaaagatgcgccagattcgcgaggatatgggccgcgattacgtcaagaaaatagacgccggtcttgtataa

SEQ ID NO: 363402 - DNA, 204 bp, Pseudomonas aeruginosa
atgttccctgaggcaaccatcgaactcaactacgcagacgaagacatcggcagtaactgcggcacggtcaggttcaagggtggagaggcaatttatcgcgatgagtctgcgggctggaacagcatgtccggggccgaccgcgagaggtggaccagctttgcctacgaggtcaagggctgggagcgcgaccaagaagacgactga

SEQ ID NO: 363403 - DNA, 210 bp, Pseudomonas aeruginosa
atggacgattggaccagggtagaagatcgcatgccgacaccaaacaaaacggtactggcttatcgcaaagggaagaaagcttcgaatggcccattcttcgcggtcgcaaagaatcgtgagcatcatccatggcagtacctcgacggctcaatttgctacatgaacatcacccactggatgcccctacccgaaccaccgcaagacgcctga

SEQ ID NO: 363404 - DNA, 534 bp, Pseudomonas aeruginosa
atgagcattgactggagcacggcaccagagggtgcgacgcattgggaaccgaaatcatattacttcgctgaaggctggatgcggaaagtcgggaatgaatggtcattttggagcgaagtaagcgaatcatgggtcagggggactctaacctgcaatgtatccggcgagcgtgaggcgaaattcgaggctagaccgcaagagtcctgggacggccagggcctgccgccggttgggacggtgtgtgaatacaagtacacgcactggcctgagtatcacaaatgtgaaattcggtacatcagcgctgcgtcattaattgtgtacgaccatggccaagaacagtactaccgcacgtgcgacatgctgttccgtcccgtccgcacgctcgagcagatcgccgccgaggagcgggagaaggcggcgctggaaatggcagcgctgatgtcagggcatgaggatcgttcgaaagactgcttcaaggtactgggcgaaattctctacgacgccggctaccgccgccaggaggaagggaaatga

SEQ ID NO: 363405 - DNA, 522 bp, Pseudomonas aeruginosa
atgagtgaggtgaagcggttgaatttcaccatttcccagttcgagagcgttgtgccgtatgcgtcagagcatggccaatacgtccgctatacggactacgccaagctcgccgccgaggctcaggcgctcaggggggaagtggccaagctcacgcaatacaacaagagccttgacgaagaaaatacacgactgcttgcggattgtgagaagaccgacaaggaagtcgcggcactgcgcgcaagggtgatggttacgcccgatgcgagcacggtgtacgcggcgctcgatgctcgtgagcggttattcacaagccctgagaacattcaggtagcgctggaagctcaatcgcgcctcaacggcaagacggtaagcgaggggctgttgcggcgtatcagcgatctgttcccggctgacatgggagatgacggatcaggccgcgccggttggtttccgcatgtgcgcgagacggttgcagagcttcgcgccctgctcaaccaggacaaggagaacggcaatggctga

SEQ ID NO: 363406 - DNA, 342 bp, Pseudomonas aeruginosa
atgaacgaccgcgaactactcgaactggcggcgcgggcggcggggtatcagttttcatactcgtaccgctccctttccagcccggcggtaccggtaatcctggcagagactggacggtggcgacagtggaacccgcgcaccgacgacggcgacgcgctgaggctggctgtgaagcttcgccttgatatttccgttgaacgtgaaatacaggtttcttggtggcaaggcgaatctctagagactgtcacctggccgcttggagatgacccatacgcggctgcgcgttacgccatcgtccgcgccgccgccgagatcggcaagtctatgggaggttgggagtga

SEQ ID NO: 363407 - DNA, 480 bp, Pseudomonas aeruginosa
atgaacagcttccaggcatggctcgacagcgccgacatccctacccaggagaacgggcagtgggttgacctcgaaacggggatcgcctacgacccgcagtacaactacgcatcgaagacccgccggacatccttgagcccgcgcgctatggacgctcgcacagtggcaaaagcgttcggcggtcgcgccctcaccggcacagccaggcagaaggagtgggccgagaagatccgcgccgagaaggtgcagcagatgaatcaagaccaggcggaaatggcctgcgatccaagcggcctgctcactgccgccaaattctggatcgaaaatcgcaacgctaccgggcaggcaatcgccggattcgtaatgcagcagaaagccctgcttgcccaacatcgttctgcccaggccgcaggacaagccgacaatgtggcgaagatcgctactgagtacaacgcactcaccgctcgctgggggttctga

SEQ ID NO: 363408 - DNA, 687 bp, Pseudomonas aeruginosa
atgagcacgatccacatcgggccattctcaatcactcaggctgcccgcggactgcattacggggggctgccgcatcaccgttggaccctctactacgggctccgggaaatggcgatgaagaccctaccggacagttacaccttgtcggaggtgagggacgagttctcagacatcatcgccgaattcgtcatcgacgcccggcaacgatacgcgcccgatgttctggaactggtgacggcggagggtgaaacggttcttgcccgcctccccgtgagccggttaccagagggtttttcagggtgcatacccgatgccagattcccatattggctcctcacctcattccatcctcagatgggattccccgtaagcctgggcgagtacaccgagatcgcaagcgaactcgccgcccctccgctggcatggatcgccggactcctccctggcgaggttctgacccagaatgcagatgagtggcgcgccccgacgaactgggagatacgtcacgttgttggcgagggatcgtttaccggcgtaagcggcgctgctgcggccgccatgcttggaatgtccgcgacgaatttccgaaaatacacagccggcgactctgccgcgaatcgccagaaaatcagtttcgcagcctggcattacctactcgaccggctcggcgtgaagcgggcgagctga

SEQ ID NO: 363409 - DNA, 1047 bp, Pseudomonas aeruginosa
atgagcgtgactgatcccgaggcgctgctcctgctgccacgcctggccatccagaacgccaacgccatttccagcccgttgacctgggggttcccttcgcccggcgctttcaccggattcgtccatgccttgcagcgtcgggtcggaatctccctcgatatcgaactggatggcgtcggcatcgtctgccaccgtttcgaggcgcaggtctcgcaaccggccggcaagcgcaccctagtcttcaacctgacccgcaacccgctgaatcgcgacggttccacggccgccatcgtcgaggaaggccgcgctcacctggaggtcagcctgctgctgggcgtccgcggcgatggtctggacgatcaccccgcgcaggaaatcgccaggcaggtccaggagcaggccaacgccatgcgcctcgccggtggcagcatcctgccccggtgcgacgagcgcttccctgccccgagcgccgaactgctgatgctaggaggcagcgacgagcagcgtcgcaagaaccagcgccgcttgacccgccgtctgctgcccggcttcgccctggtgagtcgcgaggcggtgctgcagcggcatctggaaagcctgcgcaccactacccctgaagccaccacgctggacgcgctgctcgatctgtcccggcgtaacttcgagccagtcgcgcccaccactgcggagggaacatccacgggtccggaagcaacggccgagggctcggagcaagcatccgtgaattcaggagaagccgccatggccacagcggcctggaaaatacgcgacgagccgggctggctggtgccgatcccggccggctataacgctctttccccgctatacgagccaggcgaggtcaggaacgcccgcgaccgggaaacgccgttccgcttcgtcgaaaccctcttcggtctgggcgaatggctcagcccccatcgaaccccagcgttgcaagacctcctctggtatcaccaggccgagcccgacaaagggctttaccgttggagcacgccgcgtttcgccaagcacatcaacgaataa

SEQ ID NO: 363410 - DNA, 573 bp, Pseudomonas aeruginosa
gtggatgagccgcacgccttggtcgtcatggacgaagcggtggaacaggccctcctcggcggccaggcggagcaggaagtccaggtgggtgtcgccggcctgcacgcagtactcgcggggcaggtgttcctcggtgaggttttgcgcgtaggcgtcgatgcgctgttcggcgagcagggtctggagaatctgcgggacgctggtctgctggaagatgcgccagtccgagcccagcgccaggcgggccagcggcggctcgaccacggcgcggtagcgggtgcgtcggaagccggtgtcgtgttgttcgaaatccgagaccaggccccagacgtggcgcacggccacgccgccttgccagagggtgaagtgggcgggttggtccaggacctggccgaagtcgatggcggggtcgaagctgctcagcgccaggtccaggcggtaggtctcggacaggccctcttcgagggtgaactcgacgacgtcgaagtcgacatcgccgacgacgaaggtgaagcgcaaatcggactgggtgggcatggggtgctccctgcagtgctcccgctcagggcttga

SEQ ID NO: 363411 - DNA, 825 bp, Pseudomonas aeruginosa
atgacccataccgtcatcatcgagagcgaccgcaatttccatcgcagcccaccaacgccgaccgtggaaaataagctggaggtcgccttcgacacggcctaccagttggacgacgatgccgacctcgcctttcaactgagggggcacagcatcaacccgctggtggacgccgccatgccgctgttcggcctggcgatacgcctgcgtcgactgaacgagttcacccgaatcaacgaactgcacgaaacggtgcgcgaccaaatcacctcgattggcgaagaggtccgtcgtcatggctacgacaccgccgtacagacggcctaccggtatgccctgtgcagcttcatcgacgacatcgtgctggccacgccatggggccgctcatcgccgtggtcgcatcggtccctgctgagcgtcttccataacgaaacctggggcggcgagaaattctttacggtactcacccgtatgcagatggatcccgaacgctatcgggatgtcctggagttcaagtacttctgcctttgcctcggcttcaagggcaagtacggcgagcggcacaaccaggacgaagtgctgcaaggcatcatcgtcaagctgcatcgtgcgttgcgccaactgcgcggcgagccatccgaagagctgaccaacgcacaagccaacgtggcctcgcgcagctatcggctgggccgccaatggccgctgtggagtccgtgggtggtcgcaggtgtggcgctggttgggctttacgcactgttcgcgatgagccttggcaacaccaccgatttggtcctgcgatcgctggacggaattctcaagccctga

SEQ ID NO: 363412 - DNA, 1344 bp, Pseudomonas aeruginosa
atgagcagcaagaacccgatagtcctgtgcgaaggcacattcttcgaaccacaacacttccagcagatggtgcgcgcattggaacaccagatcattggacggctgactcacgcgggccttgcctacccctatggtttcagcgagctacagataaaccaggagttcctggcattcggcaagctggccatcacacgggccaagggagtcatgcctgatgggaccttgttcgacataccccacgaccagccaccgcccgaaccgttggtcatcacgggcgacgcggtggacaaccaaatggtctacctgaccgtcccgcatcgttccgaaggcgaactggaagttcgctggcccgagacctacggcaagaaccgctacaccctgcgtagcgaggaaattcgcgatacccatagccagaatggcgactatcgtcccgtcgacctggccgtactcaatctgcaattggcccttgaacgtgacgatcgcagtgccttcaccggcctggcctttacccgaatccgcggccgcggtggcgatggcagcctgttgctggatgagagtttctaccccaccagcctgtcgctgcgcgctgtccctgcgctggaccgctttctcggcgaactcaccaccctgttgcgcgagcgcgcgcggaccattgcttcccgcattggcacacctgggcaggctggcgtggccgacgtcaccgacttcctcttcctgaaaaccctgaaccgacttcacgcggagttcctgcaactgtcgcgactgtccaccgtgcatccggagcaactctacagcgccttcctgatggcctgcggcgagctggccacctacatggaagaaggacgtctagcgccggaactgcccgcctaccgccatgacgaactggcggtcggcttccgtccattggaagccacgcttcggcgctacctggggaccgttctccagcctcgggccatacccttgcccatcgaaaagcagcaatacggcatgctcaccgccgcagttccggaatccaagctgcttgccgattccgacttcatccttgcggtctccgcgcagatgccggtcgagcggctgcggcaacaattcctgcaacaggtcaaggtggcgtcgatggagcggctgggtgaactggtcagtcgccaaatccccggtatcccgctgattcagttgcccgttgcgccgcgtcatctgccgtaccacgccggtttcacctacttcgagctggaccgcaaccatcccaactggcagcagatgatgcgcaatacctctggcttcggtttccacatcgcaggcgattaccccggcctcgaactgcaattctgggcaatcaggagacagtga

SEQ ID NO: 363413 - DNA, 957 bp, Pseudomonas aeruginosa
atgaagcaagcgctgagcgtcctgctattggccaccctgctttctggctgcagcaccgtgggcaacgtcttcaagaagaccggacagattctgatggacccttccattcaggttggttccgccgatgaccagcccacgcagatagccctgagcctgtatgccgaccttgacgtcaaccccaatgctgaaagcctgcccgttcaactatccgtcgcggaggaagacagtacgcagtcggacagcgaggcggacggtccctttgcgattcgcctcaacagcaccagtcgcagcgggctcattgaaagcctacgggctctgcttgggcacttggaagaagatcgcgatgtttccggcgcagctccggacacgctggccgtagaccctgcccctgttccgttgcctacggttgcgcaagcgctgcagcttccacccgaatggcaggacgtggatgccagcgcggtattcgtgccgctacccgtggcagcgaccaatgcgacccagccatccagtggcctggcacctgggcagtacgggttgggcaagtcgctgcctgatgcccctgccaaggacattgagcgttccgcagcggccaccccgattgccttcaagattctccaactgacggacgactctctgctgctcaatgcaagttctgaccagctgcagcaggacatgaagaaagcgctcggcagcacttacctgagagccgatgactatgtactggtaccgggacagtacaagttcgtcaacttccgcgccatcgacgaagaagccaacttcatcgcagtggtcgccgacttccgcaacccgaacgggtccacctggagtgcgctgttcaagctcgaacccaaagggcgcaagtacgcccttctcatcgcgctgcagggcacccgcgtttccattatcgacgagagctatcgccccgctcatacgtcgcaaacgagtaagcacccatga

SEQ ID NO: 363414 - DNA, 1377 bp, Pseudomonas aeruginosa
atgacagtcgccaccgatcaacagcgcatagcgcttgtcgtgaccaatccccagaggctgcggttgggaacccttccgcgccacaactttgatcgacgcggtggcgttctcggctcgggcagtgccgattggctgctcgccgacggacgtggcagcgttcagcctcggcactgccagatcgtctgggaggatggtgccttctgcgtggtcgaccgctgcggcgcgacgcgtatcaacgatagcccggatgccttgggccaggacgtcagcgtgcgcctggccgaaggcgaccgcctgtacttggggcccgtttgcatcatcgtccacttggaggagggcgaccacagccttcccgacccaagccgccacttggctgagcacagcgtcgacgagttgctcaacgcgcaggatcacagctttgagtccctgccgccgttgccgcctgaaagcgccgagtcagcaggcgtcgaccccacgccaccggagttccgggcattgacgcgtccgctggacgacatcccgctggacccgttgcaagccatggataacgcggacatccagcacgacgttcgaacatcctcggagtcgctcgatccgcatcattacggcatgtccgagccgacgacgccacccgatctcgcccagacccgcttcgaagcactatccggctcgccacgccttcattttggagataaccgcatgtcatcgcaggaacccaacgccggcgcacgccccgctcccgctgacctcaactactacggacagcttgaaggccaagtggtcggcggcgatccgcgagcggcaatagcgcctcttctcgaaggactgggagcaccgctgggagaactcgatgcgcaatccagctaccgcctcctatatgaggcgggccagacgctgggggcgctgattcacggcttgctcgccttgtaccagcaacaggtttccggggagaccggcataggcctacaggggcgtactctgcagcccatcgaagataacccgctgcgcctggggctggactatgagacgacgctgcaggccatgttctctgggcagcgtagtctggtacacctgtcgcccaaagccgcggtggatgagagccttgcccagttgcgccggcacaatgaggcgctcgtcagcggcatcgccgccggactggatgccttgctgcaagccttcgaccccgccttgctgatggagcgtttcagtcgctaccaaccggggcaggccggcagcacttcccaaggcgagtgggcgtggcacatgtatgcccactactacagcgagctcaaatccaaccgacaaggtggcttctccaagcttttccgggaagtgtttgaccagcactacgacagggccttgcgcacggaggcgtaa

SEQ ID NO: 363415 - DNA, 975 bp, Pseudomonas aeruginosa
atgctggctgacgcgaaaaactacgattttttccggcttctgcacctgttacatcaactacacggtgacgatctggaaggccgcgatcggctgcgtcccgcgcgtcagcgagtgcgtctgtccgcagatgcgggactcagttttcccacctccgacgttgcccacgccgagcgacttcccgaaggcgcttccagtgactacctggtgcgggtgaacttcttcggcctgcatggcacagactcgccgctgcccggctactacctggacaggctggcctacgagtcaggccatggagccggcattcgccccgcgtttctcgatttcgtcaaccaccgcctgctgaccctgctgcaccacgcctggcgcaagtaccgctactttattcgcttccgctcggatgcccgcgaccgcttctcgcggtacgtcttttccctcgtcgggttgggcgatgcggacttgcggggcgagacccccattgcttggagccgactgctcagcttcgccggcatggtcgccgggcgtgggcgttcgccggcgatggtcgaaggcatcatcgcgcattgctttgaccttcgggcggtacgggtgcgtcccttcgagatgcgctacaccgacgttccgcaggaccaacgcaacgccctcggccggcgcaactgcaccttgtcaggcgacttcgtcctgggacgtcgcgccaggactgtccaaagcaaattcaccatctccattggcaacctgacccaggcgcgatttcgtgactttctgcccactggccctgattacccgcggctgtgcaagctcatcgacttcttgcttcgcgatccccatgcctacgacttggaactcggcctgcgtcggaacgaagttcagcccatgaacattgcccgtggcggaggtagccacttgggatggacaagttttctcaagcagccaggtcggcgccccccgcccaccgttcgcgtgaaggttcgccaatga

SEQ ID NO: 363416 - DNA, 1770 bp, Pseudomonas aeruginosa
atgccacttaagacaaaatttcgcgaagagatggagtttctccagcgcacggggcgcgagttcgccaaggacaacccccagctggcgcgcttcctgggcgaggaagcgaacgatccggatgttgagcgcttgctggagggcgtagctttcctcaccgccaagatgagcctgaagattgaagacgatcttccggaactgacccattcgctgctcaatctgctctggccgaactaccttcgccctctgcccagcatgaccatgatgcggttcgagccgagggacggtgaaatcaccgagcgcaaagtcgtacccaagggcaccccgctgctttcccaacccgtggagggtgtccagtgccggttccggacgtgtcgtgatgtacccatctacccgttgcgcgtcgaggaggtcactgcggcgcattcgcaggagaagtcgatcatgcgcgtcgacttgcagcccaccagtccggatctcctcctggatgccatcgattgcggtgaactggagttccacctcagtggcagcgatacgaacgcgcaaaccctgtatctgtggttgtcccgatacctccatgaggttcggatcgaaatcaatggcgtcgcccgccgtatccggccggatcaacttgccttccctggtttctctccagaagaggcgctgctgccttacccacagaacgtattcgacgggtatagaatcctgcaggaatacttcgtttttccacagcggttccattttttcaccgtcaacggcctgcgctcgatctggccatccgacaagactgaccgcgtccgcctggagtttcacttctcccgcccgatgccggtcgatgttcgcctgaccacggccgacgtttccctgtattgcacgcctgcggtcaacctctttcctcacagcgccgagcccatcagccttgaaggccgcgccatcgaccaacgcctggtccccatggcgaaccgaaccgaggcgttcgagatcttcagtattgacgaggtaagcggttggcaccgggaacctgacgggaaacagggtcgtcgactgcgaacttttcactccttcgagtcattgcaacacgagtccgaacatagccaagggcgcacctctctttactatcgaacgcgcattgagcaggcgcacggcatggaaggcattgcgcatcgcatttccttcgtgcgtgccgatgacattgactacgttggcgccaacgaaaccgtctccgtgtcgttgacctgtaccaatcgcgaactaccgacgggattgggcgcaggcgatatctgcctgcgcagcgaggaaaccgcgagcttcgtgaccttccgcaacatttcgccgcccactcccccctaccggcccgtgctcgatggcgagttgcaatggacgttgatttccaacctctccttgaactacctgtcgctgctctccatcgagccgctgaaggccgtgattcgcgcctatgattttgctgcgctgcacgacttgcgccacgccagggcaagcaggaaacggctggacgcgattaccgatgcctgcactgcgcccatcgatcggttccttcgcggccttccggtcagggggatgcagacccgcctgcgactggaccagagcggatttctctgcgagggcgacctcttcctgttctgcacggtcctgagccacttcttcgccctatacgccagcatcaattccttccacatgctcgaggccgtcaacacgagcaacaacgagacctactcatggcccatgaagatcggcacacagcccctgatctag

SEQ ID NO: 363417 - DNA, 429 bp, Pseudomonas aeruginosa
atgccaaggtcgcctggtcgggggagcttgttcgaacggttggaccctgatctcccgccgcgccgaatgcgcgcgcggcaggagctggcttccgaacgcgtaggcgccttcaaacgacagttggagtggattctcaatacccgccggggcagcgcacaaagctgccccgagctgggtttggcggacctcaatgactccactattgggagcacggaccttctgcagaaggtctgtgaggatattcgcaccacggtggctcgctatggcccgggcgttcgcagtgtgcgggtccaccccctcatggacggaaacggcccacaaaggctgcgcttccagttgagctgcgtggtccttgtgaacaacgccgaggagcaattcgaactggaactgctgctccgtggagcgaatcgggatgtcagcgtgagctga

SEQ ID NO: 363418 - DNA, 1482 bp, Pseudomonas aeruginosa
atgaccaaagcgcaatctaccgcggcaaaatctcgggacgctctgcctcaggaaggactgctggcgcagatcatggcccagacccgcttggagcccagccatgatggctattccgtggctgaacgcggcatcgccgcgttcattaccgaagcgctcaagagcaaagatcgcgagcaaccggtcaacaagcagctggtcgacagcatgattgccgaaatcgacctccaactcggcaagcagctggaccaactgctgcatctcccaaccttccaggagatcgaatccacctggcgcgggctccacttcgtggtgtttaacacggatttccgcgagaacatctacatcgacgccctgcacgcgaccaaggaagagctgctggacgatttcgagagcgctggcgacatcacccgtagcggtctctacaagcacgcctacaccgccggttacgggcagttcggcggccagcccgtcggctgcatcgcttccacttataccttcggcccctctgcacctgacatcaaactgctgagctatgcggcctcggtaggcgccatggcgcacgccccattcctcggcgcagccgggccgagcttcctcaacatcgacagcttcgaagagcttcccaacctcaaggacatcaaggaaatccatgaaggtccgcagttcgccaagtggcgtagcttgcgcgagagcgaagactcccggtacctcggtctgcccatgctccggtacctccagcgcgcaccttacgaccctctggaaaaccctgtgcgcagcttcaactaccgtgagtccatcgacggcaagcacagcaactacctgtggggtagcggtgcgttccggctcgtgaaccgcatcaccgagagcttcgccaggtaccgttggtgcccgaacatcatcggcccgcagtccggtggtgaaatcgaagacctgcccgtgcacctgtttgaatccctgggtcagctccaggccaagattccgaccgaagtcctcgtgtcggatcggcgtgaattcgagctgtccgaggcgggcttcatcccgctgaccatgcgcaaggacagcgacaacgcggcctttttctccgccaactcggtacagaagcccaagctgttccagaagactccagaaggcctggcggcccaaaccaactatgcgctgggcacccaactgccgtacctcttcatcgtttgccgcgtggcgcactacctgaaggtcttgctgcgcgagcagatcggcagctggaaagagcgcgcggacgtggagcgcgaactcaacacctggctgcgccaatatatcgccgatcaggagaatcccagcgccgacgttcgtagccgtcgccctctgcgccaggctcgtgtggtagtccaggacgtaccgggcaatccgggctggttccgctcgtccctgtcgatgcggccgcatttcaaattcatggggtctgacattgaactctcgctcgaaggccgcttggacaaggaatga

SEQ ID NO: 363419 - DNA, 510 bp, Pseudomonas aeruginosa
atggcaggaaagaagaaaggctctgttgcacccaaggaacgcataaatatcagctatgtccccgcaactaatggccaacaggaggaagtcgaacttcccttgaaggtacttatagttggggatctgaaagggcgcgcagaagactcggcactggaagaaagaacggcagtgcgcatcaacaaagacaacttcaacgaggtgcttgaaaaggcagaagttcgtctggccgcagacgttccagccgttctggccggtagttctgaaggcgacaccatctctgtagaccttcgtttcaattccattgacgacttctcgcccgactccatcatccgcagtgtccccgaacttcggaaacttcacgaactccgtgaagcgctggttgctcttcgaggtccgatgagcaacatccctgcgtttcgcaagcagctgcaagccatgctcagtgacgaaggcgcccgtagtgagcttgccaaagagctggccatttcaatggggggcacggaggcctga

SEQ ID NO: 363420 - DNA, 2565 bp, Pseudomonas aeruginosa
atgatcagggtcgatctggccgcgctattagggcgtttgaacctgttgtgccgccacgcattggaagaagctggtagcttgtgcatagcgcagcacggcacggaagtgactgcttcgcatctgttcttcaagttgctggatcagccactgtgtgacgtgcgactgatcctggacgatgtgagtctgtctgtcgacgaagtgcgacgtgccctggcctcggcgtttcgagacgaaccggatgccaatgaacactacccggcgttctcgccgctactggtcgagctgttgcaggaggcatggttgctgggctcgatagagctggggcaaaccgaaatccgcggcggcaccctcctccttgcggcactactcaatccggcacgctatctcccattgaacgcggtcaggctgctggagagcatcaaccgcgagcatctgcgcaagcactttcacgaattgttgtcccgctctgcggaaatacccgagacagaggtgtctggtgagtcgcttggccgggtggtcagttcggaagacaccgccttggctaggtttggacatgacttcacggcgcaggcgcgtggaggacacattgatcctgtcctttgccgggacactgaaatcgacctgatggtcgacatcctgtcccggcggcgaaagaacaatccgatcgtcgtgggcgatgctggagtaggcaagagtgcggtcgtggaaggactggccttgcgtatcgtccaggagagagtccccgacaccctgaagtcggtgcggttggtgggtctggacctgggggcgctacaggccggagcttcggtcaagggggagtttgaaaggcgcctcaaggctgttcttgacgaagtgaagggtgccacgcagcccatcgtgctgttcatcgatgaagcccatacgctgattggggcaggcaatgcctctggtggcagcgatgcagccaatctgctgaagccggcgctggcgcgtggcgaactgcggaccatcgccgccacgacctggtccgagtacaagcagtatttcgagaaggacgccgcgctgacgcgccgcttccaactggtgaagctggacgagcccagccaggagcaagccgttcacattcttcgagggctgcgccccatctatgaacaggcccatcaggtctacatcggggacgacgcgcttcaggcggcggctacgctctctgcgcgttacctctctgggcggcagttgcccgacaaggcgatcgacgtgctggatacggcctgcgcccgcgtagcgacggcgttggccgaaccgccacgccggctcagcatgctggaaaacgaagccaggcaaatcgaagctgagcgcgagacattgcaacgagacgtcagagctggtcgcagtatcgataccaaccggctggaagcgctggacgcggccagtcgatcgaaccaggagagcgccgcgcggatccggctggcctgggaaaagcagaaggcactggtggatgacatcctggtgctgcgcgctgatgaaagtacccctactggtatgttggtggcaaaagtcacccacctacaggatctccagcgagagggtgcgctcctccacgccgacgtgggcgcagagcagattgcccaggtcatcgccgattggacaggcatcccggccaccaccatcaacagtgaccagatgtcgcggctggagaaactgccggcgaccctccgcgagcgtgtgaaaggccaggacaccgccttggaacatgtccatcggcacctgttgaccgccatggccgacttacgccgtcctggcaccccgttgggtgcgtttctgctggtagggcccagcggggtcggcaagaccgaaaccgcactgtcagttgcggatgccatcttcggtggcgagcagttcctgaccaccatcaacatgtccgagtatcaggagaagttcacggtgtcccgcctgctcggcgctccgccgggctatgtcggctacggcgaaggcggcgtcctgaccgaagccattcgcaagcagccctattcagtggtgttgctcgatgaggtggaaaaggcgcatccagaggtgctgaacatcttctatcaggctttcgacaagggggaactcgcggacggagaaggacgccggatcgactgcaagaacattcttttcttcctcacttccaatctgggcttcgatcaggccgacgagatgttggccgaccatgatgccgatgcgctaagggcaaagctgacccgcttcttcaagcctgcgctgttggcccggatgcaggtagtaccgtatggctacctggatgaggcaacgctggccgaaatcatcgatagccgcttggaacgcctgaaacgccaggtggatgaacgctacggtgcatcgctggacgtggagacgagcgtactcgaagagcttcgcagccgctgtgcccgtcatcaggacggtgcgcgcatgctcgatgccagcctggacggcgagctgcttcctccgctgtcgctcgccgtccttcgccgtatggcccgtggtgaggctttcacccaggcaacgctggcctggacgggaagcgcattcgaggcacaactggcctga

SEQ ID NO: 363421 - DNA, 1572 bp, Pseudomonas aeruginosa
atggatatcctgcagcttgctcctgccatcagagacttggcccgtgccaagcaaccggccgacctggccgaggtgtttctgcgcgccgccgtgaagatgtgcggtctgaacgccggatgttgctattggcgcgatgctgccgggcagatccttcaccctcttgcaggggccggaaaggtccagggggatctgccggccatttcgatggacgagatggacaaccccctcgtctacagtctcgttgcttcccaacgcttccaggtggagacgctcgacaacctgattggtgttggcgacagctttgaacagctgcgacagcagctgccggtccgccaggcactgcacatcacccccttacgcgatgaaaaggagcaggtctcgggggtccttgccgtggtgggagccccggacgcggtacgccagtggggaaactccgatgtctggcagatgctggtgcaggcttacgagcacatgaacatacgcgtcctggaggcgtccggggccaccgatacctcacggcgtcaacaggccgaggcggcgcggcgtgacggcgagcggggaagtgcgcgtgccgccaaactcctggctgccggattcgtcggaacgagcggaatcgccaagaccctgcgtaacgagatgctgcggctgtccgactcctcgctgtctttgctcatcaccggtgagaccggcactggcaaggaccatgctgcatggctgatacaccaggccagttcccgtgaagggaagttcattcccgtgaactgcgccgcgatacccaaggacctcatcgaggccgagctgtttggtgtggtgcgcggcgcctacaccggcgccacccaggcacgcaatgggttggttgccgaagccaatggcggcactctgtttctggatgagatcggcgacatgccgttgggactccagggcaccttgctgcgtctgttgaacgaaaagaggttcaggccggtgggcgccacgcgagaacaggactccgacttccgactgatttgcgcgacgcaccggtcgttaccggagctggtcaacgagggcctgtttcgcgaagacctgtatttccggatctgccagcacgtcctgcacatgcccgccctacgcgagcgcgtcgaggacatcccggcgctggcctcctacatcctgctgcagttcaaccgcgagcatcagcgcaatgtcatgggcgtttccgcccgagcattggtgcaactccagcggtgtcagtatcccggcaacatccgcgaattacgcaacctgctccagagcgctgcggaacgtgtggagcccggccgcttcgtccgcagcagcacgctggccggtgcgcagagcaggctgccgactctcacggcggtcaagggcgaccgggggctgctgctgcaggaactctggcacaccgacaaccttccccaagccctccagcgcttcgaggaaagcctggttcgggagcgtctgcgccaggccgaaggttcaagacgccgggcggccgaaagcctgggcattcccaaacgcacgctggccagaaaatgccagtcctggaatctggatgtggagcaatcaacgacatga

SEQ ID NO: 363422 - DNA, 522 bp, Pseudomonas aeruginosa
ttgcccgtggaggcgctgcgacagcccggccatccgccggcagtggtcgagccggaaatcatcgggctgctaaaagaaaatgaagcggaccgtgagccatcccaggccggggtaaaactgctgcgtgctcccgacaccttgcccggccagaagaggatcgcgatcaccgcaccgtcgacgcgcggcatcgccaccgaaccctatttggccatcagttgcctggcgaacatctcccgtctgcaactgatatcacgggcgcccgtcgacgtgaaccggatgaacatacgcctgctgctggacaatcgtccgctgggcgacgcgcggccatggcaggtgttggaggatggcaagatcgtggacgccgggcgaggactcgtagccatagagcaactgcgacagatgtcccagccggccagccagatctgggtggagagcgactatgccccgttcgacggcgtccgtttcgatgtctccggactgcatgcccagattttagcgcagcgggaggcatgtcactggtga

SEQ ID NO: 363423 - DNA, 1446 bp, Pseudomonas aeruginosa
gtgaacccgcctccgatcgacatggacatcctgctggcgccggtggataaagagcatcctgccggcgccttcgatgaagaagacaatgccttccaggagattgaccatgaaatggtcaagctcggaggccttcaggaacccaatcttgattggcgcttcgtcgacgaagcgtcgcgccagtacctgatccagcagtgcaagcattttcgcatcgccggccacctggtgaccgcgcgcttgcgcgagcccagttggcgagggtggggcgaagctgtcggggttctcgccggcatggtcgaccgctactgggaaacgggccatccgaaacccggaccaaccggatatcccgccaaacgccgtcaggtggccctcctggcggagcgtttgagcgaggcgctactcaaactgccggcggacgacatggctacgcctcatcaggaggcagcccggcaggcgctagaccggctgcaggcctgcgccgagagcgccaagctcgacgtccccctgctgactcgcctggaaacccagttcacccgccgtgtggaagagacacgtatccaaagcgccgaccccattcaggcgctcgacgccgccgaaggcggtcgaccaatcagcgaagcgtatttcaagtccgtgccgaccacgaacctgggcgatgaacgggaaagcaagcgcacactgttagccgttgcggacttcatcaacgaacagaatgcctacgatccgaccggatacctgctgcgtcgcttcgccctgtggggacacctaaccgcaccgccgaccgcccggaatgaccaacgtaccgaactggcgggcgtaccactcgataccgtagaggcgtatcgcgaggcgttggcgaccagcaacatcagcccggtcctgctgcagcgggtcgaaaaaagcgtttccaattcgccgtactggctgcagggcagcttcttcgccgcggccctcgcgcaacggatggaaatgccggaagtcgcctcggctatccgcctggcagtcgagcgcttcgtgttgcgcatgcctgggttgaaggcgctccattttgccgatggtcgcccgtttgtcgacggtgaaacccttacctggctcagcggtgccaacgaacaatccagtgcgacaaccgagggacgagagtatgccgccctgcgcgacgaactctcggcactgctggaaggtcagggggtcgagcatgtactcaagcgtcttgaacagcttcagaccgatgcagaagaccccaggcaccgctgccacatcctgaccattgccgctgacctggtggccgcgcgcggcttcacctggttggccaatggcctctatgacagcgcacatcgcctgatggatggagcatccatcgcggcgtgggagccggttcttcacaaccatcttgcggcgcgggtacacgcaacgcagccatctggccactcagggaacaaggaatag

SEQ ID NO: 363424 - DNA, 3795 bp, Pseudomonas aeruginosa
atgttgaaactatggtcgatggcgactcggttcggacggccgctcctgcgttgggcgaagcagggaacaccgctactgctggtgctcggattcctgttcgcgcttgtcgcgatctggtggctcggcccacaatggaactggaagacctacaccccgctggccagcctgacggccagagtgttggccacggtgcttttgttggtccttccgctgatggtctgggcccttcaactgcgccaccgtaatcgcagactggaggcggaacgcaaagagagcgcacagcgcgaagaagacccaggcctgcgttttgtccaggcgcaggagcgcaccttggatcgcagcctgaccatgctgcgcagcaacctgcgcggccgcaacgggctgtatcaactgccgtggtacctggtactagggcaggagaactccggcaagaccagctttatcaaccgcagcaaccagaacttctctctgaccggggaaatcaaggccggcagccgacgcctgcttgatgacccggatctggcgtacaccatcgactggtggatgggggatgaggcggtgctgatagacccaccgggcgaactcatcagccaaccacgggaagccgcggaaacgctctcggacgccgcgacatcggctgctgccgacacagcgaccgaaggggcggccgccgacgacacggccaccgccacaccatcgaccaagactacgaccgaggcacgaacgacgctgttgcccggaaagaagcgcgtattgcccgaaggtacccatgcgcgcctgtggacgcacctgatcgactggctggcgcgcaaccgcagccggcgcccgctcaacggcgtggtcctgatggtggatctggtcacgttgctcggccagccggccagcgaccgcaaggcgttggccattctgttgcgctctcgcctcgccgaactcagtcgccagttgggtacccgcccaccgctctacgtggttctgagtaaattcgacctgttgcagggcttcgaagccttcttctcccggttgccgaagtcggtcaaggaagacatcttcggcttcaccttcaccctggacgccgtacagaactacgacgcttggctgagtgaactggccgagcgctacgacggcctgatttccacgctgaacgaccgcatcttcgacgccttgagttcggcggcctcgatcgaggaacgagaggggctgttctcgctggtgcgccagcttgccggcatgcgccaggtcctgctcggcttcctggccgacgtattgggtagcgaccgctatgtcacgccagcgctaccgcgcggcgtgtatttctcgtcggtgcaccagcatggcgtgctgaccaacgctttcgtccgcaacgcatcgatgaactaccacatcgatccgccagtctcctacgcccagcctggcggacgctcggcggtgtacttcgcgcagcaactgttccagcgggtcatctaccccgaggccggccttgccaccgacaacgtcaaggtgctggcggacaagaaacgcgccctggcactgagcatcggcgtagcctgcctaggcagtctgctgatgggggctggctggtatcactactacggtgtgaaccgcgacaaggcgattaccgtgctcgaacgcagccgcgccttcagcgccaacaccatcgacaagcgcgccgaccccaccggccgcaacctgctcgaaccgctgaatcaaatacaaagcgccgtggccgtgttcggcgactatcgcgacgcttggccggtcgtctccgacatgggcctgtaccagggccgcgaaatcggtcccaaggtggacgaggcctatctgaccctcctctcgcaacgcttcctgccggccctggccggcggtgtcatgacgaagatagatgcgtcggacgccagcagcgatgaacaactggcggggctacgggtgtaccggatgctggaagatcgcgccaaccggcgcgcgcccttcgtcgaggactggatggcccgtgaatggcataccgcgttccccggagaccgtggggtacaagctgcccttaggcgccacctcgactatgcgatgaaatatgccgacgccgatctgccgcagtatcgcagcagggtcgccgaactgcagcggcagctacgccagatccccatgccgcaacgcgtctacatgtccatgcggcgtcaggcgggccaggcgctgcgcactccgctggagctgcgcagcgaaatcggcccggcctacgacgtcatctacaagccagacgcggttctggccgctggcgcaagcagccaggccagcggcagaatcgatgccttgctgacggccaagggctaccgcggctattttgagcctcatagcaaggatctggtcgacttggcgatcatcgaccaatgggccttgggcgaacgccagggcatcgactactccgacgccgacaagcaagcgctgagcgagcgtatccgagcactctacagccgtgactatatcgatacctggcagcgcaacctcaatcagttggaagtccgcgacttcgacgacatcaccgaagccgtcaacattctgggcagcgtcaccagccctgccgctcccctgcggcgcctggtcgaaaccgttcgggacaacaccgaactggcgaaggtggtggatgcggccaagggcgccgacggaagcgaagagaagtcggccgacacgaaggccagggatcgtatcaacgtcgatgcggcaccggaaattgccagcgtcgtgcgggccttcgcgccgttgaccgacctgcttgtcagcgacggcaagaaaccaccgtatctcgacgagaccatgcaggctatcgggcaggtgcaggatcaggtcaagacggtccatgacagcccgaaccggggcaaggccgcgcttaccgtggtgctggaccgcttctcgctgaaagggcctgatcccatcggcaacctccagcgaatcgccgccggcttgccggcgccgctgaaccagcaggtgaaaaagctggccgacgagtcgtcccaggtattgctgatcgaggcgctggcggaactggagcggcgctgggataccgaggtctatcgcttctacaacgagcgcctgctgggtcgctatcccttcaccccatcgagccgtgaagacgcctcgctggacgacttcgctgccttcttcggaccgcagggcaagctgcagcagttcaaacagcaatacctgaagctgttcctcgaggacaacctggaagcgctctactccgaacgtcgaggcggctacctggtgcggaccgatgtgctgacccaactggaagcggccgaccggataagcgatgccttcttcaacagccggggcacgttgctgctgcagttcagggtcgaaccactgggcctgacggccacccgccgctccagcgtgctcaacgtggacggccaattgctcgcctacagccatggcgcgagcaatgtcgcaccgctcatttggccgaacaccctgagtggcacggccggcagcggcgaaagccgcatcaccctggtcaatggcaatggcaatagcagcgggctggtctaccgcgggccgtggtccatgtttcgcctgctcagccaggcccgcctcaacggcgcgactggcacgtcggtggacatcagcttcaccgccagcgatggcggtatgcgctaccgcatcaccaccgacaagagcaacaaccccttcacccagcagttgttccgagggttcgccttgccacgcaccctgctgatggagagcgccaggcaggcggccagcgcgccgaccgacatccaacccaccacggtggcacgccgctga

SEQ ID NO: 363425 - DNA, 264 bp, Pseudomonas aeruginosa
atgccagaaatcatccgcaagggcgacaagaccgaccacggcgggacagtattggaggggttcgcccagaccaacctcaatggtcaaccaatggcgggcgtagggcaccaggtgtcctgcccgaagtgcaaaggcgtgttcccgattgccgaaggcagcggcaccctcaaagtggacggcgtaccggtggccctgcatggcatgaagactgcgtgcggagccggcctgatagcgagcggacccaagggaagcgcccatggctaa

SEQ ID NO: 363426 - DNA, 543 bp, Pseudomonas aeruginosa
gtgcgttctgtcgagaaactgattgaggtgcttgaactttgtgtgccgcaactggacccggagccgctgcgggccaacatgccggcgagcgacgagcagtcggatgtcctggattggatgctccaacaccttgagcaacaggagctatgcgtctacgaggaatggaaggagtacttcgggcatgtgcccgaactgcgccctctctccgccattgatttttccgccttcgacagcgaatacatcgttggcttggtggaagatatagacgaggaacagctgaccccggagctggtgttttccataccctatgaaatgccttatctcgagtatctgaatgcctacctgtgtgagcatgggctgcgagtggtcgacctgcttccctttgaaaatgccttcatgctggccgtgaaagacgacgagccgcttctggaacggctcagtcactgcctgcaggcgttcggcatggacgtcaacccgcgcggcgcactgaatgggcaagaggcaaaggcccactttgaaaagcttttgaccgccaagtcctga

SEQ ID NO: 363427 - DNA, 1161 bp, Pseudomonas aeruginosa
atggaatcggcccacatgtcagccattgccacacgtaccaccaaccctctgccattccaggatctcgaacccaagcgcttcgaggacctggtccggcagctcgcctatgacttccggccctggcgccgcctggaagcgacaggccgctccggtgcggatgagggtttcgatgcgcgggcgctggaaatcgtcaaccccgtatccgaggctcggctactggacgacgaagaagacgaagccgatgacgccgtgctctcctctgccgatcgcctatggctcgtccagtgcaagcgcgagcgcgccatcgggccgactaaggccgcctcctatctgggcgacatcattctccccgccgacccgcctctgtatgggctggtgtttgcagctgcctgtgatttctccaaaaagacccgagacaccatctttggctggtgccgcgaaaagggcattgaagaagttcacatctggggccgcggcgaactggaagatatgctgtttcagccgaagaacgacaacctgttgttcgcctacttcggcatctcggttgccattcggcggcggacgcaaagtacgcagttgcgtgcagaaatcgccaccaagcgcaagctgaagcggaccatcatgacgagctctgccgaggtgctggtgcgggacccagacgccagccaatacccgatagtggaggatggtaaagagccgaatttgtggcgaaccttcgtaccggaagagctttctcactatggcttgatgatgagcttgggatggcattgcgcttacatcgacatcgagaccggcgagtgggacgcagccgacgtcgtgaagaaccactacagccagaatccctggcgtatcgaagaccccaagaagcagcgactcgccgaggaagcgagccgcatctggcacgattttcccgatacccaccgagggtggctgaaagtgtcgggatttatcccgtaccggaacatcctggccattgacgacctcggcgacgagattttcaacggcacgcacctgtacgtcccgtttcatcccacgtacgggcccttcgacggaggaggatcctgggtgaggttgacgaccacctcttcctatggccgggatattgagccgctaccagaaaagcgcatcgagaaatttcccaagatgctgcggcgggtctga

SEQ ID NO: 363428 - DNA, 1047 bp, Pseudomonas aeruginosa
atggaattgaatcaaaccaggaagcatctaaatgtaccgttgaacaatggaaaccatgggcgtcgcgcccgccttcgtggatgggtttgggggcttgtactgttggcgggaagcgccgccgccaatcagccttacctgcagctggaagagcacatggtggacgagccataccagtggaggctctccacgggtgaagtgattagcgacggcttgagcgatcagactgcgcgggtcttggtagcaccacgcgtaggtcacgaagtctacgaggtcgagctgctgggggggcgtttccgggtgacggtgccggcgcgttgctggaaattgccggcggcgcagtttgaaggatgtgcagtcattggcccacgcgaggactcggcgtggcaacgcgagcaggccgacgcactcgcaaaacaggacgctacgcgccagcgcaatcgtgaagtgcgcctagcctgggcgctagaccaggtcggccttgagcgtgtgccgcgcaccatagaagccacgttggcacagcaccggcgctggcttgcatcggatgcgggggcagcgagttcgagggagatttcttgtcgtccgctggcctcagcgctagccgccgcaccttcgcaggacacgctgcctcgcgaagacatgttaagaggaaaatctgaggccgtcgcggcatatgcgcaggccgcgcaaggcgggaactggcgcgcggccggcgggttgctcgacgcgatgttagcggaggaggattttgaatccgcatacgtggttgtagcctggctgttaaaaaaagagatccccgccggctactacaagcttggccggctgatggacgtaactgacgactacacagcacacgagctatacggagacaccggaccaacgcgtggcggtggctcagtgattgagagtctgcgccgacatgcagcatggttgggggatccagcagcgcagaaggacctggctagccttctggaagactctggcgatgaagtcagcgccgcccgtctacgcaactgcgccactgcacagtcccccgccccggcacggtga

SEQ ID NO: 363429 - DNA, 2481 bp, Pseudomonas aeruginosa
atgaccactagccgactgcctgacaacgtacacagcatcccttggcaactcaccgtcagcgaccgcaaaaccctcacctgcgccgagtcgacggacgatgccatgtcgtgtcagcgcacgttgtacctgggcttcttcttcgacggtacgcgcaacaacctgcattacgataaagagagcaagtcacacagcaatgtggctcggctgtatgacgcatttgaggaagagcggcgcgatggagaagaccgccagtaccgctatgccgtctatgtccccggcgtcggcaccgagttccgcaagcagataggcgacaccggtgtgggccagcatgccgcggccggcgccgccgccggctggggcggcgaggcgcgcatcaactgggcgctgttgcagttgcagaataccctgcatcttcatgccttcggtaagcgcctgacggaggaagatgaagaccgcgccctggtcggtcagatgagcaccgacatcaacctgaaacgcatgcaggacctgcgcaacagcacggccacggacctcaagcccaaggagccgcgcgaccgccagctgcgcggcgaagtctcgacacggcaggcgtttcaggccgttgccagcacgcaatggcgtgacaccgacgtcgacggccgtcgccgggtgctggcccagcgccgcgtcgagctgcgcgacaagctgacccccgtgctgaacgggcggctgccgcgggtcgcccagattcgtctgtcggtattcggcttctcccgcggcgcggccgaagcgcgggtgttcgtcaactggctgcgcgacctgtgcgacgaggccaccggcccgctgcgcatctgcggcgtgccggccaaggtggatttcctgggcctgttcgacagcgtagcctcggtgggggccgcccaggggtggctggaggactacgccaccggccatggcggctgggcgcagcgtagggatttacgcatccccggcccactggtggtgtcgcgctgcctgcacttggtggctggtcacgaagtgcgggggtcgtttccggtcgacgccgcctccggccccaacgtggaggaggtggtgtaccccggcgtgcactcggacctgggcggcggttaccgccctggagaacaaggccgcagcgtgcgcgacgaggccaagctgtcgcagattcccttgtgccacatgtaccgcgccgcgctggcagccggcgtccccttggtggacctgacgagcgccccgccgggcttgcaggatgcgttccgtgtggataccggcctgattgggcgtttcaatgcctatatcggccagttgcgcacccaggggagcgaaggcgccgacacccaggccctggtgcaactgcactaccggcagtacctgcactggcgacgctaccgccttgggcagcacaagaacttgccagccgtcattgccagcagtcgtcaggaccgcaccgatttgatattggccgacaacgaactcaaagaagaatgggacatgctgttgcgtgcccgcgaggtgatgcgcgcgcgcaacagcacctggggctcccacggctataccggcttcctggtcgacggcggactgatgacgctgggagtcatggcccggtactggtccgccttgctgggcggcaccttcggctttgcgggcgcggccgcgtttgatgacttgcccggcggcgctgttgccgccatcaccccactggacaccgcctattggagtctggatatgttcgttgcgctgaccaaggcagcggagagcaagtggacccagtggacacaggtggagaacgcctggaacagaatcggcgcgcctccatcggccgcgtgcgcgctgttcgagcaggatgtgcacgactcccgtgcctggttcaagccactgggtgacgacgatgatgtctgggcagacaagcgccgggcgcggttgaaggaattgctgaagaaggagaagcaggccgaacgtgctcgcggcgttcgcatgctggagccggccgggtccctggccatggccatgtatccggtcatcaccgaacgtgagcgcagcgaactggcccgataccgcgagcggctgacggcgctgtcggccagcgatggccaatttccggacgacgccctacccacccaacccggcggacgcgagttctacattctgtggggctatctgcgctggcgcacggtgtatcaggaccctattgaagacttccgcgctcgctacccggcactggcacaagcgaatcgtgacacgctcaaggcccgaaaaaaagcgctggcgcgcgaagccgccaagctcgacgaacgcgcgcgccagatttaccaaggcatgggtaactggagcggcggtggcggccagtttggttttgggggctacagctacaacactcaggcactcattgaatacggtgccgcggcgacccgccaggccgagatatccgccgagcaacgagcggttgatgctttcctggaagagctggggccggcgccatggtggtaa

SEQ ID NO: 363430 - DNA, 591 bp, Pseudomonas aeruginosa
atgtttaagaccgcctgccatctcctgctgtcggccttgatggcgatggccctgaccggctgcaagccggccgacccgccgccggcggccaaggccgacgcagacatgaagtcgttgcaggtcagcgtcctgaactacaccgaccactacatcggcgtggtgtatgtggacggctcctgggcaagcaatgccatggcgcacagtggtggcgggaagtttgcaggctccgccgaagtgcctcgccagtgggatccgaactacaagctaaccatacattggcgtgacgaagcgctttacgagaaggacccgcaggcgctctacaagcgcgaggtggtgcccgagccgtatcagatggatgaaagcggccgcatgacgttcctgtgggtcgcattcttccccggcgatgtggtcaagctgtacccgacgtgggtggcgcccgaccatcccgactttcctgatggcttgctatccccaaagatgcaatgccgtaaggagcgccccaatacggattggtgcgagcacagcggctgggtgaagcgggaccaggccaaacgacaagctgcccaggaggccgccgacaatgaccactag

SEQ ID NO: 363431 - DNA, 582 bp, Pseudomonas aeruginosa
atgcttaaggccgcctgccatctcctgctgtcggccttgatggcgatggtcctgaccggctgcaagccggccgacccgccgcctccggcggccaaggccgacaccgacatggtgccgctgcgggtcaccgtcctgaactacaccgacgagtacatcgacgaggtgtacgtggacggctcttgggctgccaacgccatgccacatagtggcggagggaagattgctggctccgccgaagtgccgcgcaaacgcgacccgaactacacgttgaccatccaatggcgtgacgaagcgctttacgagaaggaccggcgggcgctctacaagcgcgaggtggtgaccgagccttaccagcagagcgacgacggccaaatggctacgttgtttgtggccttcttccccaacgacgtggtcaagctctatcccgcctttgttggtcccggcaatcccgactttcccggggggctactcgccccctcatgggaatgcgagagaaagttccccggggacgccaagtgcttcgccccgtcatctccacccgagccaaggaccgccaatcagataaagggagaggcgcagtga

SEQ ID NO: 363432 - DNA, 807 bp, Pseudomonas aeruginosa
atgtggatagacagcccggatgaacaagggatgcggcgcctgataacgctcgtgcaagagcgacatcacctaaacccgcaagcccgaatccacgccttgctggacctgtccttcgcggagtcgggcctgcgcggcagcatcgccgaagcctatccacacgcatgcaatcttctccaaggccactacgccggcgcaggcctcgaccgcgtggacagcagcctgatggaactaccgcaacctgcggacgaatcgatgatggcgctcatgcgactctgcgcgggacgccccatgctcagcttcattctggccagcgcaacgctggaacagctgcaagctcacttgcgccaacagctggaggcccaggacgaccagggagatgtcttcatcctgcgctgggccgatacgcgatgcctgccgaccctccatcagtgtcttgatgacctgcagcgcagtcgcctaatgagcggcatcaatgcctggctgtatctgggccgcaacggtgagccacaggtcatttcggcaagcgcacagcaaactctcccgcctcatcgataccctgcgccctacacgctcgacaccacgcaaatccaagccatccgcgcgggagcacaccctgatgcactgctttcgctcatcgcaagccgcccgcatctgtatgggaccttggccgggcaaccttccctgcgacacgccgtggttcgctcggtccttcagcgcacggacggcacaacccacacaggccaactgctccgcgccattgctgaaagcctgcaggcccagggcctgcttgaggaaaaaatgccatga

SEQ ID NO: 363433 - DNA, 351 bp, Pseudomonas aeruginosa
atgcgccacatcgcccaccagggtgaactgttgatgcaggcccagcacaacagtgcacgactggaagccgaaaagagcgtgcaagtcaccgcgagccaggagcatgtcctgctcagcgccaaaacgcacctgaccctgctctgcagcggtgccttcatcaaaatgcaggatggcaatctggaacttggcggaccgggaaagctcaccatcaaagcggctgaccacctctttctggggcccgccacgcgggaccacccgctgccatccttcctgccgccgggcagcatctgcgtcgaatgcctgttgatggcagcccaggccggtagcccgatggcgcgcaaggggctgtga

SEQ ID NO: 363434 - DNA, 294 bp, Pseudomonas aeruginosa
atgactcataaatacgaccgtcgcctgctgtttccgattggcgcacttatctttagccaaggtatcgaccgcctcatccgcgaaggccggctcgaacctataccgttcttccagcgacatacccgtggcgactggggcgacgtcaccgacgcgcaatggcagcagaacaacgctgcgctggagtccggagcacgcctcgattcgctctacatcgtcacccgtgaactgagcatctgcatctacaccgatgcggaccgccgctccacccacatcgtacttccgtccgaacgctga

SEQ ID NO: 363435 - DNA, 717 bp, Pseudomonas aeruginosa
atgctacgtctgttcaaccgtctcagcggtaagctcgacacctcaaggctaccaagccgttccggcgaaattggcgactacctcaaaaacttcgagcatgcggtccgcttcacgcgcagctgcggcttcaaggaagcccccccaaactggatcgagcgtgacctcctggacacggaaggcacgttcatcgaacctgccttccgtgcggccggtgtcgtcgacccggccatggctgccggtcaatgcctgaaatggtgccactacctcgcgccacacttcgagcggcaaatcggcgccaaggtctgggtcacgatcgggcaattgtggaatggcgaccagccgatattctcgcccacctggtccgcactcaagcgatgggctcgcacaggcatcaccctcggcgaactccaggcgggcggcactatgggcatcaacctgcatgcctggctgaccgtggagtccggcgagatcatcgagccaaccttcggcagctcgctggccgctttcgccggcgacgccttctccaagttccgcggcgccgttgcgtggggacgagatccccatgtcctgaaccgccaccgctactttcccatggccgtgggacaggcgttcgccgaagccatcggcagcacgcccgaattgcctcttctggcaaccgacgcggccgacctgcaccgccttcccgtgttcctggtggcgtcgacggtagaccggtag

SEQ ID NO: 363436 - DNA, 180 bp, Pseudomonas aeruginosa
atgtgcaagttccgccgaaagcttgaaaacttcaagacggcagtcctgttctatcgccttgactggctctaccactatccttccgtacggcttcctctggtagttcggctgctcaatgcgatccgctgcggattgcgtgacttcgagaagacctctgagcgttgccgctgtggcctttga

SEQ ID NO: 363437 - DNA, 585 bp, Pseudomonas aeruginosa
atgccatccctatgcctctgccagcgcccggtgtgctgcgcattgctggccatcgtcaccctggcggccggctgcagcaccgtgacggcgccgctcggcgaatcgccgaagattgcggcttccgaccttgccccgacgacacccgactacattcccgtggtgcgccagggccgctacacgctggtggagcttgcgccggccgcggcgcagcgcgacctcctgctgcaggtggtggacgtgtccttgcctgcggacgcgcacgccagcgtgggggatggcctacggcacgtgctcaagcgcagcggctaccggttgtgcggcgacacgcccacgttccgcgagctgtcttcccttcccttacctctggctcaccaacaattggggccgatgacgctgcgcgatgcgctgctgacgctggccggccctgcgtgggcgatgcaggtcgatgaccgtgcgcgccagatctgcttcgaccgggcgagtgccatccctgcggccgccgaggtgaccgaggctgcggacagggccgagtccgacaccggcgtggtgcaagtattccccatcggcgtaggggcacagccatga

SEQ ID NO: 363438 - DNA, 681 bp, Pseudomonas aeruginosa
atgaacgagcctctgccccagccccgcgcgacggcacgtccacgtacgctttccctggtcatcatcgtgcaatgggcctggctgcttggcctgagtattctggtgattgccggctggcggtccagcattgatgcggaggatccacaagcaacggcggccacgcagcgaagccaggcgatcgaagctcgcctcgtcgcactggaggaaagcaatcaggcccggctggtacaggctccaccagccacacagcaggccctgcaaagcctgcgcgagtcgctggaaggccgtctgcaacggctggagcagcagacggccagcgaagccccggacagcggtctgcaagccatgcgcgtcgaggtcgaagcgctgaagacccagcaggccgcgctcaagctcgcattgaccgagcgcgccgcgtcgcgccacgtcaccacgcccgtgcgggaggtgcgcccaacggcgccacgcgaagaaccgctgccgttccgcgtgctgggcgtggaacgacgcgccgggcagctcagcctttcggtcgtgcccggcgaaggcgcactagccgccaatagcatcctggtgatgcttcccggagagtcactgggcaagtggcgcctggaaagcgtggcgggcggcacggccgtgttccgcgccggcgagcacgtacgccgactggcgattccgtga

SEQ ID NO: 363439 - DNA, 744 bp, Pseudomonas aeruginosa
atgaaacccatcttcgttggaatcgttctggccgccgcgcaactttcggcctgggctcagctaccgggtacgcagttgggagccatccagcactcacgtcctgtgcagagccaggtggaacaaagccgcgagcagcgcctggctgccgattgggggctgcgtaccgaagaatggacgcgctaccaggaaatcatggaaggcccgctaggcatctattcgcccaacctggacccgttgaccgccctgggcatcgaagcccgctcggacgccgagcggcgtcgctatgcggagctgcaggtgcaggccgaatcccgcagggtcgaaaagctgctgacctaccaacgcgcctacgacgatgcctggcagcgcctgcaacccaacacccagcgggtcaatctgcctggcgccgtcgcagggttgggaccgacagccccaggtgccaccccgctgggagtcaacggtcgaacagccgtgttcgtacgggacaactgcccgccatgcgaggacgtggtgcgcaagctgcaagcgtccggaacactttttgacctgtacatggtcggcagccggtccgacgatgcccgcatccgcacctgggcccaacgcgccggcatcgagccggggaaggtccgcgaccgtgctattaccctcaaccacgatgacgggcgttggatggcactcggcgttgccggtgaattgccagcggtcgtgcggcaggtcaatgggcaatggcaacggctgccatga

SEQ ID NO: 363440 - DNA, 579 bp, Pseudomonas aeruginosa
atgaaccgtctgcgtagcgtgctgctggcactgctgggcctgtgcctcgccggtcgctcgggtgcccaggagattcccccgccggcctatcaactggccgcccagcgtgccggtgttccctcgcctgtgctgtatgccgtggcactgcaagaaagtggcgtgcgcagtggcggccgtgtggtgccctggccctggacgctgaacgtagccggcgagtcgcgccgctacgcgacccgcgccgccgcctgcgctgggcttcttgaggcgctgcgcgtcttccccgcaacgcgaatcgatgccggcctgggacagatcaacctggggcaccagaagcaccgctaccgccgcccctgcgacttactcgacccgtactacaacctggcccagtccgccgacatcctgcgcgagcagcacagccccgacgaggactggctgctcgccattggccgctaccaccggcccgctggcggcgaaccggcagcgcgctaccggcgcggcgtttcgcgccatctacagcgcgtccaaggcgcttgtacgttcgccacctcggcctgcctcgcccgcaaggagcatcaatga

SEQ ID NO: 363441 - DNA, 558 bp, Pseudomonas aeruginosa
atgagccacctcatcacgatcacgccccgtcgcggcttgctgcatctgtccttcctgttggccgcggccagttcacctctgaatgcggcgcagccgccttcgacgcttatcgtcgtcgaggaccgcggcggcacatccgccttgccgtactacgaggcgttgagccttcagccccgcgaagcgccggtcgcaccaccgttcagcttgcccatcccgcccaccggtaggggcgaggccgacatgttgccggtccgtacctcgcgcatgtcccctggcgtcgtctccccccgcgtgctggaagccccaggcctgaccccgcttttcctggtcggcgaggacgaacgctccatcgcttggttgcggcgcaatgccgcatcgctgcgtgagcgcaaggccgtgggcctggtggtcaatgtgcagacggccgaggcgttggctcgtctgcgcggcgtcgcgtccgggctggagcttgcgccggtgtccgcggacgacctggccgagcgattgaacctgcagcactacccggtattgatcaccggtaccggcatcgagcagtga

SEQ ID NO: 363442 - DNA, 750 bp, Pseudomonas aeruginosa
ttgagcgacgccaccgcatccgccgcgcgtcagcagccacggcgccaaggcttggtgggtagcctcgtcacgctgccgttccggctgttcggcgtgttggtcgcatcgctcttgctctccatcttggtcgaatgcgtcggcatgcactttttctggaaggagcagggctggcgacactcccagaccatgctgcaatacgaacttggccacctgtccggccaattcacccgtagcgcgctcgtccaggagcccggccgcacggcgcaccacctggtcgacaccggctaccgctggctgttcgtgcgcaccggcctgctggagaggatggagcgcaccgcagaacaggccagagcccccagccgcagcagcgcgagggactttcgctatttcatgagccaggcctacgtctgggccgaagcctatctggtcgccgccgccttcaccacgctgacgttcctggtgaggttgctcgttctggttctgaccctgcccttgtttctgatggccgccttcgtcggcttcgtggatggactggtgcggcgcgacgtgcgccggttcggcgccggccgggagtcaggtttcctctatcaccgcgccaaggcatcactgatgcctctggcggtattgccgtgggtgctttacctggcactgccgttctcgctgcatccgctgctggtgttgctaccagccgctgtgttgctcggcttggcgatgaacctgaccaccggcagcttcaagaaatatctgtga

SEQ ID NO: 363443 - DNA, 639 bp, Pseudomonas aeruginosa
atggacgaagcggtggaacaggccttcctcggcggccaggcggagcaggaagtccaggtgggtgtcgccggcctgcacgcagtactcgcggggcaggtgttcctcggtgaggttttgcgcgtaggcgtcgatgcgctgttcggcgagcagggtctggagaatctgcgggacgctggtctgctggaagatgcgccagtccgagcccagcgccaggcgggccagcggcggctcgaccacggcgcggtagcgggtgcgtcggaagccggtgtcgtgttgttcgaaacccgagaccaggccccagacgtggcgcacggccacgccgccttgccagagggtgaagtgggcgggttggtccaggacctggccgaagtcgatggcggggtcgaagctgctcagtgccaggtccaggcggtaggtctcggacaggccctcttcgagggtgaactcgacgacgtcgaagtcgacatcgccgacgacgaaggtgaagcgcaaatcggactgggtggacatggggggctccctgctgagccggaattcatccggcaggccattcgaacgggggttcccttctcaagcacgttttccgtgtcttgccgttggaagtgccgtagatgtccatggagccccaagcatcaatga

SEQ ID NO: 363444 - DNA, 1119 bp, Pseudomonas aeruginosa
atgaaagcaataacaagcgtcgtgatggtggctttgggcatatcccagtgcgtcctcgcatcggcacaagaggacgatgtcaggattggcatcgccgggccgtttaccggcagctatgcccgcctgggagctcaggtgtggaatggcgcacaggctgcggtagaccagatcaacacccaagggggcatcgaggggaagcggatcgttctggtcaaaggtgacgatgcatgcgagccgaagcaggccgtagcggtggcgaaccgcctggtcgacaccgagcgcgtcagcgcggtggttggccacgtctgttcgtcctcgaccttcccggcatcggaggtctatgccgatgccagcgtgctgatgatcacgcctgcatccacggccgacaaaatcaccgaacaggggcttgacaacgtactgcgaatggtcggccgcgatgaccagcaaggagttgtcgccgccgactacctgcgcacacaactgaaggccaggcgcgtagcaattgtccacgacaaggactcgtatggcatgggcgtggccctggccgtgcagaagaagctcaccgaggacggccagaagccgatcctgttcgagggattgactcgcggtgagaaggacttcaacgcgctggccaccaagataaagggtgtgcaggccgatgccgtcttctacggtggtttggctgtggaggcgggcacgctggtacggcagctccgcgaagctggtatgtccgtgccgttcgtcgccggcgatggaattgcgtccgacgacttcaccttcgccgctggcggcggccagttcatcgacggcgtattgatggtcttcggcaaggatgcacgcgagaatccggacagccagcaggcagtcacagccttgcgcaaggggggcttcgagccgctgggctatacgctctacgcctatgcctctgtgcaagccatcgcccaggccatgcaggcaacccactcgcgtgatggtgcccgtctcggtaaatggttgcgcggcaacgaggtgcatacggttgccggtccaaaacgttgggatgcccgaggtgacctggcaactcctgatttcgtgatgtatcgctgggatgcccagggcggctacgccgccgttcgctga

SEQ ID NO: 363445 - DNA, 915 bp, Pseudomonas aeruginosa
atggcgattggtcaggtcagcgatatcgacattcgtctgctgcgcgtcttcaagagcgtcgttgagtgcggcgggttcacggccgccgagatcgagctgaatatcacccgggcagccatcagcctgcgcatggctgacctcgagcagcgtctgggcgtgtgcctgtgcaagcgcggccgcagcggcttcgcattgaccagcgccggtcaggaggtctatgacgccacgctacagctgttcgccgcactgggaaacttccgcacgcgggtcaacgccacctcgtcgcaactgcgcggcgaactcaacatcggcatcaccgacaacctggtgacctcgccgaacatgcgcatgacacgggcgctcaaggcgctgcgaagcatgggcccagacatccacgtcaatgtccgcatgaccacgcctggcgaggtcgagcgtggcgtattcgatggacgcttccatctgggtgcggttcccgagcctcgccgggtgcagggtctggactatcgcccgctgtacggtgaggagtcgatgctctattgcggccgcgagcaccccctgttctcggtgcgggacgagcgtaccctcttggagcggattcccgagctcgatgccgtcgtgctggcccagccgcaacaaggtcaggtgattcatcgtaatcagcagctcaaggtcatggccagttcaagtgaccgcgagggtgtggcctttctcatcctcagcggtgactacatcggctatctgcccagtcactatgcccagcgttgggttgactgtggccgcatgcgctccctgtgccaggagcgctaccgctatgccacccagtaccaggtcatcacccgcccggacgaagacgccaacgtgctgttgcagcactacctgcacgcgctggactcgctcgcgccagacactgcctga

SEQ ID NO: 363446 - DNA, 1320 bp, Pseudomonas aeruginosa
atgacgaccaaaccctcgctcgagcattggtggatgccattcaccgcgaacagcgaatttcggcgggcgcgaaagccacgcctgattgcgggagcatacgacacccactacgtcaccgatgacggccgtgaactgatagacggcatgtgcggcttgatgtgctcaccatgcgggcacagccggccggagattgcccgtgcagtggcccagcagttggaacagatgtcctacgcgccggcgttccaggtggggcaccgtctgggattcgagctatccgggcgtctggttgcaatggctccgcccggcctgacccaggtgttctacggcaactccggctccgaggccgtggaaacggcgttgaagattgcgctggcctatcaccgcaagcgcggcgaggcacatagaacacgcttggtcggtcgcgagcgcggctaccacggggtcaatttcggcggcatgtcggtcggcggcatcctcgccaaccgcgaggcgttcggacctggcctgccgggcgtggtgcacctgagccatacctggcatccccagcatcgcttcagcggcggccagcccaagaccatgggccgcgagatggccgacgagttggaaatcatctgccgcaagataggcggacacaacattgccgcctgtatcgtcgagccggtcgcaggctccaccggcgttctggtaccgccgctagggtatctggagcgcctgcgggaaatctgcgataagcatggaatcctgctcatcttcgacgaggtcatcaccgggttcggccgcctttcagccaacttcgcctcgcagcgtttcggggtcacgcccgacctcctggtgctggccaaaggcatcagcaacggcgcgattcccatgggtgcggtcatggtggccgggcacatctacgaaacgctcagcgaccaaggccaagccagcggtatcgagctgttccacggctacacctacagcgcgcatccggccgcctgcgccgcagcgctggctacgcttgagattttcgagcgcgaacgcctggtcgagcgtgccggcagcctcgaagagccattccagcacgccgcacgcagcctttgtaccttgccggtggtcaccgacgtgcgcggcctgggcatgatggccggcgtagacctcaagccgctgaaggagcctggaaaacgaggccagtccacgctgcaggcactctacgacgctggcgtgctggtgaaattcaccgccgacaccatgctgctcggtcctgcgctggtcatcgagccggacgaaatcagcgtgctgttcgaacgtatcggcaacgtcctcgccgacctgacctga

SEQ ID NO: 363447 - DNA, 1506 bp, Pseudomonas aeruginosa
atgaccgagactctgcatcacttcatcggcggtcgcgccaaacccggccgcggtgcgcgccagggagacgtatacaacccgtccaccggaaaggtcatcgcgcactgtccctacgctgacctggacgagatcgacgcagccatagacgtggcagccaacgcccaggttccctggaaactcacctcccttagtcgccgcatgcaggtgatctacagcttccgccagttggtgctggacaacgtggagacactggccgaggtcatcggccgcgagcagggaaagaccctggaggatgcccgcagcgaggtggagcgggcggtcgatgccatcgagttcgccaccagtgcgccccatcatctcaagggtgagtacgccttgcgcgtgggcggcgacgtcgacaacttctcggtgcgccagccgctgggagtggttgcctgcatcgcgcccttcaacttcccggccatggtaccgatcttcatgagcgtcatggcggtggcctgtggcaacagcgtggtgctcaaaccgtccgagcgcgtgcccggtgcagcgaacctgctcgctgaactgtggcaacaggccggcttgcccgatggcgtctggaacgtcctgcatggcgatcgcgagaccgtcgaagggctcatcacccatcccggagttgccgccatcagcttcgtcgggtcgacccccgcgggtgagcacattcaccgggtcggaagcctgcacggcaagcgcgtggcggccttcaccggcggcaagaacatcatggtggtaatgcccgacgccgacctcgaccaggccgccacggcatttgtcggcgccgcttatggctcgaccagtcagcgttgcatggcggtgtccattctgatgccagtaggggacggtacggcagaggcactgctcaagcggctgttgccgaagatccgggaactgcgggcgggtccgtacaacgatccgggtgcgcatttcggtcccctggtgagcgcacaggccaggcagcagacctgctgggccatcgaggaatgcctgcatgcggggggcgagatgctcgtggatggacgcgaggtagaggtgcttggacatgaacagggtttctacctgggcgccacgctgatcgacaaggtcactccgcagatgcgcctctatcgtgaggaaatcttcggcccagcccgcgcggtggtgcgggtgcagacgctggacgaagctatcaggctggtgaacgcccacgagttcggcaacggcgtggcgctgttcactcgcgatggctacgcctcccgacagttcttcgagcaggttcaggttggcatgatcggcatcaatgtgcctattcctgtgccggcgggcttcttcaacttcggcggtttgaagcgttcgaagttcggcgaggggcacctctacggaccggatgccgtgcgcttcttcagccaggtcaagacaatttcgcagcgctggcctgctccagatgaggggacacaggcggtcgtgctggggttcccgcaacacggatag

SEQ ID NO: 363448 - DNA, 210 bp, Pseudomonas aeruginosa
atgagctatctgatactgaccagaagaccaggacagcgagtccgaatttcggcgcgtccaggcgcaaccgatgagcagttgctgcactcgcttcgaaacgaaggaatcgacatcgtactgtgcgaggtatccggaatgctcgtcaagatagggttcgatgcgcctcgggtaatcatgatcctccgcgatgagctaagcgccgactcctga

SEQ ID NO: 363449 - DNA, 1509 bp, Pseudomonas aeruginosa
atggacgccttccctccctacccgccgagcgactttcccttctcgttgatacggcccgggggacgggccacgatagccggaggagcggaccgccctacgcgcacgattgtggaagccgtgcttcgcgtttcattaagattgggcgggcagtgcgcgaggtgtgccgaagtggtccccggtgtggtgatgcgggtgtccgttgagcctgcccgagccactaacctgaaccggcacctgccgttcgatgagatgtggggctatctgagcacagaactcaaagcatggctgaccagcgccaagccatcggctggcatcaggctcacggtggcgaacagcatgcacttcgagtttggcttgagcgacagagtgcgaatgcacgatgcagcgatgtacctgaaggtgcagcacgacaagagtttcctggctcagtaccgcaagcagcgaaagtgctcgccgctggtcgagcacaccggcgagaatccggggccgacgtcggttcgtcaatgtctgcaatacgccttgacgaagagcctccagaccaacagcccgcagtatgcacgcctgcctgcccccatccgctaccgcgtgacgggcgcattggacgcatggcgttcatttcggcgcgacgccggtcccggcttgaacctgtcttcgctgcttgccgactcgtccatgacgacgatgatcaagttctacggtgaaatcgttgcaaggctgctatccaatgggactgccgaccactccgtggaaaccctggtgctgcaaggcgttcagagcgtcgtctggcaggcgttcgaggtgcgcggcggcgtgttctacgagccaagcgcctcattgcaccgattgcttgacgcgagctacatggcagacgacgtggtcatcggccaactgcggctacccgacaaagcgctgtgcatcatccccgaacctagtcgctggagtcagccgggcggatacgaggccatcgtcattttccagtccgactccttcatcaactgtgtgacctgggcacacgagaagaacgcggagcgcagtgtggtcatggatatcatcgaactgtcgctcgccaatccggagcggaccatccgcgaactgctggacgatgctttcaaagcgaaacaagcccagttcgcgcacgtgcggcagcactggcaggacgcgctcgactacgccatcaagatgctgctctatctggcggttcgcgatgcccatgtcgtacatgacctagcctacagcaacgcccccagaaacttctcagggctgggcggccgcaaacgggagcagcgactggcggagattgaggaactctacgatcgccacatcgttggaccggcactgctggatgacgtgatggacctggcggatccgggcacatcgggaggcagggaggtatccagtcattggcgtcgaccgtacttcaagatgcagcactacgggcccggctcatctcaaagaaagctggtattcatcggccctaccattgtccgcgctgaccgtctgggacgctga

SEQ ID NO: 363450 - DNA, 1194 bp, Pseudomonas aeruginosa
atgagcctcgatgtcgcatcccttcgtcgcgcgctctgcctcgcaatctctctcgggattgcggtgctggcgggaatcgcccatggcaagaacgtgaaaccgcctctgcccgattggcaggcgctggccttcacctgcaccaccgaacagaacccgcccgtcgacccgcaggccgacgcctggttcttgcgcgcccgtgaactggaaaggcagaacatcgaggcacatgacgccgagatggtcaggctttaccaaatggctgccgaccgtgggcactacaaagccatgctcaacttggcgggactttacagtcgcggaacggcagttccaagggatgaaagcaaagccatagacctcgtagagcaggcattaaagctgaatgctccgcatgccttttacaccatgggcgtgatgttgcagcagggcattggcgtcaagcaagacgacgaggctgcgctgagctattttcgaagggcagctgacctaggcaaccgttacgggcagcaagccgcaggagaagcgatacgcaatgtatttgccaaacaacttgagccagaacgcacccgcggctatgcaattgcagtgcagatgctggagtgtgctctgtcacaggatatggcggaagccggatatacgcttggctggcactttcttgactttgaagaagacgcatcgatagcacttgggtacttccagagagcggctgctcttggcgatgccaagagtatctatatgctctactcaatatttagggagggatcaaatggtattgagaaagacccacagcgcgctgcctgctacgacaagctatggtatgaagctaaagccgagccaggcagaaaattccccgacatcgaccgcctttgccccttgccaccgccgccagttcgcaccggcatcagtggccagttgtccccgcgcgtaggcctctggcatcaagccgacaatcccgccgtgatgttccgcgcatcgtccggcgacatcttgcccgaggtggacggcgttccggtgcaatgggcgtgggaggcctctcccttcgaaggttcccgcctggcctccggccaactctgcacctggcccggcacctgggcctgcgaagacctgccggtgggcggacgccacttcgagcatggcgagccgttcccggaagtggaaggccgcccggttacctggcgcctgatgccgcgcgcatga

SEQ ID NO: 363451 - DNA, 1188 bp, Pseudomonas aeruginosa
atgagccccgatgccatctcccttcgtcgcgcgctctgcctcgcagtcttgctcgggattgcagtgctggcgggaaccgcccatggcaagaacgtgaaaccgcttctgcccgattggcaggcgctggccttcacctgcaccaccgaacagaacccacccgtcgacccgcaggccgatgactggttcttgcgcgcccgtgaactggaaaagcagggtatctcggcaaatgacgccgaaatgattgccctctacaagcttgcggcagagaaggggcatcataaggcgcagttgaacttggctgggctatatatccaaggtacgggagtacctagagatgaaaacaaggcagtagatctggtggagaaagctatccagcaaaattcgccacgcgcattctacttaatgggagtaatgctacagcaaggagtaggagtcaaaatagatgagaccgctgcgctgagctattttcgcaaggccgcagacatgggcgacccctatggtcaactggccgtcggtgaatcattgcggaatgcatccgttaacctccccgaaccggaacgccgacgcggctaccagattgcattaacgatgctcaactgctcgctctctcaagacttgcctgaggcgggacacctgttgggtcgtcactacttaaatttcgaaaacgatatacaccaggctcttgagtattttcagagagcggcggccttaggttacaacgatagcctgtatcgactgtacacaatatttgatgaaggcgagtacggtattcagaaggatcctcaacgcgcagcttgttactacgaactccgtaagcagctgaaaaccgaaccaggccgccgctttcccgacatcgaccgcctttgccccttgccaccgccgccagctcgcaccggcaccagcggccagctttccccgcgcgtaggcctctggcatcaagccggcaatcccgccgtgatgttccgcgcatcgtccggagacaccttgcccgaggtggacggcatgcccgttcagtgggaggcctctcccttcgaaggttcccgcctggcctccggccaactctgcacctggcccggcacctgggcctgcgaagacctgccggtgggcggacgccacttcgagcatggcgagccgttcccggaagtggaaggccgcccggtcacctggcgcctgatgcctcgcgtatga

SEQ ID NO: 363452 - DNA, 1101 bp, Pseudomonas aeruginosa
atgaaatttcaatccatagactggaaatcactccagttttcttgcatcacagagcgaaacccaccgatcgattcggaatctgatgtgctatttcaagaagctcgcgagcttgaacgcgccagtgacgagaggaatgaccaaaagatggtcaacctgtatcaaatggctgccgaccgtgggcactataaagccatgctcaacttggcgggactttacagtcgcggaacggcagttccaagggatgaaagcaaagccgtagacctcgtagagcaggcattaaagctgaatgctccgcacgccttttataccatgggcgtgatgttgcagcagggcattggcgtaaggcaagacgaagctgctgcgctaagctactttcgaagggctgctgacctaggcaaccgttacggacaacaagcaatcggtgaagcgatacgtgatgcgttcattaaacagcctgagccagaaaagggacgcgggtactcaatcgccatcaaaatgctggagtgttcgctggcgcaggggcttgcggaatctggatatacactcggcatgcattttctgtacttggagaaagaaacatcgaaatctctatcgtatttccagaaagcagcatcgctcggacatgagaagagcatctacatgctgtattcgatattcaatgacggcgaggatgggttagcaaaggatccacagcgggctgtctgttactttgagcgatggaacgaggctaaacttgcccccggcagacagttccctgacatcgaccgcctttgccccttgccaccgccgccggctcgcaccggcaccagcggccagctttccccgcgcgtaggcctctggcatcaagccgacaatcccgccgtgatgttccgcgcatcgtccggagacaccttgcccgaggtggacggcgttccggtgcaatgggagtgggaggcctctcccttcgaaggttcccgcctggcctccggccaactctgcacctggcccggcacctgggcctgcgaagacctgccggtgggcggacgccacttcgagcacggcgagccgttcccggaagtggaaggccgcccggttacctggcgcctgatgccgcgcgcatga

SEQ ID NO: 363453 - DNA, 1770 bp, Pseudomonas aeruginosa
atggaattgatctccaccaccgacaccttcaccgtttcgctggaaaatcagcggtcggtcctgcttaccttcccttggttcgtcagtcaggcgaagtatcccccgcgtccggccaacaggattatgcccctcatcaatggcgagaaggcttttgaggcggtccacaaggccatcgtcggtgcgcagcacagcgtggagataatcaattgggggttcgaccccagcatgaatttgctgcgcatcggaaaaaaggaagactggggagacccgctgggcacattgctgaaagctaaagccaggggtgacgagaaatcacctccggttgatatccgcatcctcatctggaagaacgcgctggccaacttcgtggagaacaacatccacggcgatggcttaatcggcagcggcggcagcgcaatgggggctggcaaggggtcgactgccgcctatagcgaggggggcaccgataagcagggctataacgaatacgggagcaacgtcttcaacagcgcaggtgtcaggaatcacgaccctgaggcagccaaatacaatcgtgactggttcaaggatttgccagaacacctgaccttccggacccgcgactacagcctgctggaccgcgccaagattgtgttggaacaactccggaacggtagtgcaggtgtcagccagacagccgccatgtcactgtttgcctcccatcaccaaaaaaccattctggtggactacgaacatcccgaaattgccacggggttcgtcatgggtcacaacctgctacgcaactactgggacaccgacaagcacgaatttcactccgacgcccgccagggcttcgccccctggcaggacctgtcctgccaagtttgggggcctgttctgcacgatctcaacgagaacttcatggaagcctggcaaaagtccgatggctggttcacctcgtccaggtcctggcgtgagaagcgggcggccatacccagcgaagccttcataaaaccggccctcgccaagggcgatacctacccggcgcaaatctgccgcacccagtcccaggaggatgagcgctccatccttgacgcctaccggctgggcatcggcaacgcacgcttctacatgtactttgagaatcagtactttcgctacgaggccttcgcggagcttatgcgccaggtgcgccgcaagctgaaaggccgtggttggccatccgatttctatgtattcgtggttacctcccccccggatagcaaaggccggaccaacacctacgaaatgctcgcggccctgggccagggcgagcgaatgccggagtaccaccgcgacacggaaaaaaagcccgacccggatgcggaactgcgcaagattgacctggatggggtgaacatccacgtctgcaccttgcaggttgacggcgaagtcttagtcgacggcaagaaggagcgaaagtacaacgacatctatgtgcactccaagctgctcttggtggacgacgtgttctttacgctgggctcagcgaacgtcaatgctcggagcatggagggagacagtgaactcaacattgcgtgcccctcaccagaactgaccaaactgtggcggaaaagtttatggaacatacacaccaagaaaatacctaattccgatataaagctggagtttgatcgatggcaaaaagtcgtcgacgtaaatgggcttgcaaagaaagatggcgctgaactcaaagggaacatcgtaaacttccacgatgccgacaaaaaatccatggcggcattagattga

SEQ ID NO: 363454 - DNA, 291 bp, Pseudomonas aeruginosa
atgctgcgcagctctggcgggaaattgggcatgaccgcgccactgttcccacaagaaatctacctgctggaacgctacagctccccggagtactacagccagatgcgtgacgcttgggaagcgatgctcaggcatgtcgaggacagcctggaccgattcatgcggcaggtgcctgctgattaccgtgcgcgcccccagccgctgcaaccggatattgcctgggggcaattggtgctttcgaactttcgcagcaccatctcgacctggcggcgcagcagcacgtccagttga

SEQ ID NO: 363455 - DNA, 957 bp, Pseudomonas aeruginosa
atgaccacccccttgctcccacaagaaatctacctgctggaacgctacagctccccggagtactacagccagatgcgtgacgcttgggaagcgatgctcaagcatgtcgaggactgcttggaccggttcatgcggcagttgcctcccgactaccgtgcgcgcccccagccgctgcaaccggatattgtctgggggcaacgagtgattcccatttttcgcgacaccatgcaggacctcaacacaggcgtcatcaagctgacccacggtgacctgggcggtcttctaaagggaaccgtcagtaacgactttcgaggacaggtggagttttccagcgattggatggatgaagtagaacctggcgcggcggacaagtactggaagttgataggtcaagcttcgacactcgcctttaacatagacatgacggttggggcatattggaacaagggagcattggccgtgcgctattcgccggacgcgcgcggcccattaaatccacctcctgcatggccccgctatcgcctcaatcctgacgtccaggttcgcacaggtgagccagtgcttcacaccggtatctacctgcccgaccttgacgactccaatgcgcagttcctgttggcttcgcgccactaccggtacgcgcacacgtgcccgccggcgagtgtagggtacgacccgcagacccaggatgtctcggaggcccctgcactttggactcttgtggagcgcgtgcccggcgagaccgttccactggaggaaggcctgggcggcctgccggtcgccctccatgtgtatgccggccagccttgcccgcgcgccggattctggttcacgctggccaggcacggctcgcgccgccacttcgagcaaggcgaaattttcccggccattcccagcgaaaccaccgtggggcttaccctatggcaatgggacccagaccaggcgtcgaccacgtga

SEQ ID NO: 363456 - DNA, 1212 bp, Pseudomonas aeruginosa
atggtgaccccatgcctcagagttgctctcttagttatttgctccgccattgctggctgtaatatctccgaggaaacatcgatgtggactcaggttagcgctacattcatcatgagtgacaagccctatggggctggggattttcgtattcttggtcaagaggtaatttcgctcaaacgcagcaagccggagactgctacgcggccaatgaccccagaagaattggcagaccccacttctgtagctgagtacactgaaacttggatgtctgacccaagtgagcgtgccaatcggcgttcaacacgggttctcgttggctcctttggcaccgaatttcgccgaacgctagaagaacaggcgcagcgagccaattggagcttaacctctgattcgaaattcatctatttggcaactggatggtccgactatcggaaaagctcgaacccaggtttaggttacgcgccacaactaaccaagttattcaagtctgcaaacagggggaaggattggcaacaactcagttggcctgagaatttcgacatttcctgccttcgtttcttagactccctacggggctatgccataggctgggggcctcgtatctggcggaccgccgacggtggcgacaactgggtagagattcctgtgcctgctgctgcgctcgacccggcggatgtacgcaagcaattcgacgcggtggtgctgggaaacgacggggtgctgcgcgtggcattcgccacccgcgacgtcatatcccaggacttggtcagtcaggtccatgccctgcgatgggatgctgctacaccttcgctggcctttacgctcccgaatcacaccgtcgccgacctggccgaccatctcggccatctctatatccttgcctggaagaaccagacctctcgccccgacgcctcatcgccagccacttcagtgttctacctgggcccgcaaggtatcgaattgcggcacgagtttgcgcccggcttcaaagcatacgccttgtacgtcactcccagtggcggcctgctggccgacggcgtcgatgagcaaggccgtcgtcccgaggacctgacggccatcagctacgacgccggcaaatcctggaaactccagaatgaaggcgccagcgcccaagggggttactacgacacccagactggcacgcgctggcgggtcgttggctactccctctacaagcggcatattccataa

SEQ ID NO: 363457 - DNA, 2316 bp, Pseudomonas aeruginosa
atgctgatcagctacccattcttgcctaccgggctgaacacaatgagcgagcacgcccagcttcagcacatgctggggctcgttcgtcgcgatgaaggcctcttccctgtgagctatggaaatcgatggcatggtgggattcacctggacccgggcaatgacaacgagccggtgcgcgcgatagccgatggtgaagtggtggcttaccgcatagcagcccaggccgaaacatatccttcggaccgagatcgctttgacaccagttttgtcctcatcaagcatacgacgcaatcgggtgagaacacgccggtagtgttttattcgctgtacatgcaccttcgctcacggggtgctctgtccgcccaacagctggcacaactgccagcatggttgcggaatgccccccccggtcccaatgccatacgtgcggcgcagggaacccgcatttggcgaaaggatgtattgggatttgcggggaccttgtacaacaggcgttgcttgcattttgaagtctttgccaccaacaccgactttgtcgggacaccgaaccaacctggtttttggcgagaccgcaatgccatcgcacaaggtcgccacggctcgaatgatgtcttcggtgatattcactacatcattcccgccggacgcaacttcgtcgcacgccatccccgggccgtggcgccacaccgaattgatttacctggccccaatgtcttctatgatctacccgttggacaagtcggtacaaatatggggcgcgccttacatgtcgttgtgcgcttcactgaaggccagcgggtcgccaccacattccgtattctcccgtccggagcgagggaactgctgggcgactttgtattgcaaacagattacgagtatgaactgtatcgcttggctacggcgctatatcccgattgccctagtgcgggctacgaatacctccgatttggccgcattctgagcagggacagaacgacgaccaatgagaactggcaacttgtgcggtactccgaggacgccatcggctacatcgaccttgcctcggctggtaacaacgtttcaatcctttccgatgcagactttccgttaagctggcagcgcctggaagaaggccaagccgccagcgccggcgacggcatctgcgacgtgcgccaactcctagaactgattggcctccctccagacagcaacagcaatgggcgtgttgacgaagacgagttctttacacatgcgtccagagctgcggtggcggacaagctgcgcttcttcatctgcaagcaccccaccgagtgggacgacagtgatctagaaaatcgatatcgccgcttgcgcgagccagaccagccgttgcaggcccaggatagctgggaagagttttcggagcatgtgagccgaatggcgttctggtctcaggcaggtattgcagaaaggtcggtctggcactttcatccgctgcaatttatacgtcattaccgcaactgtgaatggttgagttcagatgagatggccatgacgctaccacggcaccaattctatacggggacggccctacgaatgatagacaataatgccggggtagatggggcaataagcttagataccgcgactcaaaggctggcgaatcacgtaacccccttaaataaaacaatgagaaaatacggcataaccacgagaaagcgccaagcacattttcttgggcaagttatttgggaggctgcgcagtggcgtgaccgacctccaaacagaagattattgcaagaatggttttatggccgctatagcacgaccaaccccgcgaccctctactatgctgccttctatgggcgaggaattatgcaattgacgtgggtgggaaactacagatcttatggagcctatcgctctctccctaatcacgttggagcatatcaggagaggctaacacccgccgcccctcgaatcacaaatacatctacgcactatacggctcacccagacgacggcggacaactaattcagtgggcccctaggtatgacccggacatcgttgccacagaccccgaactagcttgcgactccggcggatttttttgggtatcaaagcaccatgcaggcagcactaacattaatcgaatatgtgatgaaaattacaccgcggaggaagttgggcgcgtaaatcggcttgtcaatgggggtggcaacggataccacgagagacaggcgtacgtggcctacctaatacgctatttgacagatgacacggcaacggctgaggaaactgagattcaaaccccacgctcgcgagtcagagtcaatttcttaaggccctcactatga

SEQ ID NO: 363458 - DNA, 438 bp, Pseudomonas aeruginosa
atggcctgccgggcctgcggtccttggcccgttgcgccggcgcagcagcacgtccagttgacctcgggcgagcgcaccgtcatcaacgccggcaacggcctgagcaccttcgcccagcagggcgatatgcgccatatcgcccaccagggtgaattgctgatgcaggcccagcacaacagtgcacgactggaggccgagcagagcgtcgagatgaccgccagccaaggccacatgcaatgggccgcgggcaagcgcatcaccctgatgtgcggcggcgcctacatcgagatgcaaggcggagacatcgagatgggtatgccggggctcttcatcgtcaaggcggccactcacagcctgttaggaccagccagcttaagtggccccaaactcaaatggtcgactggcaaatacaaacgttcttacccattctccgtataa

SEQ ID NO: 363459 - DNA, 1476 bp, Pseudomonas aeruginosa
atggcacacccctttgagctcagtctggtgcaaaagcgccaggccacgctgatttatcattttgcctctctggagtacctccagggcctgctgccgcgcatcgaaagcctgattcagtatgcggactacctgctggaccgtcgtaaggtggtcgaaccgttcatgtacagccagcaatggggtgcacggaacaccggcgccaactggagcagcacggcctatcccgccatcgccgacttccgccaagggatactggaagatattgccctgcggcctcaactggcctatcgggactctggcgtcggtcactgttcccgtatgttgagcgagtattcgatgatgtggatgagtccagagcaggagaaatccttcaaggagcgttttcaggaggttgccaagtacgcgggggaaattgatggcgtcttggggcgtcagacgccgttggatgatttttccttttgggatacgtgggagcgtcaaaaagcgctgttccctcggctgccgaaattcaggattcacaccgacattgtggggcgctccggtcaggtgccgccgcgcacgggtgcctatgttcccatcgatgaccctcacggggcgctgcagtttggctggacgggcgctacgccggaaggatatcgtgggggccggcttctggactgcgacacttttaacgacatcggcctcgatgccttgaccgccgtggggcgcaatggtctatggggggacgacgcgggattgattgccttcctcgccaaggcctggagtcgcatcccgaacgcccgccgggttttggataaaaacggtgctatcaagacaaagccaggacttgccgcctcgatcgtcgcaatgaactcgtccactcgccgaccgtgcgattggtacttcgtggaactgctggaaggtgagtacgaggacggggatgctcctgactcatctgcagcaggacaaggcgtcccggctccgcaaaaagcgggcgacgtctgcaccgccaccggctggtggcgctcgcccgccaagcacgactcccgccgtcactttctacgcggcgatctgtttccggaaatcccgagccaaaccaccgttggctacgtgcagtggcagtgggacgagaaacaacagcaatcaaatgagccagagacaccggaacctactcgcgaggccagcagcattcaggcagcgccccgcggaggagtctggttgcagaccgacaatccagttgtacgctgccgcgttgccgaaggtgagtcgcttcccttggtcgatggtgtatccgtgacctggaaatgggcagagcagcccccgccaggcatgcgagccatcagcggccagccttgcccctatccaggcgtgtggcattgcgaagactctcccgtcggccctcgcacctttatgcatggggtacccttgccgcaagttaacgggcgtgatgtcacctggttcttggggcaaacgcctggctcgatgggtcgaagctga

SEQ ID NO: 363460 - DNA, 834 bp, Pseudomonas aeruginosa
atgcgcaaactatttattcacaataagggttcgttagacctagtgcccgtgattcgcaccaaagaggagcttttctcgacgacggtccagaactacaataaaagcaggaaagtcacagcgataatcaacacaaatttctacgatgtaaccaaggctggcctgcttgacgcattgagtggtgatgatcccgtccctgcagatgccaccacgccactagggaaagtgatttacaacggaaaacatgccattggagtatcagagccgctgaatttttatattgcctatttcaaagataggtttcctaatgaaggcggaatctattccgcattttcatcaggacaaggcgatcctccttcaagctgcacatgcgggattgggggcttagggccgttgatcatcaatggcctctcgtatggcaaaacgaataaatacagcagcggcgccccaaaagatgcgccttcaataggcgagccaccgccggcggccaagaaattcctagttcagcgaagttctgccaaatttaccgcttttgcggtaaacgacgctaaataccaatcacgcattggtaagacttgtcttggagttgggaaggacaatatttgcatattcgtacagcagcatggcgactccggaatgagcctggatgaagttcgagacgagtttcttagctacggttgtcagcatgcagtcttttttgatggcagcgattccagcctgcttttcacagatgtagatggctttgtagtgacccaggatcacaataaggatgaaacatgcgtcgctggcttagcgtttcactgggttgcttcaagtaagaaggagcctccgaagtga

SEQ ID NO: 363461 - DNA, 783 bp, Pseudomonas aeruginosa
atgcgccacatcgcccaccagggtgaactgttgatgcaggcccagcacaacagtgcacgactggaggccgagcagagcgtcgagatgaccgccagccaaggccacatgcaatgggccgcgggcaagcgcatcaccctgatgtgcggcggcgcctacatcgagatgcaaggcggagacatcgagatgggtatgccggggctcttcatcgtcaaggcggcgacgcatgacctccaaggcccaagcagcatgctgtttcaaccacgcactcttgttccttctaacttctcgacgacacccctacccctaatgcgcgtaactccatcgacgctcagctcaacacacaatgtcatagcccgcatcgaatgccttgatggaacaagcattcagccagaccagcacattcaaataggctctttacgactgacggactactgggttgattcaaaaggacgcgcatattttattccaccaaaggttaccagcatcggcactcccgaatacggggaagttgaccgcttccgctatagcctggagtctccgctaagtactgcagtcaccgccgaatccataattagctcaattactgagcagttggaccttctccaagaggccgctgatgagaaaaaaaatatgggagggacatactcacagtactggagaagtcagatttacttcgaaggctaccatcgcctagagaaggcccttattgatgtcgagtcatttcagctctcagattccgaccagcaggtgcttcaagcgtggcttgaagcaaaaataaaatag

SEQ ID NO: 363462 - DNA, 1044 bp, Pseudomonas aeruginosa
atgaatattttagagatcactgaccagataaataagaacagaaaaaccgtctcttttgacagctatgacattactgttaggcagctatatgacatggttatcgagagagaaatagatatagccccagaataccaacgacactttgcctggaatgaagtaaggcaatcacaacttattgaatcccttatcctaggaattcctataccgagtctttttatggcgacgaacccagactcaagctgggaggttgtagacggattacagcgcctgacaacagtaataaatttcatgggagatgaggacttaattgaaagagtaaatcctgcatgcaaaaagttaaagctaacaggcttagaaaagctttctgcactgaatggagtcagctacccagatctcccaaagtcaattcaattgatgtttataaatcgtcccatgcgggttactgttctcaatgacagaagtgactttgatattagatatgatctttttgagcgcctcaacaccggaggcataactttacatccgcaagaaattcgaaattgcatttttgcgggaccgttcaatgacatgctaaaagatttagcaacctatccggcatttagggctgtcgtaaagaccactgagaattcagcccgaagcggaagctatgaagaactggttctaaaattctttgcttattacgaagatcgagatgaattcgttcatggagttaaagaatttctaaacgagtacatgcagaaaaaaatcaatacaagagatgataaccacctgaagacactattcacacgcacatttgattacctagaagaaaatcttccaaatggcattgtgcgtggaaacagagtcaataaaactccattagttctatttgaagcgatatccatcggcgttgccgatgcactcgaagcaggcgccaatattaacgcggaggctcttcagaccttgctgaatgacggcacgctaaaaaaattaaccactggagcaacaaactcaagaagcaaactaaccgcaagaatcaattatgtaagggaagcgataagctga

SEQ ID NO: 363463 - DNA, 687 bp, Pseudomonas aeruginosa
atgccgctctcgggagtaaaaaaccggttgcgcgagagatttgtcgaggtgaattttttcctcaatcacattacgtctctcgagccaaacgatccaaggacagcaacctctctggaagttaaagtcatgaggggactttttcacgtccatttatacggggcatttgaaaaaaccgttaatgatctagtgcaatcaatgttaattcttctctcaagcaaaagcataaaaaacaggcactattcccctccacttctttctctcgtcctgtgcgaccaagtcaagtcacttaaagacaccagctattctaatttaataaatagatctgcggatttgtttgtcatctcatctactgaacaggtaatggctgtatctgaaaccgccatgtcaggaagcctgcaaaatatctggatgcgtgtaatagacgagataataaaagcatttggcttgcagaatttaaactttaaccctagagaaatagccacagtcaacgaaattgtggacaagagaaacgccgtcgctcacgggcgcgaaaatgcctccacagtcggagagcgtcacaattcagcagttttacggcagaaaatggaaattgtaatttctgtggcaaactctctaatatcggcctttgaacaatggtatgacaataagagttttctgcttgagtctgcgagatcagagtattcataa

SEQ ID NO: 363464 - DNA, 705 bp, Pseudomonas aeruginosa
atgcaggaagaaattaaatatgggcagattctactcggtgccggaattggtctatttcttatgccgttcagcgaatggcttaaatatcgggtaggtctttattttgccagaagaaaattgcttgagaaactctccgatatgcaggagggaattcatgagaaaattccagctcttgcaaagctgatctgcgaaagagagtcttttatacagaccggaaagcataccgctgaaccgtacagaataccgagctttgagtttctggatgtggagaaggatatcgagtcctgctatacgattctatccaaggggaggcgtcatgggctaaccattattcgaggtgcagtgaagaatattaccggtcattcggaagataacgcagcgacgcgtaaagaacagataaaaaaaacaagggaagagttcgaaagccctgaaggcgacaaggttggtatggcagatgcagccgtaaagataagggagattgaaaaatatttctataggcagcagtgccaaagggaaaaagcaataatttacactgcgacatgtctctattatgttattgatgaagttgtaaaagataatttccagcgcccacgcccagatgacaactttatgatttccaaatatctggaggaaaacaagttgctcaggttcagagatgtttataacttgccgccatcatcgcgcgagaaagcctcggaaaaatag

SEQ ID NO: 363465 - DNA, 1857 bp, Pseudomonas aeruginosa
atgctcaccgacgtcatggttcgccaagccaaggccactggccggccctacaccttggccgatttcgacagcctgtccctatttgtctcagccaacggatccaagcactggcacttccgctacacctgggtgggccgacgcgctcgcatttcgctggggacctatcctgaacttgcgttacgcgaggcacgtgaactgcgcgaccaggcgcgcgcgctcgtcgccaagggcgtcaacccccgaattgaccgcaagctcaagcgacaggccatccggctagccagcgaaaacaccttcaaggcggtctacgagaaatggatggaacatcggcgtctgtcactcgaggaaggccgccagacgacggcgtccatcatcccgcggatcttcaacaaggacatcttcccctacctgaagcagtacaccgtctatgaaatcactcggcccatgctgctggaggtgatcgcgcgtatcgaaaagcgtgggtcgctgtcggtggccgagaaagtacggacctggctcaagcagctgtttgactacgccatggtggtcatcccagccatggagaccaacccagccacagacctacacgtggtggctatccccctgccgccggtggaccacaatcccttcttgcggatgggcgagctgccgcaatttcttcaggcgctgcgcaagtaccatggcaccctgaaaacccaattggccacccgactcctcctgttgacaggcgttcgcaccggcgagcttcgcctggcgacccctgaacagttcgatatggagcacgggctgtggatcatcccggttgcatcgctcaagcagcgcaaaatgctcacgaagaagcggcgcaagcgcgtcacggacattccaccctacatcgtgccgctgtcgacccaggctcaggaaatcgtccgattcatgctggggcagttcaagccagcacagcgatacctgttctcgggcgccaagcgcattactgaccggatgagcgaaaacacggtcaacgcagggcttaaacgactgggctatgaaggccgcctcacaggtcacggcatgcgagccacgatctcgacggcgctcaacgaactgggttatcccaaggtgtgggtcgacgcacaactgtcacacgctgaccccaaccgtatcagcgccacctacaaccacgccgagtatgtggagcaacgacgactgatgatgcaggactgggccgatcggctggatctgttcgagcaaaatcaggtcgaggtcgccagcacgcacctgaccatccacctgcagggcgtacccatcattgcagggcagcagccccagcccttgcctacctctgctcaaaacgcgcccatcatgctggttacacccaccgagcaggcgatttccacggcagcgactgcgcgccagcgactttcggccgtggagatgccggagtatgccaagccccgcctgtcggacctgcagcgcgaacgcctagagatactggaagccttcgagcattccgacaacctggtggtcgccgagtacgccaagctggtcggcaagtcgcgaaggtggatcacttatgaaatccaagcaggcaaactgctggcgattcagttcggcaataaaggtcaacgtgtgcccgtgtggcaaatagatccactaaaacgccagctggttcagaaagtcctccggcggacgccgcgcggcatggatacctgggacatctatcacgcgctacagaccgtctacgcggatcttgatgagcgcacgccattggatgcagtgacggatgaaaacatggagctcgtggcagacctggtgctcgagcattgcagtcggctggactttgcgggggcgcggcctgacgcggcctgctacatctga

SEQ ID NO: 363466 - DNA, 264 bp, Pseudomonas aeruginosa
atgttggtaattcgattcaaagggtggtccatgaaactcgaccgccaagtgggctcttcgggaaaattcggagtgtggtcgtttcacagctccgaaagcagctatatgccagatatgcagacgattctgcggcatgcctcgttccagcctgccgagccgaagcaggacgccacggtcgaagttttcgtctgcgacccgcggatgcagcaagatcagtggcgcgccgttgggtctggtgtcgtcgcgtacgagtcggaccgttga

SEQ ID NO: 363467 - DNA, 309 bp, Pseudomonas aeruginosa
gtgcgctacaaccccacccccggcggcgatgcgcccgcgccggcgctgcgccgcttccgctatgccgagcgcgtgcgcaccgcccgccagacccagcgcgactacaccttcaagcacccgcgctatgaacagcagcactcgctggccggcgaagacctcgcccaccaggcgcgcgactacgagcgctacgactaccccggccgctacaagcgcgacgccgccggcagtcccttcacccgcgaccgcctgcgcgacgatgcctactggagccagccccatcattccgcgccaaggacgccgaacccatga

SEQ ID NO: 363468 - DNA, 3237 bp, Pseudomonas aeruginosa
atgacgacggctaccaagctgaaaacggctaagaaacgagttgccctgaccaccccggccaacgcgaccaacaccagccagtgcactgattgtgtaaaggccaacgggctggccatcttgccgttggtaaccgggctgttacccaaccgtcttttgcccggcgatataaccggaatccccgaagagttccagatcaatgcgccgctgcgtgacctgagtaatgcactgagcgctgccgacttgaagcatcactggtactacatgcgcgccctgccggccggctatctgtacctgctcctgccggatgatacctggcagtcctacctggtggacaagtcaggcctcctgcgccaaatgccgccgttgaacatggcgtctcccgccgacagcgtggaacccatggaccagcctggcgcctgccgcagcccggagcacaaccccatcgccctgcaatacatcgtgctggacccggacaagacgcccagcgtctggatggccttcagccgctatcgctggtcgcagcaaaccctggacgactaccgtgaagacaagagcggtagccgtaaccagcgtatgacccgcgtgaacgtcgctgcggcggccaggggcgaactcggcattggttccgcggttcccaatggtcaagtcgtcactgcgcaactgggcaagcacgtggccgactacagcacccagcgcacccgtaatcggattgacgaaacgtccgttgaaaatctgcactcgcggggcgaacgggtcgttccgccttacgcccaaccacaatcggataccgaaaaactagctacgcaaatggccgaggcttccaagaagacgccggtcaacagcggcatcttcctggtgctcgatgacgtggtcggtcatgcgatgcagctgaactacctacgcaaccatacccgcgccgagcgattcgcgctggagggcgtgggcgagaacacgaccgactgcgaaacagaaagtgcgctcagcaaggaaaagctgcgcaagcgcatcatcgccctacagattaagagcattgtcgaaagcgcagaaaaaaacccaggtccgtggtacctgccgcatttcggtccggagcgctatcttaaacacatcgaccaggcggcgtggcaggaagcactgcaggaaagcgctcgacatacagagctgaaacagcaggagctcgacaccagtaccgacttctgcacggtcatccagtccacgccctggaaacagcaacaacgcaccgacttctcgccccatccagcctctgccctcggccacgaagacatggtggccagttgcatggccggctctggcgtcaccgagcaggagcagcaacaactctgggacccggtgctgaatctttcggatgatgacccggacaactggctggcacgcgcgctcggcagcttggatacctcttacgcggcgcacttgaaacagacgcccgccgagcaggatgacgcctacgtcgccgcgaaggaggccaccaatctcacccggaccttcctggccaagggtgcgaagaagatacgggagattcgagccagcatccgcacacagcgcgccgccaacgccaacaccgccacgctcatagaaaccagcgcgggccacctgttccgactacgcgacaagaaccccaaggcttatcgcaagttgatacgtcaggtcacgcttaccctcatcacccgcgccgacctcgtccccacccctacattggtacgcggcaccgtgcagcaaacgacacaaatgtggatggccgtgctgcacggtgacccgcgcattgtggcgcgcgcgcctgtcgcggtgactcgagggagcacgacgggccggtcgacgattcgaaaacctgccttgtccggcactatagggggcgcattggtgctggcaccaccgaattcgcgtcaagaagccatcgccaccgtagcctgggtggtcaagaaaattgagcaaggtggccacctggactatgaccaactgcgcaaactgaaactcaccgaattgaaccttgccgcacgggctgccgcccagccgacgcaaagcaacccggtactgcagaaccatttggtgcgcatgggacggggcgtagacgcggtactcggcgccggcgcgctgtttttccaggtgctgcaaggggcagacgtgatgaagcaatactcaatcgagcttaatcctgacagcaaagctgaagcggactaccgggtggggatgacggtctccgtgctgggcgcgctaagcgcgagcatcgagctctatgttgctgttcaggtcctaggaggcgtatccaaaaccaccctatcgaaagtgagtctttttggggcaagagtagggggcgctgccggcatagttgatggcatgtatagcatgtataaagggaaggagaagatgggtgccggtgatatcgactcgggagtgtggaccatggcgtcgggtgcagcattcgcacttgcgggtgtcgccacattcttcgcgttcggaggcccggtcggctggacgcttttgcttatcggcgccatcggagtgggcctgttttgcgcctggcaggcctacgccacggacgatgagaacctcacgccggtggagtactggctcgacaacggtgtgtttggcaaaggcgagtttcgcagcggcaagcgcgcccggcagaacccttacgccgagcatggacaagtgctgccgttcacccacctcgaagacgagaccatggcattgcagaaagtggtcttagtcgcccaggcccgctttaccgacccggaggaacgcttcactcgctttgccacctttacggttgacttgccacgctacgccgaaggctcacgcctggaactgaagttccatggttatcaaggcgaccgtcgcctggacgtgggggaaatgtcctgccaatgccccgatgaatgggaccgcgccgtccggccgcgagcggagaggctggacaacacgcattttcattacgaattgtcggagaagctgatggggcgtcgattcgagcctgagatgaaagtggacaatgaactgggcaccgcccgtatccaaggcggattcaccacagccgacccagatggaatggccgtgtacaaccgcgtcaagtcggcggtggaatggctcgcaagttcggaaaccgatgaaaaatggcacgtcgacagattcggcatgacgctcagatactggccaaataggaaggagatgcccaacctcgtctctgagttcacctttcctctggcggaggctgagcatgtttga

SEQ ID NO: 363469 - DNA, 1071 bp, Pseudomonas aeruginosa
atgtttgagccaacgctgccggaaaaggtaaatcacacctacttcgtattgccaaagttcggcgagcgccctcaagaaggcgccacgctcaatgattgggatatggtggcagatatcaatcccgcctacatggcgttctcccagacacgacgcgctgagtacacatcattgctcgctttagtgagcgtatggggaggcgcgatgatgtttctgttgttccttcccttcgcagttgaagtgcttttagaaattgataggttcggcataggcattgcggccttgggttttctactgccggctgttggactcagcttcgctattggcggtccctatagaatcattcgaaagccactttcacctatccttctcagccgtcatctgcgtcgcttctaccattggcaaggcaagaagacaggctgggtggcactgaactacaacgacgtggtgccctatgttatgcgcgtgacctcggtcagccaggccggcacagcaacttcttatttcctgcacgttggcctactcaagccgggcacacgcaaagttatccagtccatccgcctcagcgacccatcccgcggaagcatccagctgcccgcggaattgtgggagttcatacgggcgtacatggacggttcgccggccaaggtgccgcccatcgggttccgcatccccgagggccagaggcacggtattcatgcccgaatggaccgagacatgtatagcggcgtggtggatagccagcaccgcctcgagcctggaatcttcccaaaagtatatttcgccatgctggccatgacggcgtactggtcgggccgcctgctgccctggctggaacgcaagcgtccacagccaccactgccaccggaactggtcgaagccatgcagtgggagggcaaaaacccctatcgcatcaccccacccacggacatcgagcagaaagccatcgacggccaactgccctacatgaatcgccggtggttcgtcggcatgctgctgtccacgttgttctggggcggcagctttctgtggatgtccacgctcagttggcgcgacctgctgttggggccgtga

SEQ ID NO: 363470 - DNA, 1686 bp, Pseudomonas aeruginosa
atgaaaagagcactattcaaaggtgtcaccctatccatcgccgcactcttcggctgccatgccgatgccgcggaacgaccgaacatcctgttgatcgtcgcggacgacctgggctattcggatacccaaccattcggcggcgagatccccacgccctcgctgcagcaactagcggaccagggggtccgtctgaccaacttctatgccggcccgacctgctctctgacccgctccatgctgatgtccggggttgataatcacatagccggcctgggcaccatggaccggcaacaacagccggaacagatcggcaagcccggctacgagggctacctgaaccgtcgcgtggcgtcgctcgcagaactgctcgccgacaagggctatcacacctatatagcaggcaagtggcacttggggatgaaaccggagcagggacccgccgcacgtggtttcgaacgttccttcgtgctcctgcctggcggcgccagccatttcgacgacgccgtctccatgtatcctgccgaccgagagaagtccaccggcatcggcaaggcgccgtatctggaggatggcaagccggccacgccaccaaaaggcttttactccagtgcctactacaccgaccgcatgatcgaatacattgaggcgggcaggaaggacgacaaacccttcttcggctacctcgcctacaccgcaccgcactggcccctgcaggtaccggacgcggacctcgatcgattccgcggacgctatgccgaaggctatgaagccctgcgccaggagcgcctgaagcgcatgcgcagtcaaggcatcatcgctgccgaaaccgctgccaacacgaagctggaaggcaagcttcccaagtgggaagagctgaccgatgaacagcgcaggcagcaggcacggacgatggagctgtacgcagcgatggtggccaacatggaccagcagatcggtcggctgctggcctacctgcaatccaccaagcagttggacaacaccttcatcctgttcatgtcggataacggcgccgaagccagctcgctcgacgggttgcgtctgaccgattgggtcaatgcgaccttcgataacggcctggcgaacatgggcaagaagaactcctacctcatgctcggcccccagtggggacaggtcggcagcacgccgttcccctactacaaggggctcaccgcccgcggcggcatcaacgtgccagccattgtccgcttcccgggcatcggccagccgggcaacatcgagaccaggcagatacacgtactcgacgtcgtacccacagccctggaactggctggcgcacgctacccggccgaacgccaaggccatgccttggctcccctgcaaggtcgttccatgctcgccccgctggcgggcaaggagcaaccggagcgtccgctgggctgggagtacaacggtcggcgcaacctgatcaagggtgactggagcctgctcatgcaagcgccccctttcggcaccggcaactgggagctctacaacctgaaggacgaccccaccgccttgcacgatctgtcctcgagcaagccggagaaggtcaaggaactggccgccgactgggagaaatacgctcgcgacaatggcgtggtgttgtcgaaaaagaacgtgcgctacggctacatcacctgtctgttcggccactgcgtcgagtaa

SEQ ID NO: 363471 - DNA, 2322 bp, Pseudomonas aeruginosa
atggccccgcagaaacatagccagtcaacctttgccaacctcaggggcacgctgctggccgccttcctgctcgtcctcccggcactgacggagacgtgctgggcgtcgacactcgacgtcgagcacgaggcaccgccgcaacgcgcgctccaaagcgagcacatcaatcctctgccagatctcggcccccacctggtggaggaaggcttgtgcgccggctgccacgccactcaggcaaaggactggcagggcagtcaccatcggttggcgatgcagaaagccagtgataccagcgtgctcggcgacttcaacgacgcgcgcttccagggcgaaggcgagaccacgcgcttcttccgcaaggacggcggcttctgggtcaacacccctggcgtcgatggccagccggccgacttccgcgtcgcctacgccttcggcgtggcgccgctgcagcagtacctgatcgacgtccccggcggccgcctgcaagcacttggcgtcgcctgggacgtggacaagcgcacctggttccacctctatccgggccagggtgtggacttcaaagacccgctgcactggagtcgcccgcagcaaaacgccaacttcatgtgcatggagtgccataccaccggcttcaagcgcaactacgatccggtcacggacagcttcaccagccagtggcacagccttggcgttggctgccaagcttgccacggcccagcctcacgccatctcgactgggcggcgaagacgctcgaagccgccaatgccggcttcgccatcgacctgggccgggcaagcgagatcgccgaagtcgaaacctgcgcccgctgccatgcccgccgcgccccactgggcgacggctaccacaacgacaagcggctgatggacgactacctgcccagcatcctgactcgcgaactctatgagctggacggcaagatcaaggacgaggtgttcgaatacggtgccttcacccagagcaggatgttcgccaagggcgtgcgctgcagcaactgtcacaacccccacagcaccgcgttgaaggcgccgggcaatggcgtctgcctgcaatgccacaacccttccggcaagaccagcgtcgccggtgtcgatggccaggggctgcgggcgaaggactacgagtcctccgagcatcaccgccatgtccagggccaagacgggtcgcggtgcgtggattgccatatgccgggcaagccctacatggtcaacgactaccgccacgaccacggtttcaccttgcccaacccggctcgcgcccagcgtctggacactaccgatgcctgcctggaatgccatggtgagcaacccggcgagagaatcgccgaacagttccgcctctggtacggcgagcacaaagccgccgcgccacgctacgacgagaacctgtggctgatccgcaatggcatgccgggggccgcccaggctctgttccaactattgaattcgacagatctgcctgatattcgtcgcgcgaccttgctggccgagctcccttcctatcccagccgaaaggcgcttgcccaggctcgccgaagcctcgacagcaggtccccgctggtacgcgaagccgccgtcagggccgtggctctcttggcttctccacaacagcatctcaagttgctcgcgccgtcgctgaccgaccccgtgcgggcagtgcgcattaccgccgcctacgaactgttgggtgtggcccatggctacgacgaagccgactggatcacagccattgccgaatacgaaaccgtacagtccaacttgcaagagcgtgccgaagccaacctcaacctggcgcagctcttccaggcaagcggccgttccgctctggtcgagccttatctacgcgcggccctgcgccgcgacccagccttcacgcctgcgcaggtcgccctggtgcagtggctggatgccaaccaccgagggaaggaagctcgaacgctcctcaagcagacactggtagacaccccacaatcagccttgctgctatataccgatggcttgatgagggtacgccaaggagacatagctggcgcgcttgacgccttcgccgctgccgagaaactggaacctgccaacgaccagtacagctacgtccacgccgttgctctgcatgacagtgggcaggcgatccaagcccgggacgtgttgacgcagttggtcaggcgccgcccggccaatcgcaccgcgcggctgaccttggtcagttattggcgcgaggccggccacatgcagaaagcacaaacactactgcaagagctggagcagataaacccgtgggacccggcgctcaaccacagcaagtag

SEQ ID NO: 363472 - DNA, 279 bp, Pseudomonas aeruginosa
atgcgcaaggatcgcaagctccccactgatattccgccataccttgtcccactctccgtgcaggcccaagaggtcgtgagctacctgctcgaacagcgcaagccggctcagaagtatctgctgacgcattgcagtgagttgagtgaacggatcagtgagaaccagtggcaatgcgagccgctccaggaactggacgaactgccgagtccccggccgtcgctggaggaaacgccggcgtttccagaaccaggcgctggtggcagcggcgtacaggcatag

SEQ ID NO: 363473 - DNA, 327 bp, Pseudomonas aeruginosa
atgcgccacatcgcccaccagggtgaattgctgatgcaggcccagcacaacagtgcacgactggaagccgaaaagagcgtgcaagtcaccgcgagccaggagcatgtcctgctcagcgccaaaacgcacctgaccctgctctgcagcggtgccttcatcaaaatgcaggatggcaatctggaacttggcggaccgggaaagctcaccatcaaagcggctgaccaccagttcctggagccagcaagccgcgtggtcgaagaccttcaattctcgggttgccaaaagttgctgcaagaagctgcacagacaggcgccgctctggtgtga

SEQ ID NO: 363474 - DNA, 879 bp, Pseudomonas aeruginosa
atgctgcgcactgaactgctcgaaacttccggcgcgaagcgcggcgagcgcttgcacattctgatagaccccattctgggggacccattcccggaattgcccggcaagaagacaccactccctgtggtgcatgatggcctgcgcgaggcgcatcgcccctatctactgcgtgcccacatacaaggcgaactgttcgaccaatccacattgctggcaacccaggaagccacgcgacaacgagaggacactccaggcgcaaggagcatctgtggctggtggttcaccaccgcttccaccgaccatttggccaagcacctggctggccatgcactcctgccggatgccaatggcgctcgcctactgcggtactgggacccccgcgtcatggatctgctttggctcatgttggatgccacgcagcacacggccttgatgggggcggcaagcggcctgcattgggcagggcgagatggccacctgcgcacgctaccggcgacgaccggtacccacgacacacgggcaatgctgcaagtcaccgacgaacaacgccaatgtttgcaacaggctgctcacgtaaacggagtacttgacctgctgcaggatgcaggccacgacctgacccgtatcgaaccgctacacctggcctacagcatccgccacggcggccaggcgtggcgcctcaccacggcacgcgaacacatcacctatggcctgtactgcgcgctggtcgatgaacacttcgaccaacggccagaggtgcacaccgccatggcggcggcagttcgggccggagattccgccatcgacgccctggaccagttcgacgatgcctactggagccagccccatcattccgcgccaaggacgccgaacccatga

SEQ ID NO: 363475 - DNA, 3204 bp, Pseudomonas aeruginosa
atgacgacggctaccaagctgaaagcgaccaagaagaaagttgccttgaccactccggctggcgcggccaactccagccagtgcgcagactgtgtaaaggccaacggcctggccattttgccgctggtgaccgggctgctacccaaccgcctgttgcccggcgatatgaccggcatccccgaacagttccagatcaatgcgccgctacgggacctgagcaaggctctgagcgctgccgacttgaaacaccattggtactacatgcgcgccctgccggccggctacctgtacctgctcctgccggatgacacctggcagtcctacctggtggacaagtcgggcctcctgcgccaaatgccgccgttgaacatggcgtctccggccgacagcgtggagcccatggaccagtctggtgcctgccgcagcccggagcacaatcccaccgccctgcaatacatcgtgctggacccggacaagacccccagcgtctggatggccttcagccgctatcgctggtcgcagcaggtgctggacgactaccgcgaagacaaggacggtagccgcaaccagcgcatgacccggctcaacgtcgccgccgcggccaggggtgaactcggcatcggctcggcggttcccaatggccaggtcgtcaccgcgcaactgggcaagcatgtggccgattacggcgccaagctcacccgcaccctgattgacaacatctcgctcgaacatcttcacccgcgaggcgaacgggtcgttccgccttacgcccaaccgcaatcagataccgaaaaactagctacgcacatggccgaggtctccaagaagacgccggtcaacagcggcatcttcctggtgctcgatgacgtggtcggtcatgcgatgcagctgaactacctgcgcaacaggactgccgccgacatgtgtgaactggaaggcatcggcgacaaggagaagatgcgtagacgtgtcgtggccgagtgcatcgagggcatccgccggaacgccgaactcaatcccggcccctggtatgccaagcactacggccccgagcgctacctcaagcatatcgaccaagcggcttggcaggatgccaggcgcgagagcgcggcgctgaaagagctgaaacagcgaatacccgaaatcagcgaagatttctgcaccgtcatccagtcctcttcctggaagcaacagcagcgtaccgacttttccgaccatcccgattcggcgttgtcccacgagaagatggttgcctactgcctggctggctccggccagacccgcagggaacaggagcaactgtgggacccggtactggccctggagccgaatgcgccggacaactggttggcacggtcgctgggcgggctatctgtttcctatctcgactacctggctcaaacgccaggggagcaggatgacgcctacaacgccgccaatgaggcccaggacctggtcgctggcttcctcggcaacggtgtcaagaaaatcgaaagtatccgcaccgccattcgcgcccgtcgtgccgccaatgtcaacacggccagcctgattgaaaccagcgccggccatctgttccggctgcgccagcagaacgtcaaggcccaccgcaagctggttcgccaggtcacgctggcgctcattacccgcgacgatgtcgtgccggtccccacccgcatgcagagtacctggcagcaggtcgtgcagaaatggtcggcggtccttctcggtgacccgcgggtcctggcacgcgcaccgataggcgtgacccagggcagcacggtgggcctgtcggaactgcgcaagcccgcgctgtccggcgcggtacaaggcgccgtggtattggcgccgccgagtacccgcaaggaatcggtggcgaccattgcctgggtggtcgagcgtatggaacaggggggcaagttggactacgagcacctgcgcaagttgagattgacggacctggacttgaccgcacaggcggcgacgcgtcccacgcagaacaaccccatgctgcagaaccagttgaagcgactcggcgcacaggctgatatcgggctcagtgccggcgccctgtttttccaaataatgcaggcagcggatatcgtcaagcagttcagtgaagtccgcgaccccggcaccaaggagtggcaggacttgacgattggccttacctactcggtcatcggcacgataggcgctggcatggagcttgccgcatccgtgcaggcgctacgcggtgtggacaaggtggtggtaggcgccatgatgcgccgtgctgccgcagttggtgccgtggctggtgttatcgatggcgcttatacgatcttcaaaggcgcgaacaagtatgtcgctggcgatacagattctggctattggacgatgggggccggtgcctttttcgtggttgcaggcgtggccagctatgggttggggggcgtggctgcagcatcgttcgctggcggctccgcaaccggcatcgccggcctgatgggcccggtggggtgggcgctcctgctcgtcgccgcactgggcatgggcctgtacttcgcctggcaggcctttgccacggatgatgaaaacctgctgcccgtggagtactggctggacaacggcgtgttcggcaagggggcgttccgcaagggcctgcgcgcctcgaagaacccctacgtccagggcggccaagtcccacccttcaccagcctggaggaggaagtcatggccctgaatcgtgtggtgctggtggcgcaggccagctttggcgacgcccgtggcagctatggtggtttgggcagctaccagattgacctaccgcgctacgccaagggcgcgcgcctggaagtacagtttcatgcgtaccaggaccgccagcgggtgaatattggtgaactgcactgcgagcacggcaaggagcagcccagccgctaccaactttccaatcgcctgaccggaatgcatcaaggccctacgctgcgtatcgacaaggagctgggcaccgcacgtatcgaaggcatgttcgccacggtcaacaagagcggcaagctcgttcgcgatgccgtcgagtgggtggtggagagcgtcagcggccaggacgtaccggacgcgctctatgcggatagcttcggcatgacgctgaaatactggcccaatcgcgacgagatgccggacctggtgtccgaattcgcctaccccgcaccaaggacatag

SEQ ID NO: 363476 - DNA, 756 bp, Pseudomonas aeruginosa
atggacgaagcggtggaacaggccttcctcggcggccaggcggagcaggaagtccaggtgggtgtcgccggcctgcacgcagtactcgcggggcaggtgttcctcggtgaggttctgcgcataggcgtcgatgcgctgttcggcgagcagggtctggagaatctgcgggacgctggtctgctggaagatgcgccagtccgagcccagcgccaggcgggccagcggcggctcgaccacggcgcggtagcgggtgcgtcggaagccggtgtcgtgttgttcgaaacccgagaccaggccccagacgtggcgcacggccacgccgccttgccagagggtgaagtgggcgggttggtccaggacctggccgaagtcgatggcggggtcgaagctgctcagtgccaggtccaggcggtaggtctcggacaggccctcttcgagggtgaactcgacgacgtcgaagtcgacatcgccgacgacgaaggtgaagcgcaaatcggactgggtgggcatgggggctccctgctgagccggaattcatccggcaggccattcgaacgggggttcccttctcaagcacgttttccgtgtcttgccgttggaagtgccgtagatgtccatggagccccaagcatcaatgatgcccggcgcatggccgtctcgaaatcagaaaaatcccaaaatgggaggcaagaaataccgcggcttcgtgcgactaattgcctgcatttcagaggcaacgagcagccggcgcactag

SEQ ID NO: 363477 - DNA, 2904 bp, Pseudomonas aeruginosa
ttgaatccacccaacgagttgatcctgcaggggcgcaacaccgaagatctcttcaagttccgcaacctgcatcgcctcaccatgcagggcagcgactggacgctgaccggcaccggcagcttcggcaatgctgcgcaggtcagcagcggtaccctgcgtgtcgacggtcggctcacgtccccgctcattaccgtcgcctcgggtgcaacgctcgccggcagtggaaccttcatcggtgatgtgctgaatgagggcacgctggcccctggcggcacccacaacccggtcggcaccctgaccatcgatggcaacttgaccctggccgagcactccatgctggactttcagttgggagcggcaggcgcgaccagtagtgcgctcaacgaccggatcgatgtcagcgggaacctgacgctggacggcatcctcaatgtctccgagtcgcccggcggaatgttcggcccaggcctctacaggcttttcaactacggaggcacgctgaccgaccgcggcctggcctttggccgaatgccagccggcagcgacagctcgctgatgaccgccatcgccggccaggtaaacctggtcaatcgcggcggggtggccttgagttattgggacggcgacagcgggccacgcttcagccacacggtggacggcggcgacggcatctggcgggccgcgggcgacaacaactggaccgatatggagggccgggtcaacgctgcctataccacgggcagcttcgccacgttcgcgggcaagcccggcacggtcaccgtcgacgacagccgtggggcggtggtatcggcgggcatgcagttcgctatcggtggataccgcgtacagggcggtcccatcaccttggcggcgggcaacaatgtcctgcgtgtaggcgacggcacggccaccggcggcgactacgtggccacgctcgcgtctgcgctgcagggcgcgggtgacatcgagaagaccgacctgggaaccctggagctggccggagccaatacctataccggctccaccacggtcacggccggcattctgcgcgccggcgcaggcaacgtcctctcccagagtcgcgaggtgattgtccagcacgccggcacgctcgacctgaacggttacgaccaggtcgccaaccgcctggcgggcgatgggcggattgatctgggcgctgccacgctgaccgcgcgcaacgccaccgcggcgtggagcagcgtgttcaagggtgtgctcagcggcctgggtggcctgacgaagaccggagccggcacgctgacgctcagcggtcaaaccctgtatcgcggcgagacccgcgtggaggaggggcaattggtgctcgatggcacctatggcggcgcgcgcttgcacggccaggtcggcggcctgccggcaggctccttggtattgcgcaacggcgccgagctcagcggtactatcagcgggcctagcctggccgtcgatgcggcgagccgctggagcatcgccgccagctcctatctgaaccagctcagcaatgccggcatgattggcttcacggcgcccgcgttaccgatgacccaggggcgcagcctcaccgtgcagagcttgcaaggcctggggggcagcatccgcctgtacacggcgctgggcgccaacgactcgatttctgaccgcatcgttgtcgacggcggccgcgccacgggcttgtcggtactggagattcacaacgctggcggcctgggtgatcagaccgccggcgatggcatccccgtggtggtcaccaccaacggtggcaccacggaagcaggggctttcgccctgggccgcccggtgctggccggcccctatcgctacagcctgcggcgtagtggcagcctggcgggggacgactggttcttggtcagtggtcggagcgatgacggcggcgcgggcactgctctgcccgactaccgcgcagagacttccctgtacagcgcactgcaagcgcaagcggtgcgttacggcgatgcggtgttgggcaccttgcaccagcgccgcggtgcggatgcggatatcgagtcgggcggacaaccgcccgtgtggatgcgcatcatcaggcaacacgaccgcagcactggcgccaacagcggcctgcgcgaaaagcgtgtgcgcggcgaggccgatgtctacgcgctgcagttgggtgtcgacctctatggggtccagctgagcgagcgttcggttcgcacgggcgtgtatggcgctgtcggccgcagcaagggcacggccgaccatgctgacgcgtgggggacgcgctcacgcgcgggtgaaaacgacctcgccgcctacagcctgggcctgtacggcacctggttgaacggacaaggcggctacgtcgatgctgtgcttcaaggcacgtattacgatgcgaaaagccgctcgcacgatgcgatgaagctgtccaccggcggcctcggcctggcggcatccgtcgaggccggccagcgcatcccgctggccgcggggctgaccctgcagccacaggctcaggccgtgtaccagcggctgaaactgcgcgatgctcgggatgccgccagcagtgtcgccttccccgcttccgacacggcgcagttgcgcctgggcgcgcacctgagtcaggaccttgccccggaggccagcgcgtcgggcacggcctgggcgagcgccgatctgctgcaccgcgtgggcagcacgacccgcactcgcttcagcacgccgacgcagggcgatgttggcttcgccaacgatctgcccggcacgtcgctgcgcgtgcagacgggggtggatggtcagctgagcaagcgcgtgtcgggtagcgcccgtctgggcgcggagcgcagcatcgatggcgcaggccacaccagcattggcggtcaggtaggtttgaaggtggtgttctag

SEQ ID NO: 363478 - DNA, 1755 bp, Pseudomonas aeruginosa
atggaattgatctccaccaccgacaccttcactgtttcgctggagaaccagcgctcagttatcctgagctttccctggtttgtcagccaggcaaagtacccgccgcgaccggccaatcgcatcgagcctctgatcaatggccagaaggctttcgaagcggtgtacgacgcaatcgacaaggccgagcacagtgttgagatcatcagttgggggttcgatcccagcatgcggatgattcgcccccatggcgagcgccttggcgacttgctacgccgcagggcctacggctgggacggacgcccgcccatcgaaatccgcatcctcatctggaagaacgtcctggccaacttcgctgagaacaatatccccggcgatggcctggcgggcagcggcgggacagccgttgggtcagggagcggctccactgcccccaatagcgaaggcggtaccgatgagcagggctacaacgactacggcagcaaggtcttcaacagtgccggcgtcaagaatggcgaccctgaagccgccgcctacaaccgcgaatggtacaagaaccgtccagaacgcctgacgttccgcactcgcgactacaacctgctcgaccgcgccaagattgcgctttaccagatggcacagagcggcacggcgggaccgagccagaccgccgcccttgcgctgtttgcttcccaccaccagaagaccgttctggtggattacgagcatcccgaaatcgccacgggcttcgtcatggggcacaacctgctgcgcaactactgggataccgacgagcaccttttctattccgaagaccgcctgaatttccagccctggcaggatctctcgtgccaggtctggggaccggtcctgcacgacctcaacgaaaacttcgtggaggcttggcgcaagtccgatggctggttttcctcctccaaggcctggcgcaaggcccgcatggaactcaagagcgaagacttcatcaccgatgagctggaaaccgatggcgagatggcgcagatcctccgcacccaatcccaggagaatgaccgttccatcctggacgcctaccgactgggcatcggcaatgcgcgcttctacatgtacttcgagaaccagtactttcgctacaaggcctttgccgaactgcttaggcaagtacgccgcaagctgaaaggccgtggctggccctcggatttctacatttttgtagttaccaacattccaccgggaagtgggcgaaccaacacctacgaaatgctggaggctctaggtcatggcgaccggatgccggagtaccaccgcgacacggaaaaaaagcccgacccggatgcggaactacgcaaaatagacctggacggggtgaacatccatatctgcaccttgcaggttgacggcgaagtcatagtcgacggcaagaaggagcgaaagtacaacgacatctatgtgcattccaagctgctcttggtggacgacgtgttctttacgctgggctcagcgaacgtcaatgcccggagcatggaaggggacagcgaactaaatatctcgtgcccctccccggacttgaccaagcaatggcgggaaaggctgtgggaaatccatacgaaaaatagcccagaaatcgaacttcgtgacgagtttcgtcgctggggagatgagatggcaagcaatgaaatctttacaaagaaaggtgacgagctttcttgttcgctccttggttttcatgatccaaatgataggtcatggggggcgccggattga

SEQ ID NO: 363479 - DNA, 210 bp, Pseudomonas aeruginosa
ttgcccgaggtggacggcgttccggtgcaatgggcgtgggaggcctctcccttcgaaggttcccgcctggcctccggccaactctgcacctggcccggcacctgggcctgcgaagacctgccggtgggcggacgccacttcgagcatggcgagccgttcccggaagtggaaggccgtccggttacctggcgcctgatgccacgcgcatga

SEQ ID NO: 363480 - DNA, 1131 bp, Pseudomonas aeruginosa
gtgctggcgggaaccgcccatggcaagaacgtgaaaccgcccctgcccgattggcaggcgctggccttcacctgcactaccgagcagaacccacccgtcgacccgcaggccgacgcctggttcttgcgcgcccgtgaactggaaaggcaggacatcaaggcacatgacgccgagatggtcaggctttaccaaatggctgcggaccgcggacactacaaagccatgctcaacttggcgggactttacagtcgcggaatagtagtcccaagggatgaaggcaaagcagtagatctcgttgagcgcgcactgaaattaaacgccccacatgccttctacaccatgggagttatgttgcagcagggcattggtgttaagcaagacgacgcaacagccttaagctattttcgtcgtgcggctgacctaggcaatcgctacggccagcaagccacgggtgaagcaatacgcgatgccttcatcaaaagcccagaactggaaagaagtcgcgagtatgcgattgcagtgcaaatgcttgaatgcgcactttcccaaggtttggctgaggccggagatactcttggctggcattatcaggaattcgatgtcgacatggaaaagtcacttaagtatttccagaaagctgcatcactaggacataaagacagtctatttcatctctactcgatgttccgaaacggtgaggatggcgtcgccaaagacccacagcgcgctgcctgctacgacaagctatggtatgaagctaaagccgagccaggcagaaaattccccgacatcgaccgcctttgccccttgccaccgccgccagctcgcaccggcatcagtggccagttgtccccgcgcgtaggcctctggcatcaagccgacaatcccgccgtgatgttccgcgcatcgtccggcgacaccttgcccgaggtggacggcgttccggtgcaatgggcgtgggaggcctctcccttcgaaggttcccgcctggcctctggccaactctgcacctggcccggcacctgggcctgcgaagacctgccggtgggcggacgccacttcgagcatggcgagccgttcccggaagtggaaggccgtccggttacctggcgcctgatgccgcgcgtatga

SEQ ID NO: 363481 - DNA, 1191 bp, Pseudomonas aeruginosa
atgagtacccaagcggagcgccccctcaccaaagcagagctggccgaacgggagaaggaactgtgggccaacgagttggaatggcagcgtcagaatccccacccagacttgagcgacttccagtcgctgattgaaaaagaaatacgccgtcagaaactcattcgcctacccggcctggatatcgccatgtggccagaggctgtggattgcagcattgatatcagcaatacagagaagttcaacgagcgcttcattgagcttccggctcaaactcgggccagcggatttgagaaatggtttatcggtgcacacaatttcttcttcttacttatcatgggcgtccgcatatacgaggatgcgcctttctgggactatgtggttccttacgtttttgtcgcagccgtcttcctccctcttatctatttcttcacgttccgtcttgcgggtaaaggcacttcgggaggcgttaggtataaccgccaagcgcaacttgttcatattgatgatgggcagggtcacgtcgcacatattccatggcggcaggtaattccctttgtcagcatcggcgtggcccccgcatccctgatgcgcttgtgcgcacctcagccccacgcccagaacgcgtactacgatgttgtggcgattggtcaggacgacgcggagcgtgcgcgcctgcattccctgcgcgaattggtggggccatacgacgtcccagtcaatatgacggaaacggatcacgtcattgtctggagcaacttgcagcgcttggaattcctgcggcgctacatggcggatggcatcgcggccattcaaccaagccccaagcgagtcgcatccgggcagttggagcgcccagaggactacggcaacccccggaacatcctggccggtggctgggacgcaaagtacctgctctaccccctggaccgtgccttccactacttcaccttcggcccctggctggacaagcgcacgcgcgcccgcgcagagcgattcagatggacgcaggaagtcgaagacctctgcggtctcaacccggacctgcgcggcctggatacccgtcccatcaaacccaggactgacgtcttctaccgcccggaaggcttcaccttcactgtcttgaacaggcgcggagaaccagtctcttcaacacgtctagagaagagcacagcatcttattcctcgaaatga

SEQ ID NO: 363482 - DNA, 1191 bp, Pseudomonas aeruginosa; identical to SEQ ID NO: 363481

SEQ ID NO: 363483 - DNA, 1050 bp, Pseudomonas aeruginosa
atgcggcttcttggaacttttttctgtttgcaattgttttggcagccggaagctgcctatgcgtggtgcgtaggcactcagcatatgacgattccagtcaggagtgcgttacagattacaggtgctgcggatgccaatcctgtcggccagcaaatatcaaattggggtggacaggtaacagacactatggcattcgccattgatacttgttctcctcgtgtctatcgtagctatgcagtacctacagcgatcccagtccctgggttgacgcacacaagcgatggggtcacttatcctatctacaagtcaaatgtgccaggggtggggtacgttattggcctcagagaccccaacgctacaaagtggacagggatcaatgcgccggaaacacagatatatcctgcgccagggactatcacaggggaggctccagggaccctgggctttgttgcgcaagtgaagtttattgcaataggtcgaattaaacctggcgtctatagtgggggcggggaacaggttgctacacttcgagtcacttctgcgagtggtactcagatggcaaccactgtgccgctatatgtacagtcttttactcttacagccacgacaacatcatgtcgagtgacacagggggcgcagcagacagttaaccttccggctgtcacggctggaagctttaatgctcatccggaaagtcgtgagtctgcttcattttctttgtcattgtcttgcgatgcaggtgtctcagtctatgcaaccatgactgatgcatccaatccgacaaatacggaggattttttgaagctcggaattgggtctactgcttctggtgttggtatccgtatttttaagaacggtgaagcagaccccgttaaattcgggccggactcatctgcgataggaaatttgaatcagtggtatgtcggaaggagtaattcgaacaacactcctttcgtaattccatttttggcgcgctattacaaaacttccgacaaggttggtacgggcagtgtgagggcctcgagtacgattacattttcttatcagtga

SEQ ID NO: 363484 - DNA, 966 bp, Pseudomonas aeruginosa
atggtcgccgccatcaaccccgcctatctggagttcagcaagacgcggcgaaccagcttcaggccaatgaacattctgttgagtatttggggagctggcgggctaggtttcttagcgatgttgcctatggttgttatgagttggacaaatgtagacaggaatgggccgggccttcctcttgtgggtacgctgatcctggcgatctgcctctggatcgctattggagttcctctacgtcaactgcgtcgccctcactcccccatcctgttcagcaagcgcctgcgccgtttctaccaatggcagggcaagcagaagggttggacggcactggactacgaccaggtggtgcccttcgtcacccgcctgaccgtggtcagcaccgccggcaccagcacctcgttcttcctggatgtcggtgtgttcgaaccgggcacccgcaagctggccgagttcatccgcctgagcgacccggccaatgacgtaatgacgcagggcgagctctgggagttcgtgcgcgcgtacatggacgacccggcgagcaaggtgccggccgttgcctacagcctccccgaggggcaggaccacggcattcatgcgcgcttggaccgcgacatgatgggagggctagtggatagcgagcatcgcctgcggcccgggctgttccccatggcctacttcggcatgagcgccaccattggctactgggcggaccgcatgattccctggctcgaacgccggatgccgcgaccggcgctaccgccggagctggccgaggccatgcaatgggaaggcgagaatccgtaccgcatcacgccacccagcgccattgaacagcaggccatcgacgggcagttgccctacatgaaccgtcgctggcgtatcggcatgctgctgtccaccctgctgtggggcggcagcttcgtggggatggtcggcgtcgcctggcacatggcgtttttccagtga

SEQ ID NO: 363485 - DNA, 1317 bp, Pseudomonas aeruginosa
atgagccttcaacaagccctcctgcaaactgccgagcttaatcccacttccttcgaacgctttgcccagttaattgacccctcttggatcgaacaggcactcgtcctgacgggaacggtttccctgcggcggcgtcgcttgccagcggagcgcatcatctggctggtcgttggtatggcgctgttcaagaacgagccgatctggctgatcgtgcagcaactggggctttctcaaggcgaagggcaggccccggtacccagtgcggctgtccaggctcgccagcgtttaggtgaagcgccgatggcggcgctgttcgaacaactggcagccgcttggctcgcgattgaacccccggtcaccgctcgcttccacggcctgcgcagctacgcggtcgacggggtggtctggtcggtaccggacagccctgataaccgtgaaacctttggcggcagccagaatcagaccagcgccggcccctggccacaggtacgcggagtgtgtctgatggatacctatagtcatctgatccgcgctgctcagtttggcgactacggcgttggcgaactgagctacgcccacgcgttgggtgaagtcgtcagtgatcattccttgacgatccttgatcgcgcctactactcggcggcctttctactgggctggcaacagcgtggagtcgagcggcactggctgatgcgtgccaaaacgccgttgcgtcatgagatcgtgcagaccttgggggccggcgactggctggtccgtctgcccgtttcccctcaggctcgccgacagcatcccgaactgcctgagcactggcaggcccgtctgctcgaacagatcatcgatggcaaacctcgccgctacctgacttcactctgtgatgccaaacgttacccggcagcccaggtcgcggcgcactatcgcgaacgctgggaaattgagttgggttatcgggagatcaagcaaggtctgctggggggcgaactgctacgcagcaagcagcccgaactcatccgccaggaactgtggggcaccttgctggcctataacctgatccgacaggaaatgcgcctgatggccgaagagcaaaaagtacttccccagcgcttgagctttcagtggttagccatcgctatcgccggagcattgcgccattgcccgacccaaacgcccgcgaccatcccgcagcgcttgagcgaactcagggtacaagccaggcattttctcctgccagccaggagggaacggagctatccccgcgttgtgaaaccacgcccagccaaataccccaagaagaaaaatgccagtcagcttaactga

SEQ ID NO: 363486 - DNA, 654 bp, Pseudomonas aeruginosa
atgagccccgatgccatctcccttcgtcgcgcgctctgcctcgcaatctctctcgggattgcggtgctggcgggaatcgcccatggcaagaacgtgaaaccgcctctgcccgattggcaggcgctggccttcacctgcaccaccgaacagaacccgcccgtcgacccgcaggccgacgcctggttcctgcgcgcccgtgaactggaaaggcaggacatcgaggcacatgacgccgagatggtcaggctttaccaaatggctgcggaccgcgggcactacaaagctatgttgaacttggcgggtctctatgtgcgcggaattggagtagccaaagacgaaggaaaggcggtcgaccttgttgagcgagctattaaactcaacgctcctcacgcgttttatcttatgggggtcatgctgcagcaaggtatcggtgtcaagcaggacgttcgcgctgccatgagtttcttccgccgttccgctgacttgggaaatcgctatgggcaagcagcagtaggcgaagaaataattcgtgcatttcaacggcagccagagccgactaaaagtcgtggcaagtctattgggaggaaagctttggattgcgcgatttcccaaggcctacctgattggtctgtcccggaactggtggacaggtag

SEQ ID NO: 363487 - DNA, 210 bp, Pseudomonas aeruginosa; identical to SEQ ID NO: 363479

SEQ ID NO: 363488 - DNA, 192 bp, Pseudomonas aeruginosa
atgggctcgacggtcggggtggtgatcgccgccttcgtcctcaccgtcgctccggagctgctgcgcgccttcgccgactaccgcgtgttgctcttcggcgtcctcatggtgctgatgatgatctggcggccgcgcgggctgatccgcatcagccgtgctggcttcaccccgcgtaaaggagtagcaccatga

SEQ ID NO: 363489 - DNA, 876 bp, Pseudomonas aeruginosa
atgagcgacgaatacatcctcagcgtcgagcacctgatgatgcacttcggtggcatcaaggcgctcaacgatgtcagtctgaagattaagcgtggctccatctccgcgctaatcggccccaacggcgctggcaagaccaccgtgttcaactgcctcaccggcttctacagggccaccggcgggcgcatccagctcaatacccgtagcacgagcatcgacgtcatcaagatcctgggcgaacccttccagcccaccgacttcgtcaacccggtgcaattcgccaaccgcctgcgctacaagatgttcggcggcacccacctggtgaaccgcgcagggctcgcgcgaaccttccagaacatccgcctgttccgcgaaatgtcggtgatggagaacctgctggtggcccagcacatgtgggtcaaccgcagcctgctcgccggcatcctcgatactcccggctaccgccgcgccgagagcgaggcgctggaccacgcgttctactggctggaggtggtcgacctggtggactgcgccaaccgcctggccggcgagatgtcctacggccagcaacggcgcctggagatcgcccgcgccatgtgcacccgaccgcagctgatctgcctcgacgaaccggccgccggcctcaacccgacagagaccgaggcgcttagccggatcatccgcacgctgcgtgacgagcacggccagactgtactgctgatcgaacacgacatgggcatggtgatgagcatttccgaccacatcgtggtgctggatcatggcgaagtgatagctgagggcggtccccaagcgatccgccaagacccgaaggtgatcgccgcctacctcggcgcagaagaggaggaagtggcatga

SEQ ID NO: 363490 - DNA, 822 bp, Pseudomonas aeruginosa
atgtctttccaacagcacctgctcgatctgggcgacctgttcaacttctccgacctgagcaccttcacccagaacattccaatcgagtgggtggagtcggcactgcatctttcctcacaggccagcattgggcggcggcgtctgcctaccgatcaggtgctctggctggtactgggcatggcgttgttccgcgatgagcccgtccatgaagtggccaggcgcctgaatatctgcgctcagggcctggcttccgaccacctgctggcgagaagtggtatcagccaagcccgtaacccggcgctgccggcctactgggaggtacgtgaagtcagctacgaacgtcagggcaagctgaaaaccgtgccgacctctctgccagccgagcgctacagcgccaaggccgttgccgatctgtaccaggagcgctgggagatcgaactgggctgccgagatatcaagagttccctgcaacagaacgcggtcaccctgcgcagcaagaaggttgagctgatctatcaggaggtctgggggttgctgctgagctacaacgtcattcgccgtgaggcgagccaggcagcgggagcgttcggccgttccgcatccgagatacgcttcaagccggtggctcattacatcgccgttcaactgatcgtgatggcagcagccaatccgatttccgccactggaaggcgcctggcggagtcgcgggccgggatcggcgggctatttctggatcgccgcccaaggccggcaagaccaagggcggtgaagatttcgaagacccgctatccggtgaaccgcaatgctgctccgcttaagtga

SEQ ID NO: 363491 - DNA, 579 bp, Pseudomonas aeruginosa
atgcttaagaccacctgccggctcctgctgtcggccttgatggcgatggcactgaccggctgcaagcctgccgacccgccaccagcggcccagggtgacaccgacatggtgccgttgcaggtgagcatcctcaactacaccgacacttacattgatacggtttatgtgaacggctcttgggctggaagcatgagtgcccactcgggtggtgcgaagttcgcaggctctgccgaagtgccgcgtcagtggagtccagactacaagctgactatccactggcgagacgaggctctgtacgagagggaacgcgaagcactgtttaagcgcgaggtagtgactgaaccatatcagaaagatgaaaaagggcgcatggcaaccctatggatcgccttttttcctgctggagttataaagctctacccaaccttcgtcggccccggaaattccaatttccctgaaagactattagctccctcatgggaatgcgagaaacgatttccggggaactccaagtgttttgcacccatttcatctcaggagcagcacgccgggcaaaacaggaagagtgaggcgccatga

SEQ ID NO: 363492 - DNA, 498 bp, Pseudomonas aeruginosa
gtgttcgtcgtgcttgccctggcggtcccaggggaactgcaccttcacccggccatgttcgtcgacgtggaactcctcgccctcgggaccgaccacggtggccacctgcgggccggggatgaccggccgcgggcgcggggccgggcgccactccacgcggtcggggaccagttcggcgacgtagtggtagtgggtgccctgttgggcgtcggcgccctcctcggcctggctggtgtgctgggtgccggtgtggcgcaggcgcaccgggcgccaaccgtggttccagtcttcccgcggatggccttgcaggtcgaaggccacgccggggaccaggcgcgcgtcatcgccctcgaccacggcgatgcgcgcatcgccgcgcaggccgcgcaggcggtcacgggtgaagggactgccggcggcgtcgcgcttgtagcggccggggtagtcgtagcgctcgtagtcgcgcgcctggtgggcgaggtcttcgccggccagtga

SEQ ID NO: 363493 - DNA, 288 bp, Pseudomonas aeruginosa
atgcatgcgcaacaccgggaagccgagcactgcgccggccatggccgccagcagcgccgacagcggcagcatgctccagaagcccaggccgaggtactggtagcccagcgccaggccgtaggcgccgatggcgtagaacgccacgtagccgaggtcaagcagcccggcgagaccgaccacgatgttcaggccaaggcccagcagtacgtagatcaggccaaggatgaccaccgccagcaggtacttactggcgaagaacgggaagaccagcgcggcggcgagcagtag

SEQ ID NO: 363494 - DNA, 654 bp, Pseudomonas aeruginosa
atgcgccacatcgcccaccagggtgaactgttgatgcaggcgcagcagaacgatatccgcatcgaagccgaccagaacctcgaagtcaccgccagcgaagagcacatcctgattgccgccaaagaacacctcaccctgatgtgcggcggcgtctacatcgagatgaaaggcggcaacatcgaactgggcatgcccggcgacttcaccgccaagcaaggccttcccacgctcattggccccacccagcgccagccgcgactgccagagttcgaggcggcaaccgtcagcccactgcgccgcaccatgaagttctctctggcgacactgccgggttctccgccacgttacgccggcgaacccttcaccctgctggccgacggtgcgccactacaggaaggcgtgctggacgaaaccggcggactgcgctgggaacacaaggaaggcacgcagaaatacaccgtggagctggtgaccggccagcgcttcgacatcgatgcccaggacagcttcgccgacgacccgcaaacccgagagcaacagacgctctccaacctcggcttccgcagccatgagcatgccggcgacatcgccgccaccgacaacgctgtcggcgatgccttccgccaactgctcgcccgcttcggcggccgctaa

SEQ ID NO: 363495 - DNA, 624 bp, Pseudomonas aeruginosa
gtggtgcccttcgtcacccgactgaccgtggtcagcaccgccggcaccagcacctcgttcttcctggatgtcggtgtgttcgaaccgggtacccgcaagctggccgagttcatccgcctgagcgacccggccaatgacgtaatgacgcagggcgagctctgggagttcgtgcgcgcgtacatggacggcccggcgagcaaggtgccggccgttgcctacagcctccccgaggggcaggaacacggcattcatgcgcgcctggaccgcgacatgatgggagggctggtggatagcgagcatcgcttgcggcccggcctgttccccatggcctactttggtatgagcgccaccatcggctactgggctgaccgcatgattccctggttcgaacgccggatgccacgtccggcgctgccgccggaactggccgagaccatgcaatgggaaggcgagaatccgtaccgcaccaccccgcccagcgccatcgaacagcaggccatcgacgggcagttgccctacatgaaccgtcgctggcgtatcggcatgctgctgtccaccctgctgtggggcggcagcttcgtggggatggtcggcgtcgcctggcacatggcgtttttccagtga

SEQ ID NO: 363496 - DNA, 591 bp, Pseudomonas aeruginosa
atgtttaagaccgcctgccatctcctgctgtcggccttggtggcgatggccctgaccggctgcaagccggccgacccgccgccggcggccaaggccgacgcagacatgaagtcgttgcaggtcagcgtcctgaactacaccgaccactacatcggcgtggtgtatgtggacggctcttgggcaagcaatgccatggcgcacagtggtggcgggaagtttgcaggctccgccgaagtgcctcgccagtgggatccgaactacaagctaaccatacattggcgtgacgaagcgctttacgagaaggacccgcaggcgctctacaagcgcgaggtggtgcccgagccgtatcagatggatgaaagcggccgcatgacgttcctgtgggtcgcattcttccccggcgatgtggtcaagctgtacccgacgtgggtggcgcccgaccatcccgactttcctgatggcttgctatccccaaagatgcaatgccgtaaggagcgccccaatacggattggtgcgagcacagcggctgggtgaagcgggaccaggccaaacgacaagctgcccaggaggccgccgacaatgaccactag

SEQ ID NO: 363497 - DNA, 543 bp, Pseudomonas aeruginosa
atggcgatggtcctgaccggctgcaagccggccgacccgccgcctccggcggccaaggccgacaccgacatggtgccgctgcgggtcaccgtcctgaactacaccgacgagtacatcgacgaggtgtacgtggacggctcttgggctgccaacgccatgccacatagtggcggcggtggcatcgcaggttccgccgaagtgccgcgcaaacgcgacccgaattacacgttgaccatccaatggcgtgacgaagcgctttacgagaaggaccggcgggcgctctacaagcgcgaggtggtgaccgagccttaccagcagagcgacgacggccaaatggctacgttgtttgtggccttcttccccgacgacgtggtcaagctctatcccgcctttgttggtcccggcaatcccgactttcccggggggctactcgccccctcatgggaatgcgagagaaagttccccggggacgccaagtgcttcgccccgtcatctccacccgagccaaggaccgccaatcagataaagggagaggcgcagtga

SEQ ID NO: 363498 - DNA, 210 bp, Pseudomonas aeruginosa
ttgcccgaggtggacggcgttccggtgcaatgggcgtgggaggcctctcccttcgaaggttcccgcctggcctccggccaactctgcacctggcccggcacctgggcctgcgaagacctgccggtgggcggacgccacttcgagcatggcgagccgttcccggaagtggaaggccgcccggttacctggcgcctgatgccgcgcgcatga

SEQ ID NO: 363499 - DNA, 123 bp, Pseudomonas aeruginosa
atgtcctgccaacggacgctatacctgggcttcttcttcgacggtacgcgcaataacggttccggcattcccgaatggccgggcacgacctacattcccctccccggagacgaccatgtttaa

SEQ ID NO: 363500 - DNA, 1047 bp, Pseudomonas aeruginosa
atgtcaggcgcctactacaacgaattcgacccatatgccgcccagtggcttcgaaacctgatcgccgccggtcacatagcacctggcgacgtagacgaacgctcgatcgaggatgttcatccagatgacctcaagcactacacacaatgccacttcttcgcaggaatcggcgtctggtcgctcgcccttcgccgcgccggctggccagatgatcgacctgtttggaccggttcctgtccttgccaacctttctcctcggcaggcgaaggagctgggtttgatgacccgcgtcatctctggccacattttgcctggctcatccgccagcgccgccctggagaagtccttggtgagcaggttgcaagcaaggacgcggagccttggctcgaccttgtacaagctgacctggaagccatggaatatgccttcggggctatcgcgtttccgtctgcgggcatcggtgccccgcacatccgtgaccgcacgtattgggtggccaactccaacggcagcgctggccgacaagggcgtcagaaccttcgagggcggccttctggaggccatgcgaaaccacggtccggaccttgcagcagtggcgtgcttgacgggatggcccagtccaacagcatgcgactcgaacaggagtccgtcgcagggattcacaacaccgaacatcacgctgaaccatgcggcggtgctgagcggatggccgactccgatggcgggcactccagctcagagcgggaacaacatggccggcaactcggacttaacccggaagaccgaggccatctgcggccgaaccatcgtggggcacggggtgagccttccggaagactggagcggaccggcgcggttaacggtctctgggcaggtgctgactggatcttctgccgggatggaaagtggcggccagttgaacccggaacattcccgctggctcatggggctccctcccgagtgggacgactgcgcgcctacggaaacgccatcaatgctgaagcggcgacgcagttcatagccgcatacctcgacgctacctcatag

SEQ ID NO: 363501 - DNA, 222 bp, Pseudomonas aeruginosa
atgatcgacatcttcctggtgtgcgttggcgctgtgggcatcacaggcgcggtgatgatctttagctaccactttggttatgaggcaggcctaaaggcgaactgcccactatggcaagaccccgcaaaagccgccctttacgggttaggcaagcccaagaagcttgaggatgagcgcgcctccgaccagggcggcaagccacttggatgcagtgatgactga

SEQ ID NO: 363502 - DNA, 201 bp, Pseudomonas aeruginosa
atgcagcagaatacgcaagacaaggcggtctcgcgggcagagctattgcaatcgattcttgggcaggcccatttgggagcacactgccaagtgcaggctcagcatcagcaggcgcgtcaagggtttgacatctacacgggcctagattactccctgaaaactaccgttaccaccaataccataagcgcacggaatgcctaa

SEQ ID NO: 363503 - DNA, 219 bp, Pseudomonas aeruginosa
atgcccaagtcgaataccccagcccagagtgctgcagtctttaagcgcgtcaccttctcgctgacggaccagatcagcgaggagatcgatcgccttagcctgatcccgcgagggttccgggcttctcgttccgatgttgttcgtgccggtgtcgcggcccttgctgcaatgtcggaagagcagctcgtgacattgctggataaggttcgccgcgagtag

SEQ ID NO: 363504 - DNA, 675 bp, Pseudomonas aeruginosa
atgaagccgaggcgcttgccgtgccccccagacctctcccgccagctcggcgtcctccagccgatggggaacgaccaggcgccagcaggtttcgccggaatgacgcaaggtcgcctccggccagacataacgtcgcacgctcgaacgaatgccatccgcaccgaccaccagcgaacagtcgtggacagtgccgtcgctcagggtcacgcgttcgtggtcgagtccgtcgaggatctgcacgatggagaccccgacccgaatgcgcgactcatccagcccctccagcagcgccgcatgcagttcgtggcgctgcaacgccaggccgccgcgggaattcccacccagactggaaggcatcgacatcagcatcgaaccgtcgtgggcgtatacgttgatcccggccaacggcatgccacggcggaacagccggtcgagatccagggtgctggacaacgccgtcaacgcattgctcgccagggtgatgccggtaccgatgggcctgatctcgctggcccgctcgaccagcagccagtcgatgcctgccttggtgaattcgcgcgccagcgccaggccggcgatcccggccccctggataagaacggtcatccgttgctccttagcagcggcatccgtcgcgacttcgcgcggtcgcgacaggcctgcccgagacgatga

SEQ ID NO: 363505 - DNA, 183 bp, Pseudomonas aeruginosa
gtggcggaggaccggcgggccaagcacatcgtgctgactcccaaggccgatgtgctgatcgccgatatcgaggccatcgccgccagcgttcgcaacgacgtactgaccggcatcgacgagtccgagcaggcgctgtgccagcaggtgctcttgcgaatcctggcgaacctggaaaagcgctga

SEQ ID NO: 363506 - DNA, 492 bp, Pseudomonas aeruginosa
atgttgcgttccagctatcgagcggttgtcgctggcttggttttactgccgctgcttgccagcgccgcccccttcacctcccccggcgaccgcgacctgatccgcgaccgccagcagcgcttgctcgacgaacagcgcaagcgcctggaggagctccagcaactgcccggcaagggagcgcccgccgctgcggatgcctccggcgacgacgagcgctgcttcgagatccgccgcatcgagctggagggcgccgggcacctcggcgaaagcgcgcgtcgccaactgctggcgccctaccaggggcgctgcctgggcgtcggccagctcaatgcgctgctcaaggccgtcaccgaccattacctggatcgcggctacgtcaccacccgcgcctacctgccacagcaggacctggcctccgggaccctgcgcatcatcgtcgtcgaaggccgcctggaagctccgcgctggccagcccgcgcgaactggcgatga

SEQ ID NO: 363507 - DNA, 324 bp, Pseudomonas aeruginosa
atggccaactcacgcaagcatctgatctacctggtctacgggcgacagacctaccaccaggaagccctgttcagcatcgccagcgccttcgcccacctccgcgacggggcggcgcatggcctgacggtcagggtctataccgacgaccccagtccctacgccggcctgccggtgcaggtccgcgaagtgacggccgaggagctggtcgcctggtgccaaccgcacggctatcacttccgcgccaagcacgtggccctgcgcgacgccctggaagacgccgaccaggcattgctgatcgacaccgataccttcttccacagttag

SEQ ID NO: 363508 - DNA, 567 bp, Pseudomonas aeruginosa
atgagcattgactggaccaaggcaccagagggtgcgacgcactaccaaccggaatcacgtgacttccatgcggcatggttccgacttcaaggggggaaggctcgcgaaatgtgggtcgtgatacccggcggcgcgcttgagcacatcatcgatccgactgccttcgacgagagcatgcagaacctgatcgcccgccccgcagaacctgccacctggaacggcaagggcctgccgccggttgggacggtgtgcgagtggcacggcccgaacagcgatgggcctgatggctgggtttatacagaaagcaaggtggtcgcctatacagatgacggactattcatctgtatgcagaaaccaagcttctggcctgtcgttcagcggatagatgattgcgagttccgccccatccgcacccccgagcagatcgccgccgaggagcgggagaaggcggcgctggaaatggcagcgctgatgtcagggcacgatgatcgttcgaaagactgcttcaaggtcctgggcgaaattctctatgacgccggctaccgccgccaggagtcatccacatga

SEQ ID NO: 363509 - DNA, 492 bp, Pseudomonas aeruginosa
atgaccgacaccaacaagctgaaggagctggcggaacgggctacgcctgggccttgggtggtggatgctcagcagagcggcgccatcttcaacattgaaagcgagtccggcgaccagtgcgttgccatgtctcaggaaaacccggcacctacaaggctggagatgaacgagcagcgaagagtgaacgcagccttcatcgccgccgccaaccctaaagccatcctcgggctgattgccgaggtggagcggctgaaggcagagcttagtcaatgcgcaagcgccctccccggcacctactacatggaccctccagacggcggcaatgtcagcattccagagcagattcggcgcatggcgaaggatgctgcgcggtatcgcgcattgcggcagaaggagcgcggagttgtggtggttcgtaaccgcacatcgcatctattcggagaacacctcgacgctgcaatcgacgcagccatagaaggagccaagcaatga

SEQ ID NO: 363510 - DNA, 1266 bp, Pseudomonas aeruginosa
gtggaagtgcacgaccggcagttctcccaggagatccgcctggcctcgcccaccggcggtgccttcgactacgtggtgggcgcctacgcgttcaggcagaacctcggcaacaagaccttcacctcctacggaccgttggccgacctgtacctgctcggcgccaatctcggcgcgctgaacgacacctactcgaaggccaacggcaagatcgagaccgacagcttcgcgctgttcgcccagggcacctggcacctcagcgaacgcctggacttcaccgccggcctgcgcggtacctacgaggagaagaacgccaaggtcgagcgcttcgctccgctgggcggcgcggcggtcggcggggtcggcgcggcggtgcgcaacggccagctcggcgcctacgattccggcgatctcagccagtacaacttcgccccttcggcgttgctcagcctcagctaccagttcagcgacgacctgctcggctacgccagcctgtcccacggcgagaagtccggcggggtcaacctggcggtgggcagcgcgccgagcgccggcgccgattcgctgctggtcggaccggagcgcgccaacgacgccgagctgggcctgaagagcacgctcttcgaccggcgcctgctgctcaacgccaacctgttctggaccggcatccacggctaccaggccaccaccctgtaccaggcgccgggctcgacgcagttggtgcaggtgctggccaacgccggcagcgtgcgctcgcgcggcctggaattcgaggccaccgcgctgccgttgcgcggcctgaccctgaacttcaacggctcttacaacgacgtcacctacctgtcgttcaaggatgccccgtgccctgcggaagtcagcacccggcccggcgcgccgagcagttgcgacctcagcgggcagcgcgtggtcggcgcctcgaaatggatcgccaacctcaatggcgaataccagtggcgcctcgacgaccgcttccaaccctacgtcagcgccagctacgcctaccgctccgcggccgagggcacgctggacaactccgacctttcgaagatcgacggctacgccctggtgaacctcgccgccggcctgcgcagcgatgtcggcgacggccagctggacacctcggtatggctgaagaacgccttcgacaaggactactacctgagcgccttcgccagcatcaacggctcctacaccgcatcggtgggacagccgcgcacgctcggcgtatcgctgcgctacgacttctga

SEQ ID NO: 363511 - DNA, 195 bp, Pseudomonas aeruginosa
atgctattttcctctttgtttgccaaagcctttaacgcgacttccaggattgaacgagttgctgacgcccatattcatacggtgccggccaacgagtttcccacccataacgcgcacattcatgtaagacccatgcagggtcagaaagtaatggccgagataaagcacataaatccgcccgcccagcggcaataa

SEQ ID NO: 363512 - DNA, 1131 bp, Pseudomonas aeruginosa
gtgagcgaagcagtcactccccaagacgacgcaagaacttccacttccaccccttctcccgttgcacccgatgcatccaggcgttccggtaccgccaccggcctggcgttgctcgccctgctggttggcgtggcgggactcggcgcgggtggctggagcttctggcaggtccagcagttgcagggcaccgagcgtgaccagctggcgcagctggaagatgcccgtggcaagaccgaatccctggcccagcgcaaccagcaactggctgcccgcctggacgctttgcctaccgcggacgaactggaggcccggcgacgccttgtggtggagctgcagggcgaccagcagcatctcagcgagcaactgaagaaggtcctcggccagagccgccagcaatggcgactggccgaggccgaacacctgctgcgcctggccagcctgcgcctgtccgccttgcaggacgtgggtagcgccaccgagctggtgcagggcgccgatgacatcctgcgcgcgcagaacgatcccggcgcctatgccgcccgcgccaagctggcggccagcctcgaggccctgcgtgcgttgccggagccggaccgtaccgggctgttcgtgcaactggcggcgttgcgcgagcaggtcaaccagttgcaaccgctcacgccgaccttcaaggaaggcgaaagcggtgccagcaatgtcgcctggggcgacggcaacagcacctgggagctgtggtgggagaagatctcgcgctacatccgcatcgacttcaatgccggccaggacattcgtccgctgctggccggcgagcaattggcgcaggtgcgcctgaccatcggcctggccctggagcaagcccagtgggcggcgctgaatggcaagcaggaagtctacgagcaggcgctgaagcaggcccaggacgtgctggacggctatttcaacgtagagctggccgacagccgcgcgttgaagttgcgtatcgatgagttggcgaagcagccggtcaccgtgcaggtccctgacctcgcaccggccctgagcgccttgcagtcctacgtgtcgcgccgcgaggccgccggcaacctggtgcccgaggcgcaggcggctccggccacggagggccgtccatga

SEQ ID NO: 363513 - DNA, 1239 bp, Pseudomonas aeruginosa
atgagacgcatctacctcctggtcctggcggtggtgctggtcgccacgctggttgggctggcgatctccgagcaggccggctatgtgctgatcgcctacaagagcttccgttacgaatccagcctgtggtcgttcctcgccctgctggcggtggtctggctgctggtggtgctggtgcgcctggtcctgcgcctgctcggcagctcggggcgggtggtcaacccctggtcgcgctacaaccgccggcgtcgcgtgcagatggccgagcacagcggcctgcgcgatctcggcgaaggcaactggccgcaggcgctgcgtcatttgcggcgggctgcggagatgggcgagcggccgctgatgcattacctcggagcggcgcgggccgccaacgaactcgagcgctacgacgaggccgacgatctgctgaaccgggctcgcgagcgcgagccggatgcccaattgctggtcggcctgacccgtgcgcaactgctgatcaatcgcggcgactacccgcaggcacgcaataccctcgaagagctgcacgggctccagccgcagcaccgcacggtattgcggctgatgcagcagctgtacgtcacccagcacgactggcaggccctttgcgtcctgctgccggagctgcgcaaggagcgtgtgctgaaggattccgaactgcgcgacctcgaacgccgtgcctgggtggcttccttgcaggaagccggcgagcgtggactgaacgagggcgagacggcgttgcagccgctgacccagcgctggcagaacgtgccttcggcgctgcgtgcagacccggcgatcgtcgcgggctatgccgcccaactgcttcgcctgggcgccgaggaagaggctgaagaagtcctccgccatgcgctcaagcaaggcttcgacgcgaccctggtgcaactctacgggcaggtgcgcgggcgcgatccgggcaagcaattgcaggccgcggaaggttggctcaaggaacatccgaacgatcccggcctgctgctgaccctggggcgcctgtgcctgatcaacaagctctggggcaaggcccgggaatacctggaggccagcctgagcttccagcgcagtgccgagacctgcgccgagctgggacgcctgctggcgcagctcggcgaggtcgagcgcagcaaccagttgttccaggagggcctggtcctgctcgatcggcgtactccggggctgcccgtggtggtggcggggatttga

SEQ ID NO: 363514 - DNA, 492 bp, Pseudomonas aeruginosa
atgcccctggccagcccccgtcagcttttccttctcgcgttcctggcctgcgtcgccatcatgggcggggcgctgtacctggaacatgtggttggcctggaggcctgcccgctgtgcgtcgtgcagcggatcttcttcatcctgatcggcctgacctgccttgctggcgcgatccaggggcccggcctgcgtgggcggcgtatctactccgtgctggtgttcctgctcgctctcggcggcggggccacggccgcccgccaggtatggttgcagaccgttccgctggaccaactgccggcctgcctgcccagcctcgactacatgatgcaggcgcttcccttccaggaagtgatccgcctggtcctgcatggcaccgcggattgtgcccaggtgagctggacgctattcaccctgagcattccggaatggagcctgctggcgttcgttgcctatctcggcttctccatcgtgcagttcctccgacgtgcctga

SEQ ID NO: 363515 - DNA, 483 bp, Pseudomonas aeruginosa
atgctcgaaagctgccgtaatgcccaagagcggtgggggggtgtgcaccaactgatcgatcgctggctgcatgagcgccagcaactggtgcaggccttcgatgccctgagcggtattcaggcaccggcgcccaacgccgaagaactccagcatttctgccaattgctgctggactacgtatctgccggacacttcgaggtctacgagcaactgacggcggaaggcaaggccttcggcgatcagcgcggcctggagctggccaagcagatcttcccccggctggaagccatcaccgaatccgcgctgaacttcaacgaccgctgcgacaacggcgattgccgtgaaggagcctgcctcatcgcggagctgaaggtcctgcggcaacagttgcacgaacgcttcgagctggaggactgcctcatcgaagtcctgcacaacgcccacagccagagcggcgcagagggttcggcagtaccggtctga

SEQ ID NO: 363516 - DNA, 630 bp, Pseudomonas aeruginosa
atgccgcgccgccttttcatcggtctttttctactgccgctgccgcttttcgccgcgcctcccaaggacgaactggcctatgccgtaggcgcccgcctgggcatgcgcctacagcaggaaatgcccggcctagagctatccgagctacttctcggactgcgccaggcctatcgcggcgaggcacttgaaatcccccccgaacgcatcgaacaacttctgctgcaacacgagaacgccacgacggaaacaccgcggaccacacccgccgaggcccgcttcctggccaacgaaaaagcccgcttcggcgtccgcgaattgaccggcggcgtcctcgtcagcgaattacgtcgtggccaaggtaacggcatcggcgcggcaacccaggtacacgtccgttaccgcggcctgcttgccgacggtcaagtgttcgaccagagcgaaagcgccgagtggttcgccctggacagtgtgatagagggatggcgcacagcgttgcgagcgatgcctgtcggcgcgcgctggcgagtggtgattccttcggcgcaagcctatggccacgaaggcgctggcgacctgatcccgcccgacgctccgctggtcttcgagatcgacctgctgggcttccgctga

SEQ ID NO: 363517 - DNA, 1059 bp, Pseudomonas aeruginosa
atgtcggccaacaagaagcccgtcaccacccccttgcacctgttgcagcaactttcccacagccttgtcgagcacctggaaggtgcgtgcaaacaagcgctggtcgattcggaaaagctcctggccaaacttgaaaagcaacgtggcaaagcccaggaaaaactgcacaaggctcgcaccaagctgcaggatgctgccaaggccggcaagaccaaggcacaggccaaggcgcgcgagaccatcagcgacctggaagaggcgttggataccctgaaggcccggcaggcggacacccgtacctacatcgtcggcctcaagcgtgacgtacaggaaagcctcaagctggcgcagggtgtcggcaaggtgaaggaagccgctggcaaggctctggagagccgcaaggcgaaacccgcgaccaaacctgctgcgaaggcggcagccaagcctgcggtgaaaaccgtagcggcgaagcctgcggccaagccggctgcgaagcctgctgcgaaaccggcggccaagcctgcggcgaaaaccgcggcggcgaagcccgcagccaagccgacggcgaagcctgctgcgaaaccggcggccaagcccgcggcgaaaaccgcagccgcgaagcccgcagccaagccggcggcgaagcctgtggcgaaaccggcggccaagcctgcggcgaaaaccgcagccgcgaagcccgccgccaagccggcggcgaagcctgtcgcgaaaccgacggccaagcccgcggcgaaaaccgcagccgcgaagcccgcagccaagccagctgcgaagcctgcggcgaaaccggcggccaagcctgtggcgaaacccgcggccgcgaagcctgcagccaagccggctgcgaagcctgcggcgaaaccggcggccaagcctgcggcgaaacccgtagccgcgaaacctgccgcagccaagcccgccaccgctcctgctgcgaagcctgcggcgactcccagcgccccggcagccgcctccagcgctgcttcggcaacgcctgccgcgggcagtaacggcgccgccccgaccagcgcctcctaa

SEQ ID NO: 363518 - DNA, 480 bp, Pseudomonas aeruginosa
atgactggaaatgtctggaaattcgcggtggacgtctatgcccggccgggcgtggaaacggcttgcctcgcgcttcaggagcaaggtgcggacgtctgcctgttgctggtcgccgcctggcttggcaggcgcggtgtgagctgctcgaaagaacgcgcccagatcctggagaacgccgcgcgtccctggcgcgaaacggtcatcgaacccctgcgcagattgcgttgcgcctggcgcgaagcggcaacccacgacgcctgcctggccgaactccgcgaggaaatgaaggcccaggaactacgagcggaacgggaacacctgcaacgcctggccgacctggccacagcctggctggagggccaggaagcgaatcgcagtgcggatgcctggctgcaagcctgcagccgggacatctgcacggaagcagagcgccgggctttgctggtgcttggctcggcggctttgcagacagcgccttag

SEQ ID NO: 363519 - DNA, 1917 bp, Pseudomonas aeruginosa
atgatccgactcctcaatcttacgctacagcgcgggccgcagcgcctcctggaagctgctgaactgaccctgcacgccggccagaaagccggtctcatcggggccaatggcgctggcaagtccagcttgttcgcgctgttgcgcggccagctcgggcaggatgccggcgactgcctgttgcccgccgactggcgcatcgcgcacatgcgccaggaggtcgataccctggatcgcctggcggtggattacgtgctcgacggcgacagtcgcctgcgcgagatccaggcggcgctggccgtcgccgaagcggcgcacgacggttctgccctggcgcgcctgcataccgagctggacaacgccgacggttataccgccgatgcacgggcgcgcaagctgctggccgggctcggcttcagcagcgagcagatggagcgccgggtcggtgatttctccggtggttggaggatgcgcctgaacctggcgcaggcgctgatgtgcccgtccgacctgctgttgctcgacgaaccgaccaaccacctcgacctggacgccatcctctggctggaagagtggctcaagggttatcccggcactctggtgctgatctcccacgaccgcgacttcctcgatgcggtggtagaccacgtggtgcatctggaaaaccgcaagctgatcctctaccgcggcggctattccgctttcgagcggacccgcgccgagcggctggctcagcaacagcaggcctacgagaaacagcaggcgcagcgtgcgcacatggaaagcttcatcgcccgcttcaaggccaaggccaccaaggcgcgccaggcgcagagccggatcaaggcgctggagcgtctagaggaactggcgccggcacatgtcgattcgccgttcaatttcagtttccgcgagtcggacaagatctcccggccgttgctggatctcggcgaaggccgtctcggctatggcgacaaggcggtgctggagaaggtcaagctgcaactggtgcccggtgcgcggatcggcctgctcggtcccaacggcgccggcaagtcgacgctgatcaagaccctggccggggacctgcccgagctgggcggccgcctgctgcgcggcgagaacctggccatcgggtacttcgcccagcaccagctcgattcgctggatccacaggccagcccgttgctacatctgcagcgtatcgcccccggcgagcgcgaacagaccctcaaggacttcctcggcggcttcgacttccgcggcgttcgggtggacgagccggtattgaacttctccggtggcgagaaagcgcgcctggccctggcgctgatcgcctggcagaagcccaacctgctgctgctcgacgagccgaccaaccacctcgacctggaaatgcgcctggccttgaccatggctctacaggagttttccggggcggtcctggtggtttcccacgaccggcacctgctcaaaagcaccaccgatgaattcctcctggtcgccgatgggcgcgtggtgccgttcgatggcgatctcgacgattacgcccgttggctggtcgactatcgcgcgcgcaaggcgccgcaggccgagaccgcgccgggtgcgccgaccgaacgcaccgacaagcgcgcccagcgccaggcagcggccgcgctgcgccagcagctggcgccgcacaagcgcgaggccgacaagctggagcgcgaactcggcggcctgcacgaaaagctagccgctatcgaggcgcggctgggcgacagcgccctgtacgacgtatcgcgaaaggacgaattgcgcgagttgctgtccgaacaatcgagcctgaaggttcgcgaaggcgagctggaggaacgttggctggaggccctggaaaccctcgaagccctgcagaaagaactagaggccagtgagtga

SEQ ID NO: 363520 - DNA, 579 bp, Pseudomonas aeruginosa
atggaagacttgcaggtgttgacgcagacctggagcgggccgctggtggtggcgatgcagatcctgctcatcctgctggtcgcctggctgctacagcgcctggtccgacgcacggtgacccgtatcggcgagcgttatccggtgccgccggagctgctcctgccgctgcgtgggggcctgcgctggctgatcatggtcagcgcactgatcatggtgctggagcgcctgggcgtgtccgccgaagtgctgtggaccgcgctgaccggtttcgccgcggtggcggcggtagccttcttcgccatctggagcgtgctctccaacctgttctgtgcgttgctgatcttcaccgtcgggccgttccgcatcggcgaccgcgtggagctgatcgatagcgccgacaaaccgggcgtcaccggacgcgtggttgccatcaatctcttgtatacgacactggaagaaaccctcgaggatggcgcgccgggcccgctgctgcaggttcccaacagcctgttcttccagaaagccgtgcgtcgctggcgtgggccaggtttttcaactccaacaaaaaacgggaaataa

SEQ ID NO: 363521 - DNA, 759 bp, Pseudomonas aeruginosa
atggaatggctcgccagtcctgaaatctgggtcgcgttcctgaccctgaccgccctggaaatcgtcctcggcatcgacaacatcatcttcatctcgatcctggtcgggcgcctgccgccggcccagcaaccgaaggcgcgcttcttcggcctggccctggccatgggcacgcggatcctgctgttgctctcgatcacctgggtcatgcgcctgaccaccgacctgttccacctgttcggccagggcatctccgggcgtgacctgatcctcttcttcggcggcctgttcctgctgttcaagagcaccatggagatctaccacagcctggaaggcgcggaagaagagcagaagagcggcggcaaggtccacggcttcatgggcatcatcgtccagatcgcgatcatcgacatcatcttctccctggactcggtgatcaccgccgtcggtctggtgcagaacgtgccggtgatggtcgcggcgatcgtcatctcggtcggcgtgatgatgctggcggcaggcaccatcagcgacttcatcgagaaacacccctcgctgaagatgctcgccctgtcgttcctcatcgtggtcggcaccgtgctggtggccgagtccttcgaagtgcacgtgccgaaaggctacgtctacttcgccatggccttctccctggcggtggaggcgctgaacatccgcttgcgcggagccctggcgcgcaagcgcggcgaagagccggtgaagctgcgcaagggttcgccggactga

SEQ ID NO: 363522 - DNA, 630 bp, Pseudomonas aeruginosa
atgctcgtcagtacctggttcgccttcttcctcgcctgctgggccatcagcctgtcgccgggcgccggagccatcgcctcgatgtcctgcgggttgcagtacggctttgcgcgaggctactggaacgcgctgggcctgcagatcggcctggccctgcagatcgccatcgtcgccgccggcgtcggtgcgttgctggcgacctcggcactggctttcagcctgatcaagtggttcggcgtggcctacctggtgtacctggcggtgcgccagtggcaggcgccgccacaggccttgagcaccgatggcgaacggcctctggggcgaccgttgaccctggtgctgcgtggtttcctggtcaacgccagcaatcccaaggcggtgatcttcatgctcgcggtgctgccgcagttcatcgacccgcaccagccgctgctggcgcaatacctgatcatgggcggcaccatgatcgtcgtcgacctgatcgtcatggccggctacaccgggctggctgcgcgcgtgctacgcgtactgcgttcgccgcgccagcagaagctggtgaaccgtaccttcgccagcctgttcgtcggtgccgcggggctgctggcgacggtacgccgagcgccgctctga

SEQ ID NO: 363523 - DNA, 1959 bp, Pseudomonas aeruginosa
atgggcgggaaggcgaagggacaatttaatctcttccattctcacttcgtcttcgccatgcaccctccgaaaatcctgctgtggctgctgccgctggtctgcgcgttcagccttggagctcttgccgacacggccgtcgacccctcccaagccttgcatctgttgagttacctggcggccgactatccgccgaccgtggctgacggcaagatcgtcgaccccagcgaataccaggaacaggtggagttcgtcggcaacctgcaggcattggtcctgaccctgccgatgcgccccgagcgcgccgagctggagaggggcgtcgccagcctgcgccaggccatcgagcagcgcttgccgggaagggacgtggccctccaggcgcgcaacctcgaggcacgggtggcggatatctaccaggtggtgcagacccccgcgatcacccccgacccgagccgcgcggcgccgatctatgcccagcagtgcgcgatctgccatggcgatgcgggcaagggcgacggccccgccggcatcggcctggaaccgccgccagcgaacctcaccgatcgccagcgcctcgaccacctgagcctctacgacctgcgtaacgtcatcggcctgggcgtggcgggcaccgacatgccggcgttcgccgaccagctcgacgaacgccagcgctgggacctggccagctatgtggccggcctgagcgccggcagtgcgcagccggacaaggcccatgcctacccgctggcgaccctggccacgcagactccggccgaagtcgccgagcacgacggcgaggccgctgcggagagcttccgcgccctgcgtgcgcatccgccgctggagcagcgcggtcctgggcagttgatcgactataccgccgccaccctggacaagagcttcgcggtctatcgcgaaggcgaccgcgaccaggcctacgacctgtccgtggcggcctacctggagggcttcgagctggtggaaagctcgctggacaacgtcgacgccgatttgcgccgctccaccgagaagcagctgatggcctaccgccaggcgttgcgcgatggcctcccggaaacccaggtggcgcaacagctggagctggccaagggcaagctggcagaggccgccaagcagcttggcggcgactcgctgagtttctccatcagtttcgtttccgccttgttgatcctgttgcgcgaaggggtagaggcaatcctggtgcttgccgccatcctcgccttcctgcgcaataccgggcaggaaagtgccgtgcgtggcgtgcacgtcggctgggggctggccttcgtcgccggcttcgccacctgggcgttggccgcctatgtgatcgatatcggcggtgcccagcgcgagctgatggagggcttcacctctctgttcgcctgcgtgatggtgctctggctcggcgtctggatgcacgaccgccgccacgcggcagcctggcaggactacatccgcagcagcctggtgggcggtggcggacgcttcggcttcgcagtgctggcgttcttctcggtctaccgcgagttgttcgaggtcatcctgttctacgaaaccctctggttgcaggccggaccggccgggcacaatgccgtgatcggcggcgcggcgaccgccgtggtcctgctgatcggcctggcctgggtgatcctgcgtggttcggcgaaactgccgctggggttgttcttcagcatcaacgcggcgttgctctgtgcgctctcggtggtgttcgccggacatggcgtcatcgccttgcaggaagccggggtgatcggcacccgtccggtgccgttcttcgacttcgactggctggggatcaaggccgacgcctattcgctgtcggcccaggccatggcgctggtggccatcgcgctgctctacggacgtagccggatcgtcgagcgccggcgtgcggcggccaacgcggccgactga

SEQ ID NO: 363524 - DNA, 483 bp, Pseudomonas aeruginosa; identical to SEQ ID NO: 340009

SEQ ID NO: 363525 - DNA, 474 bp, Pseudomonas aeruginosa; identical to SEQ ID NO: 340008

SEQ ID NO: 363526 - DNA, 669 bp, Pseudomonas aeruginosa
atgcacaagaaagttgccgtcatcctctccggttgtggcgtctacgatggcgcggaaatccacgaaagcgtgatcaccctgctccgcctcagccagcgcggcgccgaggcacaatgctttgcgccgaacatcgcccagcaccatgtggtcaaccacctgaccggcgaggaaatgccggaaagccgcaatgtcctggtcgagtccgcgcgtatcgcccgcggcgaagtcaaggacctgcgcgaagcccgcgccgaggactacgacgcgctgatcgtgcccggtggcttcggcgctgcgaagaacctcagcgactttgccatcaacggcgcgcaatgccaggtgcagccggacgtgctggcgctggccaaggctttcgccgaagccggcaagccagtcgggctgatctgcatcgctccggcgatggcggcgaagatctacggcgccggcgtccaatgcaccatcggcaacgacgccgacaccgccgacgcgctgaagcagatgggtgccgagcacatcgacgcgccggtggacgagatcgtcgaagacagcgcgcgcaagctggtgaccaccccggcctacatgctcgcccagtcgatcgccgaagccgcttccgggatcaacaagctggtcgaccgggtgctcgaactggtggaccaggacaaggcctga

SEQ ID NO: 363527 - DNA, 591 bp, Pseudomonas aeruginosa
atgatgctccaacaattcctgcaggacttcggctatttcgccctttttctcggtactttcttcgagggcgaaaccattctcgtgctggccgggttccttgccttccgcggctacatgcagttggataccgtgattctcaccgccttcctcggcagctacgccggtgaccaactctggtacttcctcggacgccgccacggccgccggttgctggcgcgcaagccgcgctggcagaagctcggcgacaaggcgctggaccatgtgcgccgccatcctgacctgtgggtgctgagtttccgcttcgtctacggcctgcgtacggtgatgccggtggccatcggcctgtccggctatccaccggcccgctatcttcttctcaacggcatcggcgccatcgtctgggccgccgcgctgggctccgccgcctactatttcggcagcgtactggaaggcatgctcggcaacatcaagaaatacgaactcatggtcctcggcggcctgatcgtgctgggcctgctgctctggctatggcggcgtttcaagacaccgcgcggcaacggcgcgggcggcaacgccgacaaatccgagtaa

SEQ ID NO: 363528 - DNA, 1014 bp, Pseudomonas aeruginosa
gtgagcttcactcccgccaatcgcgcctatccctacacccgcctgcggcgcaatcgccgcgatgacttctcccgccgcctggtccgcgagaatgtcctcaccgtcgacgacctgatcctgccggtgttcgtcctcgatggggtcaaccagcgtgaaagcattccgtcgatgcccggcgtcgagcgcctgtccatcgaccagttgctgatcgaggcggaagagtgggtggccctgggcattccggcgctggcgctgttcccggtgaccccggtggagaagaagtccctggacgccgccgaggcatacaacccggaaggcatcgcccagcgcgccacccgcgccctgcgcgagcgctttccggagctgggcatcatcaccgacgtggcgctcgacccgttcaccacccatggccaggacggcatcctggatgacgatggctacgtcctcaacgacgtcagcatcgacgtgctggtacggcaggcgctgtcccacgccgaggccggcgcccaggtggtagcgccctcggacatgatggacggtcgcatcggtgcgatccgcgaggccctggagtctgccggccacaccaatgtgcggatcatggcctactcggccaagtacgccagcgcctactacggtccgttccgcgatgcggtcggctcggcttcgaacctcggcaggggcaacaaggccacctaccagatggatccggcgaacagcgacgaggcacttcacgaagtggccgccgacctggccgaaggcgccgacatggtgatggtcaagccgggcatgccctacctcgacatcgtgcgtcgggtgaaggatgaattccgcgccccgacctttgtctaccaggtcagcggcgagtatgcgatgcacatgggcgccatccagaacggctggctggccgaatcggtgatcctcgagtcccttaccgccttcaaacgtgccggcgccgatggcattctgacctacttcgccaagcaggccgcagaacaattaagacgggggcgttga

SEQ ID NO: 363529 - DNA, 2211 bp, Pseudomonas aeruginosa
atgaatacgcagcaaggacttgatgagatcgaacgtatcgccgccgacgaaaccgtagtggcgaacgtggaaagcgaagcagaagtgaagatggccgaaacgatcccggtggaaacgccacctgtggtggttcccagcgtggatgacagcagcctgtacattcatcgcgagctctcccagttgcagttcaacatccgcgtgctggagcaggcgctggacgagtcctacccgctcctggagcggctgaagttcctcctcatcttctcgagcaacctcgacgaattcttcgagatccgcatcgccggcctgaagaagcagatcaccttcgcccgcgagcaggccggcgccgacggcctgctgccgcaccaggcactggcgcggatcagcgagctggtccacgagcaggtgtcgcggcagtaccggatcctcaacgagaccctgttgccggagctggccaagcaccagatccgcttcatccgccggcgtcactggacgctgaagatcaagacctgggtgcggcgcttcttccgcgacgagatcgcgccgatcatcaccccgatcggcctcgacccgacccacccgttcccgctgctggtgaacaagagcctcaacttcatcgtcgagctggaggggatggatgccttcggccgcgactccggcctggcgatcatcccggcgccgcgcctgctgccacggatcatcaggctgccggaagacgttggcggcgagggcgacaactacgtgttcctgtcgtcgatgatccacgcccacgccgacgacctgttccccggcatgaaggtgaagggctgctaccagttccgcctgacccgcaacgccgacctgtcggtggacaccgaggatgtcgaggacctggcccgcgcgctgcgcggcgagctgttctcgcgtcgctacggggacgcggtacgcctggaggtggtggatacctgcccgcagaacctgaccaactacctgctcaagcagttcggcctgtccgaaagcgagttgtacaaggtcagcggcccggtcaacctgacccgcctgttcagcgtcaccggcctggaaagccatccggagctgcagtacccgcccttcaccccggcgatcccgcgtcttttgcagaagaaggaaaacctcttcaacgtcctcagcaagctcgacgtgttgctgatgcacccgttcgagtccttcaccccggtgatcgacctgctgcgccaggccgccaaggatccgaacgtgctggcgatcaagcagaccctgtaccgcagcggcgccaactctgagatcgtcgacgccctggtcgaggcggcacgcaacggcaaggaggtcaccgcggtgatcgagctgcgcgcccgcttcgacgaagagtccaacctgcaactggccagccgcctgcaacaggccggcgcggtggtgatctacggcgtggtcggcttcaagacccacgccaagatgatgctgatcctccgtcgcgaggacggcgaactgcgccgctacgcgcacctgggcaccggcaactaccatgccggcaacgctcgcctgtacaccgactacagcctgctgaccgccgacgtggcgctctgcgaggacctgcacaagctgttcaaccaactgatcgggatgggcaagacgctgcgcatgaagaagctgttgcatgcgccgttcaccctgaagaagaacctgctggaaatgatcaaccgcgaggcggcccaggcggcgctcggccagcctgcgcacatcatggccaaggtcaactcgctgaccgatccgaaggtcatccgcgccctgtacaaggccagccaggccggggtcaggatcgacctggtggtgcgtggcatgtgctgcctgcggccgggcatcccgggggtctcgcacaatatccacgtgcgctcgatcatcgggcgcttcctcgagcacagccgcatctactacttcctcaacggcggcgacgagaagctctatctctccagcgccgactggatggagcgcaacctcgacatgcgcgtcgagacctgcttcccggtggaaggcaagaagctggtgcagcgggtcaagaaggaactggaaacgtacctgaccgacaacacccaggcctgggtgttgcaggccgacggtagctaccagcggctcagtcccaccggtaaccagaacccccgcaatacccaggcgaccctgctggagaagctggccgcgccggtgcttaccgcacgttga

SEQ ID NO: 363530 - DNA, 1506 bp, Pseudomonas aeruginosa
atgccgcaaaaacctgccgaggcattcccgctgattgccgccctggacctgggttccaacagtttccacctctgtctggccaaggccaatatccacggcgaagtccgcatcctcgaacggctgggcgagaaggtccaactggccgccggcctcgacgaggagcgcaatctcagcgaggaggccacccagcgcggcctcgactgcctgcgccgcttcgcccagttcatcagcggcatgccccagggttccgtacgcgtggtcgcgaccaacgccttgcgcgaggcgcgcaaccgcagcgatttcatccgtcgtgcggaagaggttctcggccatcccgtggaagtcatctccggccgcgaggaagcccgcctgatctacctcggcgtcgccaacagcatgcccgacagcggcggtcgccggctggtcagcgacatcggcggcggcagcaccgagttcatcatcggccagggtttcgagtccgagctgcgggaaagcctgcagatgggttgcgtcagctacacccaacgctacttccgcgacggcaagatcaccccggcccgctacgcccaggcgtacaccgccgcacgcctggaactgatgggcatcgagaacagcctgcggcgcctcggctggcaacaggcggtcggcgcctccggcaccatccgcgcagtggcgctggcgatcaaggccggcggccacggcaacggcgagatcagcccggacggactggcctggctgaagcgcaaggtgctcaagctcggcgacgtggagaagctcgatctggaggggatcaagccggaccgccggaccatcttcccggccggactggccattctcgaagcgatcttcgacgcgctggaactggaacagatggttcactccgagggcgccctgcgcgaaggcgttctctacgacctggtcggccgtcaccagcacgaggacgtgcgcgaacgcaccatcagctcgctgatgcagcgctaccacgtcgatccggagcaggcttcgcgggtggaggccaaggccctcaaggtgcttgccgaagtcggcgacgcctgggagctgaacggcgaactgcaccgcgacctgctgagctggggcgcacgggtccacgagatcggcctggacatcgcccattaccactaccacaagcacggcgcctacctgatcgagcactccgacctggctggcttctcgcgccaggaccagcagatgctgtcgctactggtacgcggccaccgccgcaacattccggcggacaagctggcggagttcgccgaggaaggcgacaagctggtacgcctgtgcatcgtgctgcgcttcgcgatcctcttccaccacattcgcggcacccaggaaatgccctcggtgcgtctgaaggcagagcccaagagcctttcggtgaccttccccgagggctggctggaagccaacccgctgacccaggccgacttcgcccaggaagccgaatggctcaagcgggtcggctacagcctcaacgtgcggtaa

SEQ ID NO: 363531 - DNA, 327 bp, Pseudomonas aeruginosa
atgagcgaacatatcgtcaacgttactgatgccagcttcgagcaggacgtgctgaaggccgacggccctgtgctggtggactactgggccgagtggtgcggtccgtgcaagatgatcgcgccggtgctggacgaagtcgccagggactatcagggcaagctgaaggtctgcaagctgaacatcgacgagaaccaggacaccccgccgaagtacggcgtgcgtggcatccctaccctgatgctgttcaaggacggcaatgtcgaggcgaccaaggtcggcgcactgtccaagtcgcagctggcggccttcctcgacgccaatatctga

SEQ ID NO: 363532 - DNA, 1260 bp, Pseudomonas aeruginosa
atgaatctgaccgaactcaagcaaaagccgattgccgaactgctggaaatgtccgatgccatgggcctggaaaacatggcccgttcgcgcaagcaggacatcatcttcgccctgctgaagaagcacgcgaaaagtggtgaagagatctccggcgatggcgtgctggagattcttcaggacggcttcggcttcctgcgctccgccgactcttcctacctggccggccccgacgacatctatgtctcgccgagccagatccggcgcttcaacctgcgcacgggcgacaccatcatcggcaagatccggccgccgaaagagggcgaacgctacttcgccctgctcaaggtcgactcgatcaacttcgatcgtccggagaatgcgaagaacaagattctcttcgagaacctgacgccgttgttccccaacgagcggatgaagatggaagccggcaacggctccaccgaagacctgaccggccgcgtcatcgacctctgcgcgccgatcggcaagggccagcgcggcctgatcgtggcgccgccgaaggcgggcaagaccatcatgctgcagaacatcgccagcaacatcacccgcaacaaccccgaatgccacctgatcgtactgctgatcgacgagcgccctgaggaagtgaccgaaatgcagcgcaccgtgcgcggcgaagtggtcgcctcgacctttgacgaaccgccgacccgtcacgtacaggtcgccgagatggtgatcgagaaggccaagcgcctggtcgagcacaagaaggacgtggtcatcctgctcgactccatcacccgtctggcgcgggcctacaacaccgtgatccccagctccggcaaggtgctcaccggcggtgtcgacgcccatgccctggagaagccgaagcgcttcttcggcgccgcgcggaacatcgaagagggcggttctcttacgattctcgccacggcgttggtggaaaccggctcgaagatggacgaggtgatctacgaggaattcaagggtaccggcaacatggaactcccattggatcgcaagatcgccgagaagcgcgtgttcccggccatcaacatcaaccgttcgggtacccgccgcgaagagctgctgaccagcgaggacgagctccagcgcatgtggatcctgcgcaagatcctgcacccgatggacgagatctccgcgatcgaattcctcatcgacaagctcaagcagaccaagaccaacgatgagttcttcgattcgatgaaacgaaagtag

SEQ ID NO: 363533 - DNA, 1989 bp, Pseudomonas aeruginosa
atgtcgagcctggcctatcgaagggacatcgatggtttgcgagcgttggccattctgccggtggtgttctaccaccttggcttggggggcatcaccggcggctatgtgggcgtcgatgttttcctggtcatttccggctacctgatcacttcgatcatccggcgcgagcagcaggccggacgttttagcttcgtcgacttctgggcgcgccgggcacgccgcattctccccgcgctgttcgtgatgatggcggcgagcctggtgatcggctggttcctcatggcgccgcgcgactacgaagagttagggcgttcggttcgctaccagacgatgttcgcctcgaacatcctgttctggaagcaggatggctatttcgacgccgcgtccgaattcaagccgctattgcatacctggtcgttgtcggtggaagagcagttctacattctcttcccgctactgctggccgcggtctccgggcgcctgctgcgctggcggctcgccatcctcctcgcggtcctggcgctatcgctggcggccagcgtctgggcggttagccagcgacctggcagtgcattcttcctcctgccgatgcgcgcctgggaactcctggcgggtgccgcgctggcgttgctgccgggcggtagccgcggtcattcgcaatggtccctgcaactggcggccaccctcgggatagcggcgattctcctgccggtgttcttctacgacagcgacactcctttccccggcctcgcggcgctgccggcggtgcttggcaccgccctgctgatctgggccaacggcgccggcgacacctgggctcgccgcctgctgggctggcaaccgctggtctggttcggtctgatctcctattcgctgtacctctggcactggccgctgtacgtcttcgtccagtaccacgcactggaaaccctgggcctgccggcacgcctggggttgctggcggcgagcatcggcctggcggcactgtcgctgtactacgtcgaggcaccgttccgcgagcgcaagctgttcgccgggcgccggcagatgcttggcgcggcgctgtgcagcttgctgctgctgggagtcgtcggccagttggtgcggcattacgacggcgtgccgtcgcgtctttccgaggaagccttgcgttatgccaaggcgtccaagtggcgcgatgggcagaccgactgcatgttcgacaagaaggcgctcagtcaggaaagcatctgccgcttcccggcggaactggctgccgaacgaccgctgctggtcagttggggcgacagccattccgcggcgttgagcccgctgctgcgcgaactggctgccagtcgccgactgccgatctggcaggcttcgctggcgggctgtccgccgttgctggggatgttggaaaaggacacttgcctgcgtttcaaccagcagatgctcgagttcgtcgaacagcagcggccgggcggggtgatcctcgccgggcgctgggacatgtatatatacggcgactcgcaggacggtacccgcaacattctccgcgagccggacgacacgccggacagctcgatcgccgaggcgctgctgcggcaacgcctgagcgggatgatcgaaaggctgaacgcggccgacgtacatgtctggctggtcaaggacgtaccgctgctgccattcaaggcaccggcgcggctggtgcggctgagtctgagcggggaggatgtcgggcgcgcacgttttcccttcgctgagcacgctgcgcgcgtcgcctacgtgaatgcgctgttcgatgcgttggccgaaggcaacccgcgggtgagcgtgctcgacccctccagcgtgctctgcgatggcctggattgtttcgccgaacgtgatggctggtcgctgtacatggataacaaccacctttcgacccagggggcccatgaactcgggcctttgttcgagccgatgctacagagcctcgacgactcgaggatcgccagccagcagtga

SEQ ID NO: 363534 - DNA, 1467 bp, Pseudomonas aeruginosa
atgacgttcaaggatctccgcgatttcatcgcccagctggagcagcgcggtgcgttgaagcgcatccaggtgccgatttcccccgtgctcgagatgaccgaggtgtgcgaccgcacgttgcgcgccaagggcccggcattgctgttcgaaaagccgaccggcttcgacatgccggtactcggcaacctgttcggtacgccggagcgcgtggcgctgggcatgggcgccgaggacgtcggcgcgctgcgcgagatcggcaagctgctggcgcaactcaaggagcccgagccgccgaagggcctcaaggacgcctgggccaagctgccgatgtacaggaaggtcctgtccatggcgccgaaggtgctcaaggacgccccctgccaggaagtggtcgaggagggcgaggacgtcgacctcggccggctaccggtccagacctgctggccgggcgatgtcgggccgctgatcacctggggcctgaccgttacccgcgggccgaacaaggaacggcagaacctgggcatctaccgccagcaggtgatcggccgcaacaaggtgatcatgcgctggctcagccatcgcggcggcgcactggactaccgcgagtggtgccagaagcatccgggccagccctatccggtagccgtggcgctgggcgccgatccggcgaccatcctcggtgcggtgacgccggtgccggacaccctttccgaatacgctttcgccggcctgttgcgcgggcatcgtaccgagctggtcaagtgtcgcggcagcgacttgcaggtgccggccagcgccgagatcgtcctcgaaggggtgatccaccccggcgagatggccgacgaaggtccctatggcgatcacaccggctactacaacgaggtcgatcgcttcccggtgttcaccgtcgagcgcgtcacccgccggcagaaaccgatctaccacagcacctacaccgggcgtccgccggacgagccggcgatcctcggggtggcactgaacgaagtgttcgtgccgatcctgcagaagcagttcccggaaatcgtcgatttctacctgccgccggaaggttgttcctaccggatggcggtggtgaccatgaagaagcagtacccagggcacgccaagcgcgtgatgctcggggtctggtcgttcctgcggcagttcatgtacaccaagttcgtcatcgtcaccgacgatgacatcgatgcgcgcgactggaacgatgtgatctgggccatcaccacgcggatggaccccaagcgcgacacggtgatgatcgacaacacgcccatcgactacctcgacttcgcctcgccggtctccggcctcggctcgaagatggggcttgatgcaacccacaagtggccgggcgagaccagccgcgaatgggggcgcgccatcgtcaaggacgaagcggtgacacggcgcatcgacgcgctctggtcgagcctcgggatcgactga

SEQ ID NO: 363535 - DNA, 969 bp, Pseudomonas aeruginosa
atgcgtatcgtcctgcaaccgtccggcgcctgcctcgagctgctgccgggggaacgcatcctcgatggcgcccggcggcttggctacgactgtccgcagagctgccgcaacggcaactgccatatctgcgcggcgctgctggtggaggggcgggtacgccagaacggcgaggtacgcgatcatggcgaactcttcacctgcctcgccgagccgctggaagactgcgtgctgcattgggacggggtgctggcgccgggtgaactgcctctgcgcaagctgacctgccagttgagcttctgcgaagaggtcggcggcgacgtctaccgggtcggcctgcgcgcgccggccggcaagccgccacgctatcacgccgggcagtacctgttgctggagcgtgacggcggcgacagcgcggcgttttccctggcctcggcgccgcatgcgggacgcgacctggagttgcacatcctggccaaggaagacagtgccgtcgcgctgatcgcgcagttgcagcgcgagcgcctggcacgggtccagctgccgttcggcgacgcgcacctggcggaactgcccgacggtccgctggtgctgatcgccgcgggaaccggcatgtcgcagatgcacagcctgatcgagcactgccgcgccgccggcttcgcccatcctgtacatctctactggggcgttcggcgtccggaggatttctaccgactgccgcactggacggagtgggaaggcctgccgaacctgttcctgcaccgggtggtcagcgacctctgtggctgggaggggcgttgcggcttgctgcacgaggcggtgcgcgaggatttcgccgacctgtcgagcctgcatgtgtatgccagcggctcgccggcgatggtctacgcgaccctggatgccctggtcgaagcagggatggacgcgcaccagatgcgcgccgacgtgttcgcctacgcgccgcgggactga

SEQ ID NO: 363536 - DNA, 1347 bp, Pseudomonas aeruginosa
atgttcggaatctttcgtcccgcgccacaccaggcgccactgcccgatgccgaggtggacagcacctaccggcgcctgcgctggcagatcttcgccggtatcttcatcggctacgcgggttactacctgctgcgcaagaacttctccctggccatgccctaccttatcgaggacggctacagtcgcggccagctgggcgtcgcgatgtcggccatcgccatcgcctacggcctgtcgaaattcatcatgggcctggtctcggaccgttccaacccacgggtcttcctgccgttcggcctgttggtgtcggcggcggtgatgttcattttcggattcgcgcactgggctacctccagcgtcgccatcatgttcgtcctgctcttcatcaacggctgggcccagggcatgggctggccgccgagcggacggaccatggtccactggtggtcgcagaaggagcgcggcagcgtggtctcggtgtggaacgtcgcccacaacgtcggcggcggcctgatcggcccgctgttcctgctcggcctggcgctgttcggcgactggcgctcggccttctacgtgccggccatcgtcgccgtgggcgtagccgtgttcgcctatttcgccatgcgcgacaccccgcaatcctgcggcctgccgccgatcgagaagcacaaggacgactaccccgaaggctacgacgaacaccacgagcgcgagctgtcgaccaaggagatcttcgtcacctacgtgctgcgcaacaagctgctctggtacatcgccctggccaacgtgttcgtctacctgctgcgctacggtgtgctcgactgggcgccgacctacctcaaggaggccaagcacttcaacgtcgacaagtcgtcctgggcgtacttcttctacgaatgggcggggattcccggcaccctgctctgcggctggctgtcggacaagctgttcaagggcaatcgcggcgccaccggcgtggtgttcatgatcctggtgaccgtcggcaccctgatctactggctgaacccggccggcaacccggcgatcgacatggccgcgctgatcatgatcggcttcctgatctacggcccggtgatgctgatcggcttgcaggccctggagctggcaccgaagaaagcggccggcaccgccgccggcttcaccggtctgttcggctacctcggcggctcggtggcagccaacgccctggtcggctacacggtggaccacttcggctgggacggtggcttcaagctgctgatcggcgcctgcctgctggccatcctgttcctctgcctgaccctgcgcaaacccgcggtccaggccgcgccgcagcaagccggctga

SEQ ID NO: 363537 - DNA, 978 bp, Pseudomonas aeruginosa
atgaaagccgtcctctgcaaagccttcggcccggccagcagcctggtcctggaagaaatcgccagcccgagcccggcgaagaacgaaatcctcctcgatgtgcacgccgcaggggtcaacttcccagacaccctgatcatcgagggcaagtaccagttcaagccgcccttccccttctccccgggcggcgaggcggccggggtggtcgccgcggtcggcgaaaaggtcgcccacgtcaggcccggcgaccgggtcatggccctgaccggctggggcagcttcgccgagcaggtcaaggtgcccggctataacgtgatgccgattcccgaaggcatggacttcgccagcgccgccgccttcggcatgacctacggcacctcgatgcacgccctgaaacagcgcgccaatctgcaacccggcgagaccctgctggtgctcggcgcttccggcggggtcgggctggctgccgtggagatcggcaaggccatgggcgcgcgggtgatcgctgccgccagtacccccgacaagctcgccgtggccaaggccgccggcgccgacgaactgatcaactacagcgaaggtagcctgcgcgagcagctcaaggccttgaccggcggccagggcgtcgatgtgatctacgatccggtgggcggcgaactgttcgaggaggccttccgcagcatcgcctggaacggacggatgctggtggtcggcttcgccagcggcagcatcccttcgctgccggccaacctgaccctgctcaagggcgcctcgctggtcggcgtgttctggggatcgttcgcccaacgccagccgcaggacaacgctgacaacttccgccagctgttcgcctggcacgccgaaggcaagctgaagccgctggtgtcgcagcgcttcccgctggaacgggccggcgacgctatcgacgccctcggccagcgcagggcggtcggcaaggtggtggtggaggttcgctga

SEQ ID NO: 363538 - DNA, 420 bp, Pseudomonas aeruginosa
gtgagaacccccattgccctgtcgctggccctgtgcctgagtctgttcccgtcgttcgcctcggccgaggaggccgcgccggaaggcgagggcgcgaacaagccggtctacgtcgacctgaccccggcgctggtcggcaactacggcagcgggccgcgcctgcagtactacaaggccgacatcgccctgcaggtggccgacaaggacgcggcgaccaaggtcgagcatcacgagcccttgatccgcaaccagttgatcatgctgttcgcccagcagaccgaccagagcctgggtacggtcgaggccaaggaaggcctgcgccaggaggcgctgaagcaggtccagcagaccctcgagcaggaagagggcaagccgctggtgaccgacctgctgttcaacaacctcatcgtccagccctga

SEQ ID NO: 363539 - DNA, 1074 bp, Pseudomonas aeruginosa
atgaaacaggaaagcaaacggtggctgagccgtgccttgatcgtggcggcgctgctcggcgtaggcgtgctggtctggcaggtatcgcgaccgaccggcctgggcgagggattcgccagcggcaacggacgcatcgaggccaccgaggtggacgtggcggccaagcttcccgggcgggtcgccgagatcaaggtcgacgagggcgacttcgtcaaggccggcgaaatcgtcgcgcggatggatacccaggtgctcgaggcgcagttggcccaggcccaggcccaggtgcgccaggcggagaacgccaagctcaccgcgacctcgctggtggcccagcgcgagagcgagaagagcaccgcccaggccgtggtggcgcagcgccaggccgagctgacagcggcgcagaagcgcttcacccgtaccgaggcgctggtcaagcgcaatgccctgccgcaacagcaactcgacgacgatcgggcgaccctgcagagcgcccaggcggcgttgtccgcggcacgctcgcaagtgatttcggcgcaggcggcgatcgaggccgggcgttcccaggtaatcgaggcgcagtcggccatcgaggcggccaaggccagcgtcgcccggctccaggcggatatcgacgacagcctgctcaaggcgccgcgcaacggccgcgtgcagtaccgcgtggcacagccgggggaagtgctgccggccggtggcaagctgctcaacatggtcgacctggccgacgtctacatgactttcttcctgccatccatgcaggccggcagggtcggactgggccaggaagtgcgcttggtgatcgacgcggtgccggactacgtgatcccggccaaggtttcctatgtcgccagcgtcgcccagttcaccccgaaaacggtggaaaccgccaacgagcgggagaagctgatgttccgggtcaaggcgcggctcgatccggcgctgctggaaaaatacatcacctacgtcaagaccggcgtgcccggaatggcctacctgcgactggatcctgaggtcgagtggccggccaacctgcagatcaaggttccgcaatga

SEQ ID NO: 363540 - DNA, 2751 bp, Pseudomonas aeruginosa
atgaccgctggcgggagcggcgtggcgagcctccggggcgtttcgctgcgctacggcgagacgcgtgcggttgacgacgtcagcctggagatcccggccaaccgcatggtcggcctgatcggtccggacggggtcggcaagtccagcctgctggcgctgctggccggcgcacggaagatgcaggatggcgagatccgcgtgctcgatggcgacatgcgcgaccgccgccaccgccgggcggtctgcccgcgcatcgcctacatgccccaggggttgggcaagaacctctacccgacgctctcggtgttcgagaacgtcgacttcttcggtcggctgttcggccacgacaaggccgagcgcgagcggcgcatcgccgacctgctgcagagcaccggattggcgccgttcgccgagcgtcctgcgggcaagctgtccggcggcatgaagcagaagctcgggctgtgctgcgcgctgatccacgatcccgacctgctgatcctcgacgagccgaccaccggcgtcgacccgctgtcgcgcaaccagttctgggagctgatcggccgtatccgcgcgggccgcgaaggcatgagcgtgctggtcgccaccgcctacatggaggaagccgagcgcttcgactggctggtggcgatggatgacggaaaggtcctggccaccggtacgccgcaggagctgcgcgagcgtaccgggacgcagagcctcgagtcggcgttcatcgccctgctgccggaaagcaagcgcgccggccaccatcgattggtgatcccgccgcgaccgcagagcgaaggcgcgccgcggatcgccatcgaggccgagggcctgacctgtcgtttcggcgacttcgtcgcggtcgatcacgtcagcttccgtatcgagcgtggggaaatcttcggcttcctcggctccaacggctgcggcaagtccaccaccatgaagatgctcaccggcctgctgccggccagcgaaggcacgtgcgcgctgttcggccaggcggtggacgccagcgacatggcgacccgtcgccgggtcggctacatgtcccaggccttttccctgtatgccgagctgagcgtgcggcagaacctggtgctgcacgcccggctgttccacctaccggcggatggtatcccggcacgggtcggcgaaatgctccggcgcttcgacctggagaaggtggccgacgagctgcccgacgacctgccgctgggcatccgccagcgtctgtcgctggcggtggcggtgatccacaagccggagatcctgatcctcgacgagcccacttcgggggtcgacccggtggctcgcgacggcttctgggaactgatggtcgagctgtcgcgccgcgacggggtgaccatcttcatttccacccacttcatgaacgaggcccagcgctgcgatcgcatctcgctgatgcatgccggcaaggtactggccagcgatactcccgatgagctggtgcgccagcgtggcctgccgaccctggaagcgaccttcatcgcgtacctggaagaagccgccggtgccgccgcgccagcgcaaccggccgaggcgccggccgtcgcggagcagcccggcgatggccaggggcgccaggcgcaacgccaacgcttcagccccctgcggctgttcagctatgcgcgccgcgaagccatggaactgcgccgcgacccgatccgcctgaccctggccctgctcggcaccgcgctgctgatgttcatcatcggctacggcatcaacatggacgtcgaggacctctcctgggcggtcctcgaccgtgaccagaccaccaccagccaggcctacgcgctgaacatcgccggctcgcgctatttcgtcgaacatgcgccgatcaccgacccggacgacctcgaccggcgcctgcgcagcggcgagctgagcctggcggtggagatcccgccgaacttcgggcgcgatctcaagcgtggctccgatccggccatcggcgtgtggatcgacggagcgatgccgacccgtgccaacaccgtgctcggctacgtgcagggcctgcacaccagctacctggcggacctctcgcggcaggtgggtggggccgaggccagcgcggcggccagcaccgaggtgcgctatcgctacaaccccgacgtggaaagcctgaaggcgatggtgccggcggtgatcccgctgctgctgatcatgatcccggccatgctcaccgccctcggcgtggtgcgcgaaaaggaactgggctcgatcaccaacctctatgtcaccccggtgacgcgcctggagttcctggtcggcaagcagttgccctacgtcgccatgggcatgatcaacttcctgctgatgctggtcctggccatcgtggtatttcgcgtgccgctcaagggcagcttcctggcgttgaccatcggcgctttcctctatgtggtcaccagcaccggcctcgggctgttcctctcgacgttcatgcgcagccagatcgccgctgtattcggcgtggcgatcgccaccatgatcccggcgatccagttctccgggctgatccacccggtgtcctcgctggaaggtgcggcggcctggatcggcaagctctatccgacctcgcatttcctggtggtcagccgcggcgccttttccaaatcgctgggcctgcccgatctctgggcctactacctgccgcttgccgcttccatcgtggtgctgaccctgctcagcgtggcctgcctgaagaagcaggaggactga

SEQ ID NO: 363541 - DNA, 1125 bp, Pseudomonas aeruginosa
atgcgcagcctggccaacatcttcaacctgggcatcaaggagttccgcagcctcggccgcgactacgcgatgctggcactgatcgtctgggccttcaccctgggcgtctacagttccgccaccggtattccggaaaccttgcatcacgcgccgatcgcggtggtcgacgaggaccgctcgcaactctcgtcgcgtatcgtcaatgccttccagcccccgtacttccggccgccggaaatgatcgggcatgccgagatggatcgcggcatggacgtcggcctgtataccttcaccctcgatatcccgccggacttccagcgcgacgtgctcgccgggcgcaagccctcgatccaggtcaacgtcgacgcgacccagaccgggcaggcgttctccggcgcgggctacatccagaacatcgtcgccaccgaggtgcgcgagttcgtcagccgctaccgcgcggagccgagcatgccggcgcagatcgaggtgcgcatggagttcaacccgaacctgacccaggcctggttcggcggggtgatggaagtgatcaaccagatcaccatgctgtcgatcatcctcaccggcgccgcgctgatccgcgagcgcgagcacggcaccgtcgagcacctgctggtgatgccgctgtcggccttcgagatcatgatggccaaggtctggtcgatggggctggtggtgctggtggcggcggggctctcgttgcagtgggtggtgcgtggctggctggacgtgccgatcagcggctcggtgggactgttcctgctcggcgccggattgcatctgttcgccaccacctccatgggcatattcctcggcacggtggcgcgttcgatgccgcagctcggactgttgaccatcctcgtgctgctgccgctgaacatcctttcgggcggcaccacgccacgggaaagcatgccggaactggtgcagaacatcatgctggcggcgccgaccacgcatttcgtcagcctggcccaggcgatcctgttccgcggcgccggtttcgacatcgtctggccgcagttcgccggtatcgtggcgatcggttcggcgttcttcttcggcgcgctctggcgtttccgccggaccatctcgcagatggcctga

SEQ ID NO: 363542 - DNA, 459 bp, Pseudomonas aeruginosa
atgcctgcctactggctgatgaaatccgagccggacgaactctcgatccgcgacctgcaacacctcggaaccgcccgctgggatggcgtgcgcaactatcaggcgcgcaacttcatccgcagcatgaactccggcgacctgttcttcttctaccactccagttgcccgcagcccggcatcgccggtatcgcccgcatcgaaggcgaagcctaccccgatcccacggccctggatcccgccagcccctaccacgaccccaaggccagcgccgggaagaacccctggagcgcccgcgacgtcagcttcgtcgaagccttcgccgaggtcgttccactggcccggctgaaggcccaggacgccctggccaacctcgccctggtgcagaagggcagccgcctctcggtaatgccggtcagcgccgaggaatggcaggcgatcctgccgctggcgaaacgctga

SEQ ID NO: 363543 - DNA, 132 bp, Pseudomonas aeruginosa; identical to SEQ ID NO: 321774

SEQ ID NO: 363544 - DNA, 612 bp, Pseudomonas aeruginosa; identical to SEQ ID NO: 321775

SEQ ID NO: 363545 - DNA, 315 bp, Pseudomonas aeruginosa; identical to SEQ ID NO: 321776

SEQ ID NO: 363546 - DNA, 210 bp, Pseudomonas aeruginosa; identical to SEQ ID NO: 321777

SEQ ID NO: 363547 - DNA, 498 bp, Pseudomonas aeruginosa
atgccggtctcgccggccgaactgcacggccatctgctgggtcgggtctgcgccggcgccggcttcgacgaggccgcctggcaacacgccgccgccgaactgctcggcggcgcgccgggcgaacgactcaaggccgcgttgtccggcctgctcggcatggtccggcaggacttttccgccggcgaggtcgccgtcgtcatgctcctgcccgacgacgaaaccccgctcgcccagcgcaccgaggcgctcggccaatggtgccagggtttcctcgccggcttcggcctcaccgcccgcgaaggcagcctgaccggcgaagccgaggaagtgctgcaggacatggccgccatcgcccaggtccagggccagctggaagacagcgaggacggcgagacggactatatggaagtcatggaatacctgcgggtcgctccgttgctgctgttcgccgagtgcggcaagccgctggagcccgctcccaagccttcactgcactga

SEQ ID NO: 363548 - DNA, 1335 bp, Pseudomonas aeruginosa
atgatccgtatccccaagtcggagtacgcccgtcggcgcaaggcgctgatggcgcagatggaacccaacagcatcgccatcctgccggcggcgccgatgtacatccgcaatcgcgacgtcgagcatgtctaccgccaggacagcgacttccagtacctcaccggcttccccgagccggaggcggtgatggcactgattcccggccgtgcccacggcgaatacgtgctgttctgccgcgagcgggatccggagcgtgaactgtgggacggcctgcgcgccggccaggacggtgcgatcggccagtacggcgccgacgacgcctttcccatcggcgatatcgacgacatcctgcccggcctgatcgaaggccgcgaccgggtctactacgcccttggcgccaatcccgacttcgaccgccggctgatggactggatcaacgtgatccgctccaaggcccgccagggcgcgcagccgccgaacgagttcgttgccctcgaccacctgctgcacgaccagcggctgtacaagagcgccaacgaagtgaaggtcatgcgctatgccgccgaggtctccgcccgggcgcacatccgggcgatggaggtgtgccggccggggctgttcgagtaccacctggaagccgaactggaatacgagttccgcaagggcggggcgaagatgccggcctacggctcgatcgtcgccgccggacgcaacgcctgcatcctgcactaccgcgagaacgatgcggcgatcaaggacggcgacctgatcctgatcgatgccggctgcgagatcgactgctacgccagcgacatcacccgtaccttccccgccaatggccgcttcagccccgagcagaaggcgatctacgaactggtgctggaagccaacatggcggcgttcgactacatcgcccccggtcgccactggaacgaggcccatgaggccaccgtacgggtcatcaccgccgggctggtgcgcctgggcctgctggagggcgacgtcgacgagctgatcgcccacgaggcctacaaggctttctacatgcaccgcgccggccactggctggggatggacgtgcacgacgtcggcgagtaccgcgtcggcggcgaatggcgggtgctcgaaccgggcatggcgatgaccgtcgagccgggcatctacatcgccccggacaatacctcggtggcgaagaagtggcgcggtatcggcgtacgcatcgaggacgacgtggtggtcacccgcaatggctgcgaagtgctgaccaacggcgtgccgaagaccgtcgccgagatcgaggcgctgatggccgcggccaagagcgaggcagcctga

SEQ ID NO: 363549 - DNA, 1185 bp, Pseudomonas aeruginosa
atgagcaaggtcaacctggcgatcatcggcgggggcctggtcggcgcctcgctggcgctggccctgcaggccggcgctcgggagcgcggctggtcgatcgtgctgatcgaacccttcgcccccggcaatgcctaccagcccagctacgacgcccgctcttcggcgctgtcctacggcagccggcagatctacgagcgactcggcctgtggccggcgatcgccgagcgcgccgagccgatcctgcatatccatgtttccgaccgtggccgcttcggcgccacccgcctgaccgccatcgaggaaggcgtgccggcgctgggctacgtggtggagaacgcctggctcggccagtgcctgtggaaggcgctcgaccccgaggtggtgcgctggcactgcccggccgaagtgaagaccctggaagcccgggagggcggttaccggcttaccctcgacgacgagacgcaactcgattgcgagctggcgatcctcgccgatggcggtcgttccgggctgcgcgaacaacttggcatcgccgtggagcagacgccgtaccggcagactgcgctgatcgccaacgtatcgccctccgaggcgcacctcgggcaggccttcgagcgcttcacccccagcggtccgatggccctgctgccgttgccggagaaccgttgcgcgctgatctggacccacccaggcaaggacgccgaacgcctgcgcggcctcgatgacgcggccttcctcggcgagctgcaggctgccttcggctaccgcctcggcgccttccgccaggtcggcgcacggcactgctaccccttgcacctggtcgaggcccgcgaacaggtgcgtccgcacctggtggtgctgggcaacgctgcgcacagtctgcaccccatcgccggccagggcttcaacctgtcgttgcgcgacaccctggcgctggtcgacgccctgctccacgacgacgcgccgctgggcgagttcgccgtgctgcagcgctacctcgatgggcagcgcctggaccagcagatgaccgtcggcttctccgaccgggtgacccggctgttctccaacgaccgcgcgctgctcggcgccgggcgcaacctcggcctgctcgggctcgacctgctgccgccggccaagcgctggttcgcccgccaggccatgggcctcggcgcgcggccgctgtag

SEQ ID NO: 363550 - DNA, 483 bp, Pseudomonas aeruginosa
atgccggtctggtcgagggcgcgcaaggcccgcctgctgcgcttcgccatgaacctctacccgcccttcctgggggcgggcatccgtgtgcggcacatcgctggcgatttccgcgaggttcgggtgcgcatgggcctgaaccggctcaatcgcaactatgtaggcacccagttcggcggcagcctctacgcgatgaccgacccgttcttcatgctgatgctgatggagaacctgggccgcgactacgtggtctgggacaaggcggccaacatcgagttcgtcagcccgggcaagggcccggtgcatgcgcatttcagcatcgaccagaagctgctcgacgaggtccgcgagcggaccgccggcggcgagaagtacctgccccggctgcacgccgaagtgcgcgacgacgccggcaccctggtggcgcgggttcagaaaaccctgtacgtgcggctcaagccgcgcctgcggaacgcggcctga

SEQ ID NO: 363551 - DNA, 1218 bp, Pseudomonas aeruginosa
atgcacgcggatctggtcatcgtcggcgccggcatggtcggtagcgccctggccctggccctggagggcagcggcctggaggtgctgctgatggacggcggctcgctcgacgtggcgccgttcaagccggaggcgccctacgagccgcgggtcagcgcgctgtccgaagccagccggcggattctccagcgcctgcatgcctgggacggcatcgtcgcgcgccgcgccgagccctatcgcgagatgcaggtgtgggatggctccggcaccgggcggatcggcttcagcgccgccagcgtgcacgccgaggtactcggccatatcgtcgagaaccgggtggtgcaggacgccctgctggaacgcctgcacgattccaccaccggcctgctggccaacgcgcgcctggaacagatgcgccactccggcgacgactggctgctgaccctggccgacggtcgccagctgcgtgcgccgctggtggtcgccgccgacggcgccaactcggcggtacgccgcctggccggctgcgccacccgcgaatgggattacctgcaccacgccatcgtcaccagcgtgcgctgcgagaacgcgcaccgcgcaaccgcctggcagcgcttcaccgacgacggtccgctggccttcctgcccctgccggaccgcggcgacgagcactggtgctcgatcgtctggtcgaccaccccggaacaggcagaacgcctgatggcgctggacgaggatggcttccgcgccgccctcggcgaagccttcgaacagcgcctgggcgccatcctgcatgccgaccggcgcctgtgcatcccgctgcgccagcggcacgccaagcgttacgtcgagccgggcctggcgctggtcggcgatgctgcgcacaccatccacccgctggccggacagggcgtgaacctgggcttcctcgatgcggcggtgctgtccgaggtcctgttgcacgccctggagcgcggcgaacggcttgccgacgaacgcgtgctgagtcgcttcgagcggcggcggatgccgcacaacctgggcatgatgacggcgatggaaggcttcgagcgcctgttccaggccgaccggttgccgctgcgctggctgcgcaacgccggcctgcgcctggtcgacggccatcacgaggcgaaggcgctgttcgtccgccaggcgcttggcctcagcggcgacctgccgatgctggcacgagtctga

SEQ ID NO: 363552 - DNA, 822 bp, Pseudomonas aeruginosa
atgaaccatgtcatcaccccccacagcaagctgctcggcgtcatcgagccggtcctcaacgacatgcccgccggaaccctgcgccacgcactgttccgggccttctgggacgagacggcgtcgttgctggacatcgaggacgccttcgcccgggtcaccgcccggcgccaggcggtcgagccgctgcgcaagttcttcgccagctggtcgaagaccaacaactcggcggccagcgtttccggactggccaatcgcctgaccctgctggcccgttcggaacagggttcggcagcggcagaccagctctatcgagcctgcggcagcctgcaacggatcaccgacgaagacctcggcgccctcggcaacaccgtgcatgccgatcttttctacaccatggccaccaccctttgcggcgacgaccgctggctgctgcgcgagaactgcctgccttcggcgcaggcgttcaaggactggaccgaccgccagcgcctgcgcgagcgcgacctgatgcagggactgctgaccacgctggtacacgaggtctatacccacggcgaggtggagtacatccacccgctgtacaaggaatggttcagccgcgacatgggcgtacccgccgaacgcgcccgcgccaccgtggcctgggtaacggtgcacaccggcggcaccgagagcaatcatttcgcccacgccacggcggcggtgaacgccttcgtcgaggcgatggaaatcgaggtgaacgaagaagccgcgcgcaacctgttcgggctctacctgcgcaacaaggcgcaggtcatgcgtgactgcgcggcgctgttctga

SEQ ID NO: 363553 - DNA, 1194 bp, Pseudomonas aeruginosa
atgaattcgtcccagggtttcccccgcctcgcgctgtttctctgcggttgcgctgcgttcctcaatctctataccacccagggcatcttcgacgaactggcggcgagcttccacatcagcgcccatcaatcgaactggagcatcaccgccaccaccctggcggtggccctcgccgcgcccttcgtcggtcgactcagcggcggccgcgagcgcagccgggtgatcgccttcgccgccagcctgctctgcgtgcccatgctgctggccgcccatgccggcagcttcgccgccttcctgctctggcgcttcgccgaagggatgctgattccgctgctgttcgccagcagcgtggcctacatcggcgagcgctggagcggcggcgcggtcatcgagctgaccagcctctatgtcgccgggaccatcctcggcggcttcgccggacgcttcctcaccggcctgctgaccgaggagtgggattggcgcgtcgccttccggatcctcgccgggctgaccctgctcatcgccgtcgccatccgcgcgctgctccctgccaattctggcaggcactcgcccgcacccgggaaacgccccttagtatcccgtgaactgttccgggctccgctgctgtcgtcctacgcggtggggttctgtgtcctcttttcccaggtcgccatgttcacctatatcggcatccatctcagccgtccgccgtacagcctggacaccgctcagctcggctcgatctacgcggtgttcctcctcgccctgctggtgattcccgccagcggccgcctggcccgcacccgcccgcaccgccagttgctgctgggcgcatcgctgctgggcgtctgcggctcgctgctgaccctggcgccgggcctgccgacgattctcgtcggcctggccctcagcgccaccggcgtgttcctcgcacagtccacggtcaacgccttcaccgccagcaatgccgggaccgacaaggccggtgccgtcggcctctacctgacctgctactacgccggcggcagcctcggcgcggtactgccggcgccattctgggagcgctggggctggccgggctgcctgggcctgatcctcctggcccagttgctgccgttgcttctgacccgctacggctggtccgcaccacaggccgaacgcgcggccctgcgcgcgtcgcaaggaagaccgtaa

SEQ ID NO: 363554 - DNA, 915 bp, Pseudomonas aeruginosa
atgctcgacctacgccgcctgcgctgcttcgcagccgttgccgaaaccctgcatttcggccgcgccgcccagcgcctgcacatggcgcagccgcccttgacccggcagatatccgcgctggaggaagagctgggctttcgcctgttcgaccgctccagccgggcggtgaccctcaccgccgagggcagcctgttcctgccttacgcacgcgccctgctggaccaactggagcgcaccgccggcttcgcccgcaagctggcgcaggggctggccggccacctgaccctcggctacgccagctccatcgccctgtcggacctgttcaccgaggcgatccgactgttccgcgagcgccatccggaggtgcagctggagctgctcgaaggcgcttcggcggcgcaatgggcgcagatcgccgaaggcggcatcgatgtggggctggggcgcctgccgccgccggaaggccaggtcggcatcgaggtgctggccctgggcggcgagccgctggtggtggccgtgcccaacggcgatccgctggcgcggcaagagcggatcgacctgtacgatctgcgtgatcggccgctgatcctgtttccactggactacggctccggcctcaacgaactgatcgagcgcctctaccggaaggccgggctggcgctgacgaggggaccggccggacgccagatcacctcgatcatcgccctggtcgcggccggccagggcgttgccctggtgccgcgttgcagcaccgcgctggcccgggccggagtcgtctatcgcccgctggccgagcccgaggcgctggccgatttcctcgtcttcacccgccgccatggccgcagcgccgcggtggaggcgttcctcgccatcctcggtggcttggacgcaggcgaaacaccccgacacatttag

SEQ ID NO: 363555 - DNA, 999 bp, Pseudomonas aeruginosa
atgcaggcaagcaaagctctactcgccgccctggccctgggcatcaccggcctggcccaggccgccgatgaagtggtggtgtattcctcgcgcatcgacgagctgatcaagccggtgttcgatgcctacaccagcaagaccggcgtgaaggtcaagttcatcaccgacaaggaagcgccgctgatggcgcggatcaaggccgaaggcgctaacaccccggccgacctgctgctcaccgtggacgccggcaacctctggcaggccgagcagatgggcctgctgcaaccgttcaagtcggccaccatcgaacggaacattccctcgcagtatcgttccagcaccgatagctggaccggactgtcgctgcgcgcgcggaccatcgtctactccaccgagcgggtcaagccggaagagctgagcacctacgaagccctggccgacaagcaatgggaaggccgcctgtgcctgcgcacggcgaagaaggtctacaaccagtcgctgaccgggaccctgatcgagacccacggggcgcagaagaccgaggaaatcctccagggctgggtgaacaacctggccaccgacgtattcgccgacgataacgcggtgatccaggcggtggacgccggccagtgcgacgtcggcatcgtcaatacctactactacgggcgcctgcacaagcagaacccgaacctgcgggtcaagctgttctggccgaaccaggccgaccgcggcgtccacgtcaacctgtcgggcatcggcctgactcgccacgcgccgcatcccgaggcagccaaggcgctggtggaatggatgaccgggcccgacgcccaggcgctgttcgccgggatcaaccaggaattcccggccaacccgcaggtcgcgccgtcagccgaagtcgccagctggggcagcttcaaggccgacagcatcccggtggaagtcgccggcaagcgccaggccgaggcgattcgcctgatggaccgcgccggctggaactga

SEQ ID NO: 363556 - DNA, 1620 bp, Pseudomonas aeruginosa
gtggcccatcccgctccccgccgctggtaccccatcaccttcaccgttgccgcgctggtgctgctgccgctcagcgtgctgctgctgagctggctggagatcgaccgggaaatctggagccacctgtgggatacccagttgccgcgcctgctcggcaacaccctgaccctggtgctcggcgtcggcatcggcgtgactctgctcggggtcagcctggcctggctcaccagcctctgcgaattccccgggcggcgctggctggactgggcgctgatgttgccgttcgcgatcccggcctacgtcctggcgttcgtcttcgtcggcctgctggatttcgccggaccggtgcagagcctgctgcgcgagtggtttggcagcggcctgcggttgccgcgcgtacgctccaccggcggggtgatcctggtcctggtgctggtgttctatccctatgtctacctgctcgcgcgcagcgccttcatcgcccagggcaagggcctgatggaagccgcgcgggttctcggcctgtcgccctggcaggcgttcctgcgggtcgccctgccgatggcgcggccggcgatcggcgccggcctggcgctggcggtgatggaaaccctggccgacttcggcgcggtatcggtgttcaacttcgataccttcaccaccgctatctacaagacctggtacggcttctacagcctctccagcgccgcccagctggccagcctgttgttgctcggggtatgcctggtgctgctcggcgagcgccacactcgaggcagggccaaggccgccagcgagcgtccgcgcggcgcgccgctgtaccgcctgcgcggcgccagggcgctggcggcgagcgcctggtgcgggctggtgttcctctgcgccttcgtgattcccgtggcgcaactggctgtctggttctggcgccagggccgtttcgacctcgacgagcgctactgggacctgatcggccacaccctgacgctgggcggcatcgccgcgctggcgacggtcgccgtggccctgctgctggccttcgccgtgcgcctggcgccgacccgcgctatccgcggcgcggtgggcctgggcaacctcggttatgcgctgccgggctcggtcctggcggtctcgatcatgctggccttcagctggctggacaatcactgggtgatcccgctttccagcgccctcggcggcgccggcaagccgctgctgctgggcggtctgttcgccctgctgctggcctacctgatccgtttcatggcggtggcctacgggccgctggaaagcgggctggcgcggatccgcccgtcgctgccggaagcctcgcgcagcctcggcgtgggcggcccgctgctgttcctgcgggtctacctgccgctgttgctgccggcctcgctgagcgccgcgctgctggtgttcgtcgacgtgctcaaggagatgccggcgaccctgctgatgcgtcccttcggttgggacaccctggccgtacggatcttcgagatgaccagcgagggcgaatgggcgcgcgcctcgctgccggccctgaccctggtgctggtcggcctgctaccggtggtcgggttgattcgtcgttctgcccatcattcagatcgctga

SEQ ID NO: 363557 - DNA, 1083 bp, Pseudomonas aeruginosa
atgggattgcgcaccccgctttacgagctgcacgtcgcgctcggcgccaagatggtcgatttcggcggttgggacatgccgctgcactacggttcgcaggtcgaggagcaccatcaggtccggcgtgactgcggcgtcttcgacgtgtcccacatgaccgtggtcgacgtcgccggcgagcaggccacggcctatctgcagcatctcctggcgaacgacgtggcgcgcctcggcgagaccggcaaggcgctctacagcgcgatgctcaacgaagagggcggggtggtcgacgacctgatcgtctacctgaccgagaacggctaccgggtggtggtcaacgcctccacccgcgacaaggacatcgcctggatgcaggcgcaggccgccggcttcaaggtcgacctgcaggaacgcggcgacctggcgatgctcgccatccagggccccaacgcccgcgtgcacagctccgaactggtatccccggcacgcgccgcgctgattcgcgaactcaagccgttccagggccgtgccgagggcgactggttcatcgcgcgcactggctacaccggcgaggacggcctggagatcatgctgccggccgccgaggcgccgggcttcctcaacgagctggttggcgccgggatctccccggcgggcctgggtgcgcgcgatacgctgcgcctggaggccgggctcaatctctacggccaggacatggacgaaagcgtttccccgcttgccgccaacatgggctggaccgtagcctgggagccggttgcgcgggacttcgtcggccgccgcgcgctggaagcgcagaaggccgccggcgaccagccgaagctggtcggcctggttctggaggagcgcggcgtgctgcgcgcccaccaggtggtgcgggtagctggcattggtgagggggagatcaccagcggcagcttttcgcctaccctgaacaagtccatcgcgctggcccgcgtgccggccgccaccggcgaccgcgccgaggtggaaatccgcggcaagtggtacccggtacgggtggtccagcccagtttcgtgcgtcacggcaagcccctgatctaa

SEQ ID NO: 363558 - DNA, 429 bp, Pseudomonas aeruginosa
atggcgaccgccgtcgcccccgacttcgaggaaaacaagatgagcaatattcccgccgaactgcgttacgcccagagccacgaatgggctcgcctggaagccgacggcagcgtcaccgtgggcatttccgaccatgcccaggaagcccttggcgatgtggtcttcatcgagctgccggagctgggcaagaccctcgccgccggccaggaagcgggcgtggtcgagtcggtgaaggccgcctccgacatctattcgccgatcggcggcgaagtcatcgctatcaacgaagccctggccgacaccccggaagacgtcaacaacgatccgtacgcgtcctggttcttcaagctcaagccgagcaatccggccgagctggacaagctgctcgacgccgctggctaccaggccgccgtcgacgcggaaggctga

SEQ ID NO: 363559 - DNA, 2967 bp, Pseudomonas aeruginosa
atgcgttttcgccgtcgttgctttctcattcgatatccgttcggcgacgatcgctggcagggcgatgccgcccccaacgagaccgaagccatgtcgcagacgccgtccctcgcccagctccagcccgccgatgccttcctgcgccgccacctcggccccgatccggcggaacagcaggccatgctggatttcctcggagtttccactcgcgccgaactgatcgtgcagacggtgccgccggcgatccgcctcaaccggccgctggagctgcccgccgcgctcgacgaacaggccgccctggcgcgcctgcgcggctacgccgggctcaaccagcgctggaccagcctgatcggcatgggctactacggcaccgtgacgccgccggtgatcctccgcaacgtgctggagaatcccggctggtacaccgcctatacgccctaccagccggaaatcgcccagggccgcctggaagcgctgctgaatttccagcaactgaccatcgacctcaccggactcgacctggccagcgcctcgctgctcgacgaagccaccgccgccgccgaggccatggccctggccaggcgggtggcgaaggccaggagcaaccggttcttcgtcgatgcgcattgccatccgcagaccgtttcggtgttgcgcacccgcgccgaggcgttcggtttcgagctggtcgtcgacgagccggacaatcttgccgcccacgcggtgttcggcgccttgctgcaatacccggacagtcgcggcgagatccgcgacctgcgcccgcttatcgaggcgttgcacggtcaacaggcgctggcctgcgtcgccagcgacctgctcgccctgttggtgctgaccccgccgggggaactcggtgccgacgtggtgctcggcagcgcccagcgctttggcgtaccgatgggctacggcgggccgcacgcggcgttcttcgccacccgcgaagggtacaagcgggcaatgccggggcggatcatcggcgtttcccgcgacgcccgcggcaacccggcgttgcgcatggccctgcaaacccgcgagcagcacatccgtcgggaaaaagccaactcgaacatctgcaccgcccaggtgctgctggccaacattgcttcgctgtatgccgtctaccatgggccgcaggagctgaaacgcatcgcccaacgcgtccagagcctgaccgcgctgctggcggcgggcctggaaagcaagggactgcggcggctcaaccggtacttcttcgacaccctgacctacgaggtcggcgagcgtcaggcggcgatcctcgagcgggcgcgggcggcgcgggtcaacctgcgcgtggtcgacgaccggcggctggccctgagcctcgacgaaacctgtgacgcggcgaccctggcgaccctgttcgagatcttcctcggtgccggccacgggctggatgtcgcgcacctggatggcggggcggtggccgacggcatcccggcggtcctgcaacgcacttcggcctacctgcagcatccggtgttcaacgcccaccacagcgagaccgagatgcttcgctacctgcgccagctggaaggcaaggacctggcgctgaaccaggcgatgatcccgctcggctcctgcaccatgaagctcaacgccagcagcgagatgatccccatcacctggccggaattcgccgaactgcatccgttcgtgccgcgcgagcaggccgagggctatcgccggatgatcgacgaactggaagcctggctgcgggcgatcaccggcttcgacgccatctgcatgcagccgaactcgggagcacagggcgaatatgccgggttgctggcgatccgccgctaccaccagagccgcggcgatagccagcgcgacatctgcctgatccccgcatcggcgcatggcaccaacccggcctcggcgatcatggccagcatgcgggtggtgatcgtcgagtgcgatccccgcggcaacgtcgacctcgacgacctgcgcctcaaggcggccgaggcgggcgaccggctgtcctgcctgatgatcacctatccctcgacccacggcgtctacgaggaggggataggcgagatctgcgaagtggtccaccgccacggcggccaggtctacatggacggcgccaacctcaacgcccaggtcggcctggcgcgaccggcggacatcggcgcggacgtctcgcacatgaacctgcacaagaccttctgcatcccccatggtggtggcgggccgggcatggggccgatcggggtcaagcggcacctggcgccattcgtcgccaaccatccggtgatccgcgtcgaagggccgaacccgctgaacgacgcggtcagcgcggcgccctggggcagcgccagcatcctgccgatcagttggatgtacatcgccatgatgggcccgcaactggccgacgccagcgaggtggcgatcctctccgccaactacctggcgaaccgcctggacggggcgttcccggtgctctaccgcgggcgcaacgagcgcgtcgcccacgaatgcatcctcgacctgcgaccgctcaaggcgcagaccgggataaccgaggaagacgtggccaagcgcctgatggactacggcttccacgccccgaccatgtccttcccggtgccgggcacgctgatggtggagccgaccgagagcgagtcgaaggcggagctggatcgcttcgtcgaggcgatgctgagcatcagggccgagatcggcaaggtggaaagcggcgactggccggcggaggacaacccgctgaaacgggcgccgcataccctggccgacgtcaccgggatctggcagagaccctacgagatcgccgaggcggtgaccccgagcgaacatgcgcgggcgttcaagtactggccggcggttaaccgggtggacaacgtctacggcgaccgcaacctgttctgcgcctgcgtgccgctggacgactaccgcgagtga

SEQ ID NO: 363560 - DNA, 330 bp, Pseudomonas aeruginosa; identical to SEQ ID NO: 321791

SEQ ID NO: 363561 - DNA, 453 bp, Pseudomonas aeruginosa
atggaaatcctgctgctacgcctggacttctgggactggctggccttcggtaccgtcctcctgctcctggaaatcttcggtgccggcggctatctgctgcgggtcggcctcaccgccgcttgtgtcggtgcgctcggcgcgctcctgccgggactggcctggccttggcaggtagggctgttcgtcctgctctccgggctggtcgccgccttgcatcgacgccgtcgccgcaaggccggtagcgtcgaggaaacgccagggttgcagcgacgcggcgacgacctgttcggccgcacctttcccttgcaccgggcgatcgtcggcgggctcggcgagctgcgcgtcgaggacgcgttatggctggtcagcggtcccgacctgccgcgcggcgccctggtccgggtcaccggccaggacggcgccctgctgcacgtcgagcctgccgcgccctga

SEQ ID NO: 363562 - DNA, 1785 bp, Pseudomonas aeruginosa
atgtccgtgttcgccaccgccgcccaggaccgcctgctggacctcggcgacctgctccgcgagctggtcgcccagggccgggtcgggcaggagcaggccgaacagtgcctggcgatccgccgcagcgcggtgcgcaaccagcagcatccgctggagttcctcgccgcgcagcaggtcgaggatctcaagcgccccggacgcaagctcgacctggagaccctcacccagtggctggccgagtacgccggccagccctacctgcgcatcgacccgctgaagatcgacgtcgccgcggtgactccgctgatgtcctacgccttcgcccagcgccatggcatcctcgccgtcgcgctgagtccggaggaagtcaccatcgccagcgcccagcccttcgtacagggctgggaaagcaacctggtgcatgtgctcaagcgaccgatcaagcgggtggtggcgaacccggcggacatccagcgctacaccgtcgagttcttccgcctggcccgctcggtcagcggcgccacctcgccggaccagaagatcagcggcgtcggcaacttcgagcagttgctcaacctcggcgccgccgaccaggagccggacgccaacgacgcgcacatcgtcaccatcgtcgactggctgttccagtacgccttccagcagcgcgccagcgacatccacatcgagccgcgccgcgagcagggcaccgtgcgcttccgtatcgacggcgtgctgcacaacgtctaccagttcccgccgcaggtgaccatggcggtggtcagccgcctgaagtcgctgggacggatgaacgtggcggagaaacgcaagccgcaggacggccgggtcaagaccaagaccccggacggcgccgaggtggagctgcgcctgtcgaccctgcccaccgccttcggcgagaagatggtgatgcggatcttcgaccccgaggtgctgctcaagagcttcgaccagctcggcttctccgccgacgacctgcgccgctggcagagcatgaccagccagcccaacggcatcatcctggtcaccggccccaccggctcgggcaagaccaccacgctctacaccaccctcaagcaactggccaccgacgaggtgaacgtctgcaccatcgaggacccgatcgagatgatcgagccctcgttcaaccagatgcaggtccagcacaacatcgacctgaccttcgccagcggcgtacgcgccctgctgcggcaggacccggacatcatcatggtcggcgagatccgcgacctggagaccgccgagatggcgatccaggcggcgctcaccgggcacctggtgctctccaccctgcacaccaacgactcgcccacggcgatcacccgcctgctcgaactgggcgtgccctactacctgatccgcgccacggtgctcggggtcatggcccagcgcctggtgcgcacgctctgcccgcactgcaaggcgccgatgcaactggcggacagcgactggcacgaactgacccgcccctggagcgccccgccgcccagcggcgcacaccaggccgtgggttgcctggagtgccgcgacaccggctatcgcgggcgcgccggcgtctatgaaatcatgctgctcagcgatagcctgaaagaactgatcaccgccgacaccgacctggtcgccctgcgccgccaggcgtacaaggaaggcacccgcagcctgcgcctgtccggcgcgcagaaggtcgccgcgggtatcagtacgctggaggaagtactgcgggtgaccccgcagagcgaacagaagtag

SEQ ID NO: 363563 - DNA, 1365 bp, Pseudomonas aeruginosa
atgcagaaagaaaccgaaatcaaactccgcgtcagccgcgccaccctggaagccttgcaggagcacccgttgctgaagaaacgcaacaaatcgggctgggagcgccgcgaactgtacaaccagtactacgacacccccggccgcgagctggcccgggccaaggtcgccctgcgcatgcgccgcgacggcgagcagtacatccagacgctgaagagccgcgggcagagcgtggccgggttgtccgaacgcaacgagtgggactggtacctggaaaagaacaagctcgacctgaagaaactcgacgacaagtgctggccggcggccctcaaggacctcgacaagaagcagctcaagccgatcttcagcaccgacttcgtccgccagcgcgccgagatcgcctggggccgcggcaaggccagggtagtcgtggaggcggcgctcgacctgggcaaggtggtcgccggcgacaaccaagaggaaatctgcgaactggagctggaactgcgccagggcgatgccgccgcgctgctcgagctggccgcggaactggccgccgacctgccgctgatgccctgcgacatcagcaaggccgagcgcggctaccgcctgttcgacccgaacagctacgaggtcgatcccccggcgcagaaactgctggcggaaaccccgctggacggtgccttcgccgccatcgcctggtacctgctcggcagcagccagcgactggccgagcagtatcgcttcaacggccactggcgcctgctggaggactggctgcaacacttgcaggacctgcgtaccctgctcggcagcctcggccaggcggtgccacgcgccagcagtcgcgagctgcgcgaagcgctggacgctctcctcgccgactgggcgccgcgcatcgagcgcggccgtgacgacgagacgctacgccagcaggcgccgcaactgttccgcggcgaactcgacgagacccgctggggcctgttctccctgaatgcctcgcgctggctgctggccaaggcctggaccgagtcgcgcaacgagcgcggcaaccgccagggcgccgccgcgctgggcaagtggctgctgcgcagccttgccgaagaagcccaggccacgccgctggcgcgcgcccaccagcatcccgagctgctccccgaccaagcgccgcgcctgcagcgcatgcttacctggttgcgcctggcgcgcggcgtgctcgacctgccggaagccgaccgcctctacggcgaactggccaagttgctggagctgctgcggcaacctgtcgatgccgagcgcctggctgcccgcgccacgcaggcccatactgtgctgacgctcaaaccctggaaggcgctgatgaaataa

SEQ ID NO: 363564 - DNA, 678 bp, Pseudomonas aeruginosa
atgccgaccaatccgttcatcagcctgttcggccgttcgccgatcgggccgatgcagcagcacatcgccaaggcccacgaatgcgcggccggcctgttgccgttcttccgcgcggtgatcgccgaggactgggcgcaggtcgaacaggttcagcaggacatggtgcgactggagcaggaagccgatcggctgaagaagaacgtccggatgcacctgcccaagagcctgttccttccggtgccgcgctccgatctgttggagctgctcagtgtacaggacaaagtcgccaatcgcgccaaggacatcgccgggctgatgctcggccggcgcatgcgcatcccgctgccgctgcagggccagatgctcgcctacgtgcagcgctcggtggacgccagcgcccaggcgttgcgggtggtcaacgaactcaacgaactgctcgagaccggcttcggcgggcgcgagaccagcctggtggagagcatggtggaggaactcgaggcgatcgagaacgacaccgaccgcatccaggtcgaggtgcgtcgcgagctgttccgcctggaaagcgagctgccgccggtggacgtgatgttcctctaccagatcatcgaatggatcggcgatgtcgccgaccgcgcccagcgggtcggcaaccgcctggagcaattgctggcgcgttga

SEQ ID NO: 363565 - DNA, 1269 bp, Pseudomonas aeruginosa
atgtccctgatcgccgaccacggcttcgccttcctcgtactcgcctgcctgttcggtttcttcatggcctggggcgtcggcgccaacgacgtcgccaacgccatgggcacctcggtgggctcacgggcgctgaccatccgccaggcgatcctggtggcgatggtcttcgagttctgcggtgcctacttcgccggcggcgaggtcaccgaaacgatcaggagcggcatcgtcgacccgcagtacatgacccccgacctgctggtcttcggcatgctctcggccttgctggccgccggggtctggctgttgctggcgacgatcaagggctggccggtgtcgaccacccactccatcgtcggcgcgatcatcggcttcgcctcggtcggtgtctcggtgcacgcggtgcactggggcgcgatcggcccgatcgtcgccagttgggtggtgacgccggtgctgtccgggctgctcgccttcgccctgttcaggagcgtgcagtggctggtactgcatgccgaggacccgttccgcagcgcgcgccgctacgtgccgctgtacatgttcctggcgggcttcatggtcgcgctgatgaccgtcggcaagggcctgaagcatgtcggcctggagctttccggcctccagacgctgggcctggcgttgctcgccggcggcctggtgatgggcctgggcatcgtcctgctgttgcgtatccgacccactggcggagccgatccgcgtggcggcttcgccagcgtcgagcgggtcttcgcggtgctgatgatcttcaccgcctgctccatggctttcgcccatggtgccaacgacgtggccaacgccatcggcccggtggcggcggtcgtcgcggtggtccaggccggcggcgacctggatctggtgagccgttcgccggtgccgtcctgggtactgctgctgggcgcggtgggcatcgtcatcggcctggcgacctatggctaccgggtgatcgcgaccatcggccgggagatcaccgagctgacccccagccgcggcttcgccgccgagctggcgaccgcctccacggtggttggcgcctcggccatcggcctgccggtgtccactacccataccctggtcggcgcggtgctcggcatcggcatggcgcgcggtatcggcgcgctcaacctgcgggtgatcggctcgatcttcctgtcctgggtagtgaccctgccggccggcgcgttgctggcgatcctgttcttcctggtcctgcgcgcgctgttcggtgcctga

SEQ ID NO: 363566 - DNA, 1155 bp, Pseudomonas aeruginosa
atgccgttgccgtctctgaaagaccagttcggcgcgctgatcgccgcgtcttccgtcagttgcacccagcccgagctggaccagaccaaccgcccggtggtcgacctgctggcctcctggctgggcgatctaggcttccgctgcgagatccgggaagtctcgccgggcaagttcaacctgctggccagctacggcagcggtcccggcgggctggtgctggccggccacaccgataccgtgccctacgacgaagcgctgtggagcagcgatccgctgcgcctggacgagcgcgacggccgctggtacggcctcggcagttgcgacatgaagggcttcttcccgctggccatcgaggccctgctgccgctgctcgaccagccgttccgccagccgctgatgatcctcgccacctgcgacgaggaaagctcgatggccggcgcccgtgccctcgccgaaagcgggcggccgctggggcgcgccacggtgatcggcgagccgaccaacctgcggccgatccgcctgcacaagggggtgatgatggagcgcatcgagattctcgggcagagcggccattcgtccgatccgaacctcgggcgcagcgccctggaggcgatgcacacggccatcggcgagctgatggcgctgcgcggggaatggcagcaggcctggaacaacccgcagttcagcgtgccccagccgaccctgaacttcggttgcatccacggcggcgacaatcccaaccgcatctgcggccagtgttcgctggaattcgacctgcgcccgctacccggcatgcagcccgagcagttgcgcgaggcgatccgccagcgcctgcggccgctggctgaacggcaccaggtgagcatcgactaccagccgctgttccctgccgtgccgccgttcgaacaggcgcaggacagcgaactggtacgcgtcgccgaacgcctgaccgggcatcgcgccgaggccgtggcgttcggtaccgaggcgccgtatttccagcgcctgggcagcgagaccctggtcctcggcgccggcgacatcgcctgtgcccaccagcccgacgagcacctggaactggcgcgtatcgaaccgatggtcggcgtgctgcgccggctgatccagcattactgcctgacgcccgccgccgactga

SEQ ID NO: 363567 - DNA, 702 bp, Pseudomonas aeruginosa
atgagcgaatacttccatcacgtcctggtcggcctgctcgccgtgctcccggtagccaacccgctgaccagcgtctcgctgctgctcggcctcggcggcagcctgccgccggcggagcgcaaccggcagatattcaaggccagcctctacgtggcgctgatcatgctggtcagcttctacggcggcagcctggtgatgcaggtgttcggcatctccattcccggcctgcgcatcgccggcgggctgatcgtcgcctatatcggcttcaccatgctgttccccgccaccacgccggacgagaccgaagtccagcacgacctgctgtcggacgaggaaaagatcaccccgcacttccgcgacctgtccttcgttccgctggccctgccggggaccgcggggccggggaccatcgccctggtggtcagctcggcgtcgacgctgcaatccacctacggaagcattccgctgttcatccacctcgcggcgatcaccgtcaccctgctcaccgcgctgatcttctggatcgccctgcaaagctccgggcgcatcatgaagttcctcggcgaatccgggatcgacgccatctcgcgagtggtcggcttcctgctggtggcgatgggcgtgcagttcgtcatcaacggcggcttcgagctggtcgccggccacgccgcgcttcagtcggcggcgggcgtcaggcagtaa

SEQ ID NO: 363568 - DNA, 1299 bp, Pseudomonas aeruginosa
atgcccgactacgtcaactggttacgtcacgcttcgccctacatcaactcgcaccgggaccgcaccttcgtggtcatgctccccggcgaaggggtggaacatcccaatttcggcaatatcgtccacgacctggtccttctccacagcctcggcgcgcgcctggtgctggtgcacggttcgcgcccgcagatcgaggcgcgcctggccgcgcgcggcctggctccgcgctatcaccgcgacctgcgagtgaccgatgcgccgaccctggaatgcgtcatcgacgccgtgggtagcctgcgcatcgccatcgaggcgcggctgtcgatggacatggccgcctcgccgatgcagggcgcgcgcctgcgggtcgctggcggcaacctggtcaccgcgcggccgatcggcgtggtcgagggtgtcgactaccaccataccggcgaggtccgtcgcatcgaccgcaagggcattggccgccttctcgacgagcgcagcatcgtcctgctctcgccgctgggctactcgccgaccggggaaatcttcaacctggcctgcgaagacgtggccatgcgcgccgccatcgacctggaagcggaaaagctgattctctacggcgccgaacagggcctgctggacgcatccggcaagctggtccgcgaactgcgcccgcagcaggtgcccgcgcacctgcaacggctgggcaacagctaccaggccgagctgctggacgccgcggcgcaggcctgccgggccggagtcaagcgcagccatatcgtcagctacaccgaggacggcgcgctgctcagcgagctgttcacccgcaccggcaacggcaccctggtcgcccaggagcagttcgaacagttgcgcgaggcgggcatcgaggacgttggcgggctgatcgagctgatccgcccgctggaagagcagggcatcctggtacgccgttcccgcgaggtgctggaacgcgagatcgaacagttcagcatcgtcgagcgcgaagggctgatcatcgcctgcgccgcgctctacccgatcgccgattccgaggcgggcgagctggcctgtctggcggtcaacccggagtaccgccacggcgggcgtggcgacgaactgctggagcggatcgaggagcgcgcgcgcggactcggcctgaagaccctgttcgtgctcaccacgcggaccgcgcactggttccgcgagcgcggcttccagcccagcagcgtagagcggctaccggcggcgcgggcctcgctgtacaacttccagcgcaattcgcaggtattcgagaagagcctgtga

SEQ ID NO: 363569 - DNA, 1584 bp, Pseudomonas aeruginosa
ttgagcgatcttctctcccgccgcctggctctgctcggcgccgcagccaacctgcccctgctgaccgagtgcctgcatggcatcgagcgcgaatgcctgcgagtcgatagcgacggcaagctggcgctcaccccccacccccgggccctgggttcgaccctgacccatccgcagatcactaccgactactccgaggccttgctggagttcatcacgcccacggaaaccgacgtcgccgacaccctggccgatctcgagcgcatccaccgcttcgccagttcgaaactggacggcgaatacctgtggagcccatcgatgccctgcgagctgccggacgaggagagcatcccgatcgcccgctatggcagctcgatgatcggccgcctgaagtacgtctaccgcaagggcctggcgctgcgctacggcaagaccatgcagtgcatcgccggcatccactacaacttctccctgccggagaggctctggccgctgctgcgccaggccgaaggcagcgagctgtcggaacgcgactaccagtccgccgcctacatcgccctgattcgcaatttccgccgctacagctggctgctgatgtacctgttcggcgcctcgccggccctcgacgccggcttcctgcgtggccgcccgagccagttggagcgcctcgacgaacacacgctctacctgccctacgccaccagcctgcggatgagcgacctgggctaccagaacaacgcccaggccggcctgacgccctgctacaacgacctgcagagctacatcgacagcctgcgccaggcggtcagcacgccctacccgccctacgagaaggtcggcaccaagcaggatggcgagtgggtgcagctgaacaccaacatcctgcagatcgagaacgagtactactcgagcatccggccaaagcgcgtcacctacaccggcgagcgtccggtgcaggccctggccgctcgcggcgtgcagtacgtggaagtgcgctgcctggacatcaacccgttcctgccgctgggcatcgacctggacgaggcgcgcttcctcgacgccttcctactgttctgcgcgttcagcgacagcccgctgctgaatggcgagtgcagcgacgccaccgacaacttcctcgccgtggtcaaggaaggcaggcggccgggcctgcaattgcaacgtcgcggccagccggtggaattgaaggtctgggccaacgagctgctcgaacgaatcgccgacaccgcggcgctgctcgaccgcgcgcgcggcggcgaagcccacgcggcggcgctggcggcgcagcgggcgaaggtggccgatgcggaactgacgccttcggcgcaggtgctgagagtcatgcgcgagcgcggcgagagcttcgaagcgttctccctgcgccagagccgcgaacacgcggagtatttccgccagcatccgctggccgccgaagagcaggcgcgcttcgagaagatggccagcgagtccctggccgaacagacggagctggaacgcgaccaggatggcgacttcgataccttcgtcgccgcctaccaggcgagcatcctcggcctgatcagcaactga

SEQ ID NO: 363570 - DNA, 390 bp, Pseudomonas aeruginosa; identical to SEQ ID NO: 321801

SEQ ID NO: 363571 - DNA, 744 bp, Pseudomonas aeruginosa
atgtcgaaccctgccgccctggccgaaggtgaaaaaatcctcgtcgtcgacgacgacgcccgcctgcgccgcctgctcgaacgtttcctcgacgagcagggctaccgcgtccgcgcggtggagaacaccgagcagatggatcgccttctatcccgcgaactgttccagctggttgtgctcgacctgatgcttcccggcgaggacggcctcactgcctgccgccgcctgcgcgaacagaacaaccaggtgccgatcatcatgctcaccgccaagggcgacgagggcagccgcatccagggcctggaactgggcgccgacgactacctggccaagccgttcaacccgcgcgaactgctggcgcggatcaaggccgtgctgcgccgccaggcaccgctggtgcccggcgcgcctgccggtgccgacgaggtggtgaccttcggcgactaccagctgttcctcgccacccgcgagctgaagaagggtgaggaggtacacatgctgaccaccggcgagttcgccgtgctcaaggccctggtgcagcacgcccgcgaaccgctgacccgggacaagctgatgaacctcgcccgtggccgcgagtgggatgccttggagcgttccatcgacgtgcagatctcgcgcctgcgccggctgatcgagccggacccgtccaagccgcgctatatccagacggtctggggcgtcggctacgtgttcgtgccggacggcaacgcgcgcaaggcctga

SEQ ID NO: 363572 - DNA, 1320 bp, Pseudomonas aeruginosa
atgaaaacgccgctctggttcccgcaaagcttcttcgcccgcaccctctggctggtgctgatcgtcgtgctgttctccaaggcgctgaccctggtctacctgctgatgaacgaggacgtgatcgtcgaccgccagtacagccacggcgcggcgctgaccatccgcgcgttctgggctgccgacgaggagtcgcgcgcggccatcgccaaggcttccggcctgcgctgggtgccgagtagcgccgaccagcccggcgagcagcactggccgtacacggaaatcttccagcggcagatgcagatggagctggggccggacaccgagacccgcctgcgtatccaccagccgtcgcagctctgggtgcgcgcgccgagcctcggcgaaggctggctggcggtgccgctgtatccgcatcccttgcgtggccaacggatctggagcgtgctcggctggttcctcggcatcggcctgctctccaccgccgccgcctggatcttcgtccgccagctcagccagccgctcaagcgcctggtggtcgccgcccgccagttcggccaggggcgcagcgtgcgcctgccgctggggccggagacgccgagcgaaatggccgaggtgtatcgtgccttcaaccagatggccgaggacatcgagcagggcgggcgcgaacgtgaattgatgttggccggtgtctcccacgacctgcgcaccccgctgacgcgcctgcgcctgtcgctggagttgctgccggagagcgaacgggagatggtcgaggacatggtccgcgacatcgaggacatggacgcgatcctcgaccagttcctcgccttcatccgcgacggccgcgacgagccggtggaggagggcgacctgaccgacctggtgcgcgaggtggtggcaccgttcaaccagactcgcgagcaggtgcgcatggccttgcagccggtaccggcgatgccgttgcggcgggtgtcgatgaagcgtctgctgggcaacctgatcgacaatgccctgaaccacggcggcggctcggtggaggtggccagctacgtggccggcgaaagcgcggcgccctacgtggtgctgagcgtgctcgatcgcggccagggcatcgatcccgcggaagtggacagcatcttcaatcccttcatccgcggcgacaaggcgcgtggcggcaagggcaccggcctcggcctggcgatcgtcaagcgcatcgccgcccagcacggcggcagcgtcgaattgcgcaaccgcgatggcggcggcctggaagcgcgggtctgcctgccgctggggttgctgctaccgcgcggcgcggcctga

SEQ ID NO: 363573 - DNA, 924 bp, Pseudomonas aeruginosa
atgacctctcgtccctcctccgaccagacctggcagcccatcgacggccgggtggcgctgatcgcgccagcctcggccatcgccaccgacgtgctggaggcgaccctgcggcaactggaagtgcacggcgtggactaccatctcggccgccacgtcgaagcccgctatcgctacctcgccggaaccgtcgagcagcgcctggaagacctgcacaacgccttcgacatgccggacatcaccgcggtctggtgcctgcgcggcggctacggctgcggccagttgctgccgggcctggactgggggcgcctgcaggcggcctcgccgcggccactgatcggtttctccgacatctcggtgttgctcagcgctttccaccgccacggcctgcctgcgatccacggcccggtggccaccggactcggtctgtcgccgctgagcgccccccgcgagcagcaggagcggctagcctcgctggcctcggtcagccgcttgctggccggaatcgaccatgaactcccggtgcagcacctcggcggacacaagcaacgcgtcgaaggcgcgctgatcggcggcaacctcaccgccctggcctgcatggccggcaccctcggcggcctgcacgccccggcggggtcgatcctggtcctggaggacgtcggcgaaccctactaccgcctggagcgcagcctctggcaattgctcgaaagcatcgacgcgcgccagctcggcgcgatctgcctgggctcgttcaccgattgcccgcgcaaggaagtcgcccacagcctggagcggatcttcggcgaatacgccgccgccatcgaggttccgctctaccaccacctgcccagcgggcatggtgcgcagaaccgggcctggccttacgggaagaccgcggtgctcgagggaaaccggttgcgctggtag

SEQ ID NO: 363574 - DNA, 906 bp, Pseudomonas aeruginosa
atgaaaatcgccgtgctgtcgcgcaatccccggctctactcgacccgtcgcctggtggaggccgggcgggagcgcggccatgaaatggtggtcatcgatacgctgcgcgcctacatgaacatcgccagccacaagccgcagatccactaccggggacaaccgctggagggcttcgacgcggtgatcccgcgcatcggcgcctcggtgaccttctacggctgcgcggtattgcgccagttcgagatgatgggcgtgttcccgctcaacgagtcggtcgccatcgctcgctcgcgggacaagctgcgctcgctgcaactgctgtcgcgcaagggtatcggcctgccggtgaccggcttcgctcattccccggacgatgtcccggacctgatcgagatggtcggtggcgcaccgctggtgatcaagctgctggagggcacccagggcatcggcgtggtcctctgcgaaaccgagaaggccgccgagtcggtgctcgaggctttcatggggctcaagcacaacatcatggtccaggagtacataaaggaagccggcggcgccgacatccgctgcttcgtggtcggcgacaaggtgatcgcctcgatgaagcgccaggcagcgcccggcgagttccgctccaacctgcaccgcggcggcagcgccagcctgatcaagatcaccccggaagaacgcatgaccgccatccgcgccgcccgcgtgatgggcctgaacgtcgccggggtggacatcctgcgctccaaccatggtccgctggtaatggaggtgaactcctcgccgggcctggaaggtatcgaatccaccaccggcaaggacatcgccgggatcatcatccagtacctggaaaagaacggcggcccccacctggccaggacgaagggaaaggggtga

SEQ ID NO: 363575 - DNA, 501 bp, Pseudomonas aeruginosa
gtgaagacattcgaccagctttccgtcatcggtctgcgcgagtggatcgcctttcccgaactgggcatggtcgggctgcgcgcgaagatcgacaccggcgccagcacctccagcctgcatgcctcggacatcgttcccttcgagcgcgacggcgagaagtgggtgcgcttcaccgcccacctcggcacgctggtgcagcgccggcaccgttgcgaagcgccgatggtcgcgcgcaagaccattcgcagttccaacggccaggcccagacccgctacgtgatccgcaccaccctggcgctgggcgatcgcatgtggccggtggaattcaccctggcctgccgcaagtccatgcgctatcgcgtgctgctcggctccaaggcgctgatcgccgggcaattggtggtcaacccggccctggcctacgtccaggatcgtcccgagtcgccggccgccctgcccgcggcgacgggcatcaacctgctcgacgggagtccggtttga

SEQ ID NO: 363576 - DNA, 402 bp, Pseudomonas aeruginosa
atgccagtgagcgagaaagacgacgacaaggtgcgcctggacaagtggctctgggcggcgcgcttcttcaagacccgggcgctggccaaggccgcgatagagggcggcaaggtgcattgccggggcgagcggtgcaagccgagcaaggaacccagggtaggggaggaattgaccattcgtacgggcttcgacgagcgaaccgtgacgattcgcgcgctttccgtagtccgtcgtggcgcgccggaggcccaggctctctacgaggaaaccgcggacagcgtggaaagccgcgagcgcgcggcggccatgcgcaaggccggggcgctgggcgtacagaccgaggggcggccgagcaagaagcagcggcggcagatccaccagttgcgcggcggccaggactga

SEQ ID NO: 363577 - DNA, 804 bp, Pseudomonas aeruginosa
atggataatgcctctccgttccaagcggcctggcaatggcgcaagttcgccacctgtcatcttctggcgctcctgctgctgatcctgtggctctggggccccacccgcgagctgatgaacggcttcgacttctggctcttcgacaagctcaacggctccctcgccctcaacgaaacctggctgaaactctggggcctgctcagtacccgaccgttcgacgcggtggtcggggtgatcctgctctgcctgctgattcgcggcgactggctgctgccggcgaaccaggtacggcggctgaccttcggcttcatcgtgaccctgctgatcctggtggtgatccgcgtgctctacgccaagatcgcccaccacctgcactggcagcacgccagcctgtcgatgctgatggacaaggccatccacctcagcgaccacttcccggactgggaacgcgtgtgggaaatcaaggaccgctccaagcgcagcttccccggcgaccacgcctcggtgctgctggtctgggcgctgttcatgtcgctgttcgcccgccgcgccgggcagttcctgctgatctggaccctggccgtgctgttcatgctgccgcgcctggtagccggcgcgcactggggccaggacgactacatcggcggcctgcagatggccctgctggccctcgcctggggctgctacacaccgctggcggcgaaggccagcggctggctggtgcaggtgaccgaaccgctgttccgcctgctggcgaaattgccgctgatcggccgcctcggcgtggtccgcgactcggcctga

SEQ ID NO: 363578 - DNA, 894 bp, Pseudomonas aeruginosa
atgtcccattcagatcagagccagcgtttccttttcgacgataccgacgtgcgcggcgagatggtcgatctcgagcgtagctacagcgaagtgctggccaaacatccctatccggaaccggtcgcgcaactgctcggggagatgctcgcggcggcctcgctgctctgcggcacgctcaagttcgacggcctgctggtattgcaggcgcgttccagcggcgcggtgccgctgttgatggtggagtgttccagcgaccgccaggtgcgtggcctggcccgctattcggcggaatccatcggcgccgacgccggcatgcaggaactgatgcccgaaggcgtgctgaccctcaccgtggacccggtcaagggccagcgctaccaggggatcgtcgccctggagggggtgaacctggcggaatgcctgtccaactacttcgccagctcggaacagctgccgacccgtttctggctcaacgccaacggccgccgcgcccgcggcctgctgctgcagcagcttcccgccgaccgcctgaaggaccccgaggcccgcgaggccagttggcagcacctgaccaccctggccgacacgctgaccgccgaagagctgctggcgctggacaacgagaccgtcctgcaccgcctctaccacgaggaaaccgtgcgcctgttcgagccgcaaccgctggtcttccattgcagttgctcgcgggaacgttcggccaacgccctggtcagtctcgggcaggccgactgcgagcggctgctcgaggaggaagaaggctcgatcaccatcgactgccagttctgcaaccagcgctacctgttcgacgcctccgacgtcgcccagttgttcgctggcgctggcagccaggggccttccgagacccgccactga

SEQ ID NO: 363579 - DNA, 1542 bp, Pseudomonas aeruginosa
atgacgcaagccaacaacgccgtgtacaccgatatcagcgccgcccaactggtagaagaagccattcgccgcggtgagggcgaactggccgccaacggctcgctggtcgtacgcaccggccatcgtaccggccgttcgccggtcgaccgtttcatcgtcgaagagccgagcaccaaggacgcgatcgcctggggcaacatcaaccgtccgttcccggccgacaagttcgatgcgctgtgggcccgcgtggaagcgttcaacaacgcccaggaccatttcgtttcccatgttcatgtaggttccgccgaggcttactacctgccggtgaagatgaccaccgctaccgcctggcagaatctgttcggccgttgcctgttcatcgagccggagcagtacaacccggccggcaaggacgagtggcaggtcctcaatgtcgccaacttcgaatgcgtgcccgagcgcgacggcaccaactccgacggttgcgtgatcctcaatttcgcccagaagaaagtgctgatcgcaggcatgcgctatgccggcgagatgaagaaagccatgttctccgtgcagaacttcctgctgcccgagcgcgacgtgctgccgatgcactgcgctgccaacatcggcgaagcgggcgatgtgaccctgttcttcggcctgtccggcaccggcaagaccaccctgtccgccgatgaaagccgttacctgatcggtgacgacgagcacggctggggcgagggcgtggtgttcaacgtcgaaggcggttgctatgccaagtgcatcgacctgtccgagaagaacgagccggtcatctggaaagccatcaagttcggcgccgtgctggagaacgtggttctcgacgaagagcgcgtgcccgactacgccgacgacagcctgacccagaacagccgcgccgcctacccgctggagcacgtcgagaagcgttcggagaagaacctcggcggcgagcccaacgcggtgatcttcctgacctgcgacctgaccggcgtactgccgccggtatcgatcctgaacaacgagcaggcggcctaccacttcctgtccggctacaccgcgctggtcggctccaccgagatgggttccggcggcggcatcaagtcgaccttctccacctgcttcggcgctcccttcttcccgcgtccggccggtgtctacgccgagctgctgatcaagcgtatcaaggccttcggctccaaggtctacctggtcaacaccggctggaccggcggtggctacggcgtcggcaagcgcttcaacatcccgaccacccgtggcgtgatcgcggcgatccagagcggcgcgctgatcggcgcggaaaccgagcacctggacatcatcaacctggacgtgccgaaggtcgttccgggcgtcgagaccaatctgctcaacccgcgcaatacctgggccgacaaggctgcctacgacgaggcggcgaagggcctggccaagcagttcatcgaaaacttcaagaaattcgaggtttccgacgcgatcaaggccgccggcccgcagctgtaa

SEQ ID NO: 363580 - DNA, 357 bp, Pseudomonas aeruginosa
atgaacaggatgggccaactggctttgttcggtcttcttgtaggaacttccagcaacctgttcgccgcccccggcagcatcagcggcgtcatccgcttcaccggcgccatcgtcgagccgccgtgctcgatgaatacctccagacaaggcgaggccaagggcagcttccacctcagtggctgtcccatgcaggcgcgcaccgcggaagtcagcatccgctcgatgaagaccggcgaggtgcaacacctgcaacccagcgacctggtcctcggggaaagggatttctcggcgcgctatgagctggccggaagcggtcgtcgctccggcaactacctgatcaccgtcacctacccctga

SEQ ID NO: 363581 - DNA, 603 bp, Pseudomonas aeruginosa
atgcatatcgaagacgccgttcgtagtcgccgtgccatcaagggctacgactcatccttcagcctgactcgcgaagagaaggaccatctcctggacctggcgctgcatgcgccttccgccttcaacctgcaacacgtgcggctggtcgaggtcagcgatccgcaattgcgcgtgcagttgcgtgaagtggcctgggaccaggcgcaggtcaccgacgcggcgatgctggtggtggtgtgcgcccagctcgacagttgggagcgcaatgcgcagcgggtctggaacggcgctcccgaggcggtacaggcgttcatggcaggtgccatcgacacctactaccgcggcaagccccaggtacagcgcgacgaagccatgcgcagctgcggcctgctggcgcagaccctgatgctggtcgcccgcggccagggcctggattcgtgtccgatggatggtttcgacttcgatgccgtggcccggctgatcaacctgccggacaaccatgtgatcggcctgatggtcgcggtcggaaaaaaggccgtggaacccgggccgcgtagcggcaagctgccgcgggaagaactggtcatccgcgaccgcttctga

SEQ ID NO: 363582 - DNA, 909 bp, Pseudomonas aeruginosa
atgaatatccaaaccttcgacctcaacctgctacgcgtcctcgacgccctgctgcgcgaacgcaacgtctcgcgcgcggcggaacgcctggcgctgagccagccggcagtgagcaatgcgctgaatcgcctgcgcgagctgctcgacgacccgctgctggtccgcgccggtcgtgcgatgcagccgacgccccgggcactggcgctggaagcgccgattcgcgcggcgctgcggcagatcgaacagagcctgggcgacggcgagggcttcgatccggggcgcagccggcagcgcttcaccgtagcggtgaccgactacgtcgaactgatctgcatgcccgccctgatgcgccgcctgagcgagcgggcgccgggaatctccatcgccatccagcacctgaccccgaccttgccggccgaggcgctggacaaaggcgaactggacctggtgctaggccgcttcgaaaacgtcccggcgcgcttccagcgccgccattgggccagcgagaccctgcaactggtcgcccggcgtcagcacccgctgctggcgcaggctcccgacctggccacctttctggagctacagcacctgtgggtgcatggcgggcagaccaaggggatggtcgaccaatggctgggcagccaggggctcaagcggcaagtggcctacaccacgccgaactacctgcaggcagcgcacatcgccgcgtacagcgacctggtcggcgtcctgccgcgacaactggcgcactacttcgaacgattgctgcccctgcaatcgttcgacctgccgttcgacctgggccccttccacctggaactggtgttcctggcccagcgcgaacgcgacatcgccctgcaatggctggtcgaacagatccgccaggtcggggccgccggaccggactag

SEQ ID NO: 363583 - DNA, 1236 bp, Pseudomonas aeruginosa
atgagccagaacttttccttccgccaggccgcggtgatcggcgccggcaccatgggtcgcggtatcgtcatgtgcctggccaacgccggtctcgacgtgcagtggctggacagcaacccgcagatgctcaaccaggcgctcggcgccgtcgccgacacctacgcgcacaacgtgcgccaggggcgcatcggcgaagaggaagcggccgcgcgccgcgcccgcatcacgccggtccagcacctcgccgcgatgcgcgaggcggacctggtgatcgaggcggtctacgagaacctggaactcaagcaatcgatcttccgcgagctggacgcggcgctgaagccctccgcggtgctggccagcaatacctcctacctggacatcgacgccatcgccgcggtcaccgcgcgtccgggtcaggtgctcggcctgcacttcttcagcccggcgcacatcatgcggctgctggagatcgtgcgcggcgcgcagaccgcgccggcggtgctggaggcggccctggcgctgggcgagcggatgggcaaggtcagcgtggtggccggcaactgccacggcttcatcggcaaccgcatgctcgaaccctacgccaccgaggcccgcctgatgctgctggaaggcgccctgccgtaccaggtggaccgggctctccaggcgttcggtttcgccatggggccgttccgcatgtacgacgtggtcggtatcgacctggagtggcgcgcccgcgagttggccggggtcggccaggaccagccggccgtgcaggtggacaaccgcctttgcgagctgggccgcttcggccagaagagcggtgccggttactaccgctacgctccgggcagccgccaggcggagcacgataccgaggtggatgccctggtgctccgggtcgccgagacgctaggctacccgcggcgcgatttcgccgacgaggaaatcctcgagcgttgcctgctggcgctggtcaacgagggcgcgaagatcctcgacgagggtatcgccgcccgtagcgccgacatcgacactgtctacctgaacggctacggcttccccgccgcggagggcggtcccatggcctgggccgatcgcctcggcgcggccgagctgctgcaacgcctgcgtttcctcgaacagcgccacggcgcgcgctggaagccggcgtccctggtcgagcgcctggccgccgagggcggagccttcgccgacctgcaggaggtgcgctga

SEQ ID NO: 363584 - DNA, 1791 bp, Pseudomonas aeruginosa
atggattaccaggcccccttgcgcgacatgcgcttcgttctccatgaattgttcgatgtcggcgcgcattgcgaactgctgggcaacggcatcgatcgcgaactgatcgacggcgtgctcgaggaaggtgcgcgctacaccggccaggtggtggcgccgctcaatcgcaacagcgacgaggaaggcgcgaagctgaaggacggcgtggtgaccacccccaccggctttcgcgaagcctaccggcagtacagcgagaacggctgggcgagcatgaccggacccaccgagtacggcggccagggcttaccgcagatggtctccgcgtgcttccacgagatgttgatggccgccagcctgtccttccgcgtctattcggggctgaccgagggcgccgtgctggcgctttacaagcatggcgacgaggcgttgcggcgcgactacctggccaagctggtgagcggtgaatgggccggcaccatgtgcctgaccgaaccccaggccggcaccgacctcgccctcctgcgcacccgcgccgaggcgcaggccgacggcagctacgcgatcagcggcagcaagatcttcatcagcggtggcgagcaggacctcaccgagaacatcgtccacctggtgctggcgcgcctggcggacgcgccggccggggtgaagggcatcagtctgttcctggtgccgaagttcgtcgccaatcccgatggctccctgggcgagcgcaatagcctggggtgcggcgccatcgagcacaagatggggatcaagggtgcttccacctgcgtgatgaacttcgacggcgccaggggctggctgctgggccaagcgaaccagggcctggcctgcatgttcacgatgatgaacgacgcgcgcttccaggtcggcctgcagggcctgggtatcgccgaacgggccttccagggcgccctcggctacgcccgcgagcgcctgcagtcgcgcgccctggtcggcccgcaggcaccggacaaggccgccgacccgatcatcgtgcaccccgacgtacggcgcatgctgctgacccagaagaccttggtcgaaggctgccgcatgctggcggcctgctgtgcacgccagctcgacctggaacacggccatccggatgccgacggccggcgcgcggcgacgcgccgtgcagcgctgctgatccccatcgtcaaggccttccttaccgatgtcggccaggaagtcgccagcctcggcgtacaggtctatggcggtcacggcttcatccgcgagtggggcatggagcaattgatgcgcgacagtcgcatcacccagatctatgaaggcaccaatggcatccaggcgctcgatctggtccgccgcaagctgctcggcgaccagggcggcgaactgctggcgctgcaaggcgaactggcggcggccagcgaggcgctgcaagggcgtgctgcgctggcgccgctggtcgagccggtgctgcaacgcctggaggagtggcggcagctcaccggccaggtactcgaggcctgcgcccgcgatccccaggagatcggcgccacttccgtggacttcctccagtacagcgcctacgtattgctcgcggccctctggttgcaagccgcggcacgagcccaggaagcgctggacggcggctccggcgagggcgatttctatcgggccaagctgcgcagcgccgatttctacctgcggcgcatcctgccgcgggcgagcatgcaccgcgaagccttgctcggcggcgccgactgcctgatggccctgcccgaggagcatttctcgttctga

SEQ ID NO: 363585 - DNA, 1164 bp, Pseudomonas aeruginosa
atgcaagctttcagtttcgccactaccgcgcagatcctctgcgaggccggctccgccatccgcctggcggaactctgccgcgagcgaagggcgcgccgcgtgttgatcgtgaccgacccggggatcacccggctcggcttgctggatgcgatcctgcccggcttcccgcgcctgggcctggccgtcgaggtgtacgaccaggtgctcgccgatccgcccgagtcggtggtcgaggccgcgctcgggcgggcgcgggccatggctgccgagctggtggtcggtttcggcggtggcagttccatggacgtggccaagctggtcgcgctgctcgcccatccagaggcagggcaggggctcggcgaggtcttcggggtcggcaacgcacgcgggccgcgcctgccgctgatccaggtgccgaccaccgccgggaccggctccgaggtgacgccgatcgccatcgtcaccaccggcgagaccaccaagatgggcgtggtctcgccccacttgctgcccgacctggcgctgctcgatgccgacctgaccctcgggctgccgccggcggtcaccgcggcgaccggtatcgacgcgatggtgcatgcgatcgagagctataccagcaagctgaagaagaacccgctgtccgacctgctggcgcgggaggcgttgcgcctgctggcggccaacctggaacgcgcggtaggcgacggcggcgaccgcgaggcgcgccaggccatgctgctgggcgcctgcctggccgggcaggccttcgccaatgcgccggtggcggcggtacatgccctggcctatccgctgggagggcatttccacattccccacggcctgagcaacgcgctggtgctaccggaggtgatccgtttcaacgctcccgctgccgctggactctatgccgagctggcgccgctgctgctgggcgaccgcttgcgtccgggcgatcgcgacgcgcttaccgcgcagctgatcgacgaactggcccagctcagtccgcgcaacggcctgccgagccgcttgcgcgacgccggggtggacgaggcgatgctgccgcgcctggccgccgacgcgatgctccagcagcgtctgctggtcaacaacccgcgcgaggtcggcgaggcggatgccctggcgatctatcgcgcggcatactga

SEQ ID NO: 363586 - DNA, 444 bp, Pseudomonas aeruginosa
atggcgaccgccccgcgaccgctgcgcgagcagtaccttcatttccagccgatcaccacgcgctggcacgacaacgacatctacggacacgtgaacaacgtgacctactatgcgttcttcgacacggcggtgaatacctacctgatcgagcgcggcggcctggatatccagggcggcgaagtggtcggcctggtggtcagttccagctgcgactatttcgcgccggtggccttcccccagcggatcgagatgggcttgcgggtggcgcgcctgggcaacagctcggtgcagtacgaactggccttgttcctcgaagggcagcgggaggcctgcgcggccgggcgtttcgtgcatgtcttcgtggagcgccgaagcagccgcccggtggccattccgcagggactacgcgatgcgctggccgcgcttcagagcgcggcccagtga

SEQ ID NO: 363587 - DNA, 558 bp, Pseudomonas aeruginosa
atgcgcccgtcgttcgccagttggggcctgcttgccctcctgctcctgcaaggcccgctgctccaggcccagccgctgtcgccggctctccagcaactgttgagcctgagcagccagcgtttgcaactagccgatcaggtagcccagagcaaggcccggtcgggcaaggcggtccaggacagcccgcgggaacaacaacagttgcagatgctcgccggacaagccgggagccacggggtcggtgccgagcaggtgcgcctgctgttcgccgcgcagatcgaggcgaacaagctggtccagtaccgcctgctcagccggccgctaccggacgctggccaggcggtcgacctggagcgcatccgcagccgcctcaatcagctcaacctggagctgctgcgcggctacgccccggcgctcgccgaactgcgcgtcgacgactgccggccgaggctcaaccaggcgctgcaacggcaggtacgcgacgatcgcctggacgaactgcacgccatcgccctgtcacgggcggcgggcgatctctgtcactgggccgcgctctga

SEQ ID NO: 363588 - DNA, 216 bp, Pseudomonas aeruginosa
atgggtttcctgatactctcccgccgagaaggcgaaggcatcaccctgtccctcaaagccgactacccggcggaggaactgattcggcaattgcgcgaaggcggcatccggatcctggtcaccgatatcatcggcaaccaggcccgggtcgggatcgaggcgccgcgtggcgtcctgatcgttcgcgacgagttgaagacggcaccgaaaggctga

SEQ ID NO: 363589 - DNA, 516 bp, Pseudomonas aeruginosa
atgaagtattcctcgatactcctgttgtccctgagtctggtcggtggtaccgccttcgcaggcgacgacacccgcgcggccatcggcggcgccttgggcggggtgttgggttcggtcgtcggcgatgcggtcggcggcagcactggcgccgcgatcggtagcggcatcggtggcgctgcgggcggtgcagtcggcgccggacgcggtaacaagaccgaagcggcgatcggcggcggcctcggtgccgcaggcggcaacgtcatcggccggcagatcggtggcagcaccggtggcctgatcggcgcggccctcggcggcgccggcggcggcgcgctgggcaaccattatggcgacggcaaccgccgctacgacgacgatgacgactaccgcgaccgtcgctactaccgccgcgccggctatcgcgatggctattaccggcatgacaacggccatcactatggccggtacaagaagtggaagcgccataagcatcatcgtcgctactacgacgactga

SEQ ID NO: 363590 - DNA, 2322 bp, Pseudomonas aeruginosa
atgagcctgcaacctctccaaccccgctacaagccctacgccggtgccgccgccggctggggcgcgctgcgcagcgtggcgcacttctggctggacagcaaacagccgttcaagaaccttcgcgccctgctcaagaccaaccagaacggcggtttcgactgccccggctgcgcctggggcgactcgccggaagacggccgggtgaagttctgcgagaacggcgccaaggcagtcaactgggaagccaccaagcgccgcgtcgacacggcgttcttcgcccgttacagcgtcagcgccctgcgcgaacagagcgactactggctggaataccagggccgcctcaccggaccgatgcgctacgacccgctcagcgaccactaccagccgatcacctgggacgccgccttcgccctggtcgccgagcacctgcgccgcctggatagccccgaccaggcggagttctatacctccgggcgggccagcaacgaggcggcctacctctaccagttgttcgtccgcgcgttcggcaccaacaacttccccgactgctcgaacatgtgccacgaggccagcggcgtggcactgggccgcagcgtcggggtcggcaagggcagcgtgaccttcgacgacttcgaacacgccgacgcgatcttcatccttgggcagaaccccggcaccaaccacccgcgcatgctcgagccgctgcgcgaagcagtgaagcgcggcgcccaggtggtctgcttcaaccctctcaaggagcgcggcctggaacgcttccagcatccgcagaacgcgctggaaatgctgaccaacgggtcctcgccgctgaacaccgcgttcttccgtccggcattgggcggcgacatggcggcgatccgcgggatcgccaagttcctcctcgcctgggagcgcgaagcccaggccgagggtggcgagccggtattcgaccacgccttcatcgccgagcacaccgacggcctcgaggcctacctggccgaactggatgccaccccctgggaacacctggagcgccagtccgggctgagcctggcggaaatcgaacaggctgcgcggatgtaccggcgggcgaacagggtcatcgtctgctgggcgatgggcatcacccagcaccaccattcggtggcgatcatccaggaaatcgtcaacctgcaactcctgcgcggcaacctgggccgcccgggcgccggtctctgcccggtccgcggccacagcaacgtgcagggcgaccgcaccatgggcatcaacgagcggccgccggcggcgctgctcgacgcactggaacggcgcttcggcttcgaagtgccacgccacaacgggcacaacgccgtcgaggcgatcgccgcgatgctcgcgggcaagtcgaaggtcttcatcggcctgggcggcaatttcgcccaggccaccccggacagtccgcgcacccacgccgccctggcgtcatgcgacctgaccgtgcacatcagcaccaagctcaaccgcagccacctgaccaccggccgcgacgcactgatcctgccctgcctggggcgcaccgacatcgaccgccaggccgaaggcccgcaggcggtcacggtggaagactcgttcagcatgatccacgcatcctacgggcaactggagccgctctcgcagcagatgcgttcggagccggcgatcatcgccggcatcgccaaggcaaccctgggcaaccatccggtggactgggacgcgctgatcgccaactacgagcgcatccgcgagctgatcgccgacaccatccccggtttcgccgacttcaaccgccgcgtccggcatcccggcggcttctacctcggcaacgccgccggcgaacggcgctggaacaccgccagcggcaaggccaacttcgtcgccaacccgctgccccgcgacctgttgccggcacaggtgcgcgacagcggcctcgaacccgacctgatcctgcagaccctgcgctcccatgaccagtacaacaccaccatctacggcctggacgatcgctatcgcggagtgaagggccagcgcgaagtggtattcgccaacgaggcggatatccgccgcctgggctaccagccgggcgacaaggtcgacctggtctcgctgtggagcgatggcatcgaacgccgggtacgccgcttcaccctgctcgccttcgacatcccggccggccaggcagccgcctactacccggaaaccaatcccctggtgccgctggagagcgtcggcgtcggcagccatacgccgacttcgaagttcatcgcggtacgcctggaaaaggccacgggcgacgggcgcattgtctga

SEQ ID NO: 363591 - DNA, 840 bp, Pseudomonas aeruginosa
atgccttgccagcctgcatgcccggtatccgccgatacctgggcgccttccgccgttcccgacgtttaccgctacgccgacctgcacctgccgcagcaggtcggccaggcctcccttgccgccgagtgtgccctggcgatcagttacaacggactgaaccaggcggtgatgatggcctcgcccgaggacatcgaggatttcgtccgcggcttcagcctcagcagtggcttcgtacagaccatcgacgacatctatgaaatccgcgtcagcggccagggcgaatccctccacgccgaggtcgagatcagcagccgcgcattctggaacctcaagcgccaacgccggcaactggccggcacttccggctgcggcctgtgcggcgtcgaagccctggagcaggcgctgccgcaactgccggagcggtcgtcgcaggcgctgcctcccgccgcccatctcggcgccctgcgccagcgtatcgagcaggcccagcgactggcgcgccatagcggcgccctgcatgccgcgctgtatttcgacgggcatggcgagctgcgcctgtgtcgcgaggacatcggccgccacaacgccctcgacaagctgatcggcgccctgcatagacagggactggacgctgcgcagggcttcgccgtggtcaccagccgctgcagcctggagcttatccacaaggccgtacgcgccgggatcggcaccctggtcagcctctccgcgccaaccgccctgaccgtgcaatgggcgcgccgccaccagctgaacctgatccaccagccccatcacagtgccccgcgggtctacagcccggcgccggccgcaaccgagtga

SEQ ID NO: 363592 - DNA, 921 bp, Pseudomonas aeruginosa
atggacatcaagcaactgaaattcctctgcgccctcgacgaaacccgccacttcggccaggccgccgcacgctgccacgtcacccagccgaccctgtccatgcgcctgcgcagcctggaggaagaactcggcctggaactggtgcgacgcagccagcgcttcgaaggtttcaccgaggccggcgagcgcgtactggcctgggcacgcagcctgctggcggcccaggaagggctgtacgcggaagccgccgcctgccgcgggcaactggtcgggaccctgcgcctgggcgtggtgccgctggccagcttcgacccgatgcgcctggtccagcacatggccgggcgccacccggagttgcgtttccagctctattccctgagttcggaacaggtactcgaaggcctggcgcgcaaccagttcgatctcggcgtctcttatctggaccgtctggaccgcagccatttcgagggcatcgaactggcggagacccgcatgggcctgctccatcaccccagccatttcccgctcgacgccgcgctgctgaactgggatgcgctggctggcctgccgctgggcctgctctcggcgggcatgcacttccgccaatccatcgaccacaacttccgcagccgcgggctgagccccatcgcgcgcctggaaaccgactcggtgcagcaactgctgcaggcggtgcagcgtggcttgtgctgcgcgatcatgccgttgggcagcgaagtcgacgacgagttgcgcctgatccccatcgaggacgcccataccctggcagcgctcggcctgatcattcgcagcggacagccgcgctcggcgctggccgaagcctgcttcgaggaggcccggacctggctggcgcccgccggcttgatagaccctgtcgatcagggtatcggcacaaccgattag

SEQ ID NO: 363593 - DNA, 438 bp, Pseudomonas aeruginosa
atgggtattttcgcgttcgtgaaggaagccggtgaaaagctgtgggatacgctgacggggcatgaggcacaggcggccgagtcgctgaaggagcacgtcgccaaggtcggactgggcaacccgaacatccaggtttcggtggaaggcgacaaggtcatcgcctcaggcgaggtggccagccaggaggagaaagagaagatcctgctggcgctgggcaacgtcgccggcgtctcctcggtggaagacaagatcaccgtggcccaggccgctccggaggcgcgcttcgtcaccgtgaagaaaggcgacaccctgagcgccatcgccaaggccgaatacggcaatgccaacgcctacatgaagatcttcgaggccaacaagccgatgctcagccatccggacaagatctaccccggccaggtcctgcgcattcccgagtga

SEQ ID NO: 363594 - DNA, 666 bp, Pseudomonas aeruginosa
atgcccaccctgccctggtccgccatcgacaccgtgctgctcgacatggacggcaccctgctcgacctgcacttcgacaaccacttctggctggaacacctgccccagcgctatgccgaacgcaacggcctgagtcgcgccgaagccgacgccgtgctcgagccgctgttccgcgaacacgccggccagctcaactggtactgcctggatttctggagccgggaactggacctgtcgatccgcgaactcaagcacgaggtggcgcacctgatctcgctgcgtccgcacgccgataccttcctcgccgccctgcgccgggccggcaagcgcgtggcgctggtcaccaacgcgcaccgcgactcgctgtcgctgaagctggaacggatcgaactggcgccctatttcgaccgactgatcagctcccacgactacggctacccgaaggaggacgcgcgcttctggagcgccctgcaagccgatttcggcttcgacccgcagcgcagcctgttcatcgacgacagcctgccgatcctgcgcagcgcccgcgcctatggtgtcgcccacctgttggcggtacgccacccggacagccgtggccaggtccgggacaccgaggagttcgctgcccaggaggactaccggcggctgctcgaaggactgccgtag

SEQ ID NO: 363595 - DNA, 567 bp, Pseudomonas aeruginosa
atgcgtcagaaacccaccgtactcgccagcgagatcgtcgcgaagagccgactgttcgctgtcgaggagttgcaactgcgcttcagcaatggcgtcgagcgcacctacgagcgtctggtcggcaagggccagggctacggtgcggtgatggtggtggccatgctcgatgccgagcacgcggtgctggtggaggaatattgcgccggggtcgacgaataccagttgtcgctgcccaagggcctggtcgagccgggcgaggacatcctcgcggcggccaaccgcgaactcaaggaggaagcgggctacggggcccggcaactggagcacatcaccgaactgtcgctgtcgccgggctacatgagccagcgcatccaggtggtgctggcgcgcgatctctacgaggagcgcctgccgggcgacgagccggagccgatgggcgtcgatcgcatcagcctgcgcgaactctcgagcctggcccagcacgcccagttcagcgaaggccgcgccctggccgcgctgtacctggtgcgcgacctgctcacccagcgcggcgagtaccaggcatga

SEQ ID NO: 363596 - DNA, 822 bp, Pseudomonas aeruginosa
atgaggccggtgccctggggcgaattggtggcgctggtgcggcgcgccggcgaggcgatcctgccgcactggcgcgccgacgtggcggtgcgctcgaaggccgacgaatcgccggtgactgccgccgacctggccgcgcaccatatattggaggcggggttgcgggcgctggcgccggacattccggtgctttccgaagaggattgcgagataccgctgagcgagcgcggccactggcggcgttggtggctggtggacccgctggacggcaccaaggagttcatctccggtagcgaggagttcaccgtcaacgtggccctggtcgaggatggccgggtgctgttcggcctggtcggcgtgccggtgagcggccgctgctactacggtggcgccggtctcggtgcctggcgcgaggaggccgatggccgcgcgcaaccgatcagtgtgcgcctggagcccgaggaggccttcaccgtggtggccagcaagcgccatggcagcctggcccaggagcgcctgctggatggcttgagcgagcgcttcggcgacctgcggcgagccagcatcggcagttcgctgaagttctgcctgctggccgagggcgctgccgactgctatccgcgcctgacgccaacctcgcaatgggacacggccgccgcccagggtgtgctggagggcgccggcggcgaggtgctcgacctgcatggcgcgccattcacctacgagccgcgcgaggactacctcaacggctccttcctggccctgccgcgcgccgccgagtggcgcagcgagctgatccaactggcgcgcgcgctgcactga

SEQ ID NO: 363597 - DNA, 1905 bp, Pseudomonas aeruginosa
atgtctcgactaccggtcattgttggtttcggtggctacaacgcagcaggccgtagttccttccaccacggcttccgtcgcatggtcatcgaatcgatggacccgcaggcgcgccaggaaaccctagccggcctggcggtcatgatgaaactggtcaaggccgaaggcggccgctacctggccgaagacggcacgccgctgtccccggaggacatcgagcggcgctacgccgaacgtatcttcgcctctaccctggtgcggcgcatcgaaccgcagtacctcgacccggatgccgtccactggcacaaggtcctcgagctgtcccctgccgaaggccaggcgctgaccttcaaggcctcgcccaagcaattgcccgagccgctgccggccaactggtcgatcgctcccgcggaggatggcgaggtactggtgagcatccacgagcgctgcgagttcaaggtcgacagctaccgtgcgctgacggtgaagtccgctggccagctgcccaccggtttcgaaccgggcgagctgtacaactcgcgcttccacccgcgcggcctgcagatgtcggtggtcgccgcgaccgacgcgatccgctccaccggcatcgactggaagaccatcgtcgacaacgtccagcccgacgagatcgcggtgttctccggcagcatcatgagccagctcgacgacaacggtttcggcggcctgatgcaatcccgcctgaagggccaccgggtctcggccaagcaactgccgctgggcttcaacagcatgcccaccgatttcatcaatgcctacgtgctcggcagcgtcggcatgaccggcagcatcacaggcgcctgcgccaccttcctctacaacctgcagaaggctatcgacgtcatcaccagcggccaggcccgggtggtcatcgtcggcaacagcgaggcgccgatcctgccggagtgcatcgagggctacagcgccatgggcgcactggccaccgaagaaggcctgcgcctgatcgaaggccgcgacgacgtggacttccgccgcgccagccggccgttcggcgagaactgcggcttcaccctggccgagtccagccaatacgtagtgctgatggacgacgaactggccctgcgcctgggcgcggatatccacggcgcggtaaccgacgtgttcatcaacgccgacggtttcaagaagtccatctccgcccccggcccgggcaactacctgacggtagccaaggcggtggccagcgcggtgcagatcgtcggcctggacaccgtgcgccacgccagcttcgtccacgcccacggctccagcacgccggccaaccgggtcaccgaatcggaaatcctcgaccgcgtggccagcgccttcggcatcgacggctggccggtcaccgcggtgaaggcctacgtcggccactccctggccaccgccagcgccgaccagctgatctccgccctgggcacgttcaagtacggcatcctccctgggatcaagaccatcgacaaggtcgccgacgacgtccaccagcagcgcctgagcatctccaatcgcgacatgcgccaggacaagccgctggaggtatgcttcatcaactccaagggcttcggcggcaacaacgccagcggcgtggtgctgtcgccgcgaatcgccgagaagatgctgcgcaagcgccatggccaagcggccttcgccgcctacgtcgagaagcgcgagcagacccgcgccgccgcccgcgcctacgaccagcgcgcgctgcagggcgacctggagatcatctacaacttcggccaggacctgatcgacgagcacgccatcgaggtcagcgccgaacaggtgacggtgcccggcttcagccagccgctggtatacaagaaggacgcgcgtttcagtgacatgctcgactga

SEQ ID NO: 363598 - DNA, 933 bp, Pseudomonas aeruginosa
atgcgtatcgtcgtcgcattgggcggtaatgccctgctacgccgtggcgaacccatgaccgcggacaaccagcgggaaaacgtgcggatcgccgccgaacagatcgccaaggtggcgcccggcaacgagctggtgatcgcccacggcaacggcccccaggtcggcctgctggccctccagggggccgcctacgaccaggtctcgccctacccgctggacgtcctcggcgcggaaaccgagggcatgatcggctacatgatcgaacaggagatgggcaacctgctgccgttcgaagtgccgttcgccaccatcctcacccaggtcgaggtggacggtaaggatccggcgttccagaacccgaccaagccgatcggcccggtctactccagggaagaagccgagcgcctggccgccgagaagggctggagcatcgccccggacggcgacaagttccgccgcgtggtgcccagcccgcggccgaagcggatcttcgagatccgcccggtgaagtggctgctggagaaaggcaccatcgtcatctgcgctggcggcggcggtatcccgaccatgtacgacgaggccgggaagaagctcagcggcgtcgaggcggtgatcgacaaggacctctgctcctcgctgctggcccaggagttggtggccgacatcctgatcatcgccaccgacgtcgacgcggcctacgtcgactggggcaagccgacccagaaggccatcgcccaggcccacccggacgaactggagcgcctcggcttcgccgccggctccatgggaccgaaggtccaggccgccatcgagttcgcccgcgccaccggcaaggacgcggtgatcggttcgctcgcggacatcgtcgcgatcaccaagggcaaggcgggaacacgggtcagcacgcgcaaggcgggcatcgagtaccgctga

SEQ ID NO: 363599 - DNA, 1011 bp, Pseudomonas aeruginosa
atggctttcaacatgcacaaccgtaacctgctcagcctgatgcaccacagcacccgcgagctgcgttacctgctcgacctgtcccgcgatctcaagcgcgccaagtacaccggcaccgagcagcagcacctgcaacgcaagaacatcgccctgatcttcgagaagacctccacccgcacccgctgcgccttcgaggtggccgcctacgaccagggcgccaacgtcacctacatcgacccgaactcctcgcagatcggccacaaggagagcatgaaggacaccgcgcgggtcctcggccggatgtacgacgccatcgagtaccgcggcttcaagcaggaaatcgtcgaggaactcgcgaagttcgccggcgttccggtgttcaacggcctgaccgacgaataccacccgacccagatgctcgccgacgtgctgaccatgcgcgagcacagcgacaagccgctgcacgacatcagctacgcctacctgggcgacgcgcgcaacaacatgggcaactccctgctgctgatcggcgccaagctcggcatggacgtacgcatcgccgcaccgaaggcgctctggccgcacgacgagttcgtcgcccagtgcaagaagttcgccgaggaaagcggcgccaagctgaccctcaccgaggatccgaaggaagccgtgaagggcgtggacttcgtccacaccgacgtctgggtgtcgatgggcgagccggtggaagcctggggcgagcggatcaaggaactgctgccctaccaggtcaacatggagatcatgaaggccaccggcaacccgcgggccaagttcatgcactgcctgccggcgttccacaacagcgagaccaaggtcggcaagcagatcgccgagcagtatccgaacctggccaacggcatcgaggtgaccgaggacgtcttcgagtcgccctacaacatcgccttcgagcaggccgagaaccgcatgcacaccatcaaggcgatcctcgtctcgaccctcgccgacatctga

SEQ ID NO: 363600 - DNA, 1257 bp, Pseudomonas aeruginosa
atgagcacggaaaaaaccaaacttggcgtccactccgaagccggcaaactgcgcaaagtgatggtctgctcgcccggactcgcccaccagcgcctgaccccgagcaactgcgacgagttgctgttcgacgacgtgatctgggtgaaccaggccaagcgcgaccacttcgacttcgtcaccaagatgcgcgagcgcggcatcgacgtcctcgagatgcacaacctgctgaccgagaccatccagaacccggaagcgctgaagtggatcctcgatcgcaagatcaccgccgacagcgtcggcctgggcctgaccagcgagctgcgctcctggctggagagcctggagccgcgcaagctggccgagtacctgatcggcggcgtcgccgctgacgacctgcccgccagcgaaggcgccgacatcctcaagatgtaccgcgagtacctgggccattccagcttcctgctgccgccgttgccgaacacccagttcacccgtgacaccacgtgctggatctacggcggcgtgaccctgaacccgatgtactggccggcgcgacgacaggaaaccctgctgaccaccgccatctacaagttccaccccgagttcgccaacgccgaattcgagatctggtacggcgacccggacaaggaccacggctcctcgaccctggaaggcggcgacgtgatgccaatcggtaacggcgtggtcctgatcggcatgggcgagcgctcctcgcgccaggccatcggtcaggtcgcccagtcgctgttcgccaagggcgccgccgagcgggtgatcgtcgccggcctgccgaagtcccgcgccgcgatgcacctggacaccgtgttcagcttctgcgaccgcgacctggtcacggtcttcccggaagtggtcaaggaaatcgtgcccttcagcctgcgccccgatccgagcagcccctacggcatgaacatccgtcgcgaggagaaaaccttcctcgaagtggtcgccgaatccctcggcctgaagaaactgcgcgtggtcgagaccggcggcaacagcttcgccgccgagcgcgagcaatgggacgacggtaacaacgtggtctgcctggagccgggcgtggtagtcggctacgaccgcaacacctacaccaacaccctgctgcgcaaggccggcgtcgaggtcatcaccatcagcgccagcgaactgggtcgcggtcgcggcggcggccactgcatgacctgcccgatcatccgcgacccgatcgactactga

SEQ ID NO: 363601 - DNA, 1449 bp, Pseudomonas aeruginosa
atgtcccaagaatccagccaaaaactccgactaggagcgctaacggctctggttgtcggctcgatgatcggagggggcatcttctcccttccgcaaaacatggcagccagcgccgacgtcggcgccgtcctgatcggatgggcgatcaccgccgtcggcatgctcaccctcgctttcgtcttccagaccctcgccaaccgcaagcccgaactcgacggcggcgtgtacgcctacgccaaggccggcttcggcgactacatgggtttctcctcggcctggggctactggatcagcgcctggctgggcaacgtcggctacttcgtcctgttgttcagcaccctcggctacttcttcccgatcttcggcaagggcgacaccgtcgcggcgatcgtctgcgcctcggtcctgctctgggccctgcacttcctggtgctgcgcgggatcaaggaggcggcgttcatcaacaccgtcaccaccgtggccaaggtcgtgccgctgttcctgttcatcctgatctgcctgttcgccttcaagctggacatcttcaccgccgacatctggggcaagagcaacccggacctgggcagcgtgatgaaccaggtgcgcaacatgatgctggtcaccgtctgggtgttcatcggcatcgagggcgcgagcatcttctcctcccgcgcggaaaaacgttccgacgtcggcaaggccaccgtgatcggcttcatcaccgtcctgctcctgctggtgctggtcaacgtgctgtccatgggcgtgatgacccagccggaactggccaagctgcagaacccgtcgatggcgctggtactcgagcatgtggtcggccactggggcgccgtgctgatcagcgtcggcctgctgatctcgctgctgggcgcgctgctctcctgggtgctgctgtgcgccgagatcatgttcgccgcggccaaggaccacaccatgccggagttcctgcgccgcgagaacgccaaccaggtgccggccaacgccctgtggctgaccaacatctgcgtacaggtgttcctggtggtggtgttcttcacctcgggcgacccggacggcatggacccgtacaccaagatgctgctcctggccacctcgatgatcctgatcccgtacttctggtccgccgcctatggcctgctgttgaccctgaagggcgagacctacgagaacgatgcccgcgaacgcagcaaggacctggtcatcgccggcatcgctgtggtctacgcggtctggctgctctacgccggtggcctgaagtacctgctgctgtccgccctgctgtatgcgcccggcgcgatcctcttcgccaaggccaagcacgaggtcggccagccgatcttcaccggaatcgaaaaactgatcttcgccgcagtcgtcattggcgccctggtggctgcctacggcctctacgacggtttcctcaccctctga

SEQ ID NO: 363602 - DNA, 1284 bp, Pseudomonas aeruginosa
atgaccattctgttcctcttcctgctgctcttcctgctgatgttcatcggcgtgccgatcgccgtctccctgggtctctccggcgcactgacgatcctcctgttcagcccggactcggtacgctcgctggcgatcaagctgttcgagacctccgagcactacaccctgctggcgatcccgttcttcctgctctccggcgcgttcatgaccaccggtggcgtggcgcggcgcctgatcgacttcgccaacgcctgcgtcggacacatccgtggcggcctggcgatcgccgcggtgctcgcctgcatgctcttcgccgcgctatccggctcgtctccggcaacggtggcggcagtgggttcgatcgccatcgccggcatggtccgctcgggttatccacaggcgttcggcgctgggatcgtctgcaacgccggcaccctcggcatcctcatcccgccatcgatcgtgatggtggtctacgccgccgccaccgagacctcggtgggcaagctgttcatcgccggcgtggttccggggctgctgctgggactgatcctgatggtggtgatctacatcgtcgcccgggtcaagaagctgcccgccatgccaagggtcagtctgcgcgaatggctggccagcgcgcgcaaggcgctgtgggggctgctgctgatggtgatcatcctcggcggcatctattccggcgccttcacccccaccgaggccgccgccgtcgccgcggtgtactcggccttcgtcgcactgttcgtctaccgcgacatgcgcctgagcgaatgcccgaaggtgctgctggagtccggcaagctgaccatcatgctgatgttcatcatcgccaacgccatgctcttcgcccacgtgctgaccaccgagcagataccgcagagcatcgccagctgggtcacggaactgggactttcgccatggatgttcctgctggtggtgaacatcgtgctgctgatcgccggcaacttcatggagccttcggcgatcatcctgatcctggcgccgatcttcttccccatcgccatggagctgggcatcgatccgatccacctcggcatcatcatggtggtgaacatggagatcggcctgatcacgccgccggtcgggctcaacctgttcgtcacctcggcggtcaccggcatgccgctgggcgcgaccatccgcgcagcgctgccgtggctgatgatcctgctggtgttcctgatcatcgtgacctacatcccggcggtatccctggcattgccgaactggctggggatgagctga

SEQ ID NO: 363603 - DNA, 633 bp, Pseudomonas aeruginosa
atgcacgcgctcgcgcgcgtctgggcgcgcctggaggaaggcctgatcgccttcctcctcgccgccatgacgctggttaccttcgtttatgtagtcctcaataacctctatacgctgctctacgatctcgccgatctctgggagggcggcaacgagacgctgctcgccatcggcgatggggtcctcaccctggcccaggagatgacctggagcaacgccctgaccaaggccctgttcgcctggctgatcttcctcggcatcgcctacggcgtacgcaccgccgggcacctcggtgtggacgtgctggtgaagctggcctcgcgaccggtacagcgagtgctcggcgtgatcgcctgcctggcctgcctcggctacgccggcctgctctgcgtggccagctacgactgggtgaagaccctgttcatcgccggcatcggcgccgaggacctcgaccacttcggcatccgccaatggcacatcggcctgatcgtgccggtcggcttcgccctggtgttcatccgtttcgccgagatcctcgtgcgcatcctgcgcaaccgccagaccggactgggactggccgacgaggctgccgacgcgctgaagctgaccgagcacgaggagcccaaggcatga

SEQ ID NO: 363604 - DNA, 996 bp, Pseudomonas aeruginosa
atgctcaagcacaccgcgaaggcgctcgtctgcgcactttccctgaccgtcgccggaatcgtccaggcagccgacccgatcgtcatcaagttctcccacgtcgtcgccgagcacacgcccaagggccagggcgcgctgctgttcaagaaactggtggaggaacgcctgccgggcaaggtcaaggtggaggtctacccgaactcgtcgctgttcggcgacggcaaggagatggaagccctgctgctgggcgacgtgcagatcatcgcgccgtcgctggccaagttcgagcagtacaccaagaaattgcagatcttcgacctgccgttcctgttcgacaacatccaggcggtcgaccgcttccagcagagcccgcagggcaaggagctgctgacctcgatgcaggacaagggcatcactggcctcggctactggcacaacgggatgaagcagttgtccgccaacaagcccctgcgcgagccgaaggacgcccgcggcctgaagttccgcgtgcaggcctccaaggtgctcgaggaacagttcaaggcggtgcgcgccaacccgcgcaagatgagcttcgccgaggtctaccagggcctgcagaccggcgtggtcaacggtaccgagaacccctggtcgaacatctactcgcagaagatgcacgaagtgcagaagtacatcaccgagtccgaccacggcgtgctggactacatggtgatcaccaacaccaagttctggaacggcctgccggaagacgtgcgcggcgtgctggccaagaccatggacgaggtcaccgtggaggtgaacaagcaggccgaggcgctcaaccagggcgacaagcagcgcatcgtcgaggccaagaccagcgagatcatcgaactcactcccgaacagcgggccgaatggcgcaaggccatgcagccggtgtggaagaagttcgaaggcgagatcggcgccgacctgatcaaggccgccgaagccgccaaccaggcccaataa

SEQ ID NO: 363605 - DNA, 1389 bp, Pseudomonas aeruginosa
atgagtcccttcgcgccattcgatgcccagacccaggtcctgctgatcgacgacgatccgcacctgcgccaggccctgcgccagacgctcgacctcgccgggctcaaggtcgcgaccctggacgacgcgcgccagttggataccgcgcagtgcaaggactggcccggggtggtggtcagcgacatccgcatgcccggcatcgatggcatggaactgctccgccagttgcacgaacaggacgccgacctgccggtgatcctgatcaccggccacggcgacgtgccgctggcggtccaggccatgcgcggcggcgcctatgacttcctggaaaagcccttccccagcgacgccctgctcgacagcgtgcgccgcgccctggaggtgcgccggctggtcctggagaaccgcaccctgcgcctggccctggccgaacgccacgagctgcatgggcgcctgatcggacgctcggccggcatgcagcgcctgcgcgagcaggtcggctcgctggcggcgatccaggccgacgtgctggtccttggcgaaaccggcgccggcaaggaggtggtcgcgcgggccctgcatgacctgtcgagccgacgcgacggaccgttcgtcgcgatcaacgccggcgccctcgccgaatcggtggtggaaagcgaactgttcggtcacgaggccggcgccttcaccggcgcgcagaagcgccgcatcggcaagttcgagtacgccaatggcggcaccctgttcctcgacgagatcgagagcatgagcctggacgtgcaggtcaagctgttgcgcctgctgcaggaacgggtagtcgagcggctcggctccaaccagttgatcccgctggatatccgcatcatcgcggcaaccaaggaagacctgcgccaggccgccgaccagggccgcttccgcgccgacctctattaccgcctcaacgtcgccagcctgcgcattccaccgctgcgcgagcgcggcgaagacatcccgctgctgttccgccatttcgccgaagccggcgccatgcgtcatggcctgacgccacgcgaactggacgccggccagtcggcgcggctgctggcctacgactggccgggcaacgtgcgcgaattgcagaacgccgccgagcgcttcgccctgggtctcggcctgagcctggacgacggagtcctgcccgacgccgccgacgagccgcacaacctcagcgccaaggtcgaggccttcgagcgctcgctgatcgctgccgaactggaacgcccgcacaattcgctgcgcagcgtcgccgaggccctcggtatcccgcgcaagaccctgcacgacaagctgcgcaagcacggcctgccgttcaacacgcctggcgaaaatccgccagatgatggcgaatga

SEQ ID NO: 363606 - DNA, 1800 bp, Pseudomonas aeruginosa
ttgaaagcctatttccatcgctggcgctcgctggtcatcctcgccctgcttctcgcgccgctgctctggcccctgcaatatttcgccgagcgctactacagcgagcagttggccgagcagaaccgccagacgctcgacctctacgtcgccaacctgctcggcacgctgcgccgctacgaagaactgccgcagatcctcggcggcctgccggtgctgcgccaggccctgcaacaacctggcgacccgctgctgcagaagatcgccaacgaggcgctggccgacatccgccgacgcaccggcgccgacgtgatctacctgctgcaaccggacggcaccacccaggtcgcctccaactgggcccaggcggacagtttcgtccaccgcaacttcgccttccgcccctattatcgcgaggccatgcagggccgcctggcgcgcttcttcggcctgggcaccacctcgatcaagcgcggctactacttcgccagtgcggtgaaggaaggctcgcggatcatcggcgtgctggtggtgaaggtcgatctcgaacacatcgaacggctctggggcaattccccggagcaactgctggtgatagacaactacggcgtggtgatcctctcctcccgcgaggattggcgcttccatgccagtcggccgctgagcgcggcggagcgcgacgagatccacgccaacatcccctacccggtgcaggacccgaagcccctgcgcctgcaacagagcgcctggctcagccagagccggacgctgccggaaaccggctggacggtgagcatctacgccccccgcaccctcatcgaacggccggtgcgcagcgtcctgctgatcggcggcgcgaccctgctcgccctgctcctgctgcttaccctgctgaccctcagccgccgtcactacctggaccgcatcgctctcgaggccgaggccaagcgccagttggaagagcgcgtactggaacgcacccgcgagctggagaacgccaacgcgcagttgcagcaggaagtccacgaacgcgagcaggcccagcgcgagctgatgcgcgcccaggacgaagtggtccaggccggcaagctcacggccctcggcaccatgtcggcgagcatcagccacgaactcaaccagccgctggcggcgatccgcagctacgccgacaacgcccgggtgctgctcgaccaccagcgcaccgaggacgcccgcggcaatctcgagcagatcagcgacctcaccacccgcatggcctcgatcatcgcccacctcaaggcctatgcccgcggtgcgcgccgggcgccggagaacgtgcagttgcagccggcgatcgaggacgccctgtcgatggtggccagccggcggcgggcgatgaacgtcgaactgctgcgcgacgtgccggacgccccgctgtgggtccaggccggcgagacccgcttgcggcagatcctcggcaacctgctcaccaatgccctcgacgcgctcgccgagaaagctccgccgcggcgcctgtgggtaatcgccagccaggaccagcacggcgtgaccctgaccctgcgcgacaacggcccggggttttccgaggacgccctggcccacgcccacgaaccctttttcaccaccaagaccaccgccaaagggctcggcctcggcctggccatctgcgataacctattgcgcgccctcggcggccgcctggaaatgggcaaccatctcgaaggcggcgccgtggtgcgcctgcacttgctgccgggagttcccggcgtcgccgccatgccccaggaggaaacccgcgcatga

SEQ ID NO: 363607 - DNA, 546 bp, Pseudomonas aeruginosa
atgaaagcgacccgcctggcaattcccgacgtcatcctcttcgaaccccgggtgttcggcgacgatcgcggattcttcttcgaaagctacaaccagcgcgccttcgaggaagcctgcggtcatccggtcagcttcgtccaggacaaccattcgcgttccgcccgtggcgtcctccgcggcctgcactaccagatccggcaagcccagggaaaactggtgcgcgccactctcggcgaggtattcgacgtggccgtcgacctgcgtcgcggctcgccgaccttcggccagtgggtaggcgaacgcctgagcgcggagaacaagcgccagatgtggattccggccggcttcgcgcacggcttcgtggtgctcagcgaatacgccgagttcctctacaagaccaccgacttctgggcgccggaacacgaacgctgcatcgtctggaacgatcccgagctgaagatcgactggccgctgcaggatgcccccctgctttcggagaaggaccgccagggcaaggcattcgccgacgccgactgcttcccctga

SEQ ID NO: 363608 - DNA, 882 bp, Pseudomonas aeruginosa
atgaaacgcaagggcatcatcctcgccggaggctcgggcacccgcctgcacccggcaacgctggccatctccaagcagttgctgccggtgtacgacaagccgatgatctactacccgctcagtaccctgatgctggcgggcatccgcgagatactgatcatctcgaccccacaggacaccccacgcttccagcagttgctgggcgacggttcgaactggggcctggacctgcaatatgccgtgcaaccgtcgccggacggcctggcccaggccttcctgatcggcgagtcgttcatcggcaacgacctcagcgcgctggtcctgggcgacaacctctattacggccacgacttccacgagttgctcggcagcgcttcgcagcgccagaccggcgccagtgtcttcgcctaccacgtgctggacccggagcgctacggcgtggtcgagttcgaccagggcggcaaggccatcagcctggaagagaagccactggagccaaagtcgaactacgcggtcaccggcctgtatttctacgaccagcaggtggtggacatcgccaggaacctgaagccttcgccgcgcggcgagctggagatcaccgacgtcaaccgcgcctacctggagcgcggccagctcagcgtggagatcatgggccgcggctacgcctggctggataccggcacccacgattcgctgctcgaggccggccagttcatcgccaccctggagaaccgccagggtctcaaggtggcctgcccggaagagatcgcctaccggcagaagtggatcgacgccgcgcaactggaaaaactcgccgcgccgctggccaagaacggctacggccaatacctcaagcgcctgctgaccgagaccgtgtactga

SEQ ID NO: 363609 - DNA, 909 bp, Pseudomonas aeruginosa
atgaaccggatccttctcctcggcgccaacggccaggtcggctgggagctgcagcgcgccctggcgccgctgggcgaactgctggtctgtgaccgccggcgcgccgatctcgccgaccccgaaggcctggcgcgactggttcgcgccgagcggccgcagttcatcgtcaacgccggtgcctacaccgcggtggacaaggccgagagcgatgccgacaacgcccgcctgatcaatgcccgcgccgtcgcggtactggccgaggaggccgcggcctgcggcgcctggctggtgcattactccaccgactacgtgttcgacggcgcgggcagcgcgcctttcgccgaggacgcgccgaccggcccgctgagcgtctacggacagaccaagctggaaggcgagcaggccatccgcgccagcggctgccgccacctgatcttccgcaccagctgggtctacgccgcgcgcggcggaaacttcgccaagaccatgctgcgcctggccgggcaacgcgacgaactcaaggtcgtggccgaccagttcggcgcgcccaccagcgccgagctgatcgccgacgtcaccgcccaggccctgcagcgcctgcgctgggatgtcgagctggcagcacgggccagcggcacctaccacctggtcgccagcggcgagacgtcctggcacctctatgcgcgcttcgtcatcgaacaggcgctggagcggggctgggagttgcaggcgacgccgcagcgggtcctgccgatcgccaccgaggactacccggtgccggcgaagcgtccggccaattcgcgcctcgacaaccgcaagctgcaacaggtcttcggcctggtactgccagactggcgctaccatgccggacgcatgatccaggaactgagcgagcagggaccactatga

SEQ ID NO: 363610 - DNA, 1059 bp, Pseudomonas aeruginosa
atgacgattctcgtgaccggcagcgccggcttcatcggcgccaatttcgtgctcgactggctggccctgcatgacgagccggtggtcagcctcgacaagctcacctacgccggcaaccggcagaacctcgccagcctcgacggcgacgcccggcacaccttcgtcgccggcgatatcggcgatagccagctggtagcccgcctgctcgccgagcaccagccgcgggcgatcctcaacttcgccgcggaatcccatgtggaccgctcgatccacggccccgaggacttcatccagaccaacatcgtcggcaccttccgcctgctggaagaagtgcgcgcctactggggcgcgctggagccggaagcgaaggcggcattccgcttcctccacgtctccaccgacgaagtctatggctcgctggcaccgagcgatccggccttcaccgagaacaaccgctacgagccgaacagtccctactcggcgtccaaggcggcctccgaccacctggtgcgggcctatcaccacacctatgggctgccggtgctgaccaccaactgctcgaacaactacggcccctaccacttcccggaaaagctcatcccgctggtgatccacaacgccctggccggcaagccgctgccgatctacggcgacggccagcagatccgcgactggctctacgtcaaggaccattgcagcgccatccgccgggtcctcgaagccgggcaactgggcgagacctacaatgtcggcggctggaacgaaaaggccaacctcgacgtggtcgagaccctctgcgccatcctcgaccaggagcagccgcgcgccgacggccgcagctatcgcgagcagatcaccttcgtcaaggatcgtccgggccatgatcgccgctacgccatcgatgccacgcgcctggagcgcgagctgggctggaagccggcggaaaccttcgagaccggcatccgcaagaccgtgcgctggtacctggacaaccaggactgggtggccaacgtaaccagcggtgcctaccgcgagtgggtgggtaagcagtacgcatga

SEQ ID NO: 363611 - DNA, 915 bp, Pseudomonas aeruginosa
atggccctagagcttgaccatactcagtccctaattttgccgcgagcaattgccaggccagatttattttatagattcttttcgatcccaaagagaactgggggattgagaaaaatccgggctccttaccctgcccttgcatctatccaaaaaagaatactagattgtctgctggcagaaaaacatgtgcatcacctttcgtttgcatatgttaaaaacaagtccgctatagacaacgcaaaagtccatttaacaagcaaggaaattctgaaattagacattcaggattatttccctagcattgatagtcaaatggtaattgaagcacttatgcggaatggatttagctccgcaacagctttctatatttccagactttgcactgtagatggcgctctgcctcaaggtgcatgcaccagccctatcttaagcaatctagtattcaaccccatagacaataggctagccaaattggctgagcgcctaaatttacgatattctcgttatgcagatgacatcgtaatttctggcgaaagagttcctagaaaccttataaatctaattaggaaaattctgattgagcgaagattttctctcaatgaaaaaaaatgccaactaaagctttccggatcaaagaaaatcattaccggagtttcaatctcatctggagtgatgaaagcgccaaaggcatttaaaagagagctaagatcgcaaatcttcgcacttgaaaaatattctggcgacttatctaagctaagagagtttgatcctcttttcttcgaaagggttgtaggaagattaaactatcttttacagatagagccctacaacgaatacgcgagaaaaaagaaagccactatctgctcttaccatcaaaaattattgggcctgcaccctatagcacagccacaatag

SEQ ID NO: 363612 - DNA, 852 bp, Pseudomonas aeruginosa
atgctgacaaccaacaaaatcccttatgagtttctgcatgatatgcttgatatatttgagcatcaatcgtggactaaagagctaactcacgaactgaccgatttatggaatttgtgcgagaagcgcgaagagcaagaactgctgaaatccctgattaaagatttttgcatcttcgacgccaagatggaaaagcaagctcaaatagcaattgatgacaaagtacaagaactgggattaagacctaaatctacatggattgttggtgccgctaatagatctgaaattgacggatcttcggcagcgcttcaaagactaaaaaacaaaattgaaccatgcgaagaatggcattctcgctttctcccaaacatcccagaagcggttgaaaaagtaaaggaagggcaaacagtcatactgttcgacgactttatcggcagcggtaaaaaaatggttgacaaaggcgcatggcttcgcaaacttctcgccacgaaagaagtaaacgaattcaagatgatttatatgtctctctcagctatgaaatttgggcttgaccgaatagttaaagacacagggtgcgaggcattcgctcataatattttacagaaagccatctccgaaaaacatccacccgcacaagctgcagttctcattgagaccatgagaaaaattgagtccagacttgacgagacctatagacaaaaatctatcaaagagtactcattagggtttggtgaaagcgaagctttgtattgtgctgaaaacgacaactgcccaaacaacgtttttccggttttttggtggccccgtttaaagagtggagctccatttaaaaccattttaagacgagccggatag

SEQ ID NO: 363613 - DNA, 1470 bp, Pseudomonas aeruginosa
gtgattttctcggaagtcgccaatgccctggcccagacgattattcacttggagaccgaagagaccaacaccacagttagtgaaaattttcgaatctccaactttagtctagacaccactgcgcttgccgagtccctaaaaagcgtacatatccgggatagcttttccatccagttcacttacgccggtagtgatcaatcgatagtgctgacgggccgccacaacgatcaggtaactactttctgccggatgttaaatctgcacattgatggcgataatacagcgtcggggatcttatccatatccatcaccaaagactttgtttcgcaaacggcctcaatctactcgctccatcatatagaggaatattggcggttgggtgggctaggccaagcagctgcgaaactcagatccctcgctcaagtagcctatatcctcgagtcgcctaaaatcaccgagtgcgcacggtgtggcctgtttgtgttccgttcgatgagtgactctgccgcaaccaccacgcatcctgaatctgcggacaagagcaagctcctggcttcccgcgacaaggcgtgtttattctacgaaagcaagtcctatcctttcattccccaggactttgatttcaccacccctctagctcatgtggggattacaaacctatttgatactctcaagctcgctttcgctatcattttcatagctgacgttagcagcttgagcgagcagaagttaacggcaacaattaaaggctacaggcacataactggcacgataaagctaacaggcacgtctgacgacaagatagcggctacttattacgaaatatatttgtggacctacagtgaaggcggcgtgaccgataaactcggcattgccaaaaatttactatccattcacattgaaaaaaacgatttgcgcgacatgcgtagcggcgcgctgcaagcgatggtttcaaatcacagcatctatttgagagaaaacgtaaaacaatatattgaaattaagaataagctatccgaacaaatccagaaacaatctgaaaaagcaagcgaaatggtgaaatccatcggtagctacctgaggacttctgtctttacagtttactctttcatcgttaccacattcataattagatccttatctaaacctgctgcagaaggaatatttacgactggaatttactatatttttttgatgtttctctttctgtcgctggggactctcttctatgcttacagggaatctgaggcagaacttgatcgattcaaggcaatatatcagtcatttaagacgcgctatgatgacctcctgtcaaatagcgatagagatcgaattttacagaacgatactgacttcaagcgtgactgcgactatatcatccagtcgcgtaaacgtgctttgattctctgggcttctacacttggcgctgtattcttatttgtttcgataatcaagctgctcaactactag

SEQ ID NO: 363614 - DNA, 1107 bp, Pseudomonas aeruginosa; identical to SEQ ID NO: 348701

SEQ ID NO: 363615 - DNA, 981 bp, Pseudomonas aeruginosa
atggcattggtgggtagacgcgatggccgtaatttcggctacggcaggcaattgagctacgcaggtccgcaggcgctgaaagacatgttcggcggaggccactacggcacggtcaaggcacactgtgatcggtggcaggcattcgtcaaatggtgccgttccgaacaggggcctggcattaatgatgcgcggcagattgatcgaaaagtgttggccgactatgcggcgtatctgcgcgacgtggttagccacggtgatctcgccgtcaacaccgcacaaaaccggctatccagcgttaataggacagtggcggcgctgcgcggtgatcagtgtgtgaaattgcccagtccgagcaaggcgttgggaatgcagcgccccggggttcgccgctcggtgccgcagggccaagaccgcgatcaggttaaagagatcgtcaatgcgctttgccgaaatcatcagcaacgggcggccgcgattgtcctgttggcgcgagccaccggcatgcgcttgcgtgaggctatcttgactgacctgccacggttgagccgtgaggctaacgccataggcaggattaatattcaggacggcacgaaagttggtcgcaacggagcgtcggcgccacgctggattgcggtggacgaccatattcgaggtgcacttgggtttgcacggcaggtgtcgcctgcggggagccgcaacctgattgcaccagacgaaagctacctgaatcttttgcaaaaaatcatccgcccgacgcgggacatcctgcatggccacaacctcaaaggcttccacgaactgcgagcggcctacgcttgtgagcgctatcagcaaatcactcatcaccgcgcgcctgtcaacggcgaccaatgttgccaggtagataggaaccttgatcgtgaggcccggtggcaaatcagctgcgagctagggcacggacgcatcgacgtggtcgccgcctacattggtggccgggcatga

SEQ ID NO: 363616 - DNA, 1179 bp, Pseudomonas aeruginosa
gtgaaacccgatggccgcgaaggcctgaccgccctcgacagctatccggtggtcaggctgggcgacgcacgccgcaagcgcttcgagatcaagcagcagctcgccaacggcatagatcccatccactccaagcaacaagccaagactcaggccgtgatcaacggtcgcaccttcgaaagcgttatgctcgactggcacgcgagcatggtacccaggtgggcgcccggccacgccaagactgtactcagccggttgaagactcacgtattccctttgctcggtgccagagcaatcgttgagttggacacccacgacctcatgcagccactggaggccgtgacgaagcgcggcaccatcgacgtggcgctcaggatcaagaactacctgcaaagcatcatgcgcgaagccaaacggctgcggctgatcacggcgaacccggctcatgacctcgatggctcgatcaagacaccacgggtaactcaccgacccgcactacccctatcgcgactcccagagctattggcatgcatcgaggactacagaggtcgcccgctcacgcgcctcacggtgatgctgtcgttgcatgtattcgtacgctccagcgaactgcgcttcgcccgttggaacgagttcgacctcaagcgcggaatctgggaaatccccgatacccgcccggcgctggacggagtgcccttctccacaaggggtacgaagatggccgatgacatccatgttgtacccttatcgccacaggctgtgaccttgcttgagcagatccacacgatcaccggcaagttcgacctggtgtttgcgggggatgccaaaccgtggaagccaatgtccgagaacacggtgagtgcggcactcaggacgatgggttacgacaccaaggtggatatctgcggccacgggttccgagccatggcgtgcagtgcgctggtcgagtccgggttgtggtcagagacggctatcgagcggcagatgagccacaaggaacacaacaacgtgcgcgccgcttatccccacaaggccgagttcctcgaagaacgccggatgatcatgacctggtggagccggtttctggaggcgaaccgcgaggaccatgtgacgccgcatgagtttgccaagcaaacgggcgagaacgtcacgcgccttcgcagtgccaagaggaccgagtaa

SEQ ID NO: 363617 - DNA, 141 bp, Pseudomonas aeruginosa; identical to SEQ ID NO: 339930

SEQ ID NO: 363618 - DNA, 1530 bp, Pseudomonas aeruginosa
atgagcgaaagcagcagcttctccccgcccagcctggtgatggcgaccatcggcctgtccctggcgactttcatgcaggtgctcgacaccaccatcgccaacgtcgccctgccgaccatctccggtaacctcggggtgagttcggaacagggcacctgggtgatcacctcgttcgccgtgagcaacgccatcgccctgccgctgaccggctggctggcccggcgggtcggcgaggtgcgcctgttcatcgccgccgcgctgctgttcgtactcgcctcgttcctctgcggcatcgcccagtcgatgccttctctggtcggcttccgcgccttgcagggcttcgtcgccgggccgctgtatccgatcacccagaccctgctgatctccatctacccaccggcgaagcgcggcatggcactggccctgctggcgatggtcacggtggtagcgccgatcgccgggccgatcctcggcggctggatcaccgacgactacagctggccgtggatcttcttcatcaacgtgccggtcggcctgttcgccgccttcgtcgtctaccagcaactgaaggcacgcccggtggtgatcaagaaggcgccgatggactacgtcggcctgatcgccctggtgatcggcgtcggcgccctgcagatcgtcctcgacaagggcaacgacctggactggttcgagtcgaacttcatcgtcggcggcgcgctgatcgcggcgatcgccctggccttcttcatcatctgggaattcaccgaccgccatccgatcgtcaacctgcgcctgttcgcccaccgcaacttcgccgccggcaccctggcgctggtgctgggctatgccgcgttcttcggcatcaacctgctgctcccgcaatggctacagacccagatgggctacaccgccacctgggccgggctggccgccgcgccaatcggcatcctcccggtgttcctctcgccgctggtcggccgctacgccaaccatttcgacctgcgcatgctcgccggcctgtcgttcctggcgatggccatcacctgcttcatgcgcgccaacttcaccaccgaggtcgactaccagcacatcgccatcgtgcagttgattatggggctcggcgtggcgttcttcttcatgccgatcctgagcatcctgctctccgacctgccccccgaccagatcgccgacggctccggcctggccaccttcctgcgcaccctcggcggcagcttcgccgcctcgctgaccacctggatctggaaccgccgcgccacccagcaccacgcctacctcagcgaaaacatcagcctctacgacccggccacccacgaaaccctcgcccagctcggcggcaacacccaggcgaacgcggcgctgctcgaccggatggtgcagagccaggcctacatgatgtccaccatcgactacttcaccatgctcggctggctgttcctcgccctgctggtgatcatctggctggcccgcccgccgttcggcgccaagcccggcgcggccgcctccgggcactga

SEQ ID NO: 363619 - DNA, 1185 bp, Pseudomonas aeruginosa
atgactaccgccaacagcgaaacccccgccggcaacccgaagcgcaagcgctggttgctgatcctgctcgccgtgatcgtcctcgccaccctggccagcgtggcctgggagttcttctacggccgctggcacgaggacaccgacgacgcctacatcaacggcaacgtggtacagatcaccccgcagatcgtcggcaccgtggtcagcatcggcgccgacgacggcgacctggtgcgcaagggccaggaactggtcaggttcgatcccagcgacgccgacatcgccctccaacgcgccgaggccaacctggcccacaccgtgcgccaggtgcgcgggctgttcagcaacgtcgacggctatcgcgccgaggtcgccacccgcaaggtcgcgctggccaaggccgaggccgactacaagcggcgcaagaacctcgcagacgacggcgccatttcccaagaggaactggcccacgcccgcgacgccctggacagcgcgaaagcctcgctgaccagctcggaacagcagttgaacaccaatcgcgcgctggtcgacgacacccagatcacctcccatccggacgtcaaggccgccgccgcgcaactgcgccaggcctacctggacgacgcccgctcgaccatcgtcgcgccggtcaccggctacgtcgccaagcgcagcgtacaggtcggccagcgcgtgcaaccgggcactgcgctgatggccgtggtcccgctggaccagatctggatcgacgccaacttcaaggaaacccagctcaagcacatgcgtatcggccagccggtggagatccgctccgacctctacggcagcgacgtgcgctacagcggcaccgtcgacagcctcggcgtgggaaccggcagcgcgttctccctgctgccggcgcagaacgccaccggcaactggatcaagatcgtccagcgggtgccggtgcgcatccatatcgatccgcaagaattgcagaagcatccgctgcgcatcggcctgtcgatggacgtcaaggtcgacctgcacgaccagagcggcccggccctggcccagcagccaccgcgcgaagcgctgttctccaccgatgtctaccagcagcaactggcctcggccgacaagctgatcgaacgcctgatcgaagccaacctcgccgaagaccacggcaagaccgcccagcgttga

SEQ ID NO: 363620 - DNA, 1479 bp, Pseudomonas aeruginosa
atgccgttccctcttctccatccctggccgcagcgattggcgctggcctcggcgatactgctggccgccggctgcgtcacttccgaaggcctggaaccgaacgcccaactgcaaccggcaggcgccctccaggcgggcaggagcctggacggcgtagccctttcgccagcggcctggccgcgccaggactggtggaccgggctcggcgaccggcagctcgaccaactgatcggcgaagccctgcaaggcacccccgacctgcagatcgccgaggcgcgtgcgcgccaggcggcggcaacggcccaggcgcaagatgccgcgcgccagccgacgctggacgccaaggccagctactccggcatccgcgcgccgaccagcgtggccccggcaccgctcggcggccgctattcggcgatcaagtacctgtcgctcggcttcaactacgacttcgacctctggggcggcgagcgcgccgcctgggaagccgccctcggccaggccaatgccgcccggatcgacagccaggccgcgcgcatcggcctctcggcgagcatcgcccgcgcctacagcgacctcgcccacgcctttaccgtgcgcgatctcgccgaggaagaactgaagcgctcgcagcgcatgaccgagctgagccagaagcgcatgagcgccggactcgacagcaaggtccagctgcaacagacgcagacccagctggccaccgcccgccagcagctcagcgccgccgagcaggacatcgccagcgcccgcatcgccctcgccgtgctgctgggcaaggggcccgatcgcggtctcgaactgcagcgcccgcaaccgctgaacccggccagcctgagcttgccctcggtgctcccggcggagctgctcggccgccgcgccgacatcgttgccgcgcgctggcgggtcgaggcggcgcgccgcaacatcgactcggcaaagaccgagttctatcccaacctcaatctcggcgcgatggccggcctcgccgccctgcacaccagcgacgtgttgcaggcgccgagccgcttcttccaggtggcgccggcgatctccctgccgatcttcgacggtggccgccgccgcgccaacctggccgaacgcgacgccgactacgacctggccgtcggccagtacaacaagacgctggtccaggccctcggcgaggtcagcaataacctcggcaagttgcgctccctggagcagcaggtgatcgaccagcgccaggcccgcgatatcgccaggtccaacttcgacctggccatgcgtcgctacggcgaaggcgtcggcagctacctcgacgccctcagcgtgcaacagcaactgctggtcgccgaacgccagctggccagcctggagagccagcagatcgatctttccgtccagttggtccaggccctgggcggcggtttccaacccgattcccgctccgctgcgctcgctaccgcgaaagcgccggcagaatga

SEQ ID NO: 363621 - DNA, 471 bp, Pseudomonas aeruginosa
atgggtcactacagcgcctccgactttcccttcaagggctccattggccagctcatcggcgtcagtgccgcgaccaaggaccgcatcctcgagaagcacctcgccgcgctggacatcaccgccgcccagttcaaggtgctgatcttcgtcggtctcaaccgcgccaacagtccggtcgaactgtgtcgcgagctgtcggtggacagcggctcgatgacgcgcatgctggcgcgcctggagaaaaaagggctgctgctgcgcggccgctgtcccgaagaccgccgttgcctgcgcctggatctcagcgaagcgggacggaaggtccaggagcagcttccgctgatcgcctcggcggcgatgaacgagctggtcgcctgcctgagcacggaagaattgcagacgctgacccatctgctgaccaaggttctgctacacgccggctgccctagggccagcctgcaggagtcctga

SEQ ID NO: 363622 - DNA, 1221 bp, Pseudomonas aeruginosa
gtgtccgaaaccttcccgttcctcactggcgacgccctgtcgcagcgcttcctcgcgctggacgcgttcctcctcgaacaccagcggctctggcgaccccgcccgttcagcgaaccgaccatggcgtgggaagccgaacacgccgagctggcgtcctggctgcgcgggcgcagcctcgaacaggccgacgcggagcacaaccagcccacccgcctggccgcgcccgcgccttatccgcagctcgccgcccaggccgcggcgctgggcgcggtcggcgaactgccattggcggaacgcccgcaggcaccgaaccgcttcaatgtcgacgtaccgggacgcaagtggcagcagatcggcctgttcgccgggcgcctgcagttcgcccggccggtcgtccactggctcgactggtgctccggcaagggccatctgggccgcctgctggcccatgcggggcaaccgctgacctgcctcgaacacgatcccgcgctggtcgccgacggacagcgcctgagcgaccgcctggggctctccgcccaccacctccgccaggatgtgctggccgtggactgcgccgagcgcctgcttcccgggcatacgccagtggccctgcacgcttgcggcgaactgcacctgcgcctgctgcgcctggccagccaggccggctgtcgccaactggcggtggcgccatgctgctacaaccgcattccggggcctttctaccagccgctctcgcaagcggcaggccgatcgctgctcgcgctatcgcttgacgacctgcgcctacccctgagcgagacagtcaccgccagccaacgggtccgtcgccagcgcgaccagtcgatggcccggcgcctgggtttcgacctgctgcagcgcgagctacgcggaatcgaccagtacctgagcgtgccttcccttccggtggcctggctggaacgtccatacgccgactactgtcgcgaactcgccgtcctcaagggacttcccgaaccggccgcgcgcgactggcaggcgctggaagcggccggctggaagcgcctggcgatggttcgcaacctggaactggtgcgcgccctgttccgccgcccgctggaactctggctgctgctggaccgctgcctgtatctggtcgaacagggctatagcgtccgcctgggcgagttctgtccgacctccctgtctccgcgaaacctgctgatccttgcggagcgcagctga

SEQ ID NO: 363623 - DNA, 693 bp, Pseudomonas aeruginosa
atgagcgagtgggagctgatcctcaagtggatgccgaagatgctccagggcgcggcgctgaccctggagctgctggcgatcgcggtggtcgccgggctcgccctggccctgccgctgggcatcgcccgcgcctcgcggcactggtacgtgcgcgcggtgccgtacgcctacatcttcttcttccgcggcacgccgctgctgctgcaactgttcatcgtctactacggcctggcgcagttcgaggaagtgcgcaagagcgccttctggccctacctgcgcgatccgtactggtgcgcgctgctgaccatgaccctgcacaccgccgcctatatcgccgagatcctccgcggcgcgatccactcggtgccggtcggcgaggtggaggccgcccgcgccctcggcatgtcgcggcgccaggcgctctggcacatcatcctgccgcgcgcggtgcgcatcggcctgccggcctacagcaacgaagtgatcctgatgctcaaggccagcgcggtggtctacaccgtgaccctgttcgacatcatgggcatggcccggaccatcatcgcccgcacctacgaatcgatgctgttcttctgcctggccggcgcgctgtacctggtgatcaccatcgtgctgacgcggatcttccgcctgatcgaacgctggttgcgggtcgacgctacccagggccgctga

SEQ ID NO: 363624 - DNA, 696 bp, Pseudomonas aeruginosa
atgattctcgacctgcatgggttcggcgagcaactgctcgccggtacctggatgaccctcaagctgtcgctggcggcggtctgcgtggggctgttgctcggcctcctcggcgccatcgcgaagacgtcgaagtacgcggccctgcgtttcctcggcggcacctacaccaccatcgtccgtggcgtgccggaaacgctctgggtactgatgatctatttcggcacggtgagcggcctgaacgccctcggcgaccttttcggcaagccggacctggcgctctcgccgttcgccgccggcaccctggccctcggcctgtgcttcggcgcctacgccaccgaggtgttccgcggcgcgctgttgtccattccgcgcggccatcgcgaggccggccaggcgctcggcctgtcgcccggacggatattctggcgcatcgtcctgccacagatctggcgggtcgccctgcccggcctcggcaacctgtacctgatcctgctgaaggacaccgcgctggtgtcgctgatcaccctcgacgagatcatgcgcaaggcgcaggtcgcctccaacgcgaccaaggaacccttcaccttctacatgaccgcggccgccatctacctgagcctcacggtcgtcatcatggtcgccctgcacttcctcgaacgtcgcgccggccgtggtttcgtgaggaacgagctatga

SEQ ID NO: 363625 - DNA, 753 bp, Pseudomonas aeruginosa
atgaagaactataagaagatcctgctggccgccgctgcaaccctggccttcgccctcgacgccagcgccgccgacaagctgcgcatcggcaccgaaggcgcctacccgcccttcaacggcatcgatgccagcggccaggcggtcggcttcgacctcgacatcggcaaggcgctgtgcgccaagatgaagaccgagtgcgaggtggtgacctccgactgggacggcatcatcccggcgttgaacgccaagaagttcgacttcatcgtcgcgtccatgtcgatcaccgacgagcgcaagcaggcagtcgacttcaccgatccctactacaccaacaagctgcagttcgtcgcgccgaagagcgtcgacttcaagaccgacaaggactccctgaagggcaaggtgatcggcgcccagcgcgccaccatcgccggcacctggctggaagacaacatggccgacgtggtcaccatcaagctctacgacacccaggagaacgcctacctcgacctctcctcggggcgcctggacggcgtgctggccgacaagttcgtgcagtacgactggctgaagagcgacgccggcaaggagttcgagttcaagggcgaaccggtgttcgacaacgacaagatcggtatcgccgtgcgcaagggcgacccgctgcgcgagaagctcaacgccgcgctgaaggaaatcgtcgccgacggtacctacaagaagatcaacgacaagtacttccccttcagcatctattga

SEQ ID NO: 363626 - DNA, 774 bp, Pseudomonas aeruginosa
atggccgaggccacccccgcactggaaatccgtaacctgcacaagcgctacggcgacctcgaagtgctcaagggcatctccctcaccgcccgcgacggcgacgtgatctccatcctcggatcgtccggctcgggcaaatccaccttcctgcgctgcatcaacctgctggagaacccgcaccagggccagatcctggtctccggcgaagagctgcgcctgaagaagagcaagaacggcgacctggtcgccgccgacagccagcagatcaaccggctgcgcagcgaactcggtttcgtcttccagaatttcaacctgtggccgcacatgagcatcctcgacaacgtgatcgaggcgccacgtcgcgtactgggcaagagcaaggccgaagcgatcgagatcgccgagggcctgctggccaaggtcggcatcgccgacaagcgccacagctatcccgcgcaactttccggcggccagcagcaacgcgcggccatcgcccggaccctggccatgcaacccaaggtgatcctgttcgacgagcccacctcggcgctcgacccggaaatggtacaggaagtgcttaacgtgatccgtgcgctcgccgaagagggccggaccatgctgctggtcacccacgaaatgagcttcgcccgccaggtttccagcgaggtggtattcctccaccagggcctggtagaagagcagggaacgccgcaacaggttttcgaaaacccccagtcggcgcgctgcaaacagttcatgtccagccaccgctaa

SEQ ID NO: 363627 - DNA, 738 bp, Pseudomonas aeruginosa
atggcggagagaaagaccctgttgctgaccggggcgagccgcggtatcgggcatgccacggtgaagtacttcaatgccgcgggttggcgggtgttcaccgcgtcgcggcagagctgggccagcgaatgtccctgggcggacggcgaggaaaaccacatccatctggacctggaggacattcccggcgtcgaggccagcctggaactgatccgcgagaagcttggcgacggccggctccacgcgctggtggacaatgccggcatctcgcccaagggcgaaggcggcgagcgcctcggtgtgctggaaaccgactacgccacctggctgcgggtgttcaacgtcaacctgttctccaccgcgctgctggcgcgcggactgttcgccgagctgaaggcggcgcagggaacggtgatcaacgtgacctccatcgccggctcgaaggtgcatccgttcgccggggtggcctacgccacttccaaggcggcgttgtccgcgctgacccgcgagatggcccacgacttcggcccgcatggggtgcgggtgaacgccatcgcgccgggggagatcgacacctcgatcctgtcgccgggcaccgaggagatcgtcgagcgcagcatcccgctgcaccgcctcggccggccggaggagatcgcttcgctgatctacttcctctgcaccagcggcgcatcctacgtgaatggcgcggaaatccacgtcaacggcgggcagcacgtctag

SEQ ID NO: 363628 - DNA, 1083 bp, Pseudomonas aeruginosa
atgaccccatccctctctggcctgcctccgatccgcaccgcgctgatcggctacggcttcgccggcaagaccttccacgccccgctgatccgcgcggtaccggcgttgtgcctggagcacgtggtctcccgcgaccctgggcgggtgcacgccgacctgcccgaagcccgggtcagcgccgatccggatgaggccatcgaggccgccgacatcgacctggtggtcatcgcctcgcccaatgccacccacgccagcctcgccgaacgggccttgcgcgccggcaagcacgtggtggtggacaagccgttcaccgtcaccctggccgaagcccggcgcctcgccgacctcgcccgtgaacggcctgggcaggtcctctcggtgttccagaaccggcgcttcgacagcgacttcctcgccgtggaggccgccctgcaggccggcagcatcggcccggtgcgctacttcgagtcggccatcgagcgcttccgtccgcaggtccgcgaccgctggcgcgaacacgacctgcccggctccgggctgtggttcgacctcggcccgcacctgctcgaccaggcactgtgcctgttcggcgtaccgcagcgtgtgcacggacacctgcgccggctgcgcgagggcgcgctgaccgacgactggttcgaggtcctgctcgattatccgcactgccaggtagcgctgcgcgccagcatgctcgccgccaatccggcgccacgcttcaatgtgcacggcgaccacggcagcctgctcaaggccggcgccgacatccaggaagcgcaactgctccagggactgcaccccggttccgccggctggggccgcgatcccgacctgctgcagcacatcgatggccagggcctgcgccagtcgctggtcaccccggcaggcgaccagagccgctactaccaggcgctggccgccgccatccgcggccagtcgcgcaacccggtgtcggcgcaacaggcctgcgcgctgatggccctgctggagttggcacgacgctccgccgaggaaggccggagcctgccggtggagctgcgcgacgaggaacgccaggcctggaactga

SEQ ID NO: 363629 - DNA, 273 bp, Pseudomonas aeruginosa
atgagccgcaccgtgatgtgccgcaaataccacgaagagctgcccggcctcgaccgcccgccgtatcctggcgcgaagggcgaggacatctacaacaacgtgtcgcgcaaggcctgggacgagtggcagaagcaccagaccatgctgatcaacgagcgtcgcctgaacatgatgaacgccgaggaccgcaagttcctccagcaggagatggacaagttcctctccggcgaggactacgccaaggccgacggctacgtgccgccatccgcctga

SEQ ID NO: 363630 - DNA, 1068 bp, Pseudomonas aeruginosa
atgacacctgaaggcttcaacggcgcggtcctcgactggtacgaccgtcacggtcgcaaggatctgccctggcagcagggcatcaccccctaccgggtgtgggtctcggaaatcatgctgcagcagacccaggtcagcaccgtgctcggttacttcgaccgtttcatggcagcgttgcccgacgtcgaggcactggccgcggcggccgaggacgaagtcctgcacctgtggaccgggctcggctactacagccgtgcgcgcaacctgcacaagaccgcgcagatcgtggtcgagcggcatgcgggggagttcccccgcgacgtcgagcaactcgccgaactgcccggcatcggccgctccaccgctggagccatcgccagcctgtcgatgggcctgcgcgcaccgatcctcgacggcaacgtcaagcgcgtactggcgcgctacctggcgcaggacggctatcccggcgaaccgaaggtggccagggcgctgtgggaagccgccgaacgcttcaccccgcacgcacgggtcaaccactacacccaggcgatgatggacctcggcgccaccctctgcacgcgcagcaagcccagttgcctgctttgcccgctggtctcgggctgccgcgcgcacctgctcggccgcgaagccgattatccgccgcccaagccgcgcaaggcgttgccgcagaagcgcacgctgatgccgatcctggccaaccgcgacggcgccatactgctctaccggcggccttccagcggactctggggcgggctctggagcctccccgaactggacgacctcgacggcctcgaaccgctcgccgcgcgccattccctggccctcggcgagcgccgcgaactgagcggcctgacccataccttcagtcatttccagctcgccatcgagccctggctggtggcggtggaaagcgctccgcgcgccgtggccgagggcgactggctctggtataacctcgccaccccgccgcgcctgggcctcgccgctccggtgaagaagctgctcaagcgcgcagaacaggaactcggacgcggcacggccgcgtga

SEQ ID NO: 363631 - DNA, 2253 bp, Pseudomonas aeruginosa
atgaaagcattcggcaaggtcctggggctgttcttcctgggactcttactgctcgtcgtggccctgggcttcgccctgacccacctgttcgatcccaatgactacaaggacgaaatccgccagatcgcccgcgacaaggccaacctggagctggacctgaagggcgacatcggctggagcctgttcccctggctgggcctggagctgcacgacaccagcatcgccagcgccgccacgccgaccaagccgttcgccgacctgcagatgctcggcctgtcggtgcgggtcctgccgctgctgcgcaaggacgtacagatgagcgcgatccgcgtcgaaggcctgagcctggacctggtccgcgacaagcagggcaagggcaactgggaaaacatcggcaagccggcccagccccaggccccggccgctccttccgccaccccgccggcagcggacggcaagggcgcccaggcgcaggcaccggagcaggcgccgcagaacgacagcccgcgcaccccgatcaagctcgacatcgatagcctcaatgtcaacaacgcccgcgtcacctacaccgacgaagccagcggcaagcagtacaacgtcgagggcatcgagctgagcaccggcgccattcgcgaaggcagcagcattccgctgaagctcaacgcctacctcggcaccaaccagccggtggtacgggtcaagaccgagctgaccggcaacctgcgcttcgacaccgcgctcaggcgctaccaactggaagacgccaggctctccggcgaagcctcgggcgagccgctgcaaggcaagaccgccaccttctccgcccagggccagttgctgctcgaccagtcggcgcagatcgccgagtggaacggcctgaagctgagcgtcaaccagttgcgcgccctcggcgaactgaaggcccgcgagctggacaaggacaccaagttcagcggcggcctgtcgatcgcgccgatgaacctgcgcgagttcctcgccggcatcggtgtgaccctgccggccatggccgatgccaacaccctcggcaagttcgagctgaacacccgcctggccggcagccgcaacagcctgaatctcgaagacctcaagctgggtctggacgacactgccttcagcggccgcttcggcatcgccgatttcgccaggcaatcgctgcgcgcccagctcaagggcgacaagctcgacctcgaccgctacctgccggccaaggccaagcaagcccaggatgccgccagcgccacgcgcaaggcggaagtcgacgccaccgtggccagtgccgcccagggcaacacgccgctaccggaaaaaccgaccaggcaggcctggagcgacgcgccgctgctgcccatcgcgaccctgcgcaagctcgacctggacgtggcgctgaacttcggccggctgaccgtcgagaagctgccgatcgacgacgccagcctgaagctgcgcggccagggcggcgtgatcagcctcgacgacatgcgcggcgggctgtacaacggccgcttcaacgccaaggccaacctcgatgtacgccaggacagcgccgtgctgaccgccaccaagcacatcgccaacgtaccggtggagcgcctgctcgaagcccagggcaagaaaccgccggtgaaggggctgctcgacctcgatgccgacatccgcaccagcggcaacagcgagaaatcctggatcgaccatctcaacggcaacgcacgcttcagcctgatcaacggcgtgctgcccgacgccaacctggagcaacagctctgccagggcatcgctaccctcaaccgcaaggcccttgccggtactcacggcggcaaggacacgcctttccgcgagctcaagggcagcctgaacttcaccaacggcgtggccagcaaccctgacctgaaagtggccattcccggcctggcggtcagcggccacggcgatatcgacctgcgcgtgctgggcatggactatcgcatcggcgtggagatccagggcgacaagagcgacatgccggacccggcctgccaggtcaaccagcgctacgccggcatcgaatggccgctgctctgccgcggcccgctggaactcggcgccaaggcctgccgcctggacaaggaaggcatgggcaaggtcgccgcgaaactggccggcaatcgcctcaacgaaaaactcgaagagaagctcggcgacaaggtcagtccggagctgaaagacgcactcaaagggctgttcaaccgcaaatga

SEQ ID NO: 363632 - DNA, 1107 bp, Pseudomonas aeruginosa
atgaacgacgtcgacgtactggtagtcggcgccggcgccctcggcctggcctgcgccgcgcgcctggccgaagccggccacggcgtactggtggcggagcgcgaacggctggtcggtagccacacctccagtcgcaattccgaagtgatccacgccggcctctactacccgcccggctcgctcaaggccgatctctgcctggaaggccgcgaacgcctgtacgcctggtgcgcccgccacggcgtcggccaccggcgcatcggcaagctgctggtggcggtggaggaaaacgagcgcgagaggctccaggccctggcggccaacgcacgcgcctgcggggtcgacgacctgatgccgctggacggcaccacgctgcgcgcgctggagccccaggtccgcggggtcgccgccctgctctcgccgagcacgggaatcatcgacagccacgcctacctgcaatcgctgcaggccgtcgccgaacgccacggcgcacaactggcgctggacacccgggtcgaccgcctggagcgccacgccggcggctggcgcgccgaaggacagagcgtcggcgaagcgttccggttgcgcgcgggctgggtggtcaatgccggcggcctgttcgcccaggcgctggcgcaacgcaccgaaggcctcgatccgcgcctggtgccggcgctgcacctgtgccaggggcgctatttctcctacagcggccgctcgccgttccgccacctggtctacccgatgcccgaggcgcgcaccgccgggctcggcatccacgccaccctcgacctcggcggccagttgcgcttcggtcccgacgtgaattacgtggacaacctcgactaccgcgtcgacgaatccctccgccccgccttcgcccaggccatctcgcgctacttccccggcatcgatcctcggcgcctggccgccggctacgccggcatccggcccaagctcggcgggccgggggaacccgccgccgacttcatcatccaaacccctgccgaactcggcctgcccggcctggtcaacctgttcggcatcgagtcgcccggcctcaccgccagcctggcgctcgccgaacgggtcgcccgcgcactctga

SEQ ID NO: 363633 - DNA, 237 bp, Pseudomonas aeruginosa
atgtccttttcctccgccgaacgcgccgccctgcttgccctcaagggggtcggcccgaccgtgctgcaacgcctggagcagatgggcctggacagcttcgtccggctgcgcgactgcgacgccgcgagtatcctcgcccagggcgcggccctgaccggctccagttgctggaagaacagcccgcaggcgcgggcagcgatcgtcgccgtgctgcagcgcgcagccagcgacgcatga

SEQ ID NO: 363634 - DNA, 399 bp, Pseudomonas aeruginosa; identical to SEQ ID NO: 323125

SEQ ID NO: 363635 - DNA, 594 bp, Pseudomonas aeruginosa; identical to SEQ ID NO: 323124

SEQ ID NO: 363636 - DNA, 639 bp, Pseudomonas aeruginosa
atgcagacggtagccgtgatcgactacggcatgggcaacctgcactcggtggccaaggcccttgagcacgtcggtgccggccgggtgctggttagcagcgacgcggcggtgatccgcgaggccgaccgggtggtgttccccggggttggcgcgatccgcgactgcatggccgagatccgccgcctgggcttcgacgccctggtccgcgaggtcagccaggaccgcccgttcctcggcatctgcgtcggcatgcaggcattgctggagcgcagcgaggagaacgacggggtcgactgcatcggtctgttccccggccaggtgcacttcttcggcaaggacctgcacgaagccggcgagcacctgaaggtgccgcacatgggctggaaccaggtgagccaggcggtggagcacccgttgtggcacgagattcccgaccaggcgcgcttctacttcgtgcacagctattacatcgaggccggtaacccgcgccaggtggtggggcacgggcactacggcgtcgatttcgccgccgcgctggccgaaggctcgcgtttcgccgtgcagttccacccggaaaagagccatacccacggcctgcaactgctgcagaacttcgtggcctgggacgggcgctggtag

SEQ ID NO: 363637 - DNA, 261 bp, Pseudomonas aeruginosa
atggccagggcgaagagcaatacgccgatcctccagctggacgccgcgcagacccaggacgcggtactggcgatcaagcgcttcatggaggaccgcttcgaactggagctgggttccttcgaagccgaggaactgctcgatttcttcgcccgcgagttcgccccgtacttctacaacaaggccatcctcgacgtgcagtcgtacctgaaggaacggttcgaaagcatcgagagcgatgtctgggcgctggaaaagagttga

SEQ ID NO: 363638 - DNA, 738 bp, Pseudomonas aeruginosa
atgctgatcattcccgcgatcgacttgaaagacggcgcctgcgtgcgtctgcgccagggcctgatggaagacgccacggtcttctccgacgatccggtggcgatggccgccaaatgggtcgatggcggttgccgccgcctgcacctggtggacctgaacggcgctttcgaaggcaagccggtcaacggcgaggtggtcaccgccatcgcccgtcgctacccggacctgccgatccagatcggcggcggcatccgctcgctggaaaccatcgaacattacgttcgcgccggcgtcagctacgtcatcatcggcaccaaggcggtcaagcagcctgagttcgtcggcgaggcctgccgcgccttcccgggcaaggtcatcgtcggcctggatgccaaggacggtttcgtcgccaccgacggctgggccgaggtcagcgaagtccaggtgatcgacctggcccgtcgcttcgaggccgacggggtgtccgccatcgtctacacggatatttccaaggacggcatgatgcagggctgcaacgtcgaggctaccgccgcgctggccaatgccacgcggatcccggtgatcgcctccggcggtatccacaatctcggcgacatccagaagctgctggacgcccgcaccccggggatcatcggcgccatcaccggccgggcgatctacgaaggcaccctggacgtggccgaagcccaggcgctgtgcgacaacttcaaggcctga

SEQ ID NO: 363639 - DNA, 771 bp, Pseudomonas aeruginosa
atggcactggcaaaacgcatcatcccctgcctcgacgtggacaacggccgagtggtcaagggcgtcaagttcgagaacatccgcgacgccggcgacccggtcgagatcgctcgccgctacgacgagcagggtgccgacgagatcaccttcctcgatatcaccgccagcgtcgacgggcgcgacaccaccctgcataccgtcgagcgcatggctagccaggtgttcattccgctgaccgtgggcggcggcgtacgcagcgtgcaggacatccgcaacctgttgaatgccggcgcggacaaggtctcgatcaacaccgccgcggtgttcaaccccgagttcgtcggtgaggccgccgaccgcttcggctcgcagtgcatcgtggtcgccatcgacgcgaagaaggtttccgccccgggcgaggcgccgcgctgggaaatcttcacccatggcgggcgcaagcccaccgggctggatgccgtgctctgggcgaagaagatggaagacctgggcgctggcgagattctcctgaccagcatggaccaggacggcgtgaagagcggttacgacctgggcgtgacccgcgccatcagcgaggcggtgaacgtgccggtgatcgcttccggcggcgtcggcaacctggagcacctggccgccggcatcctcgagggcaaggccgacgcggtgctcgcggcgagcatcttccacttcggcgagtacaccgtgccggaagccaaggcctacctggccagccgcggtatcgtggtgcgctga

SEQ ID NO: 363640 - DNA, 747 bp, Pseudomonas aeruginosa
atgtccatcttccgtctggctctcggctgcgtcggcagcctggccctgctatgcgctagcgccctggcgcgcgccgaaaccctggtcctgctgaccgagaacctggtgccgttcaacatggcggtgaacggcggcaactacgccaaggacgatggcatcagcggcatcagcaccgataccgtgcgcgccgcctgcgagcgcgcgcagatcgagtgccagctgatcctgcgcttcccctgggaccgggtctaccagcaggcgctgagcgagcccggctatggcgtgttttccaccgcccgtacgccggagcgcgaggacaagttcaagtgggtcggcccgctggcggtcaacgactgggtactgatggcccgcggcgacagcagcatccacctgaacagcctggaagacgccgcgcgctaccggatcggcggctacaagaacgacgccatcagccagcacctggtcgaccgcggcctgcaggtgcaactggcgctgcgcgacaacgagaacgtcgacaagctggccagcgggcagatcgatctctgggtcaccgccgatccgagcgggcgctacgtcgcccagcgcgagggcctcaaggaggtgaaggtggtccagcgtttccataccgccgagctgttcctggcgctgaacaaggacaccccggacgagctggtgcagaagttgcaaacggcggtcgacgcgctgcgcagcgaaggcttgttgaagcagatccgcgagcgctactga

SEQ ID NO: 363641 - DNA, 753 bp, Pseudomonas aeruginosa
atgcaaagaagcctgctcttcgcgctgctcgcaaccctgctgctggtcggcggcgcgcgcgccgaaaccgatcccgactacagcatggtcctgctcacggagaacttcccgccgtacaacatggcgatcaacggcaagaacttcgcccaggaagacaacatcgacggcatcgccgtggatatcgtccgcgagatgttcaagcgcgccggcatcaagtacagcctgaccctgcgtttcccctgggaccgcatctacaagctggcgctggagaagcccggctacggggtgttcgtcaccgcccgcctggccgagcgcgaggacaagttcaagtgggttggtccgatcggcccggacgactgggtgctgctggccaagggcgacagcccgatcaccctgggcagcctggacgaggcgaagaaataccggatcggcgcctacaagggcgatgccatcgccgagttcctcggcaagaacggtttcgaggccgacctggcgctacgcgaccaggaaaacgcgcagaagctggtcaagggccagatcgacctctgggccagcggcgatcccgccgggcgctacctggccaagcaggaaggcgtgaccggcctgaagacggtgctgcgcttcaacagcgaccaactgtacctggcgctcaaccgcgagactcccaacgaagtggtgcagaagctccaggcagccctggacggcatgcgcaaggaaggcttcgtcgaggacatcctcaacagctatctctga

SEQ ID NO: 363642 - DNA, 756 bp, Pseudomonas aeruginosa
atgctgaaagtcctgatccagaccctgatcctgggggtgttgctgggggcctccgcggcccgtgccgaattgcccgccgactacaaggtggtgctgctgaccgagaacttcccgcccttcaacatggcggtggacgacaagaacttcgcccgcgacgacggcatcgacggcatcagtgccgacatcgtccgggagatgttcaggcgcgccggcatcggctattccctgagcctgcgcttcccctgggaccgcctgtaccggttgaccctggacaagcccggctacgggctgttctccatgacctacacccccgagcgggtgccgcagttcaaatgggtcggcccgctggccgacaccagttgggtgttgctggcgccggccggcagcaagatcgccgtgaagaatctcaaggacgcagcccgctacaagctcggcgcctacaagaacgacgcggtcagccagcacctggaggcccagggcatcccggtgatcaacgccctgcgcgaccaggaaaacgtgaagaagcttaccggcgggcagatcgacctgtgggccaccaccgatccggtcggccgctacctggccaagcaggaaggcgtgtccggcctgcagacggtgctgcgtttcaacgaggccaagctctacctggcgttgaacaaggacactccggacgaggtggtggagcgcctgcaaaaggccctggagcagatgcgccaggaaggcttcgtcgacgaagccgtcgccaactacctctga

SEQ ID NO: 363643 - DNA, 1482 bp, Pseudomonas aeruginosa
atggcccgcccttcccctcccatgcccctgctcgccgccgccctgctggtcgcaggcgcgattcccctcggtttcatctggatcctcaccagcgccaagttcgagataggcggcgccagccccggcgagagcaccgtcggcaaggtcgagaacatcgaccagcgcgccatggagcaattctgcaccggcgtgcgggcgacgcccgccggcacctggctggtaggccggcgcgaggtcggccgcgacgagcaggctctgcccgagggcgtcatcgacctggacctggtggcggccgcccagcccagggaagaagagtccgaaccccacctcttcaacttcctcaacggcatgctgctatccggcggcgatccggaaaccacctatgtctcgcgcctgggcgcggacggcgtgttccacgaagtggcgcggctcggcgagaccgcctgcctggaagtcacgccggacggttccagcgtcttcctgctcaccggcctgcggcgcccgggcaaggacaacggtcagcgcgagcagacagtggtgctgcgcagcgacgaccagggcaagagctggcggcggctcgaggaaggcttcatggccgaggcgaatcgactgggctgggctctcgcaccgcgcttccacggcaaggacgaagtctgggtctggggtgatttcgaatacggcggtgccgatggcggccgggaacccggccagccgagcgggctgttctattcgcccgaccgcggcgccagtgtcgagtcgatcgccacctccgcgccgctgctggtcgacctcgcctacgcccgcgagttggcgccgaacggcgtcagctggggcgactacaacggcaagcacgggcagatcaaggcacacgtcgctcaactggacgcggagcgtgccgcgatctgggtaagccagaccttccgctatggcccacccgaggggcgctacctgaccagctcgatattggtcaccacccaggccgaactgcgccgcgagggcggacgctggcggatgggcgcgatccggcgcaccgacggcgtggccgtcgagcgcctggaacagaacacggacggtcgggttatcgcagtgctcgatcacccggacgaatcgcgctcgctgatcgccgagctcgatcgcgacgcgctcgaatggaagatcaccggcaagctgcccagcccgttctggcccctgccgtccagttccgggctgcgcgagttctacatgggcaggaatgtgctgctggccaacaccatgagccactacgaagtgccgctgtggctgtatcccgacgaggagccggcgagcgtctccgccaacgcggtgtactactcggacgactggggctcatcctggcgccgcctggacatcgccggctacctcggcgtgctcggcttcgacgaggcgcacgaccgggtgttctgggcccgcggcaactggtacgacagccgcgacctcggcgtccaggcctacgacctggactga

SEQ ID NO: 363644 - DNA, 774 bp, Pseudomonas aeruginosa
atgtcggcgttccgcgttgccctgctgggcctgtgcctgctgttcaaccaggcccaggcccgccaggaccccgccccctaccagcgcccgccgctgctgaccgtggtcatcgatgacctcgggcagaacctggcgcgcgaccgccgggtcctcgacctgccccccggcgtaaccctggcgatcatcccggaaaccccgcatgccgccgaactggcccgcgaggcgcaccagcgcgggcgcacggtgatcctgcacatgccgatggacccggccggcggtccctacgcctggcggccggagctgacccaggaagagcgtgcgcggcggctggacgcggcgctggccaaggtgccgttcgtgcaaggcctgaacaaccacgagggcagccgcatgaccgcggtgcgcccggcgatggcctggctcgccgaggaactccagcgtcgcggcctgtacctggtcgacagccgcaccagcgccgccaccgtggccgccagcgaggcgcagcggatcggcctggcgagcgtctcgcgcgatgtgttcctcgacaacgaagccacaccggaagcggtctccgcacaactgcaggccggcgtcgccctggcccgcaagcagggttcggcgttgctcatcggccacccgcacaaggccaccctcgacgtgctggcgcgggagctgccgaagctgcgcgcccagggcatcgagctggtaccgccgcagatgctcatcggcgagcgcggcaaccgcaacgtcaacccacgccaggcgccgcactga

SEQ ID NO: 363645 - DNA, 1311 bp, Pseudomonas aeruginosa
atgctgcattgcttccgtcccaccaccctggcgctggccctgctgctcggcgcgggcgcggcccaggctgccgacgccccggccgacgccgcgccactggccaacggtagcagtgccccgctgcccctcgacgagctgcgtaccttcgccgaggttctcgaccgggtgaaggccgcctatgtcgagccagtggacgacaagaccctgctggagaacgccatcaagggcatgctcagcaacctcgacccgcactccgcctacctcggcccggaggacttcgccgagctgcaggaaagcaccagcggcgagttcggcggcctgggcatcgaggtcggcagcgaagacggcttcatcaaggtggtctcgccgatcgacgacacccccgcggcccgcgccggcatccagcccggcgacctgatcgtgcagatcgacggcaagccgaccaagggccagtcgatgaccgaagcggtcgacagcatgcgcggcaaggccggctccccgatcaccctgaccatcgtccgcgatggcggcagaccgttcgacgtcgaactcaagcgcgccatcatcaaggtcaagagtgtcaagagccaggtcctcgaacccggctacgcctacctgcgcatcacccagttccaggtcaacaccggcgaggaagtggtcaaggcgctgaaccagctgcgcaaggacaacaagggccgtctcaagggcctggtcctggacctgcgcaacaaccccggcggcgtgctgcagtccgccgtcgaggtagccgacgccttcctcaccaagggcctgatcgtctacaccaagggccgcatcgccaactccgagctgcgcttcagcgccgacccggccgatcccagcgacaaggttccgctggtggtgctgatcaacggtggcagcgcctcggcggcggaaatcgtcgccggtgccctgcaggaccagaagcgcgcgatcctgatgggcaccgacagcttcggcaagggctcggtgcagaccgtgctgccgctgaacaacgaccgcgccctgaagctcaccaccgcgctctactacacccccaacgggcgctccatccaggcccagggcatcgttccggacatcgaagtcggacgcgccaaggtgacccaggagcggagcagcttcgagggcttcaaggaagccgacctgcagggccacctggccaacggcaacggcggcgccgaccgccccaccggcaagcgtgccgcgccgagcgagcgcccgcaggattccgactaccagctcagccaggcccttagcctgctgaaaggcctgagcgtcacccgcggcaactga

SEQ ID NO: 363646 - DNA, 1437 bp, Pseudomonas aeruginosa
atgcccgtggccttcgtcgtcgacgacatccgccgctgccatccggctgaaatacgtggaagcgccccacagcgcgcggtgcggggcgttttttttaacggcggccacgggcatactaggccggtccaattcccaggtgcccgccaccccatgctccgcctccttcctctcctgctatccctcgcctgtctcgctccggccttcgccgacgagcgcgccgacacccaacgccagctggaacagacgcagaaggacatcggcgagctgaagaagctgctggacggcatccagcaggaaaagagcggcgtgcagaagcagctgaagtccaccgagaccgagatgggcgacctggaaaaacagatcaaggccctgcaggacgagctggacaagagcgaagccgagctgaaacggctggatggggagaaaaaaaaactccaggacgcgcgcattgagcagcagcgcctcctcgccatccaggcccgcgcggcctaccagagtggacgcgaggaatacctgaagctgctactgaaccaggaacacccggaaaaattcagccgcaccctcacctactacgactacatcaacaaagcccgtctcgaacagctcgccagcttcaacgaaaccctccgccagttggccaacgtcgagcaggacatctctgcgcagaaagccgaacaactgagcaagcaaggcgagctggacagccgccgcgaggcgctggcagcgacccgcaaggagcgccagcaagccctggccaagctgaacagcgactaccgcgaacgcgaccagaagctcaagtcccgccaacaggaccaggccgagctggccaaggtactgcggaccatcgaggaaaccctggcccgccaggcccgcgaagccgccgccgcggcggagcgcgagcgccagcgcgcgctggccgccgaacgcgagcgtgcgcgccagcagcaggccgcccccggacgagtcaccagcccgccgcgcgaacctgcgccgggcccgctggtctcaagcactggcgcggtctacggcggcgcgttcggctcggcccgcggcaagctgccgtggccggtgaatggccgcgtcgtggcgcgcttcggcagccagcgcggcgacgatccgcgggcgaaatgggacggcgtactgatttcggcgagcgccggcagcaccgtccgcgcggtgcacggcggacgcgtggtattcgccgactggttgcgcggagccggcctgttggtcatcctcgaccacggtggcggctacctcagcctttatggccataatcaaagcctgctgaaagacgccggcgacaccgtgaaggccggagacccgatcgccaccgttggaaccagcggcggccagagtagcccggccgtgtacttcgccattcgccatcagggccgcccggcggaccctactacctggtgccgcgcacagggatag

SEQ ID NO: 363647 - DNA, 819 bp, Pseudomonas aeruginosa
atgtggttcctcctcgccacctcgctcctcgccctgtccttccagcgcctgctggccctcgtcttgctgctcgcgacctgctgcctcgccttctacgacggggttctcgctccgcctgcggtcgccgccctggctgcactgggcgtcctcgccctgttgcgccggcgcctggcggcacgccgcgcctgggccctgggcctggagctgctgctggtcgccggcgcggtgggcctgttcctgcacctgctacccggcttcgccaaccccaggatcctggacaaggcggtggtcggcccgcagagcctgccgttcaccatgtacttcaacttcgacaaggcactggtgccgttcctgctactggcctgcctgccgagcctgttccgcgacgaagcccgcgctcccggccgcccctggtactggctgctgctcgtggcggcggtgccggcgctgcttctgctggctgtcggcgtcggcctgctgcggccggaactccacgcgccggcctggctctggcagttcatcctggccaacctgttcttcgtttcccttgccgaggaagcgctgttccgcggctacctgcagcaacgcctgggccaatggctgggcccctggcccgccctggcgctggcctcggcgctgttcggcctggcgcacttcgccggcggcccgctgctgatgctgttcgccggcctcgccgggctgatctacgggttggcctggctgtggagcggccgcctgtgggtggcgacgctgttccacttcgggctgaacctgacgcatctgctgctgttcacctacccgctctacagacccgcctga

SEQ ID NO: 363648 - DNA, 1548 bp, Pseudomonas aeruginosa
atgactgccacgcccaaacccctggtcctgatcatcctggacggcttcggccacagcgaaagccctgactacaacgccatctacgccgcgaagaagccggtctgggatcgcctcctggcaacccagccgcacggcctgatctcaggctccggcatggacgtcggcctgcccgacggccagatgggcaattccgaggtcggccacatgaacctcggcgcaggccgcgtggtgtaccaggacttcacccgcgtcaccaaggccatccgcgacggcgaattcttcgaaaacccggtgatcgccgcggcggtcgacaaggccgtcgccgccgacaaggcggtgcacatcctcggcctgctctccccgggcggcgtacacagccatgaagaccacctggtggcaatggcgcagatggccgccaggcgcggcgccggcaagatctacctgcatgccttcctggatggccgcgataccccgccgaaaagcgcgcagccgtcgctggagcgtctcgacgccaccttcgccgggctcggcaagggccgcatcgcctcgatcatcggccgctatttcgcgatggaccgcgacaaccgctgggaccgcgtccaggccgcctatgaactgattgtcgacggcaaggccgagttcaccgccgactcctcggtggcagccctcgaggccgcctacgcccgcggcgagagcgacgaattcgtcaaggccaccgcggtggtcccggccggcgccgaagcggtgcgggtcgaggatggcgacgcggtgatcttcatgaacttccgcgccgaccgcgcccgcgagctgagccgcgccttcgtcgagccggcattcaatgagttcccccgcgaacgagccccgcagctggcaggtttcgtcatgctgacccagtacgcggcgagcatcccggcgccctgcgccttcccgccggagccgctgaccaacgtcctcggcgagtacctggccaagcatggcaagacccagctgcgcatcgccgagaccgagaagtacgcccatgtgaccttcttcttctccggcggccgcgaggaaccctacgagggcgaggagcgcatcctgatcccctcgccgaaggtcgccacctacgacctgcaacccgagatgagcgcgccggaagtcaccgaccgtatcgtcgaggccatcgagcaacagcgctacgacgtgatcgtggtcaactacgccaacggcgacatggtcggccacaccggggtgttcgaggccgcggtcaaggccgtggagtgcctggacacctgcatgggccgtatcgtcgaggcgctggacaaggtcggcggcgaagccctgatcaccgccgaccacggcaatgtcgagcagatggaagacgagtccaccggccaggcgcacaccgcgcacacctgcgaaccggtgcccttcgtctacgtcggcaagcgcaagctgagcatccgcgaaggcggcgtgctggccgacgtggcgccgaccatgctgaccctcatggggctggagcagccggcggaaatgaccggtcgcagcatcgtcaccctcggctga

SEQ ID NO: 363649 - DNA, 420 bp, Pseudomonas aeruginosa
atgcaattcgtttcccgtctgatcgagttcgccaccaaccactacctgctggtcgcggcgctgctggtcctgctggtcctgctgttgctgcacgagctgcgcaagggcggcaagagcctgtcgacccgcgagctgaccgcgctggtcaatgccgaccaggcggtggtcctggatatccgtccggccaaggagttcgccagcgggcacatcgtcgacgcgctgaacatcccggccgacaagctgaacagccgcatgaccgaactggaaaagtacaagggcaagaccatcatcctggtcgacgccatgggccagcactccggtacctggggcggcgtcctgaagaaggccggcttcaacgccgccaagctgtccggcgggatcggcagctggcgcggcgacaacctgccgctggtgaagtga

SEQ ID NO: 363650 - DNA, 255 bp, Pseudomonas aeruginosa; identical to SEQ ID NO: 322119

SEQ ID NO: 363651 - DNA, 492 bp, Pseudomonas aeruginosa
atgaccgagcaagctaccaacggcgctgccgacgagcagcaaccccagttctccctgcagcgcatctacctgcgcgacctgtcgttcgagtcgccgaagtccccggaaatcttccgccaggaatggaacccgtccatcagcctggacctgaacactcgccagaagcagctggacggcgacttctacgaagtggtcctgaccgtatcggtgaccgtgaagaacggcgaggacaccactgccttcatcgccgaagtgcagcaggccggcatcttcctgatcaagaacctcgatccgtcgagcatgagccataccctcggcgcgttctgcccgaacatcctcttcccgtacgctcgcgaagccctggacaacctggtggtacgcggttcgttcccggcgcttatgctgtcgccggtgaacttcgacgccctctacgcccaggaaatcgcccgcatgcaggcctccggcgagatcccgacgccgtcggtccagtaa

SEQ ID NO: 363652 - DNA, 462 bp, Pseudomonas aeruginosa
atgttccacgtcatcctgtttcaaccggaaattcctccgaataccggcaacattatcaggctctgcgccaacgccggatgcagtctgcacctgatcgagccgctcggtttcgaactggacgacaagcgcttgcgccgtgccggcctcgactaccacgaatacgccagcgtacgccgctacccggatctgcagagctgcctcgaggccctcggccagccacgcctgttcgccttcaccaccaaggggtcgcgggccttccacgaagtggcctaccagcgcgacgatgccttcctcttcggcccggaaagccgcggactgccggaggacgtgcgcaacgccctgccaaccgatcggcgcctgcgcctgccgatgcgcgaaggctgccgtagcctgaacctgtccaacacggtggcggtgaccgtctacgaagcctggcgccagctcggcttcgccatggactga

SEQ ID NO: 363653 - DNA, 351 bp, Pseudomonas aeruginosa
atgctcggcaggttgttcggtcccgcttcgctgccgacgtctgcgccgcaactgctggcggtcggggagagcgagcagggcctggtcctgcgcttcgatcgccaggctgcggttacggcggcacgggtggagggtgccctgacgttgcgcatcgtcgcccggggcgcggcgcagcagggagatggacgatggctgggccaaccgttgcgctggcgcgtccgcgaggagggaaaggcgctgctgttgagcctggtctcgacccgccccttgcaggggcgctggcagtggtcggaggacggcgagggctggcgcctggtcgtcgaactgcaggagcgcgacggccgggaataa

SEQ ID NO: 363654 - DNA, 1431 bp, Pseudomonas aeruginosa
atgagccgatcagagaccgtctggatcgtcgacgacgaccgctccatccgctgggtactggaaaaggccctgcaacaggaaggcatgaccacggtgagcttcgacagcgccgacagcgtcatcggccgcctcggccggcagcagccggacgtgatcatctccgatatccgcatgcccggcgccagcggcctcgacctgctggcgcagatccgcgaactgcatccgcgcctgccggtgatcatcatgaccgcgcattccgacctcgacagcgcggtggcctcctaccagggcggcgccttcgaatacctgcccaagccgttcgacgtcgacgaggcggtctccctggtcaagcgcgccaaccagcacgcccaggagcagcagggcctggagctgccggcgaaccaggcgcgcacgccggagatcatcggcgaggcgccggcgatgcaggaggtattccgcgccatcggccgcctcagccattccaacatcaccgtgctgatcaacggcgaatcgggtaccggcaaggagctggtcgcccatgccctgcatcgccacagcccgcgcgcagcctcgccattcatcgcgctgaacatggcggcgatccccaaggacctgatggaatccgagctgttcggccatgagaagggcgccttcaccggggccgccgcccagcgccgcggacgcttcgagcaggccgatggcggcaccctgttcctcgacgagatcggcgacatgccggccgacacccagacccgcctgctgcgcgtcctggccgacggcgagttttaccgggtcggcgggcacacgccggtgaaggtcgacgtgcggatcatcgccgccacccaccagaacctggaaagcctggtgcgcgacggcaagttccgcgaggacctgttccatcgcctgaacgtgatccgcatccacatcccacggctggccgaccgccgcgaggacatcccggcgctggcccggcacttcctcagccgcgccgcccaggagctggcggtggaacccaagctgctgaaggcggaaaccgaggagtacctgaagaacctcggctggccgggcaacgtccgccaactggagaacacctgtcgctggatcaccgtgatggcctccggccgcgaggtgcacatcgacgacctgccgccggagctgctgacccagccgcaggacagcgcgccggcggcgaactgggaacaggcccttcgccagtgggccgaccaggcgctgggccgcggccagtcgaacctgctggacagcgccgtgccggccttcgaacggatcatgatagaaaccgccctcaagcacaccgccggccgccgccgcgatgccgccgtgctgctcggctggggccgcaataccctgacccgcaagatcaaggagctggggatgaacgtcgatggagccgacgacgaaggcgacgactga

SEQ ID NO: 363655 - DNA, 1077 bp, Pseudomonas aeruginosa
atgccgaccgataccctgcaccgactgttgctcgacaacctgaccaccgcggtgatcctgctcgacggcgaactgcgcctggagtacatgaacccggcggcggagatgctcctggccgtgagcggccagcgcagccacgggcaattcatcagcgagctgttcaccgaatcgccggaagccttgaactcgctgcgccaggcggtggaacaggcacatccgttcaccaagcgcgaagcgaccctgacctcgatcaccggcgtcagcatcacggtcgactatgcggtgacgcccatcctcaaccgcaacgagacgctgctgctgctcgaggtccatccgcgcgaccggctgatgcggatcacccgcgaagaagcgcagttgtccaagcaggagaccaccaagctgctggtgcgcgggctcgcccacgagatcaagaacccgctcggcggcatccgcggcgcagcgcaactgctatcccgcgagctgccggaagagtcgctgaaggactacaccaacgtcatcatcgaagaagccgaccggttgcggaacctggtggaccgcatgctcggctcgaacaaactgccgaacctggcgccgaccaacatccatgaagtgctggagcgggtcagcagcctggtggaagcggagagccagggcagcatcaccctggtccgcgactacgacccgagcatccccgacctgctgctcgaccgcgagcaaatgatccaggccgtgctcaacatggtacgcaacgccatgcaggcgatcgccgggcagaacgacctgcgcctcggtcgcatcaccctgcgcagccgtaccctgcgccagttcaccatcggccacacgcgtcaccgcctggtgtgcaaggtggagatcatcgacaacggcccgggcattccggccgagctccaggaaaccatcttctaccccatggtcagcggccgtccggacggtaccggactcggcctggccatcgcccagaacatcatcagccagcaccaggggctgattgaatgcgagagccaccccggccataccgtgttcagtctgttcctgcccctggaacaaggagtgcattga

SEQ ID NO: 363656 - DNA, 573 bp, Pseudomonas aeruginosa
atgatcccgcgcattctcggcgccctcctgctgtgcctggcctgcgccgcgcaagcgggggtctacacctacatcgacgccgagggcaaccgcgtctacaccgaccagccgcccagcgggcgcaaggcccaacgcgtcgaactggcgccgggcaacagcgtggcaccaccgggcatacgctatcgtccgcccgccgcgccgctggaggtgaagccgccggcctaccagctactgcgcatcctcttccccgaaccggacgcaaccctgcgcgccaacagcggcgacgtcatcgtcaccgtcaccagcgagccggcgctgctgcccggccatcgctatcgcctgctgctcgacggcaagcctgccggagtgccgggacgcagcccggtgttcccgttgaagaacctcgatcgcggcacccaccaggtcgcagtggaaatcatcgatggcgacggcatgaccgtcgaaagcaccccgagccagcccttccacctgcatcgagtgagcatcgccgggcaacccctgccggaggtcgatacgccgctggtcagcgcgatagagccaagcgagcgctag

SEQ ID NO: 363657 - DNA, 522 bp, Pseudomonas aeruginosa
atgcgcctgatcaccagctgcctgctcctggccgccgccctgccggccatggcgcagatctaccaatacaccgacgccaacggcaacaaggtattcaccaaccagccgccagacggggtgcaggcgcagaccgtcgaactgcagccgaccaataccgtaggaatcgacacgccggaaaagtcctccgcgggcaatgccccggccgccgatagcgaggccgccgcctacgagatccttgccctcagcgacctccccacggaagaggcgctgcgcgccaacaacggcaccttcaacgtcagcgtcagcatccgcccggccctgcacagcggccaccagttgcaactggtgctggacggcaaaccctacggcacgcccagcggcggcacccgcttcaccctgcacgagatcgaccgcggcgaccacagcctcgcggtacaggtactcaacggcgaacgggtgctgcaatccagcccgccggtgaccttcaccgtgcagcgcgtgcacctcgggaagaaacgatga

SEQ ID NO: 363658 - DNA, 2208 bp, Pseudomonas aeruginosa
gtgccgatcatcgcccgcttcacccttcgctcccgcgtcctggcggccctgctgctgtgcctctgcgccgccctgttctactcgccgccgggcgccgcggcgctgccgaacccgttggcggggagttcctccggtggcgagaaggtcagcgatgcgcagttggaacaatcgctgaaccaggtcatccagaccctggagaacgacaggcagcgcgccgacctgctgaaaaagctgaaacagctgcgggacgtgaccaagaaaggcaaggaaagcgagggtggggtgctggggctgatcggcgataccctgaccagcctggaaaagcagttccagggcgcgaacagcccggtcgcgttatggggcaaccagttccagctggcgcgtgccgaactcgaggagcgctttcccagctggcgcgacctgccggcgatggtcttcgatttttcggtggtgatcctcctctgggcctgcctggccagcgcgctgctctggctcagccggcgcatgcgcgagcgcttcggcctgtcggcggagttgccgcagcatccgaagacccgcgacctgctgctgttttccctgcgcaagctgggcccctggctggtggccttcctcatcaccctgtacctgtcggtggtgctgccggactccctgagcaagaccctggcgatggtcatggcctatgtgctggtctgcggcacgctgttctccgcgctgtgcgtgatttccctctcgctgctcagcggcccgcaccgccagcgcgccctggatatcctgcggcgccaggcgttccgcccgttgtggctgatcggcagcctcgccgcgctgggcgaggtcgcccacgatccgcggctgatcgccggcctcggcgagcacacctcgatctgcctgagtaccctggccaacgccagcgccgcgctgttcaccgccttgttcgtgatgcgtttccgccggccgatcgcccacctgatccgcaaccagccgctggagcgccgcctcaagcgccgtagcctgcacgacctggtgcaactggtcggctcgctgtggttcgtgccggtgctggtgctggtggggatttccctgttcgccaccttcgtttccgccggcgacagcagttcggcgttgcgccgggcgctggtctgcgcggtgctggcggtggtggcgatgaccgtgatcgggctgatccgccgccgttccagtcgggtcggcgccggcccgcgccgcagcgcgccgtacatcgagcagttgcagagcttcggctacaccctgctgcacatcttcgtggtgctgttcttcatcgaggtcgccttgcgcgtctggggcatgtcgctgattcgctatgcggaaggcgagggcgagcagatcagcatgaaggtagtcagcttcggcaccaccctgctggtcgcctggctgatctggatcctcaccgataccgcgatccagcacagcctcggcctgggcggcaagagccggccgaacacccgcgcgctgaccatgctgccgctgatccgcaacgtactgttcgccaccatcgcggtgatcgccctgatcgtcgccctggccaacatgggcatgaacgtcaccccgttgctggccggtgccggcgtgatcggcctggccatcggcttcggcgcgcagtcgctggtggcggacctgatcaccggcctgttcatcatcatcgaggactcgctgtcgatcgacgactacgtcgacgtcggcggccaccttggcacggtcgagggcctgaccatccgtaccgtgcgcctgcgcgacctggacggcgtggtgcataccatcccgttcagcgagatcaagagcatcaagaactactcgcgccagttcggctacgcgatgttccgctggccggtgccggcgagcatgccgatcgacgacgcggtggcgctggtgcgcgaggtcgcgatggagctgcgcagcgacccggcggtctaccgcaacctgtggtcgccgatggaattgcagggcgtggagagtttcgacaacggccaggcgatcctgcgcttccgcttcaagaccgcgccgatcaagcagtgggaggtccagcgggcgttcaacctgcgcctgcgtcggcgcctcgaccaggccggcctcgaactgtccatgccgcgtctcaacgtacagttgagccgggcgcccaaggcgaaatccgcggaaccggacgagccgggcacgccggcggacggcggcatctag

SEQ ID NO: 363659 - DNA, 405 bp, Pseudomonas aeruginosa
atgcgtcactctctctggctcctgctcgccgccatcctcagcctgcccgcccaggccggcaccgaatgccgcgatatccacgaccgcgacctgcggcgcatgtgcaacgcactggaacgcggcgacagcggggattgcggcgacatcgacagccgcgacctgcggcgttactgcggcgcgctgctggcgccgggacagcgctacgactgcgacgacatccgcgacggcgacacgcgccgccagtgccgcgccatcgtccgcggcgaccgcaagcgctgcgacgacatcgacagccgcgacatgcgccgccagtgccgggccgtggtatcgcgtgcgccgtggcagtgcgacggcatcgacgaccgcgacatgcgccgcatctgccgggtcatcctgtcgcgctag

SEQ ID NO: 363660 - DNA, 1410 bp, Pseudomonas aeruginosa
atgtcgtacaagtcgcaccaactgatcaaagaccatgacgtgaagtgggtagacctgcgcttcaccgataccaagggcaagcagcaacacgtcaccatgccggctcgcgacgcgctggacgatgagttcttcgaagccggcaagatgttcgacggctcctccatcgccggctggaaaggcatcgaagcctccgacatgatcctgatgccggacgacagcaccgccgtcctcgatccgttcaccgaagagccgaccctgatcctggtctgcgacatcatcgagccgagcaccatgcaaggctacgagcgcgacccgcgcaacatcgccaagcgcgccgaggagtacctgaagtccaccggcatcggcgacaccgtgttcgtcggcccggagccggagttcttcatcttcgacgaagtgaagttcaagtccgacatctccggctcgatgttcaagatcttctccgagcaggcttcctggaacaccgacgccgacatcgagtccggcaacaagggccatcgcccgggcgtgaagggcggctacttcccggtaccgccggtcgaccacgaccatgaaatccgcaccgccatgtgcaacgccctggaagaaatgggcctggtggtcgaagtccaccaccacgaagtggcaaccgccggccagaacgagatcggcgtgaagttcaacaccctggtcgccaaggccgacgaagtgcagaccctgaagtactgtgtgcacaacgtcgccgacgcctacggcaagaccgtgaccttcatgccgaagccgctgtacggcgacaacggttcgggcatgcacgtgcacatgtcgatctccaaggacggcaagaacaccttcgccggcgaaggctatgccggcctgtccgagaccgccctgtacttcatcggcggcatcatcaagcacggcaaggccctgaacggcttcaccaacccctcgaccaactcctacaagcgcctggtcccgggcttcgaagctccggtgatgctggcctactcggcgcgcaaccgttccgcctcgatccgtatcccctacgtatccagcccgaaggcccgccgtatcgaagcgcgcttcccggacccggcagccaacccctacctggccttcgccgcgctgctgatggccggcctggacggcatccagaacaagatccaccccggcgatgccgccgacaagaacctgtacgacctgccgccggaagaggcgaaggaaatcccgcaggtttgcggcagcctgaaagaggcgctggaagagctcgacaagggccgcgcgttcctgaccaagggcggcgtgttcaccgacgagttcatcgatgcctacatcgagctgaagagcgaagaagagatcaaggtgcgcaccttcgtgcacccgctggaatacgacctgtactacagcgtctga

SEQ ID NO: 363661 - DNA, 1455 bp, Pseudomonas aeruginosa
atgaaactcatcgtcaagaccttccaggaaatcaccatcaagagccggccggtgcgcaagcgcttcatccggcagttggcgaagaacatccgcgcggtgctgcgcgacctggacccggagctgaaggtcgagggcgagtgggacaacctggaggtggagaccgccgtggtcgacgccaaggccaggcgcgagatgatcgagcgcctgacctgcaccccgggcatcggtcatttcctcgaggtccacgagtatccgctgggcgatttcgacgacatcctcgccaagtgcaaggcgcatttcggcgaccagttggccggcaagaccttcgccgtgcgctgcaagcgcgccggcaagcacgcgttcacctcgatggaggtggagcgttacgtcggcagcggcctgcgccgcgaatgcggggctgccgggatcgacctgaagcagccggaagtcgaggtgcggatggaaatccgcctcgaccgcctgttcgtcatccatcgccagcatccgggcctgggcggctatccgctgggcgcgctggaacaggtgctggtgctgatgtccggcggcttcgactcgaccgtggcggcctaccagatgatgcgccgcgggatgatcagccacttcgtgttcttcaacctcggcgggcgcgcccacgaactgggggtgatggaagtcgcccactacctgtgggagaagtacggccgctcgcagcgcgtgctgttcgtcagcgtgccgttcgaggaagtggtcggcgagatcctcaccaaggtcgacgacagctatatgggcgtgaccctcaagcgcatgatgctgcgcgccgccagccgcgtggccgagcgcctggagctggacgcgctggtgaccggcgaggcgatctcccaggtgtccagccagaccctgccgaacctctcggtgatcgaccgggttaccgacaccctggtgctgcgcccgctgatcgtcagccataagcaggacatcatcgacaccgcccggcagatcggcaccgccgagttcgcccggcacatgccggaatactgcggggtgatctcggtgaacccgaccacccaggccaagccctaccgcgtcgagcacgaagagtcgaaattcgacatggcggtgctcgagcgcgccctggagcgagccacccagcgcaccgtcgaccgggtgatcgacgaactcggccaggacctgcaggtggaagaggtcggcgaggtgctgcccggtcagattgtcatcgatatccgccatcctgatgcccaggaagacgaacccctggccctggaaggcgtcgaagtccaggcgctgccgttctacgcgatcaacagccgcttcaaggaactggacgccaaccgccagtacctcctgtattgcgacaaaggggtgatgagccgcctgcatgcccatcacctgctcaacgaggggcacaccaatgtgcgtgtttatcgtccggcttaa

SEQ ID NO: 363662 - DNA, 1818 bp, Pseudomonas aeruginosa
gtgatcgaaaatctgcgcaacatcgccatcatcgcccacgtcgaccatggcaagaccaccctggtggacaagctgctgaagctgtccggcaccctcgaccgcaaagaagcggaaagcgagcgggtgatggactccaacgaccaggaaaaagagcgtggcatcaccatcctggcgaagaacaccgcgatcaagtggaacggctacaacatcaacatcgtcgacacccccggtcacgccgacttcggcggcgaggtggagcgcgtgatgtcgatggtcgactccgtgctgctggtggtcgacgcccaggacggccccatgccgcagacccgcttcgtgacccagaaggccttcaaggccggcctgcgtccgatcgtggtggtgaacaagatcgaccgcccgggcgcgcgtccggactgggtcatcgaccagatcttcgacctgttcgacaacctcggcgccaccgacgagcaactcgacttcccgatcgtctacgccagcgccctgaacggcatcgccggcctcgaccacgagaagatggacgacaacatggacgcgctgttccaggcgatcatcgaccacgtcccggccccggtggtggacaccgagggtccgttccagatgcagatctcgcagctggactacaacagcttcctcggagtgatcggtatcggccgcatcacccgcggcaaggtcaagtccaacaccccggtggtggccatcagcgacgacggcagcaagcgcaacggccgcatcctgaagatcatgggccaccacggcctgcagcgcgtcgaggtggccgaggcggaagccggcgacatcgtctgcgtcagcggcatggaggagctgttcatctccgataccctgtgcgacccgcagaacgtcgaggcgctgccgccgctgaccgtcgaccagccgaccgtgagcatgaccttccaggtcaacgattcgccgttcgccggccgcgaaggcaagttcgtcaccagccgcaacatcaaggagcgcctggagaaggaactgctgcataacgtggcgctgcgcgtcgagccgggcgacagcccggagaagttcaaggtttccggccgtggcgaactgcacctgtcggtactgatcgagaccatgcgccgcgaaggcttcgagctggccgtgggccgcccggaagtggtgatcatcgagaaggacggcgagaagcaggagccctacgagaacgtcaccatcgacatcgaggagcagcaccagggctcggtgatggagcagatgggcctgcgcaagggcgacctgagcaacatgattcccgacggcaagggccgcgtgcgcctggagtacaccattccggcgcgcggcctgatcggcttccgcaacaacttcctgaccctgacctcgggcaccggcatcctgacctcgaccttcagccactacggtccgatcaaggccggcgaagtcagcaaccgccagaacggcgtactggtctccatggccaccggcaccgccctgacctactcgctggagaccctgcagagccgcggcaagctgttcctcggcccgggcgacgaaatctacgaaggccagttggccggcatcaacagccgtgacaacgacctggtgatcaacccgaccaagggcaagaagctcgacaacatgcgcgcttccggcaaggacgaagtcatcgccctggttccgccgatccgcttcaccctcgagcaggcgctggagttcatcgccgacgacgagctggtggaagtgacgccgaagtcgatccgcctgcgcaagaagatgctcaacgagaacgaccgcaagcgctacgagcgcagcaaggtctaa

SEQ ID NO: 363663 - DNA, 426 bp, Pseudomonas aeruginosa; identical to SEQ ID NO: 322132

SEQ ID NO: 363664 - DNA, 585 bp, Pseudomonas aeruginosa
atgtgggacgaacgctatgccgccgaagagtatgtctacggaaccgaacccaacgctttcctgaaggagcatgcgcagcggctggccgggccggtgctgagcgtcgccgagggcgaggggcgcaacgcggtgttcctcgcttcgctggggctggaggtgcttggcgtggacggctccgccgtcggcctggccaaggcgcgccggctggccgaggcgaaaggcgtgtcgatcgacaccctggtggtcgacctggcggactacgaaccgccggcagcggcgttcggcgcggtggtgtcgatcttcgcgcacctgcccagtcgcgtgcgcggcagactcaaccgcctgctggagcgttcgctgcgaccgggcggtctcttcctgctggaggcctatcggccggaacaactcggccgcggcaccggcggcccggcggacgtcgacatgctggtgagccgtgcggcgctggaggctgagctgccggagtgcgaagtgctgctggcgcgggaaatcgagcgcgaggtggtcgagggccgtttccacaccggcgcggcctgcgtggtccagttcatcgccaggaagaggtag

SEQ ID NO: 363665 - DNA, 3606 bp, Pseudomonas aeruginosa
atgcaatggattttcatgctggtgggcctgatcctcggcggcttcgccggggaatcgctggtcggcgccctcctcggcggcctttccggcctggccctgggacaggccgtctcgctgcagaacctggcgcaacagaacgagcgcctgcgcaagcagatgagcgaattcgccgaacgcttcgagcgcggcaccgaggtcatccaccagcgcttgctgcgcgtggagcgccaggcgcaggaccttcccgaaagcgttcccgagccggccgccggcatcgaccagccgctcgcagacacgcctcccgctcctcccgccgaggttgccccgccgctggactgggacatcgagctgccggccgtcgaggctgcgccgcctccgcctcgtccccccgaacccgtccagcccatcgagcgtcagccggcgttccagcctgacgcccagccagcgccgcgccgtgccgcccctccagcgcctccacgcgaaccctcgctggtcgagcgtggcttcgccgcggccaagggctggctgttcggcggcaacacggtattgcgcatcggcgtggtgctgctgttcatcggcctggccttcctcctgcgctatgcctcggaacgggtggcggtgccggtggagtaccgctacgccggggtggcgctggcagcgatggcgctgctcggcgtcggctggtggttgcgcgagcggcgcgccgcctacggcctgatcctgcaaggcaccggtatcgcggtgctgtacctgaccatcttcgccgccatgcgcctgcatccgctgatctctcccggcgcggcgctggccctgctggtggtggtgacgatctgctcggcgatcctcgccgtgctgcagaacgccatgggcctggcggtggtggcggcgctcggcggcttcgccgcgccgatcctgacctccaccggcagcggcaaccatgtagcgctgttcagctacttcgccctgctcaacgccggcatcttcgccatcgcctggttccgcgcctggcggccgctcaacctggtcggcttcgtcggcaccttcggcatcggcttcgcctggggactgcgctcctatacaccggagctgttcgccagcaccgagccgttcctggccctgttcttcctgatgtacgtcgggatcggcctgctcttcgcccgccgcaagctgctggaggccgcgcaggcgcctgccgagcgcggcgaactgctgcgctggtcggcgcgacaggccgactacatcgacgccaccgtgctgttcggcccgccactggtggggttcggcctgcaatgcgcggtgatcggccacatcgacttcggcatggccttcagcgccctggccctgggcctcttctacatggtcctggcgcgggtgctgcgcggccatgcttcggccggacgcaccagcctgctggtggaaatctgcctggcgctgggggtggtcttcggcaccctggccattccgctcggcctggacgcgcgctggacctcggccgcctgggccgtcgagggcgccggcatctactggctcggcctgcaccagcaacgccgcctggcgcggctcttcgccctgctgttgcagggcggtgcggcgttggcctacctgaatggcgtgcgcccgggtgagacgacgttgctggagggttcgccactgggcgcgctgatgctcggtgcagcggcgctgttcagcttctggcagctgcgtcgcgcgccggcgaaagcgctggccgactgggagccggcctgccggccgttgctggcggccgccggcctggccttcctctacctggtcgcaccgctctgcctggccgtcgacggcaccgccatcgcctgggccgtggccggcctggcgagcttgttcgccggcttgcgcctgggctcgcgtaccttcctgttctgcgccttcgccgtgcaactgctgggcggtgcgctgttcctcctgcatttgcagggcggcgatggccagggtggggtattcgactcgggctggcgtggcttgatgaccgcctcgctgattggcctggcgctgatcggcggcatgctgctggcggcgcgcgacccgctggtgaaggacgacagtcggctgctcatgggcttgagcctggtgctgctggccggtctggcgttcgtcaacctggcagtgctgttcgtcctgccttggcgcagcgccagcgcggtatgggccggtagcgggctgctgatcatctggctgagcttggtgctgcgccagcgcctgagcttctacttcggcctcgccttgcaggtagtgggcggcctggcgttcctcctcgccgggccgtcgctgttcggctcgctgagcggcgaaggcctgcggcccctggcccattccgggttctggacgccggcagtgctggccctggcggcgctggtcggcgcctggcggctgcgccgcgccggcgagcgcgagcgggcgctgggtatcggtaccctcggcctggccgagctgtcgcacttgctgctgctctggggagccggctggtgggcgctgaccgcgctgtgcgaaaccgtccgcttcgtgccttatggcctgcgcgagcatgcgttgctgctggtggccgcggcgacagtggcgtcgtggatgctgctggcgctgcgcgagcgctggcgcgaactggccctgctgtgcctggcgctggtcccggtggcgctgttggccctggccagtgcctggcgtttcgattaccagccgttcggcgaattcggctggctggcctggccgctgctgttcgccacgcacctgctgtcgctgcgacgccttgccccgttgctgccggcgaaggccctgagcgttgcccatgtgctcggttgctggctgttgctaggggtgctggcgctggagctgcgctacctgttcgccctgctcgccgaacagtacaacgcctggcgttggctgggctgggcgttggtcccgagcgcctacctgctgctggtggctggcgggcggagcctgccctggccgctgcgcgacttcccgcgggagtatcggctgctcgccgctgcgccggtggcgctgttgctgctcggctggttctggagcgccaacctgctcagcgacggcgctgccgagccgctgccttacctgccgctggccaacccgctggaactggggctgctgatcgtgctgttcgccctctaccgctggagcgacgccagcctggcctcgctcgtcgatggcaatgccagcgcgcgcctggggcgccaggcgttggccggcgcctcgctgttcgccctgctgaccctggcggtgtgccgcgccgcgcaccacctggccggcgtaccgttccaggccgaggcgctgaccgcgtcgatgctggtgcaggcggggctgtcgctggtctggacgctctgtgcgctgggcctgaccatcgccggtacccgtctcggccggcgcgacctgtggatggtcggcgcggcgctggtcggcgtcgtggtggtcaagctgttcttcgtcgagctgggcaacagtggcagcctggagcgaatcatctccttcatcggggtcggcgtcctgttgctggtcgtcggctacttctcacccttgcctccgcgtcgcgccgaggtcgcatcggaggccgagcagccatga

SEQ ID NO: 363666 - DNA, 1395 bp, Pseudomonas aeruginosa
atgacgcgctccttttcgttcagaaccgccggcctgctcctgctgggcgcctgcctgtccctgccgctgtcggcgaaggagtctgccgaaggtttcagccgccaggtggcgctgtcgctgcagggcgaaggtccctggtatcgcctgagcatcccgatgagcgtgcagttgtcggctgcccatgccgacctgcgcgacctgcgggtcttcgatgccgaaggcgaggccttgccctacgccctggtggccggcagcgagcgccaggccagcacgccgcatgaggccgaggtgcggctgttcccgttgcgaggcacgtccgccgccgacgcgacgcaaccgaacctgcgggtgcagcgcaacaccagcggcaccatagtcgaggtgctgacggaaaacgccgggccggctgccgagactttgcgcggctggctgatcgacgcgagcgcggtgacgtttcccctggagcgcctgcggctggactggagcagcccggaggagggcttccagcgcttctccgtggaagccagcgacgacctcgagcattggcaggcctggggtgacggacagatcgcccgcttgaccttcaacggcgaacgcatcgacgtcagcgaggtcaagcttcccggccgccaggcccgctacctgcgtctggcctggccggccggggcaaccgcggcagacctccatggcgcccgcctgcaaggcagcacgcggagcaccgagccggcgccgatgatctggtccgagccgctggccgggcgccaggcgggggacggcgagtaccgctggcagttgccgctggcgttgccgttgcagcgggtgcgggtgtccctggagcaggcgctgacccacaccatcgtcccggtggaactgtccggccgtgatcgtacggagaacgcttcgccgcgccgggaggccgcctggagcagcctggcacgcggggtcctctaccggctgccgatcgacggccgcaacgtacagcagaacgagctggaactgccgggctgggcggtgcgcgagctgcgtctgcaggtggaccaacgaggtaccggcctgggcccggaggtcccgtccctgagtgtcggcctgccggccagcgaactggtgttcctggtgcgcggcagcccgccgtaccggctggcgttcggcaagctcggcgcgcagtcggcggcgctgccgctcggcgtactgattcccggctataccgagagcaagcgcgccaccctgggtagcgccagcctgggcgaaccgctggaggtggccatggcggccgcggcgccggcaccgggtagcgactggaagaagatcggcctgtgggcggtacttctgctgggggtcgctctgctggtaataatggcaatgagcctgctgcgttcctcgccgaacaagccatga

SEQ ID NO: 363667 - DNA, 1941 bp, Pseudomonas aeruginosa
atgatcagaatggcgctcaagccactggtagcggcctgcctgctggcttcgctgtccaccgccccgcaggctgctccttcgccctattcgacgctggtggtgttcggcgacagcctcagcgatgccgggcagttccccgatcctgccggccccgccggaagcacctcgcgtttcaccaaccgggtcggcccgacctaccagaacggcagcggcgagatcttcggaccgaccgcgcccatgctgctcggcaatcagctcggcatcgccccgggcgacctggctgcctcgacctcgccggtcaacgcccagcagggcatcgccgacggcaacaactgggcggtgggcggctaccggaccgaccagatctacgactcgatcaccgcggccaacggctcgctgatcgagcgcgacaataccctcctgcgcagccgcgatggctacctggtggaccgtgcccgccagggcctgggtgccgatccgaacgcgttgtactacatcaccggcggcggcaacgacttcctccaggggcgcatcctcaacgacgtccaggcacaacaggccgccggtcgcctggtggatagcgtgcaggccctgcagcaggccggcgcgcgctacatcgtggtctggctgttgcccgacctgggcctgaccccggctaccttcggtggtcccttgcagcctttcgccagccaactcagcggcacgttcaacgccgagctgaccgcccagttgagccaggccggcgccaacgtcattccgttgaacatcccgctgctgctcaaggaaggcatggccaacccggcttccttcggcctggccgccgaccagaacctgatcggcacctgtttcagcggcaacggctgtaccatgaacccgacctacgggatcaacggcagcacgcccgacccgagcaaactgctgttcaacgacagcgtgcacccgaccatcaccggccagcgcctgatcgccgactacacctattcgctgctgtcggcgccctgggagttgaccctgctgccggaaatggcccacggcaccctgcgtgcctaccaggacgaactgcgcagccagtggcaggcggactgggagaactggcagaacgtcggccagtggcgcggcttcgtcggcggcggcggccagcgcctggacttcgactcccaggacagcgccgccagcggcgacggcaatggctacaacctgacccttggcggcagctaccgcatcgacgaggcctggcgcgccggggtcgccgccggtttctaccggcagaagctggaagccggcgccaaggattccgactaccgaatgaacagctacatggccagcgccttcgtgcagtaccaggaaacccgctggtgggccgacgcggcgttgaccggcggctacctcgactacgacgacctgaagcgcaagttcgccctgggcggcggcgagcgcagcgagaaaggcgacaccaacggccacctgtgggcgttcagcgcgcgcctgggctacgacatcgcccagcaggccgacagtccctggcacctgtcgccgttcgtcagcgccgactatgcacgggtcgaggtcgacggctattccgagaagggcgccagcgccaccgcgctcgactacgacgaccagaagcgcagctcgaagcgcctgggcgccggcctgcaaggcaagtacgcgttcggcagcgatacccagctgttcgccgagtacgcccacgaacgcgagtacgaggacgacacccaggacctcaccatgtccctcaacagcctgccgggcaatcgctttaccctcgaaggctacaccccgcaggaccacctcaaccgcgtctccctcggcttcagccagaagctggcaccggagctgtcgctgcgcggcggctacaactggcgcaagggcgaggacgatacccagcagagcgtcagcctggcgctgagcctggacttctga

SEQ ID NO: 363668 - DNA, 531 bp, Pseudomonas aeruginosa
atgagtttcaacaccgaagtacagcccggcatctgcatggagccggacgccatcacccaggaatacgtgttcaaccacaccatgttgcgggtcaaggatccgaagcgctcgctcgacttctactcgcgggtgctcggcatgcgcctgctgcgtcgcctggatttcgaggaaggccgcttctccctgtatttcctcgccatgacccgtggcgaagaagtgcctgatgcggtcgacgagcgccagcgatataccttcgggcgccagtcggtcctcgagctgacccacaactggggcagcgagagcgacgacagccagtaccacaacggcaaccaggacccgcgcgggttcggccatatctgtttctcggtgcccgacctggtggcggcttgcgagcgtttcgaaacgctcggggtgaacttcgtcaagccgctggaccgaggcatgaagaacgtggccttcatcagcgatcccgacggctactgggtggaaatcgtccaggccagcctgaacggcgagatggggcgcggctga

SEQ ID NO: 363669 - DNA, 1011 bp, Pseudomonas aeruginosa
atgtcccgcgttaccctgagccgctatctgatcgagcagacccgcagccacaacaccccggccgacctgcgcttcctcatcgaggtcgtggcgcgtgcctgcaaggaaatcagccatgcggtgtccaagggcgcgctgggcggcgtgctcggcagcatgggcaccgagaacgtgcagggcgaggtgcagaagaagctggacgtgatgtccaacgagatcctgctggaagccaacgaatgggccggcaacctggccggcatggcctccgaggagatggaccacccctaccagattccggggcgctatccgaaaggcgcctacctgttggtcttcgacccgctggacggctccagcaacatcgacgtcaacgtctcggtcggcaccatcttctcggtgctgcgctgccccaacgagtacctgaaccagaacgataccctgcgcgaggaagccttcctccagccgggcaccacccaggtcgccgccggctacgccatctacggcccgcagaccatgctgatgctgagcctcggcaatggcgtcaagggcttcaccctggatcgcgagctgggcagcttcgtcctcacccacgacaacatcagcgtgccggaaagcaccgccgagttcgccatcaacatgtccaaccagcgccactgggaagcgccggtgaaacgctacgtggaagaactgctggccggcaaggaaggcccgctgggcaagaactacaacatgcgctggatcgcctcgatggtcgccgacgtccaccgcatcctgacccgtggcggcgtcttcatgtacccgcgcgacgcccgcgagccggagaagcccggcaagctgcgcctgatgtacgaagccaacccgatgtcgttcatcatcgagcaggccggcggcgccgccaccaacggcacccagcgcatcctcgacatcaagccggagaacctgcaccagcgtgtcgcggtgttcctcggctcgaagcaggaagtcgagcgcatcaccggctaccacgcggagtag

SEQ ID NO: 363670 - DNA, 603 bp, Pseudomonas aeruginosa
atgagcgcgccctgggagaccttgctcgactggtggttcggcacctccagcgacgccgccgaggtggttgcccagcgcaacggcctgtggttcggcaagaacgtctgccaggacgccgatgccggcggccgtttcggcgacctggtgaaccaggcgctggacggcggcttgcaggagtggacggccgaggccgatggctggctggcgctgatcctgttgctcgaccagttgccgcggatgatctaccgcgacacgccgcgcgcctacgccggcgacgcccgggcgcaacgggtggtgcgcgagggcctggaaaaaggcttcgaccgccagttgccgccggtgcgccgggtgttcgcctacctggtcctggagcacgccgaggacctgcccagccaggagcgggcggtagcctgcttccgcgacctgcgcgatcaggtcggtggcagcgtgcgcaagcccttcgacgatttctacgactatgccgagcggcatcatgcggtagtcgcccgcttcggtcgctttccccatcgcaacgccattctcggccgcccctccagcgaggaggagacggcgttcctcagggaacccggttcgcgtttctga

SEQ ID NO: 363671 - DNA, 258 bp, Pseudomonas aeruginosa; identical to SEQ ID NO: 322140

SEQ ID NO: 363672 - DNA, 570 bp, Pseudomonas aeruginosa
gtgatcggtctgccgatccgggtgctctgcaccctgtggctgggcttgctgctggtcggttgcgcgggctcgccgaagaatccgccggccaccgagcaggtcgacctccagcgctaccagggcacctggtacgaactggcgcgcttgccgatgttcttccagcgcaactgcgcgcaatcggaggcgcattaccgcttgcaggaagaccagagcatccaggtgatcaatcgctgcctgaccctggatggcgactgggagcaggtggaggggcgggcagtcgcccagcaaccgggtcgcaccgacaagttgtgggtgcgcttcgacaactggttcgccaatctcttccccaacgtggcgcgcggcgactattgggtgctggcggtggacgacgactaccgtaccgcgctggtgggcaatccgaaccgtgaatacctgtggctgctgtcgcgtaccccgcaggtttcgcagcagacccgcgaacgtctgctggaagaagcgcgcagccgcggttacgcggtggacgagctgatctggcgggtacccgacggccagttgaagcggagccagtga

SEQ ID NO: 363673 - DNA, 1362 bp, Pseudomonas aeruginosa
atgtccgcaattttcgctgaacgtgcgttgctgccggaaggctgggcgcgaaatgtccgtttcgagatttccgcggacggagtcctcgccgggattcgtcccgacgccaacgccgacggcgccgaacgcctcggcggcgccgtgctgccggggatgcccaacctccattcgcacgcgttccagcgcgccatggccgggctcgccgaagtcgccggcaatcccaacgacagtttctggacctggcgcgagctgatgtaccggatggtcgctcgactgtcgccggaacagatcgaggtcatcgcctgccagctctacatcgagatgctcaaggccggctacaccgcggtggcggaattccactacgtccatcacgacctcgacggccgctcctacgccgaccccgccgaactttccctgcgcatctcccgcgccgccagcgccgcaggtatcggcctgaccctgctgcccgtgctttacagtcacgcaggcttcggcggccagccggccagcgagggccagcggcgcttcatcaatggcagcgaggcctacctggaactgctccagcgcctgcgcgcgccgctggaggcggcaggccactccctgggcctgtgcttccactccctgcgcgcggtgactccgcagcagatcgccacggtcctcgccgccggccacgacgacctgccggtccacatccatatcgccgaacagcagaaggaagtcgacgactgccaggcctggagcggacgccggccgttgcaatggctgtacgagaacgtcgcggtcgaccagcgctggtgcctggtccatgcgacccacgccgaccccgccgaggtggcggcgatggcgcgtagcggcgcggtggccggcctgtgcctgagcaccgaggccaacctcggcgacggcatcttcccggcgacggacttcctcgcccagggcgggcgcctgggcatcggctcggacagccacgtctcgctcagcgtggtcgaggaactccgctggctggaatacggccagcgcctgcgtgaccggaaacgcaaccggctgtaccgcgacgaccagccgatgatcggccgcacgctctacgacgctgctctggctggcggcgcccaggcccttgggcagccgatcggtagtctcgccgtgggccgtcgcgccgacctgctggtgctcgacggcaacgacccctacctggccagcgccgagggcgacgccctgctcaaccgctggctgttcgccggcggcgaccgccaggtgcgcgacgtgatggtggccggcagatgggtggtgcgcgacggccggcatgcaggggaagagcgcagcgcacgggcattcgtccaggtgctgggggaactgctcgactga

SEQ ID NO: 363674 - DNA, 753 bp, Pseudomonas aeruginosa; identical to SEQ ID NO: 322143

SEQ ID NO: 363675 - DNA, 591 bp, Pseudomonas aeruginosa
atgagcgaactccgcatcctgcgcgccgtcgactacccgagaatgccgtggaagaacggcgccggctccaccgaggagatcgcccgcgacggcggcgacggcctggacggcttcggctggcgcctgtcgatcgccgatgtcggcgagtccggcggcttctcccgcttcgccggttaccagcggatcatcagcgtgctggagggcggcggcatgcgcctgcgggtggatggcgcggaatccgcgccgctacgcgcccggcaggccttcgccttttccggcgacagcgaggtgcactgcaccctgctcgctggagctatccgcgacttcaacctgatctatgcgccccggcgccatcgcgcgcgcctgcaatggctgcgggtcgagggcgagctggactggcacggcacggcgagcacgctgctgctgttcgcccagcaggacggggtagcgatttccttgcaagggcaacctcgcgggcaactggctgcccacgactgcctgtgcgccgaggggctgcagggcttgcagcattggcgcctgacggcccacgagccggcgtgggtctgtgcggtggaactcgattcgctgtga

SEQ ID NO: 363676 - DNA, 1023 bp, Pseudomonas aeruginosa
atgcccccgcttcgccagatcctcgccgtcctcgccctgggcgccagcctcgccagccagaccgccgtcgcggcggaatgcccgtacccgggcaaagtggtgttcgccgggctgaactgggaaagcggcatgttcaccaccgacctgttgcgctacgtactggaaaaaggctacggctgcgagaccgacgcgctgccgggcaataccgtgaccatggaaaacgccctgcgccagaacgatatccaggtcaccggggagcaatgggccgggcgtagcccggtgtggcgcgcggcggaggaggcgggcgaggtgttctccgtcggcgagacggtgaagggcgccaccgagggctggtgggtgccggagtacctggtcaagggcgacccgcaacgaggcatcgaggcgaaggcgccggagttgaggtcggtcgccgacctgccgcgctacaaggcgctattccgcgatcccgaggagcccgccaaggggcgtttctacaactgcccgaccggctggacctgcgagatcgtcaacagccagaagctcaaggcctacaggttgcaggacagctacacgaacttccgcaccggcaccggcccggcgctggatgcggcgatcagtgcggccttccggcgcggcgagccggtgcttttctactattggtcgccgactccgttgatgggccgtttcaagctggtgcaactggaagagccgccgttcagcgagaaggcctgggccaccctgtccgatccgaagaaccccgaccccatcggttcccgctcgttgccggcgaagatcaccattggcgtttcccgcgatttccatgacaaggcgccggcgttggtcgagctgttccgcaaggtcgagatccccttgccgctgttcaacgagctgctcgccgacatggcgcagaatcatcgcgaggtcggcgaggtgcgtgcgcagtttcttcgccagcatcgcgaaatctggagccactgggtgccggccgaagtcgccgcgcgcctcgatacctccctgaagtaa

SEQ ID NO: 363677 - DNA, 705 bp, Pseudomonas aeruginosa
atggcgcactacctgagcgggcgtcagcgcaccctggtgcggcggctccaggataccttccagacgcgcagcgaatggccgacctggctgctggtcgcctgcctgtacggcggttgggcactgctcgcgagccagtatgagcgctggggttggccggtactggcgggactggtgccgttcgcctccctctacatgtcgttgcagcatgagctgatccatggccacccgacccgctggccgaggttcaacgccatgctcggctacctgccactggccgtctggtatccctatccgctgtaccgtgacagccacttgcggcaccacctcgacgagcaactgacctacccggggctggaccccgagagtcgctacgtcagtctgtccgagtggccgcgcctgggctcctggcggcggcgctggctctgcctggacaagaccctgctcggtcgcgccaccctcggcccgctgctggccctggcggcgatggcgcgcctggaaggttcgcggttgcgccggggagagggtgccgcctggcgcctgtggggcctgcatgccgtgctgctgggcggcccgcgagccggcgcagcgcagcgtgctggtcgaggcggggtggccgtggcggctgctgttcctcaacaacaacctgcatctggtccaccacgatctgccgggcctgccctggtacctgctgccgcgcgtgtatag

SEQ ID NO: 363678 - DNA, 798 bp, Pseudomonas aeruginosa
atgatcgataccccggtggtggcggcgctggacatgtatgtcgagccggactgcgtcaggcaggccggcgcaaccttcatcggcgaggtctgccggcgcctgggcgtgcgccgttacgcgtcggccgccaccgatctggcggtgcagtggcgacagcctaacctgttgttcgcgcagacctgcggctatccgctgatgacccagttgcgcggccaggtggcggtgctcgcggtgcccagctacgacttgcccgattgtgctcccggcgagcattgcagcctgttcgtcgctgccgaaggacaggcgcgccagcgcctcggcgacttccgcaatacccgcctggcgctcaacgaccacgactccaacagcggcatgaacctgctgcgccatgcgctggcgccgctggggcgagactcggcgttcttcgccgaggtgcacatcagcggcggccacctgcgcagcctggcgatggtggccgcgggtgaggtcgagctgacctcggtggatgcagtgaccttcggctacctgcaacgccacgcaccggagcgcctggccggcctgcgcgtgctcgggcgcagcgcgccgagcccggccttgccgctgatcacctcgctgcactggagtgcggcgcaacgccgcgagctgttcgaagcgctgaacctgacgctgatcgagtgcccgcacctggccgcgacactggcgctgaaaagcttcctcccggccggcgaggagcattaccggattctcctcgactacgagcgtcaggcgcagggctggggttacccgcaattgcgctga

SEQ ID NO: 363679 - DNA, 1680 bp, Pseudomonas aeruginosa
gtgaccaccccgagcaaattccgcgatattgaaatccgcgccccgcgcggcactacgctgaccgccaagagctggctgaccgaagcgccgctgcgcatgctgatgaacaacctcgacccggaggtcgcggagaaccccagggaactggtggtttacggcggcatcggccgtgccgcgcgcaactgggagtgctacgacaggatcgtcgagaccctcaagcaactgaacgacgacgagaccctgctggtacagtccggcaagccggtcggcgtgttcaagacccacgccaacgcgccgcgggtgctgatcgccaactccaacctggtgccgcactgggcgacctgggaacacttcaacgaactggacgccaagggcctggcgatgtacggccagatgaccgccggttcgtggatctacatcggcagccagggcatcgtccagggcacctacgaaaccttcgtcgaggctggccgccagcattacgacggcaatctcaagggccgctgggtgcttaccgccggccttggcggcatgggcggcgcccagccgctggcggcgaccctggccggcgcctgttcgctgaacatcgagtgccagcagagccgcatcgacttccgcctgcgcagtcgctacgtcgacgagcaggccaaggacctggacgacgccctggcgcggatccagcgctacaccgccgaaggcaaggccatttccatcgccctgctgggcaatgccgccgagatccttccggaactggttcgccgcggcgtacgcccggacatggtcaccgaccagaccagcgcccacgatccactcaacggctacctgccggccggctggagctgggaagagtaccgcgaccgcgcgcagaccgacccggccgccgtggtcaaggccgccaagcagtccatggcggtacacgtgcgggccatgctggcgttccagcagcagggcgtgccgaccttcgactatggcaacaacatccgccagatggccaaggaagagggggtggccaatgccttcgatttccccggcttcgtcccggcctacatccgcccgctgttctgtcgcggcatcggtccgttccgctgggccgcgctgtcgggcgacccgcaggacatctacaagaccgacgccaaggtcaagcaactgatccccgacgatgcccacctgcaccgttggctggacatggcccgcgagcgcatcagcttccagggcctgccggcgcgcatctgctgggttggcctggggctgcgcgccaagctcggcctggccttcaacgagatggtgcgcagcggcgagctgtccgcgccgatcgtcatcggccgcgaccacctcgactccggctcggtggccagccccaaccgcgagaccgaggccatgcaggacggctccgacgcggtgtccgactggccgctgctgaatgccctgctgaataccgccagcggcgccacctgggtctcgctgcaccacggcggcggcgtaggcatgggcttctcccagcactccgggatggtgatcgtctgcgacggtagcgacgaggccgccgaacgcatcgcccgcgtgctgaccaacgacccgggtaccggggtgatgcggcacgccgacgccggctaccaggtcgccatcgattgcgcgaaggagcagggcctgaacctgccgatgatcaccgcccagcgctga

SEQ ID NO: 363680 - DNA, 1443 bp, Pseudomonas aeruginosa
atgacccagggcagcgacagcaagccactgatcgaacggcgctcgatcgactacatcccggcgaacgagcgccacggccgcctctacagccagttcaccctctggctgggggccaacctgcagatcaccgccatcgtcaccggcgccctcgccgtggtcctcggcggcgacgtgttctggtcgctggtcggcctgctcatcggccagctcctcggcggcgcggtgatggccctgcacgccgcgcaggggccgcgcctggggctgccgcagatgatttccagccgggtgcagttcggcgtctacggcgcctgcatcccgatcgcactggtgtgcctgatgtacctgggcttcaccgccaccggcacggtgctttccggccaggccatcggccagctcaccgggctcagcgacagcgccgggatcttcatcttcgccgccttcatcgtcctggtgacggtgctcggctatcgcgtcatccacatcatcgggcggatcgccagcgtcctcggcatcatcgccttcgcctacctgttcagccgcctgatgctgctcagcgacatcggcgacctgctcgccatccgccatttcagctgggcctcgttcctcctcgcggtgtcgctggcggcgtcctggcagatcgccttcggcccctacgtggccgactattcacgctacctgccggcgtccacctcgtcgtggaagaccttcctcgccgtcggcctcggctcggtgctcggcgcccaggcctcgatggtcctcggggtgttctccgcagccctggccaacggccagttcgccggccgcgaggtggcctacatcgtcggcctgggcagcagcgggaccgtcgccgcgctgctctacttcagcatcgccttcggcaaggtgaccatttccacgctgaactcctacggcagcttcatgtgcatcgcgaccatcatcagcagcgtacgcggccaactggagatcacccgcgtgcaacgcctgttcttcgtcctcgcgatcgtcggcgcctcgacgctcatcgcgctgctcggccagcactcgttcctcgctgcgttcaagtccttcatcctgttcctgctgaccttcttcaccccgtggagcgcggtgaacctggtcgactactacttcatcacccgcgagcgctatgacgtgcccgcgctggccgaccccgacggccgctacggtcgctggaacctgccgggaatcgccgtctataccctcggcgtgctggtgcagatgccgttcctggcgaccacgctgtacaccggaccgatggtcgagcacctcggcggcgtggatatctcctggatcatcggcttgctggtgccggcggtcctctactacctggtggcgcggcgcaaggccacgcgccaggccccggcgcgaatgatcctgccggccgatcccggcgccttcgaacgtcccgcgcacggggcctga

SEQ ID NO: 363681 - DNA, 1530 bp, Pseudomonas aeruginosa
atgagcctgcatctgaaacccggccagttgaccctggccgacctgcgccaagcctacctggcccccgtgcgcctgagcctggatcccagcgccgacgcgccgatcgccgccagcgtcgcctgtgtcgagaacatcatcgccgagggccgcaccgcctacggcatcaacaccggcttcggcctgctggcctcgacgcggatttccccggccgacctggagaagctccagcgttccatcgtcctgtcccatgccgccggcgtcggcgaggcgctggacgacgccatggtgcggctggtcatgctgctcaaggtgaacagcctggcgcgcgggttctccggcatccgccgcaaggtgatcgacgcgctgatcgcgctgatcaacgccgaggtctatccgcacatcccgctgaaaggctcggtgggtgcgtccggcgacctggcgccgctggcgcacatgtcgctggtgctgatcggcgaaagccgggcgcgccatcgcggtgagtggctgccggccgccgaagcgctggcggtggccgggctggagccgctgaccctggcggcgaaggaaggcctggccctgctcaatggcacccaggtgtccaccgcctacgcgctgcgcgggttgttcgaggccgaggacctgttcgccgccgccaccgtctgcggcgggctcagcgtcgaggccatgctcggttcgcgggcgccgttcgatgcgcgcatccatgccgcgcgcggccagcgtgggcagatcgacgtggccgcggcctatcgcgacctgctcaccgccagcagcgaggtggcgcgctcccatgagaagtgcgacaaggtccaggacccctattcgctgcgttgccagccgcaggtgatgggcgcctgcctgacccagatgcgccaggccgccgaggtgctggagatcgaagccaacgcggtgtccgacaacccgctggtattcgccgccgagggcgacgtgatctccggcggcaacttccacgccgaaccggtggcgatggccgccgacaacctggccctggcgttggccgagatcggttcgctgtcggaacggcgcatctcgctgatgatggacatgcacatgtcgcagttgccgccgttcctggtggccaacggcggggtcaactccggcttcatgatcgcccaggtcaccgccgccgcgctggccagcgacaacaaggccctggcccatccggccagcgtcgacagcctgccgacctcggccaaccaggaagaccatgtgtcgatggcgccgaacgccggcaaacggctctgggcgatggccgagaacgtccgcgggattctcgccgtggagtggctgggcgcctgccagggcctggacttccgcgagggcctgaagagttcgccgaagctggagcaggctcgccgcctgctgcgcgacaaggtgccgtactaccaggaggatcgcttcttcgcccctgatatcgaggccgccagccagttgctcgccagcggttgcctgaacgcgctgctgccggcccggctgttgccgagtctttga

SEQ ID NO: 363682 - DNA, 1404 bp, Pseudomonas aeruginosa
atgacgcacgacacggggcttcggcgcggactgaacgcccgtcatattcgtttcatggcactggggtcggcgatcggcaccggcctgttctacggttccgcatcggccatccagatggccgggccggcggtgctgctggcctacctggtcgccggcgcggcggtgtacatggtgatgcgcgcgctcggcgagatggcggtgcacgagccggtgtccggctcgttcggccattacgccagcagctatctcggccccctggccgggttcgtcaccggctggacctacgctttcgagatgatcatcgtctgcctcgccgatgtcaccgcgttcggcatctacatggggttctggtttcccgacgtgccgcgctggatctgggtactgtccatcgtgctgttcatcggcgggctgaacctctgccatgtcaaggtcttcggcgagctggagttctggctgtcgctggtcaaggtcggcgccatcgtcgcgatgatcctcgccgggctcggcatcatgttcttcggcttcagcctgggcggcgcggcgacgtccgccaccggcgtgcacaacctgtggcagcacggcggcttcctgcccaacggctgggccgggctggtcgcctcgctgtcggtggtggtattcgccttcggcggcatcgagatcatcggcatcaccgccggcgaggcgcaggacccgcagcgggtgatcccgcgggcgatcaatgcggtgccgctgcgcatcctgctgttctacgtgctgaccctgttcgtgctgatggcgatcttcccctggcagcagatcggcagcaacggcagtcccttcgtgcagatcttcgacggcctggggatcgagtcggccgcggcgatcctaaatgtcgtggtgatcaccgcggcgatctcggcgatcaacagcgacatcttcggcgccggtcgcatgctctacggcatggcccgccagggccaggcgccggtcggcttctcgcgggtgtcgcggcacggcgtgccgtggatgaccgtgctgctgatggcggtggccctgctgctcggcgtggcgctgaactacctgatcccgcagagcgtattcctgttgatcgcttccatcgccaccttcgccaccgtgtgggtctggctgatgatcctcctggcccaggtcggcatgcgccggcgcatggggccgcgccaggtcgccgcgctgaagttcccggtgccgctgtggccattcgcgccggcggcggcgatcgtcttcatgctgttcatcttcgtggtgctcggctatttcccggacacccgcccggccctgtgggtcggggctatctggatcgccttgctggtgatcgcctaccggcgctgggtcaggccgaagggcgatgccgcgcatggcgtgcttcaggcccagggagggctgtga

SEQ ID NO: 363683 - DNA, 969 bp, Pseudomonas aeruginosa
atgcgatacaagaagtcgatgttgagtgttctctgtgccctcggcctgctcgccgccgcggcgggcgcccaggcggaaggctggtgcgagtccggcaaggcggtgaagttcgccgggctgaactgggagagcgggaccctgctcaccgagctgatgcagttcgtcctggccaagggctacggctgtaccaccgacagcctgccgggcaactcgatcaccatggagcaggcgctgagcaccaatgacatccaggtcttcgccgaggagtggatcggccgcagcgacgcctggaacaaggccgccgccgccggcaaggtggtcggcgtcggcgaacccatcgtcggcgcggtggagggctggtacgtgccgcgctacgtgatcgagggcgacccgcagcgcaagctcgaggcgaaggcgccgaagctgcgctctatcgccgacctggcgcagtacgccgaggtcttccgcgacccggaagagccgggcaaggggcgcttctacaattgcccggccggctggacctgcgagctggagaacagcgagatgctgaaaagctacggcctggaggagacgttcaccaatttccgtccgggcaccggcccggcactggacgcggcggtgctgtcgagctatcggcgcggcgagcctatcctgttctactactggtcgccgacgccgctgatgggccgcgccgacctggtgcgcctggaggaaaggcccggcgtcgacaagcgcatcaggatccaggtcggcctgtcgcggaccttccacgaccaggcgccggagctggtggcggtgctggagaaggtcaacctgccggcggagctgctgaacagcgacctggcgcggatggccaaggaccggatcgatgcggcgcgcctggcgcgcgagttcctcaaggagcaccccgaggtctggcacgcctgggtcgacgaggacgcggcgaagaagatcgaagcggcactctga

SEQ ID NO: 363684 - DNA, 852 bp, Pseudomonas aeruginosa; identical to SEQ ID NO: 322153

SEQ ID NO: 363685 - DNA, 831 bp, Pseudomonas aeruginosa; identical to SEQ ID NO: 322154

SEQ ID NO: 363686 - DNA, 1533 bp, Pseudomonas aeruginosa; identical to SEQ ID NO: 327392

SEQ ID NO: 363687 - DNA, 1209 bp, Pseudomonas aeruginosa
atgaaacgactctggcagcattgccatgccgccaccctcaagggcggcaagtactcgatcgtcgaggacgccgccctggtcaccgacggtccgctgatccactggatcggcccgcgcgccgaactgccgcccggcgactacgccgaacgcatcgacctcgatggcgcctggctgaccccggggttgatcgactgccacacccacgcggtgttcggcggcaaccgcagcggcgaattcgagcagcgcctggagggcgtcagctacgccgagatcgccgccgccggcggcggcatcgccagcaccgtacgcgccacccgcgaggccagcgaggaagaattgctggccagcgcgcgcaagcgcctggagcccttgctgcgcgacggcgtgacggcgctggagatcaagtccggctacggcctcgacctggccagcgagcgcaagatgctacgagtcatccgccgcctcggcgaacgcctgccggcgaccgtgcgcagcacctgcctggccgcccatgcgctaccgccggaatacgccgggcgcgccgacgactacatcgagcatatctgctcgacgatgctccccgcgctggccggggagggactggtggacgcggtggacgccttctgcgagcacctggcgttttccccggcgcaggtcgagcgggtattcatcgccgcccgcgagctgggcctgccggtgaagctgcacgccgagcagctatcctcgctgcacggttccagcctggcggcgcgctaccgggctttgtcggccgaccacctggagtacatgaccgaggacgacgcccgcgccatgggcgaggcgggcaccgtcgcggtgctgctgccgggcgccttctacctgctgcgcgagacccaactgccgccgatcgatgccctgcgccggcacggcgtggccatggccattgccagcgatctcaatcccggcacctcgccggcgctgtcgttgcgcctgatgctgaacatggcctgtaccctgttccgcctgaccccggaggaggcgctggccggtgtcaccctgcacgccgcccgggcgctggggctggaagccagccacggcagcctggaggtcggcaagctggccgacttcgtcgcctgggacatcgagcgtccggcggagctggcctactggctgggcggcgatctgccgaaacgcgtcattcgccacgccgaggaggtataccgtggatga

SEQ ID NO: 363688 - DNA, 801 bp, Pseudomonas aeruginosa
gtggatgaagtcctgagtttcaagcgcggccgcgtgccgctactgatcagcatgccgcaccccggcacgcgcctgaccccggcggtggacgccggcctggtggaggaggcgcgggcgctgaccgataccgactggcacattccccggctctacgatttcgccgaggaactgggcgccagcaccctggctgcccactattcgcgctatgtggtcgatctcaaccgcccttccgacgacaagccgctgtacagcaccgccactaccggcctgtatccggacaccctgttcgacggccggccgctctaccgcgaaggcatggcgccgtccgccgaggaacgcatgcgctacctggccgaagtgtggacgccctaccaccggaccattgccgaggaactggcgcggctgaaggccgagttcggctacgcgctgctctgggacgcccactcgatccgttcccacgtgccgcacctgttcgacggccgactgcccgacttcaatctcggcaccaacgccggcgccagttgcgatccagcgctggcggcccgcctggaggcggtctgcgctgccgccgaaggctacagccatgtgctcaacgggcgcttcaagggcggccacatcacccgccactacggccagccggagcagcacgtccatgccgtccagctggagctggcgcagtgcacctacatggacgagctggccccgttcgcttaccgcgcggacctcgccgaagcgacccgcgcggtcatccgcgaactgctggaaagcctcctcgcctggggtcgcgagcgctacgcctga

SEQ ID NO: 363689 - DNA, 2373 bp, Pseudomonas aeruginosa
atgttcgcccccgccaaccagacgcacttcagccttcgcatcgaaaacctccggcacgacttccaggtactcgccttccgcggtcgcgaagccatcagccagccctttcgcttcgacctggaactggtcagcgagcgatccgacctggacctcgacgcgctgctgcaccagccggccttcctgatcctctcgccgagcggggagggggtccacggacagctcaccagcatcgcccagggggactccggcaagcgcctgaccggctatcgcgcgaccctggagccgcgcctggcctacctggggctgtgcagcgaccagcgcatcttccagcgcctcagcgtgccggaaatcatcggccgggtgctggagggccacggcattctcgccgacgcctaccgcttccagctgggcccgacgccgtacccggcccgcgaatactgcacgcagtacgacgaaaccgacctggcgttcctcagcaggctctgcgaggaggaaggcatccattaccaccatgagttttctgcccagggccatgtgctggtcttcggcgacgaccagacctcctttccgcggctgcaacgccccgtcgcctacgtgcaggacgccgggctggtcgccgaccagccggtggtcaagcgcttcggcgtgcgcttcgacacccgtgccagccgggttacccggcgcgactacgacttcgagcaacccgcgttgcagatgcaggccgcccatggcccgcagcccggggcgcagcaaccggacctggaggactacgactatcccggccgcttcacccaccgcgagcgcggcaagcacctgagtcggcgcgcgctggaacggcatcgcgccgactacctacaggccaggggcgaaagcgacgaaccggcgctgctcagcggacacttcctgacgctgtccgcgcatccccgcggcgaatggaacgatctctggctgcttaccgaggttctccacgaagggcggcagccgcaggtactggaagagttgatcgacagcgacgtcgcgcagggccggggcgatttccgccagggctatcgcaaccgtttcgtcgccactccctggagcgcgcatttccggcccccgctggagcatcccaagccacgcgtgctgggctgccagacagcggtcgtgaccggccccgccggcgagaccatccactgcgaccaatacggccgggtcaaggtgcagttcttctgggatcgcctcggccaggccgacgacaacaccagttgctggttgcgcgtcgcctccaactgggcgggcaagcgctatggcggcgtcgccatcccgcgggtgggcatggaagtcctggtgggtttcctggagggcgatccggatcagccgctggtcaccggctgcctctaccacagcgaaaaccgggtgccctacgagctgccgcagaacaagacccgcagcgttttcaagaccgacagctaccccggcggcggcggtttcaacgaactgcgcatcgaggaccgcaagggccaggaacagatcttcgtccacgcccagcgcgactgggacgagaacatcgagcacgaccagaagatccgcgtcggccacgagcgccacgacacggtcgagggcgatagctacagcgagttcagggccgaggaacagcgcacggtccatgccgaccgcaaggtcgaactgaaggcggccgaccacctcagcgtcgccgacgcgttgcacctgaggatcggcaccggccagttcgtcgaggcgggcgacgagatccatttcaaggccggcgacaaggtagtgatcgaggcaggcatggagttgaccctaaagggcggtggcagcttcgccaggctcgacccgggcggtgtcacccttgacggcgcccaggtgatgatcaacagcggcggcagccccggcatcggtagcggcgttcgcgcgctgtcgccgctgcaaccgctcgcggccgacgccgcggcggcgggaggcgccttgttgggagccatcgcccagaaggtcggcgaagcgccgcagaaactcctgcgtttcgaactcagtccgttgcccggtgtgccatcggcggccaggcaaccgtatcggctctacgccaatggtgccttcaaggaggagggcatcgccgacgaaggcggcgcaatcagcttcgaaccgctgccgggcgaacgcacctatcgcatcgagaccgccaatggccacgcctacgaagtggagatggtcgaccagccggacgcactgcaggccgacgatcggctcgcccagcaggggttccgcgactaccgggcggaaatgccccagcacaagccgcgttccgccccggacgcctaccggcgcgacgcctcgcggcccggcgccgccgacaaggatgagcccacgccatga

SEQ ID NO: 363690 - DNA, 2238 bp, Pseudomonas aeruginosa
atgagcgacctgtacaaaccgcagaccctcaagctatacgcgcaacaggccggcagcgtccggctgaccctcgactggttcgccaacaaggctttctacccgccgcgcgcgggtgtgcacatcaagccgctgatcaatggccaggcggccttcgacgcggtgcatgcggcgatggaagcggcccggcacagcatcgacatcatcacctggggcttcgacccggccatgcgcttcaaacgccccgacggaccgcgaatcggcgaattgctgcagacgaagggccgcgaaggagtgcaggcgcgagtgctggtctggagcaaccaactcgccaggctcaaggaaaacaccatccccggggccggcgtcggcggttccggcggcacctgggcgggctcgggcgtcgccagcggcagcgcagtggacaacgaggtgctgcgactggagcagcggcgccagcataacctcaacctcatcgcgcggcagcaggaagccctggagcgctcggaacggctgcaccgcgaaggcaggctgccgagcttcgacccgcggggcgccgcccacgcgcggacgcgcatcgccgagctggaggcggagaacgccgagatccagcgcactctcgacagcagcggggcccagggctacggcggcaagcgcggttccggcggcacccgccaggatccctgggggcagatattcacccgcgactggttcaaggcggtacgcggcggtgggttgcagaacgtcgagttccgtacccgcgacttcgagcagacggccagaccggtgatgaacggcgagcaagtgcgcctcgtcaatgggcggctgcaaagcctgatccacctgttgcgcgccgatggcatcgacgacctgggcatcggccagttgctggtactcacccagttcgccagccatcaccagaagatggtcctggtcgactatggcagcccgcaggccatcggcttcgtcatgggtcacaacatgcaccgcaactactgggacaccagcgcccacctgttcgacgaccgcgccgccggtcgcgatcccgggttcgggccctggcaggatatctccatgcaggtccagggaccggtgctggccgacctcagccgcaacttcagcgaggcctgggacctcgagacgccgtggtacaagcgctggttctcgacgccatcgctgaccgccgagcgcgacgccttgccgctgccgaagatcgccacgcccgccagcaacagcgtcgcgcagatttgccggacccagccgcaggacgacgagcgctcgatcctggagcactatctcaaggccctgggcaatgccaccgactacgtctacatggaaaaccagtacttccgttatgccggcttcgccgagcgcctgcggaagactgcgcaggtgcgcaaggcccggggcgtgcccggcgacctgtacctgttcgtcgtgaccaacacccccgactccagcgacgcctcgaagaccacctacgacatgatgaaaggcctgggccaggagcaactgatgccgcaggtacagcgcgacctggcgcatgacttgagggaaaagcgggagcagttgaagcaggtcagggaaaacctacatcccgatccctatgtccggcgcggccaggaaaacaacatcgaacggctggagcgcaagatcgaggcgctcgaagagaaaggcgtgacgccggaagtcgagcaacgcctcggcgatctcggcgcgcaggagattcccggactggcgaagaacaccggcgaggacgacaagccctatcaactcgccgaagtacccggcctcaaggtggtcgtcgccaccctggccaccagtgaccctgcccccggcagcccgccgccagggcgcctgtccgccgaagccgaggccgccctcggggcgccgccgctgaaggcgcgctacaaacacatctacgtgcactccaagctgctgctggtggacgacctctataccctgctcagctcggccaatatcaatgtccgcagcatgcatggcgacagcgaattgggaattgcccagcccaatccggatttggcgagggcgatgcgggaggagttgtggggactacatgcgtatgaagtggctgcaacaaccaaggacaactttgaactttggaatcaaacaatggacaagaactggaaacagcagcgaaacgatgaacctctcactagccatctattacggttctgggatgtcataacaccttatagcccgagctttacggtggattaa

SEQ ID NO: 363691 - DNA, 822 bp, Pseudomonas aeruginosa
atggctgagaccaagccctttgtctgtgtcaatgaaaaagaccatcttcccccgctggatccgcaggctgacgcatggtatagcgaggcggtaagcctagccaagcctgacgctctgcggccgtgggagcgcattgtcgatttgtacagcaaagcaatggagcgtggccattggaaggcgatgcataacctggcaaatctctatcgaacggggtggcctggtggagtagagaaggatacacagaaagctctggatatttaccagaagatgatcgacctaggagtaccccaaggtttctatgacatgggggcaatgattggtaatcgtgccggtgttaagaaccctgctaccgatggtctgaccttcttggataaagccgctagtttggggaacccgccagcactgaccgagttgggtaaactctatatttatgtggccaaggaaaaggaattggggctggcgtataccagttgtgcttccagtcaaggttatgctccggcgagctatgagcttggaagctactatgagttggttgagcataattatccaaaggcacttagatactatcaagtctccgtctctcaaggcggcaggagtgccgccttttttctctcgcgcgtcttcggaaagaggacgcctccttcaagtgcaatgtggtatacgccggatgaaaagcttgagaaattctattactccctctatctgcaaattgatgccgaccccgatcttcgttttcccaatttggtaaaagataaccccttgccaccccaccccgtccagggctacgacgcagctcgacccgactggaagccgggtcagtga

SEQ ID NO: 363692 - DNA, 909 bp, Pseudomonas aeruginosa
atgaagctccgccatatcgaagtgttccaggcgatccgccaggctggctcggtcagcggcgccgcacagttgctgcatgtgtcccaaccggcggtgagcaaggtcctgcagcacgccgagcagcaactgggcttcccgctgttcttgcgagtgcgcggcaagctgctggcgactccggaagcgctggaactggagcgcgaagtggccaagctcagcgatagcctgcaggccgtgcggcgcctggcgcagaacctgcggcgccagccgggccacagcctgcgcatcggcgccaccccggccctggcgctgtcgctgctgccgcgggcgatcggcgaatggagcgcgcgctatccgcagagcggctgcgaactggccaccttgcattcgcgcgagctggtgcagggcctgctgatgcgcgaactggacctggccctgagcctgaagcagccggaacaccccggcctgcgcggcgaagccatcgccagcggcgtattggtggccctggcgccgcgcgaacactggcccgaagcggaacgccggcagccgctgagcctggccgggctggccggcgaagcgctgatcgggctgtccaccgccgacccgctgttcgcccgcctggaggattacctcagcgccgtggagccaccgccgcaggtgaagatcgccgtgcagacctacgccctcgcccgcgccctggtggaggctggggcgggcctggcgctggtcgatcccttcaccgccctcggcgccgacccgcacagcaccgcgatccgcccattgagcccggccttcccggtcaccctctacgccatcacccgcgccgacgaaaccccgccgcacaccctcgctccgctgctgcggatgctcgcccgccaggccgaggagcgtttgcgggccgtgcagatgtag

SEQ ID NO: 363693 - DNA, 1251 bp, Pseudomonas aeruginosa
atggctcagcgggtttgcatcatcggcgccggcgtggtcggcctggccacggcctacgccctggttcgcgaaggattcgacgtgaccctggtggaagcgcgcgagcggggcgggctggaaaccagctacgccaatggcgggcagttgtcctatcgctacgtggcgccattggccgacagcggcgtgccggcccaggcgctcggctggctgctgcgcaacgatgcgccgttgcgcctgcggccgcgccttgatccggcgcagtggcgctggctgctgggcttcctcgcggcctgccgcggctcgctgaaccgccgcaatgccgcgcacctgctgcgcctggcattgctcagccagcgcaccctgcaggactggcgcgaggaggatggcctcgatggcttcgactggcggcgcaacggcaagctggtggcgtttcgccaaccggccagctttgcgcgggcccgccagggcctggccgatccttcggcgcaattcgtcctgaccgccgccgagtgcctcgcgctggagccggccctgtccgccgcgcccttcgtcggcggcatccacacgccggacgaggaggtcgccgactgccatgccttctgcgtgcaacttgccgagcgcttgcaggcttccggacattgccggcaactgcatggccgcagggtgacgaagatcgtcgagggcggcgcggcggtgcgtggcgtcgaggtcggcggcgatctcatcgaggccgatcatgtggtgctggccgccggctaccgcagcgccgaattgatgctgccgggcctgcgcctgccgctatacccgctcaagggctatagcctgaccctgccggtcggcgcgcagcaccgcgcgccggataccagcatcaccgattacgaccgcaagatcgtctacgcgcgaatcggcgagcggctgcggatcgccgcgatggtcgacatcgtcggcttcgaccccggcctcgagcccgcgcgcctggcactgctgcgccagcaggcgcgggacacgttcccgcagggcggcgatttcgacgccgccgtcgaatgggccggcatgcgcccggccacgcccaccggggtaccgctggtgggcaacggcggctaccgcaacctctggctcaacctcggccacggcgcgctcggcttcaccctggcctgcggcagcgggcgcctgctggccgagcagatcggccgccgcccgccgagcatcgatacctctggcctgcttccgcgcggcgcgctggctggctga

SEQ ID NO: 363694 - DNA, 351 bp, Pseudomonas aeruginosa
atggaaccgacccgtatcgccaccaacgaccgcctgtccgccgcggtctgcttcgacgccctggtatttctttccggccaggtgccgggccaggccgaggatatccatggccagacccgcgaggtgctggcggagatcgacgcgctgctggccgaggccgggtcgcgcaaggagcgtatcctcagcgcgaccatctacctgaaggacatcgcccgcgatttcgccgccctgaacgaggtctggacccagtggttgccgaccggccaggcgcccagccggaccaccgtccaggcggagctggcgcgtccgtcggtgctggtggagatcaccgtggtggcggccaggggctga

SEQ ID NO: 363695 - DNA, 900 bp, Pseudomonas aeruginosa
atgaaaatccttgtatccagcactctcgcactctccctgtcgctcgccatcggcgccgcgcaggccgaggaactcagcggcaccctgaagaaggttgccgacaacggcacgataaccctgggttatcgcgatgcctcggtgcctttctcctaccttggcgataacagcggccagcccatgggctattcggtggaactggccgacaaggtggtggagcggctcaaaagcaccctcggcaagccggaactcaaggtgaagtacaacctggtcacttcgcagacccgtatccctctggtgcagaatggcaccgtcgacctggagtgcggctccaccggggtcaccgccgagcggcagaaacaggtggcgttctcctacggcttcatctacgtcaagggccagttgctgacccgcaaggacagcggcatcgcccacttcgacgacctcaagggcaagaacgtggtgaccaccgccggcaccaccaacgagcgctacctgaagaactacaacgccgaacacaagctggggatgaacgtggtcagcgccaaggaccacggcgaagccttccagatgctgcaatcgggtcgcgcggtggccttctacatggacgatgcgctgctctacggcgaacgcgccaaggcgcgccagccgcacgactgggtggtggtcggcgagccgcaatcgcgggagatctacagctgcatggtgcgcaaggacgacccgcagttccttgccctggtcaacgagaccctggccgggctgtatcgctcgggcgagatacagggcatctaccagcgctggttccagcagccgatcccgcccaaggggttgaacctggagtttcccatgaccgcggagctgaaggcgatcctcgagaaccccaccagcgatccggtgcagtga

SEQ ID NO: 363696 - DNA, 477 bp, Pseudomonas aeruginosa
atggccgaggccttgcgacaccgtatccgcgccgccggcctgctggtggtggagcaacgcatcctgctggtccgccacgaggtcggcggcgacatctactggattccgcccggcggcggcttcgagtcggaatgcgacgaatcgacgaaggataccgtccggcgcgagtttttcgaggagaccggcctgcgggtggacgtcggcccgctggtctacgtgcgcgaattcgccgaacccgccgccgggcgcttccacatggagctgttctaccgcatcgacgcctggcgtggcgagccgaccctggccaacctgaagggcctgggcggcgacgagttcgatatccgcgaggtcggctggatcgcccgcgacgaactgcctggcctgccgtcgttctatccggccgaactggccgacgacgtctggtcgcgcctggacgcgccgacgccgtcgatccgccacctcggcctgcagcgctag

SEQ ID NO: 363697 - DNA, 972 bp, Pseudomonas aeruginosa
atgctagttctgtatccggaaattaaaccctacgctcgccacgagctggccgtcgacgaaccgcatgtgctgtatgccgacgaaagcggttcgccggacggactgccggtcgtcttcgtccacggcggccccggctccggttgcgatgccctgtcgcgtcgcttcttcgatcccaacctctaccgtatcgtcaccttcgaccagcgcggttgcggccgttccacgccccacgccagcctggagaagaacagcacctgggagctggtggcggacatggagcgcctgcgcgagcacctgggtatcgagaagtgggtgctgttcggcggttcctggggctcgaccctgtcgctggcctacgcgcagacccatcccgagcgggtccatgcgctgatcctgcgcggcatcttcctctgccgtccgcaggacatccactggttctaccaggaaggcgccagccgcctgttccccgactattgggaagactatgtcgcgccgatcccgccggaagagcgcggcgacctgctggcggccttccacaagcgcctgaccggtagcgaccagatcgcccagatgcacgctgccaaggcctggtcgacctgggagggccgcaccgccacgctgcgccccaaccccatggtggtggaccgcttcaccgagccgggcagggcgctgtcgatctcgcgcatcgagaaccacttcttcgtcaaccagggcttcctcaggcccaaccagttgctcgaggacatgcaccgcatcgcccatctgcctggcgtgatcgtgcatggccgctacgacgccatctgtccgctggacaatgcctgggccctgcaccaggcctggccgaacagcgaactgcagatcatccgcgacgccgggcataccgccagcgagccggggatagtcgatgcgctggtgcgcgccaccaacgagatcggccggcgactgctcgacctgccgccggaggccgaatga

SEQ ID NO: 363698 - DNA, 438 bp, Pseudomonas aeruginosa
atgaaggcattgctgcagcgcgtcggcgcggcgcgggtggaggttggcggcgaaatcgtcggctccatcgatcgcggcctgctggtgctggtcggggtcgagcccgaggatggcgagcgttgcgcggcgaagatgctgcacaagctgctcaactacagggtgttcggcgacgaagagggcaagatgaaccggtccttgctggacgtgcagggcggcttgctgctggtctcgcaattcaccctggcggcgaacacccgcagcggactgcgtccgagcttctccagcgcggcgccgccggcgcaaggagaggcggtgttcgagcacctggtgaaactggcgcgggaggcctatccgcaggtggcgaccgggcgtttcggcgccgacatgcaggtgcacctggtcaacgacgggccggtgaccttcctgctggagagttga

SEQ ID NO: 363699 - DNA, 1578 bp, Pseudomonas aeruginosa
gtgattttccgttccgtttcaaacaccgatttccgcgcccgcgtgcgcaccctgctgcttgccggctcgaccgcgctggcattcgtcgccgccccggtatgggcgttcagcatcgacgacgtggcgagcaaggccaaggacctggccggcgacaagtattccgcgccgaccagcaacctgccatcggaattcagcgaaatgaaattcgccgattaccagcagatccgtttcatcaacgagcgcgcctactggggcaagctgaagacgccgttcaagctgagcttctatcaccagggcatgcacttcgacacgccggtgaagatcaacgaggtgaccgctaccacggtcaagccgatcaagtacgatcgcaccaagttcgatttcggatccctgaagttcgacgagaatgccaccaaggatctcggctatgccggtttccgcgtgctctatccgatcaacaaggccgacaagcaggacgagatcgccaccttccttggcgcgagctacttccgcgtggtcggcaagggccaggtctacggtctgtcggcgcgcggcctggcgatcgataccgcgctgccttcgggcgaagagttcccgcgcttccgcgaattctggatcgagcggccgaaggcgcaggacaagcaactggtgatctacgccctgctcgactcgccgcgggccaccggcgcctaccgcttcgtgctgcgtccgggcaaggatgcggtgatggatgtccaggcccgcgtgttcctccgcgacaaggtcagcaaactgggcctggcgccgctgaccagcatgtacctgttcggctccaaccagccgtccgagcagcacaacttccggcccgagctgcatgactccagcggcctgcagatccatgccggcaacggcgagtggctgtggcgtccgctgaacaatccgaagcacctgtcggtgagcaccttcagtgtggagaacccgaaaggcttcggcctgctccagcgcggccgcgagttctcccgctacgaagacctggatgaccgctacgacctgcgtccgagcgcctggatcgagccgaagggcgactggggcaagggcaccgtggaactggtggaaatcccgaccccggacgaaaccaacgacaatatcgtcgcattctggaaccccgagacccagcctgaggtcggaaagccgctggacttcgcctaccgcctgcactggaccatggatgaagacgagctgcacgacccgaaatcctcctgggtcaagcagaccatgcgctcggtcggcgacgtgaagcagaagaacctgatccgccagcaggacggcagcaccgccctggtcgtcgacttcgaagggccggccctgaaggacctggcgccggacgcgccggtgaccacccaggtcagcaccgacagcaacgccgaggtggtggagaacagcctgcgttacaacccggtcctgaaaggctggcgcctgacgctgcggatcaaggtcaaggatccgaagaagccggtggaaatgcgcgcggcgctggtcgacgaggcgcagaagccactgagcgaaacctggagctatcagctgcctgccgatgaataa

SEQ ID NO: 363700 - DNA, 2586 bp, Pseudomonas aeruginosa
atgaataacccatccactacgaaagcaccgctggccgactacctcgctcatcttcccctggcggaagaggagcgggagcggcttggcgagtccgcttccttctccgagctgcacgctcgcctggcgggagcggaaggcgccgctgccgatgccgggggctatcccgccctggcctcggtacgcgcccgcctgcagctgggcacccctgagctggacgacgccgagatgttcggcgtcgacgcccagggacgcaccttcctcaagatttccccgccgatccgccgtaccaaggtgattcccgagccctggcgcaccaacatcctggtgcgcggctggcgtcggctgaccggacgcagcaacccgcccaagcccaagcgtgccctgccgcgggcccgctggcagcgggtcggctcgctgcgccggttcatcctgctgttgttgatgctggcgcagacctcggtcgccacctactacatgaaaggcatcctgccctaccagggctgggccttcgtcgacctggaggagctggcccagcagagcctgctggataccgtccagcaggtgctgccctatgtcatccagttcggcatcctggcgctcttcgcgatcctcttctgctgggtctcggccggcttctggaccgcgctgatgggcttctgggagctgctcaccgggcgtgaccgctaccggatctccggcagcagcgccggcagcgagccgatcgccgccgacgcccgcacggcgatcgtcatgccgatctgcaacgaagacgtgccgcgggtattcgccggcctgcgggcgaccgtcgagtcgatggccgccaccggcgagatggagcgcttcgacttcttcgtcctcagcgacaccaacgacccggatatcgccgtcgccgagcagcaggcctggctcgagctgtgccgcgagaccaagggcttcggcaagatcttctaccgtcgccgccggcgtcgggtgaagcgcaagagcggcaacatcgacgacttctgccggcgctggggcggcgactaccgctacatggtggtgatggacgccgacagcgtgatgagcggcgactgcctggccaagctggtacgcctgatggaggccaatcctgaggcggggatcatccagaccgcgccgaaggcgtccggcatggacaccctgtatgcgcgcatgcagcagttcgccacccgcgtctacggcccgctgttcaccgccggcctgcacttctggcaactcggcgagtcgcactactggggccacaacgcgatcatccgcatgcagcccttcatcgaccactgcgccctggcgccgttgccgggcaagggctcgttcgccggcgcgatcctgtcccacgacttcgtcgaggctgcgttgatgcgccgtgccggctggggcgtgtggatcgcctacgacctcgacggcagctacgaagaactgccgccgaacctgctcgacgaactcaagcgcgaccgccgctggtgccacggcaacctgatgaacttccgcctgttcctggtcaagggcatgcacccggtgcaccgcgcggtgttcctcaccggggtcatgtcctacctgtcggcgccgttgtggttcttcttcctggtgctttccaccgcgctgctggcggtgcaccaactgatggagccgcagtacttcctggaaccgcggcagctgttcccgatctggccgcagtggcatccggagaaggccatcgcgttgttctccaccaccctgaccctgttgttcctgcccaagctgctcagcgtaatgctgatctgggccaagggcgccaagggtttcggcggggtgatccgggtgaccctgagcatgctcctggagatgttcttctcggtgctgctggcgccggtgcgcatgctcttccacacccgcttcgtgctggccgccttcctcggctggtcggtgcagtggaactcgccgcagcgcgacgacgacgccacgccctggagcgaggcgatccgccggcacggcatgcagaccctgctgggtatcgcctggaccctgctggtggcctggctcaacccgcgcttcctgtggtggctgtcgccgatcgtcggttcgctgatcctgtcgatcccggtatcggtgatctccagccgggtgaagctgggcctgcgcgcccgcgacgaaaagctgttcctgatcccggaggagtacgacacgccgcgcgagctgcgcgccaccgacgagtacacctacgagaaccgctggcatgcgctcaaggatggcttcctcaaggccgccgtcgatccgttgctcaacgccctggcctgcgccatgggcacggctcgccacaaccgtgcgcaagccatcgagacggtgcgcggcgagcgtatcggcaaggccatcgagacgggcccggaacagctcgacggcgccacgcgcctggccctgttgagtgacccggtagcactttcgcgcctgcatacgcgggtctgggaagaggaccgcgacgactggctcggccgctggcgcaaggccgaggcggacgacccccacgccgccagcgtaccgctggcccaggtagtgcccggcgacgccggcctgctgcccgccgcccagtcctga

SEQ ID NO: 363701 - DNA, 801 bp, Pseudomonas aeruginosa
atgaaaaagtatcttgcttcattggttctgggcgtctgcgccctggtgggcgtggcttcggtccaggcggccggcgcggtggaggacgcggtcaagcgcggcaccctgcgggtcggcatggacccgacctacatgccgttcgagatgaccaacaagcgcggccagatcatcggcttcgaagtcgacctgctcaaggccatggccaagtccatgggcgtcaagctggagctggtctccaccagctacgacggcatcatcccggcgctgctgaccgacaagttcgacatgatcggctcgggcatgaccctgacccaggagcgcaacctgcgcctgaacttctccgagcccttcatcgtggtcggccagaccctgctggtgcgcaaggaactggaaggcaagatcaagtcctacaaggacctgaacgatccgcagtacagcatcacctcgaagatcggcaccaccggtgagatcgttgcccgcaagctgatcagcaaggccaagtaccacggcttcgacaacgagccggaagcggtgatggacgtggtcaacggcaaggccgacgccttcatctacgactcgccctacaacgtggtggcggtgagcaagttcggcgccggcaagctggtctacctcgaccagccgttcacctacgagccgctggcgttcggcctgaagaaaggcgactacgacagcatcaacttcatcaacaacttcctccatcagatccgcgaagacggcacctatcagcgcatccacgacaagtggttcaagaacaccgagtggctgaaggaaatggaatga

SEQ ID NO: 363702 - DNA, 963 bp, Pseudomonas aeruginosa
gtgaccaagaagaaacgttccgtctggccctggcacctgctgaccgggctgatcctgctggtcctggcctgggcgctgtggttctccacctcgctgatttcctatgaatggcgctggaaccgcgttccgcagtacttcgcctaccaggccgaggagccgttacgggccaacgagatcggccgggtcgaggctatcgaggaacagagcagggatgcgcgcgtcacgctgctcggcgagagcggcgagaagcaggtcgtgaccgtcgcccaggacagcctgcaattctccgaaggcgacgacgtggccgagggcgacgcggtcggggtgacccgccactgggccgccggcccactgctctggggcctgtggaccaccctctggctatcgctggtgtccggtgccatcggtctggctatcggcttggtcgccggcctctgccggctgtcgaagaacccgaccctgcacgacctgtcgacgatctacgtcgagctggtgcgcggcacgccgttgctggtgcagatcttcatcttctacttcttcatcggcaccgtgctcaacctgtcccgcgagttcgccggggtcgcggcgctggcgctgttcaccggcgcctacgtggccgagatcatccgggccggcgtgcagtccatcgcccgcggacagaacgaggccgcccgctccctgggcctgaacgccggccagtcgatgcgctacgtgatcctgccgcaggccttcaagcgcgtgctgccgccgctggccgggcagttcatcagcctggtcaaggacacctcgctggtctcggtgatcgccatcaccgaactgaccaagagcggccgcgaggcgatcaccacctcgttctccaccttcgagatctggttctgcgtcgccgcgttgtacctgctgttgaacctgcccctttcgcacatggcatcccgactggagcggaggctcggacaaagtgattga

SEQ ID NO: 363703 - DNA, 735 bp, Pseudomonas aeruginosa
gtgattgaagtacgcaacctgctgaaggtcttcgatacccgcggccaggtagtgcgcgcggtggacgacgtgagtacccgcgtggccaggggcgaggtactggtggtgatcggtccgtccggttccggcaagtcgaccttcctgcgctgcctgaacggcctggaggagttcgacgaaggctcggtgagcatcgacggcgtcgacctggccgacccgaggaccgacatcaatgcctaccgccgcgaagtcggcatggtgttccagcatttcaacctgttcccgcacatgaccgtgctcgagaacctctgcctggcccaacgcgtagtgcgcaagcgcggcaaggccgagcgcgaggccaaggcgcgggcgctgctggccaaggtcggcatcgggcagaaggccgacgaatatccctcgcgcctgtccggcggccagcagcagcgcgtggcgatcgctcgcgcgttgtgcatggaccccaaggtgatgctgttcgacgaaccgacctcggcgctcgatccggagatggtcggcgaagtcctcgacgtcatgaagaccctggccgtggaaggcatgaccatggtctgcgtgacccacgagatgggctttgcccgcgaagtggccgaccgcgtgctgttcttcgaccacggcaagctgctggaggacgcgccgccggcgcagttcttcgacaatccgcaggacccgcgggcccaggccttcctccgccaggtcctctag

SEQ ID NO: 363704 - DNA, 462 bp, Pseudomonas aeruginosa; identical to SEQ ID NO: 318013

SEQ ID NO: 363705 - DNA, 1944 bp, Pseudomonas aeruginosa
atgtacgattggtgggttctccaactggccaagctgagcgtcagccgcaagctgatggtcggtttcggtgtcctcctcgcgctgcttctgctggtggtgatcagcagcaaccgcaccctcacgcaccagaccgccctcagcgagcagctcgccgaagtcgccagcctgatggaacagacccagcaagccgaacaaggccgcctggcattcgaagccggcagcgacccgcgccaggccgagcaggtccgccagaccctggccgggatgctccagcgcctgcaggcgctgcgcgacagcgagctcgacccggccgccctggcccaccaggccgaagccatcgaagcctaccgcaaggccttcgacgacctcgccgcagccgatcagcaacgcagcgccgcccgtggtgtgctggtgggcactgcacagcaggcgctggacagcttcgcccgcctcgaggaactgatggacgccagcctcgcgcagcaggccggcgacccgcaggcgttgcaacgtagccgtgcggtggccgacctgcaccaacagttgctcatggtgcgttaccaggtgcgcggctacgtcttcgaacgcagcgacaaggccgagcaggccgcgttcgccgcgttcgacgccctccgccaggccgccacgacgctgcgtggccagttgcccggcgaggccgatgcggcgctggaacaggccatgggcagcctccagggctatcgtggcgggatcgagcagttccgtgccggcgtcatccgcacgcgccaggcgcagcaagcgatgcaaagcagcacccaggatatggcccgggccggccggaccctcaccgaagccggtcgccaattgcgcgagagcaccgccagccgcgaccgcgccagcctctggctgatcgccgcgctggccctggccttcggctgcgtcgccggctgggcgatcaaccggcagatcgtccggccgctggacgaagccctcgcgcaggccgaggccatcgccgccggcgacctcggcaagcgtccgcagaatcccctgaccctccagcgccgcgacgaactgggccagttgcagcgagtcatgcagcgcatgggcgacagcctgcgcgagctggtcgggcggatcggcgacggcgtcagccagttggccagctccgccgaagaactctcggcggtcaccgagcagacccgcgccggggtcaacagccagaaagtggagaccgaccaggtcgccaccgccatgcacgagatggccgccaccgtgcaggacgtcgcgcgcaacgccgaactggcttcccaggccgctcgccaggccgacgaagaggcgcgccagggcgacgcggtggtcgatcaggcggtgacccgcatcgagcgcctggctagcgaaatggacgtttccagcgaagccatggcgcgcctgaagaacgagagcgagcagatcggcagcgtcctcgacgtgatcaagtcggtggccgagcaaaccaacctgctggcgctcaacgcagccatcgaagcggcacgcgccggcgacgccggacgcggcttcgcggtggtcgccgacgaggtccgcggcctggcccagcgcacccagcagtccaccgccgagatcgagggcctgatccagcgtctccagcagggcgccggcgaagccgccgaacgcctggagaacagccgctcgctgaccgccagcacggtggaactggcgcgccgcgccggcgccgcgctggacagcatcacccgcaccgtctccgacatccagaacatgaacctgcagatcgccactgccgcggagcaacagagcacggtggccgaggagatcaaccgcagcgtcctcagcgtacgcgacgtcgccgagcagtcggccgccgccagcgagcagaccgccgcctccagcggcgagctggcgcgcctgggcacgcagttgcaggcacaggtgggacgcttccgcctgtaa

SEQ ID NO: 363706 - DNA, 708 bp, Pseudomonas aeruginosa
gtgaacctgctgctcctcgacgacgccgacttcgtgtcggcggatcgtgcggtcctgcacgatcgccgcctcaagcacctgcacgaagtgcaccgcgccgagaacggcgacactctgcgggtcggccgcctcggcggctggatgggcgaaggtcgcctgctgaagctcgacgccagcgaggcgaccctggaagtgcgcttcgaccagccgccgccggccaagctgccgatcaccctgctgctggccttgccgcgaccgaagatgctccgccgggtgttgcagaccatcgccgcgatgggcgtaccgaagctggtgctgctgaacagctaccgcgtggaaaagagcttctggcagaccccgttcctcgacccggcggcgatccgcgagaacctggtcctcggcctggagcaggcccgcgatacggtgctgccggaaatcatcgtcgagaagcgcttcaaacccttcgtcgaagaccgcctgccggccctggccgccggcagcctcggcctggtcggccatcccggtccctggccggcctgtccgcgcgcggtggagaagccggtgaccctggcgatcggcccggaaggcggctggattccctacgaggtcgacaagctgcgcgaagccggactgcatccggtgcagctcggcgaacgcatcctgcgcgtggaaaccgcggtcagcgccctgcttgcgcggttgttctga

SEQ ID NO: 363707 - DNA, 804 bp, Pseudomonas aeruginosa
atgagcgccgataaacccgagcagcctgagcacgaccaggaaatgcccctggtctcgcacctgaccgaactgcgtacgcgcctgctgcgcagcgtggcggcgatcttcctgatcttcgccggcctgttctacttctcgcagaagatctacaccctggtctccgagccgttgcgccgcttccttccggaaggcaccagcatgatcgccaccgacgtcgcctcgccgttcctcgcgccgttcaagctgaccatggtggtggcgctgttcctcgccatgccggtgatcctcgcgcaggtctggggcttcatcgcgcccggcctgtacaagcacgagaaacgcgtggcgctgccgctgctggtgtccagcatcatcctgttctacgccgggatggccttcgcctacttcctggtgttcccgatgatcttccacttcttcgccagcgtgacgcccgagggcgtggcgatgatgacggacatcaacagctacctggacttcgtcctgactctgttcttcgccttcggcgtcgccttcgagatcccggtggccacggtgctgctgatctggatcggagtggtcgacgtcgagtacctgaagaagatccgcccgtacgtgatcatcggctgtttcgtggtcggcatggtcctgaccccgccggacatcttctcccagaccatgctcgcggtgccgatgtggctgctgttcgagatcggcctgctgttcggccgcctggtacgcaagcgcggcgagcatccggacgaccaaccggccagcgacggcgaccagcctccggccacccgccagtga

SEQ ID NO: 363708 - DNA, 426 bp, Pseudomonas aeruginosa
atgttcggaatcagcttcagcgaactgttgctggtcgggctggtcgccctgctggtgctcggccccgagcgcctgccgggcgccgcacgtaccgccggcctgtggatcggccgcctgaagcgcagtttcaataccatcaagcaggaagtggaacgggaaatcggcgcggacgagattcgccggcaactgcacaacgagcacatcctctcgatggagcgcgaagcgcagaagctgctggccccgctgaccggccagaatcccccgcaggaaaccccgccgccggcggccgagagcccggcgccgagcgtacccacgccgccgccgaccagcacgcctgcggttccgcccgcggacgccgcggcaccgccggcagtcgctgcctccactcccccttcgccaccgtccgagacgccgcgtaatccatga

SEQ ID NO: 363709 - DNA, 249 bp, Pseudomonas aeruginosa; identical to SEQ ID NO: 318018

SEQ ID NO: 363710 - DNA, 336 bp, Pseudomonas aeruginosa
atgagtgacaccctgacccgcctggcggcggtgctcgaggagcgcaagaacgccgcgcccgacagctcctacgtggccagtctgtaccacaagggcctgaacaagatcctggagaaggtcggcgaggagtcggtggaaaccatcatcgccgccaaggatgccgcggccagcggcgactgccaggacctgatctacgaaaccgccgacctctggttccactcgctggtgatgctctcggccctcggccagcatccgcaagccgtgctggacgaactggagcgccgcttcggcctttccggccacgccgagaaagccgcccgccaaccatcggcctga

SEQ ID NO: 363711 - DNA, 405 bp, Pseudomonas aeruginosa
atgaaagactggctggatgagattcactggaacgccgacggcctggtcccggcgatcgcccaggatcacgagaccgggcgcgtgctgatgatggcctggatgaaccgcgaggcgctggccctgaccgccagcgagaaccgtgcaatctattggtcgcgttcgcgtggcaagctgtggcgcaagggcgaggagtccgggcacgtgcagaagctgcacgaactgcgtctggactgcgacgccgacgtggtcatcctgatggtcgagcaggtcggcgggatcgcctgccataccggccgggaaagctgtttctaccgtgtcttcgagaatggcgcctggaagaccgtcgatccggtgctgaaggacccggacgctatctacgaacacgcaggacaccaccatgagtga

SEQ ID NO: 363712 - DNA, 1602 bp, Pseudomonas aeruginosa
atgaagctcctcgctgtccgccgcctcctgcgcatccagcgcgtcgtcatccgctaccgcctggacgacctgatcctcgaactgccgatgctgccctggtggctgcgcctgctcggtgccaccctgccctggcgctggctgccgcggcgcaagctggaactgacccgcggcgcgcgcctgcgcctggcactgcaggacctcggaccgatcttcatcaagttcggccagattctctccacccgccgcgacctgctgcccgacgacatcgccaacgaactggcctggctgcaggacaaggtgccgcccttcccgccggagctggcggtcaagcgcatcgaggaacagctgggcgcgaagatcgaacaggtcttcgcccgcttcgaacgcgaaccgctggcctccgcctcggtggcccaggtccacgccgcgcgcctgaagagcggcgaggaagtggtggtgaaggtgatccggccgaacctggaaccggtgatccgctccgacatcgcctggctgttcatcctcgcccgcctcgccgagcgggtctccagcgaggcgcggcgcctgcacccggtggaagtggtcagcgactacgagaagaccatcgtcgacgaactcgacctgctccgcgaggcggccaacgcctcgcagctgcgacgcaacttcgaaggctcgccactgctctacgtgccacaggtctactgggactggtgccggcccaaggtgctggtgatggagcgcatctacggcatcccggtgaccgacctggaaaccctgcgcgaccagcgcaccgacttcaaggcactggccgagcgcggcgtggagatcttcttcacccaggtgttccgcgacagctttttccatgccgacatgcaccccggcaacatcttcgtcagcacccgcgcgccctggagcccgcaatacatcgcggtggactgcggcatcgtcggcagcctgaccgacgaggaccaggactacctggcgcgcaacctgatcgccttcttcaagcgcgactaccgcaaggtcgcccaactgcatatcgactccggctgggtaccggcggaaaccaaggtcaacgacttcgaggcggcgatccgcaccgtctgcgaaccgatcttcgagaagccgctgaaggacatctccttcggccaggtcctgctgcgcctgttccagaccgcgcgtcgtttcaacatggagatccagccgcaactggtgctgctgcagaagaccctgctgaacatcgaaggcctcggccgccagctctacccggaactcgacctgtgggccaccgcccagccgttcctggagcgctggatgcgcgaacgggtcagcccgaagcagttgctgcgcaatttccagcaacaggtcgagcaggtgccgcacctgtcgcaaatggcccgcgacaccctcgaacgcctgtcacaaccgcacgcccacaatgcgccgccgccggagtggaaaggttcccgccacgactggctcgggcgcctggtgggcgcggtgctgctggtcggcgccgccgaggtcggcctgggccagcagctggaagcctggccggcgtgggtgatgctggccggcggggtgttcctgatcctgcgccgctag

SEQ ID NO: 363713 - DNA, 627 bp, Pseudomonas aeruginosa
atgagctcgctgctgatccaggccgtgctggccgccgccgaaaccggcatcaatcgcgtcctgcgcctcgacgggacagcgctgccgcgcctgcgcaggctttccgccaaggtcatcgaggtcgactgcctgagcccgccgctgcgggtcttcatcctgcccgccggcgacggcctgcacttcgccgcgcagcatgaggcggaggtcgactgcaccctgcgtgcgccggccggcaacctcctgcacctggccctggcgcgcgacaagacccgcgtcctgcacagcccggaagtcagcatggacggcgacagcgcggccctgctggaactggccggcatcctgcagagcctggagctggactgggagtacgaactgtcgcgctggctcggcccgctcgccacccaggtgctcggcagcggcctgcgcgacgcttcgcgctggagcgcgcagagcctgcacagcctgcgcctgaacctggccgactaccttgccgaggaaagccgtacgctggtcggccagcacgaagccgaagcccgcttcgccgaactggaccagctgaagctggccctcgatcatctcgacgcgcgcgtcggacgcctcagccaaaagaccaagcccgacgcatga

SEQ ID NO: 363714 - DNA, 771 bp, Pseudomonas aeruginosa
atgaacgatccccgcaaaggcgccgacgccgaacccaccacccacttcggctaccagaacgttccggaaagccagaaggcgaagaaggtcgccgaggtatttcactcggtggcagccaagtacgacctgatgaacgacctgatgtccggtggcatccatcgcctgtggaagcgcttcaccatcgagctgtccggcgtgcgcagcgggaaccgcgtgctcgacatcgccggcggcaccggcgacctgacccggcagttctcgcgcctggtcggcccgaccggcgaggtggtgctggccgacatcaacgcctcgatgctcaaggtcggccgcgacaagctgctcgacaagggcgtctccggcaacgtcagcttcgtccaggcggacgccgagaagctgcccttcccggacaaccacttcgactgcgtgaccatcgccttcggcctgcgcaacgtcacccacaaggacgaagcgatccgctccatgctgcgcgtgctcaagcccggtggccgcctgctggtgctggagttctccaagccgagcagcaacctgctgtccaaggcctacgacgcctattcgttcagcctgctgccgctgatgggcaagctggtcaccaacgactccgagagctatcgctacctggccgagtcgatccgcatgcaccccgaccaggaaaccctgaaggcgatgatggtggaagccggcttcgaccgcgtgacctaccacaacatgaccggcggcatcgtcgccctgcaccgcggtatcaagccttaa

SEQ ID NO: 363715 - DNA, 276 bp, Pseudomonas aeruginosa
atgtcgcgtatccacatcgaacgtccgcacagcctggggctggacgccgcacgggccaaggcggagaaactggccgaacgtctggcgaaggagcacggcgtgcagtgcgaatggcagggcgacgagctgaccttcaaacgcagtggcgtcgacggcaggatcgcggtgggggcggacaaggtcgcggtggacgtcaagctcggcctgatgctgtcggccatgagcggcctgctcaagggcgagatcgagaaggcgctggacaaggcgctggcctga

SEQ ID NO: 363716 - DNA, 417 bp, Pseudomonas aeruginosa
atggccaagattgccctgaagaaaaagaccgtttccgaatccacttccctggtctccgagatccgccactatgcccgccagatctggcttgccggcctgggtgcgtattcccgcctgggcaccgaaggcagcgactacttcaaggaattggtgaaagctggcgaagccctggagaaaaaaggcaaatcgctggtcacaagtcaggtcgattcggccaatgacagtgtcaagaccggcctctcttcggtgaagggaaaagtcgaagaccagctcgacaggatcgagcaggcattcgacagccgtgtcgctagcacgttgaaccggataggcataccttcccggaacgatgtcgaagcactctctgctaagctggatgagctgagcgcagtgctcgagcgtgtcgcgagaacccaataa

SEQ ID NO: 363717 - DNA, 930 bp, Pseudomonas aeruginosa
atggctggcaagaagaagagcgaaaaagagtccagttggatcggcgagatcgagaaatactcgcggcagatctggctggctggtctgggggcctactcgaaggtcagcaaggacggcagcaagctgttcgagaccttggtgaaagacggcgagaaggctgaaaaagaagcgaagtccgatgtggacgcgcaggtcggtgcggcgaaggcttccgcccgctctgcgaagagcaaggtcgacgaggttcgggaccgtgcgctcggcaagtggagcgagctcgaggaagctttcgacaagcgcctgaacagcgccatctcgcgtctcggcgtgccgagccgcaacgaggtgaaggagctgcacagcaaggtcgatacgctgaccaagcagatcgagaaactcaccggcgtcagcgtcaagccggcggcgaaggcagcggctaagcctgcggcgaaaccggctgccaagcccgcggcgaaaaccgcagcggccaagccggcagctaaaccggcagccaaggccgccgccaagcctgcggcgaaacccgcggcgaaaaaaaccgcggcgaaaaccgcggccgccaagccggcagccaagcccgccgccaaaccgactgcgaaggccgcagcgaaaccggcgaccaagccggcagccaaggccgcggcgaagcctgctgcgaaacctgccgcagccaagcctgccgcgaagccggcagccaagccggccgctgcgaccgccgccaagcccgcggcgaaacctgccgccaagccggctgcgaaaaagcctgcggcgaagaagccggcagccaagcccgccgcggcgaaaccggccgctcccgccgcgtcttcgagcgcgcccgctgcccccgccgccacaccggctgccagcgctccggcagcgaacgctccggcgacgccgagcagccagggctga

SEQ ID NO: 363718 - DNA, 618 bp, Pseudomonas aeruginosa
atgaagacacgcgaccgaatcctcgaatgctcgctgttgctgttcaacgaacagggcgagcccaacgtctcgacactggagatcgccaacgaactgggcatcagcccgggcaatctctactaccacttccatggcaaggaaccgctggtgatggcgctgttcgagcggttccaggccgagttggcgccgctgctcgatccgcccgaggaggtgcgcctgggcgcggaggactactggctgttcctgcacctgatcgtcgagcgcctcgcccactaccgcttcctgttccaggacctgtccaacctgaccgggcgcctgccacggctggctcgcggcatccgtacctggctcggcgcgctgaagcggaccctggccaccctgctggcccgcctcaaggccgaccggcagttgcgcagcgacgcgccggcactcgggcaactggtcgaacagatcaccctgaccctgctgttctccctggattaccagcgggtactgggcagcaagggcgaggtgcgcacggtggtctaccagatcatgatgctggtcgccccgcatctgcgcagcgaggcccaacgctcggcggaaagcctggcgcagcgctacctgggaccggaatga

SEQ ID NO: 363719 - DNA, 1683 bp, Pseudomonas aeruginosa
atgcgagaaaagcaggaatcgggtagcgtgccggtgcccgccgagttcatgagtgcacagagcgccatcgtcggcctgcgcggcaaggacctgctgacgacggtccgcagcctggctgtccacggcctgcgccagccgctgcacagtgcgcggcacctggtcgccttcggaggccagttgggcaaggtgctgctgggcgacaccctgcaccagccgaacccacaggacgcccgcttccaggatccatcctggcgcctcaatcccttctaccggcgcaccctgcaggcctacctggcgtggcagaagcaactgctcgcctggatcgacgaaagcaacctggactgcgacgatcgcgcccgcgcccgcttcctcgtcgccttgctctccgacgccgtggcacccagcaacagcctgatcaatccactggcggtaaaggaactgttcaataccggcgggatcagcctgctcaatggcgtccgccacctgctcgaagacctggtgcacaacggcggcatgcccagccaggtgaacaagaccgccttcgagatcggtcgcaacctcgccaccacgcaaggcgcggtggtgttccgcaacgaggtgctggagctgatccagtacaagccgctgggcgagcgccagtacgccaagcccctgctgatcgtgccgccgcagatcaacaagtactacatcttcgacctgtcgccggaaaagagcttcgtccagtacgccctgaagaacaacctgcaggtcttcgtcatcagttggcgcaaccccgacgcccagcaccgcgaatggggcctgagcacttatgtcgaggccctcgaccaggccatcgaggtcagccgcgagatcaccggcagccgcagcgtgaacctggccggcgcctgcgccggcgggctcaccgtggccgccttgctcggccacctgcaggtgcgccggcaactgcgcaaggtcagtagcgtcacctacctggtcagcctgctcgacagccagatggaaagcccggcgatgctcttcgccgacgagcagaccctggagagcagcaagcgccgctcctaccagcatggcgtgctggacgggcgcgacatggccaaggtgttcgcctggatgcgccccaacgacctgatctggaactactgggtcaacaactacctgctcggcaggcagccgccggcgttcgacatcctctactggaacaacgacaacacgcggctgcccgcggcgttccacggcgaactgctcgacctgttcaagcacaacccgctgacccgcccgggcgcgctggaggtcagcgggaccgcggtggacctgggcaaggtggcgatcgacagcttccacgtcgccggcatcaccgaccacatcacgccctgggacgcggtctatcgctcggccctcctgctgggcggccagcgccgcttcatcctgtccaacagcgggcacatccagagcatcctcaaccctcccggaaaccccaaggcctgctacttcgagaacgacaagctgagcagcgatccacgcgcctggtactacgacgccaagcgcgaagagggcagctggtggccggtctggctgggctggctgcaggagcgctcgggcgagctgggcaaccctgacttcaaccttggcagcgccgcgcatccgcccctcgaagcggccccgggcacctacgtgcatatacgctga

SEQ ID NO: 363720 - DNA, 858 bp, Pseudomonas aeruginosa
atgccccagcccttcgtcttccggaccatcgacctcgacggccagaccatccgcaccgcagtgcggccgggcaaggaaggaagcactccgctgctgatcttcaacggcataggcgccaacctggaactggtgttccccttcgtccaggcgctcgacccggaactggaggtgatcgccttcgacgttcccggcgtcggcggttcctcgacgcccagcgtgccctaccgctttcccggcctggccaagctggcggcgcggatgctcgactacctggactacggccaggtcaacgcgatcggcgtgtcctggggcggcgcgctggcccagcagttcgcccacgactatccggaacgctgcaagaagctgatcctcgccgccacttcggctggcgcggtgatggtgccgggcaagccgaaggtactgatgcgcatggccagcccgcggcgctacatccagccctcctatggcgtacacatcgccccggacatctacggcggggccttccgccgcgaccccaagctggccatggcgcatgccagcaaggtgcgttcgtcgggcaagctgggctactactggcaactgttcgccgggctcggctggaccagcatccactggctgcataggatccgccagccgaccctggtgctggccggcgacgacgacccgatcatcccgctgatcaacatgcgtgtgctggcctggcgcattcccaacgccgaactgcacgtgatcgacgacggccacctgttcctggtgacccgcgccgaatcggtggcgccgatcatcatgaagttcctcgccgaggagcgccgccgcgccgtcatgcaccctcgtccgttcctgcccaagaccggctga

SEQ ID NO: 363721 - DNA, 1680 bp, Pseudomonas aeruginosa; identical to SEQ ID NO: 328699

SEQ ID NO: 363722 - DNA, 372 bp, Pseudomonas aeruginosa; identical to SEQ ID NO: 318031

SEQ ID NO: 363723 - DNA, 1344 bp, Pseudomonas aeruginosa; identical to SEQ ID NO: 318032

SEQ ID NO: 363724 - DNA, 534 bp, Pseudomonas aeruginosa; identical to SEQ ID NO: 339822

SEQ ID NO: 363725 - DNA, 696 bp, Pseudomonas aeruginosa
atggcaaagaagaaacccgcccccaagcgcggcgccagccgctaccaggcgcccgccgcgaagaacggcgttcccggctgggtctggctggtcgccggcctggccatcggcggcttcatcatgttcctgatgaagctcgaacccgggcgcaaggacgtccagcgcgaacgcccggacgcccagcgcccggccgccgtgcagggcaagcagccgcagcagaacggccaggcccagcagcccgcgcaaacgcagacgccggcccaggccaagccgaagtacgagttctacaccctgctgccggagtccgaggtcgtggtgccgccggaagcggtaccggagaaggccccgccgccgcccacccccgccgaactggccaaggccgacgaagcgcgggccaaggccgcactcgccgggcaggtgccaccgccgctgccgaaagcggtggtcgccgccagcacgcagttcttcctgcaggccggctcgttccgcaagcagtccgacgccgaccgcgtgcgcgcgcagatcatcctgctcgggcagtcggtgaacgtcgaggccggcaacgtccgcgacgagacctggtaccgggtgatggtcggcccgttcaacagccgcgaccagttgtcccaggcgcagaagacactgtcctccaacggcttcagcaacctgctgttacagcaacgcaaggcccgctga

SEQ ID NO: 363726 - DNA, 1764 bp, Pseudomonas aeruginosa
atgaaagacacgattcgccagctgatccagcaagccctcgaccaactgaccgcggacggcaccctgcccgccggcctgaccccggacatccaggtggagaacaccaaggaccgtagccacggcgatttcgccagcaacatcgccatgatgctggccaagccggccgggatgaagccgcgcgacctggccgccaggctggtcgaggcaatccccgcccacgagcaactggccaaggtggagatcgccggccccggcttcctcaacttcttccaggatcacgtctggctcgccgccagcctcgaccgcgccctcgccgacgaacgtctcggcgtgcgcaaggcaggcccggcgcagcgcgtggtgatcgacctgtcctcgccgaacctggccaaggaaatgcacgtcggccacctgcgctcgaccatcatcggcgacgccgtcgcgcgcgtcctcgagttcctcggcgacacggtgatccggcagaaccatgtcggcgactggggcacccagttcggcatgctgctcgcctacctggaagagcaaccggtcgacgccgaggccgagctgcacgacctggaggtcttctaccgcgcggcgaagaaacgcttcgacgagtctcccgaattcgccgaccgcgcccgcgaactggtagtcaagctgcaggccggcgaccccgactgcctgcgcctgtggacccgcttcaacgagatttccctgtcgcactgccagaaggtctacgaccgtctcggcgtgaagctgagcatggccgacgtcatgggggagagcgcctacaacgacgacctcgcccaggtggtcgccgacctgaccgccaagggcctgctcaccgaagacaacggcgcgttgtgcgtcttcctcgaagagttcaagaacgccgagggcaatccgctcccggtgatcgtgcagaaggccggcggcggctacctctacgccaccaccgacctcgccgccatgcgttatcggcacaacgtgctgcacgccgaccgcgtgctgtacttcgtcgaccagcgccaggccctgcacttccagcaggtcttcgaagtggcgcggcgcgccggtttcgttccggccggcatggagctggagcacatgggcttcggcaccatgaacggcgccgacggccgtccgttcaagacccgcgacggcggtacggtgaagctgatcgacctgctggaagaggccgagagccgcgcctatgcgctggtcaaggaacgcaacgagcagcgcgccgagcgtggcgaggagccgttcgacgaggtccaactgcgcgagatcggccgggtggtggggatcgactcggtgaagtacgccgacctgtccaagcaccgcaccagcgactacagcttcaacttcgaactgatgctgagcttcgaaggcaacaccgcaccctacctgctctacgcctgcacccgcgtggccagcgtcttccgcaagctcggccagggccgcgagcaactgggcgggaagatcgtcctcgagcagccccaggagctggccctggccgcacagctggcgcagttcggcgacctgatcaacaacgtcgcgctcaagggcgtgccgcacctgctctgcgcctacctgtacgagttggccgggctgttctccagcttctacgagcattgcccgatcctcaccgccgaggacccggcgcagaaggacagccgcctgcgtctcgccgcgctgaccggccgtaccctggaacagggcctggagctgctcggtctgaagactctggaacgcatgtaa

SEQ ID NO: 363727 - DNA, 2220 bp, Pseudomonas aeruginosa
gtgtcagacctgatcctacgcctagccctgccttcgccactccgccgcctgttcgactaccgcgcgccccgcggcattccgcgcagcgccctacagccggggattcgcctgctgctgccgttcgggcgccgggagctggttggcgttctgatagaggtgacggaccgttccgaagtacccgaagacaagctcaagcctgccctcagggtactcgacgccaagccgccgatgccggcgcacctgctcgaactctgtcgctggaccgcccagtactaccagcacagcctcggcgacaccctgtcctgggcgctgcccaacctgttgcgccagggcgagccggccgaggcgcgccagcagcgcttctggcatgccaccgcgcaatccagcctcgacgatccgcgcctggcccgagcgccgcgccagcgccaggccctggcgattctcaagcagcatccgcacggggtttcccatgagttgctgaaccaactggaaataaacaaggacagcctcgacctgctcaaggaaaaaggcctggtcgaactggaggtgcggcgccacagcaccccgccgcgcgaaggcggctggctggcccaggcggagttgccgctgaaccccgagcagcgcgccgccttcgaggcggttcgcgccagccacggcggtttccattgcttcctgctggccggggtcaccggcagcggcaagaccgaggtctacctgcaactgatccgcgaaaccctggccgcaggccgccaggccctggtgctgattcccgagatcaacctgggcccgcagaccctggcgcgtttcgaacgccgcttcaacgcgcgcatcgccctgctgcattcggccctgaccgaccgcgagcgcctcgatgcctggctcgccgcccgggatggcgaggccgacatcgtcatcggcacccgctcggcactgttcacgccgctgaagcggccgggactgatcatcgtcgacgaggaacacgacgcctcctataaacagcaggacggcctgcgctaccacgcccgcgacctggcactggtacgcgcgcgcctggagaatgtgccgatcctgctcggttcggccacgcccgccctggaaagcctgcacaacgcccaggccggccgctacggcctgctgcgcctgacccagcgcgccggtggcgcgcacccgccgaagttcatccgcctcgacgtgaagagcatgccgctcgacgccggcctttcccgtccgctgcaacaggccatcggcgataccctggcggccggccagcaggtcctggtattcctcaatcgccgcggcttcgctccgaccctgctttgccacgactgcggctggatcagccaatgcccgcgctgcgacgcgcggatgaccgtgcaccagggcagcggcgagttgcgctgccaccactgcgaccaccgccagcggccgccgatgaactgcccgcaatgcggcaagctcgacctgcgcccggtaggcgccggcaccgagcgcgccgaggaacgcctgcggattctcttcccgaaccatccggtgctgcgcatcgaccgcgacagcacctcgcgcaagcacgccatgcgcgacctcttcgccaccatcaacagcggtgagccatgcatcctggtcggcacccagatgctcgccaaggggcaccacttcccacgggtcaccctggtggcgatcctcgatgccgatggcggcctgttttccgccgacttccgcgccagcgaacgcatggcccagcagatcgtccaggtcgccggccgcgcaggacgcgccgaggagcccggacgggtactgatccagacccacctggccgatcacccgctgctggtccagctcaccgaggacggctacttcgcctttgccgaacaggccctcagcgaacgccgcgccgccggcctgccgcccttcgcccacctcgccctgctgcgcgccgaagcgcacaagccgggccaggcggaagccttcctcgacagcgcctgcagtgccgccgagcaattgctcgagcagatgggcggaccggaggtggaactgctcgggccggtgcccgcgcccatggagcggcgtgccggcaagcaccgtgcgcaactgctgctgcagtgcatgagccgggcgccgctgcatcgcctgctgacgccctggctgcagagcctcgaacagttgcccggcgggcgccaggtgcgctggtcgctcgatatcgatccgatcgacctgttctga

SEQ ID NO: 363728 - DNA, 216 bp, Pseudomonas aeruginosa; identical to SEQ ID NO: 318037

SEQ ID NO: 363729 - DNA, 753 bp, Pseudomonas aeruginosa
atgtccgtggtttccgccttcgccggtgcggcggaggcctgccggcctaccggcgccttgcagaacgtcgaggtggcgcgggtggtggacggcgataccgtgcgcctgcgcgatggccgcagcgtgcggctgatcggtatcaacgcgcctgagctggcgcacaacggtcgcaccaccgagcccttcgccgaagccgcgaagcagcgactgcaggcgctggtatcggccagcgacgggcgtctcgccctgcagccgggccgccaggcccgcgatcactacgggcggaccctggcgcacctgttcgatgccagcggcgccaacctcgaggcgcgcctgctcggcgagggcctgggctacctggtggcggtcgcgccgaacaccgagctgacggcctgtcagcaagcggcggaacgtgcagcgcgttcggctaatctgggtgtatggaagcgttcgccggtgctttcgctcgatcgactggcgcagagcggcttcgccgtggtccgcgggcgggtgctcgaggtcgaacgcaaccggggcggtatctggctggagatggacggtccgctggtcctgcggatcgagccgaaggtgctcaaggcgttcgatgcgaaacgggtgatgcagatggcgggacgttcgctggaagtgcgtggctgggtggtcgatcgttcccgccgtggcgctgtgccggccggcaaggcgcgctggcagatgtcggtgaccgatccggcgatgctggaatggttgccatga

SEQ ID NO: 363730 - DNA, 1440 bp, Pseudomonas aeruginosa
atgaagaccgcctggctcctgctgctgttgctgggagtcggcgcgctgggcggctgcgcggtgaacccggccaccggcaagagcgatttcgtgatgatgagcgagcagcaggaactcggcatgggcgctcgctacaaccaggaaatcctcaagcagttcccccgctacaacgatgaaaagctccaggcctacgtgcaacgggtaggcgagcgggtcgcccgcagcagccaccgcagcaatctgcaatatcatttcaccgtcatcgattcgccggacatcaacgccttcgccctgccgggcggctacatctatatccatcgcggactgatcgcctaccttggctccgaggccgaactggccgcggtgctcggtcatgaggtcggccacgtcacggcgcgccacagcgtgcgccagcagagccaggccagcgcctggaacatccttggccaggcggtgacgatcggcaccggggtcggtgccgccggcgacctggccaacgtgctcggcacggccttcgtccgcggctacgggcgtgacatggaactggaagccgatggtctcggcgctcagtacctggcccgcgccggctacgatccgacggcgatgatccaggtggtgcgggtgctgaagaaccaggaggacttcgctcgcgaagaggctgcgcgcaatggccaggcggtacaggccggcggctaccacgggttgttcgatacccatccggacaacgaccggcgcctgcaggaagtggtcggcccggcccggcaactggccaacggacagcaggaagtggggcgcgaggtctttcttcgccatctggaaggcatgccgttcggcgactcggcatcggccggggtgcgtcgcgggcagaacttctaccatgccgagctggacttcaccctgagctatccggcgggctggaagatcctcaaccagcccagtgccctgcttggctatccggcggacgagcagtcgttcatcggcatgaagctggtgccccatgattcccgcctgacgcccgcggagttcctgcgcaagaacgccgggcaacggctggcccaggaggagtcgctgaagcaggccgggctcaacggctacacggcggtggtgccaggcaacccggcgcgacgggttgctgtgatctaccagggcgaccgcgcctacctgttcgtcggcgtggtcaaggtcggttccctggagacccaggacgaccgcttcctcagcgtgatccgcagcttccgtccgctgcgcgacaaggagcgggccctggcgcagccgcgacgcctgcacctggtgcaggtcaaggcggggcagacgctggagcaattggcggctggcggcgaggggtcattgagtgactccgtggctcgtctgcgtctgctgaatgacctttatccgagcggtgaaccccgtccgggcgattggcttaaagtcgtacgctag

SEQ ID NO: 363731 - DNA, 1269 bp, Pseudomonas aeruginosa
atgtccgatcttaaaaccgctgccctcgaatatcacgcacaaccccgtccgggaaaactgagtgtcgagctgaccaaacccaccgctaccgcccgggacctgtccctggcctacagcccgggtgtcgccgagccggtgcgtgaaatcgcccgcgatgccgagctggcctaccagtacaccggcaagggcaacctggtggcagtgatttccgacggcaccgcgattctcggcctgggtaacctcggcccgctggcctccaagccggtgatggaaggcaagggtgtgctgttcaagcgcttcgccggcatcgacgtgttcgacatcgaggtcgacgccgagagcccgcaggctttcatcgataccgtcaagcgtatttccatcaccttcggcggtatcaacctcgaggacatcaaggctcccgagtgtttcgagatcgagcgcgcgctgatcgaacagtgcgacatcccggtgttccacgatgaccagcacggcaccgccatcgtgaccgcggcgggcatgctcaacgcgctggaactggccggcaagaagctggaagaagcgaagatcgtctgcctcggcgccggcgctgccgccatctcctgcatgaagctgctggtgagcatgggcgccaaggtcgagaacatctacatgatcgaccgcaagggcgtgatccacgccggtcgcgacgacctgaaccagtacaagtcggtgttcgccaccgagaccgacaagcgcaccctggccgacgccctggagggcgccgacgtgttcgtcggcctgtccggcgccaacctgctggagccggaagacctcaagcgcatggcgccgaacccgatcgtgttcgcctgctcgaacccggacccggagatcaagccggaactggcccatgccacccgtaacgacgtgatcatggctaccggtcgttccgactatccgaaccaggtcaacaacgtgctcggtttccccttcatcttccgtggtgccttggacgtacgtgccacgcgcatcaacgaagagatgaagatcgccgccgccctggccctgcgcgacctggccaagcagccggtcccggaagacgtctgcgccgcctatggcgtggacaagctggaattcggccgcgagtacatcattccgaagccgatggacaagcgcctgatcaccgtggtctccgatgccgtggccaaggctgccatcgagaccggcgtggctaccctgccgtatccgaagaactatccgctgaaatcggtggacgacgtcttcaacggctga

SEQ ID NO: 363732 - DNA, 2472 bp, Pseudomonas aeruginosa
atgcgcctgctgaagttcctgtggtggacttgcgtcaccctgatttgtggagtgctgctcagtttcagcggcgcctatctctatctgagtcccagcctgccctcggtggaagctctgcgtaacgtccagctgcagatccccctcaaggtctacagcgaggacggcaagctgatctccgagttcggcgagatgcgccggacgccgatccgcttcgccgacatcccgcaggacttcatccatgccctgctgtccgccgaggacgacaatttcgccaaccattatggcgtcgatgtgaaaagcctaatgcgcgccgccgcgcaattattgaaaagcggtcacatccagactggcggcagcaccatcaccatgcaggtagcgaagaactacttccttaccaatgaaagaagcttctcgcgaaagatcaatgaaatcctcctggccctgcagatcgagcgacagctgaccaaggacgagatcctcgagctctacgtcaacaagatctacctgggcaaccgtgcctatggcatcgaggctgccgcacaggtctattacggcaagccgatcaaagacttgagcctggccgagatggcgatgatcgccggcctgccgaaagcgccctcgcgctacaacccgctggtcaacccgacccgcagtacggagcggcgcaactggatcctcgagcgcatgctcaagctcggcttcatcgaccagcaacgctaccaggccgccgtcgaggagccgatcaacgcctcctaccacgtgcagacccccgaactgaatgcgccctacatcgccgagatggcccgtgccgagatggtcggccgctacggcagcgaggcctataccgagggctacaaggtcatcaccacggtccgcagcgacctgcagaacgccgccagccaatcggtccgcgacggcctcatcgactatgaccagcgccacggctaccgcggcccggagacccgcctgccgggccagacccgcgacgcctggctcaagcacctgggccagcagcgcagcatcggcggcctggagccggcgatcgtcacccaggtggaaaagagcgggatcatggtgatgacccgcgacggcaaggaagaagccgtgacctgggacagcatgaaatgggcacgccccttcctcagcaacaacagcatgggcccgatgccgcgccagcccgccgacgtggcccaggccggcgaccagatccgcgtgcagcgccaggaagacggcaccctgcgcttcgtacagattcccgccgcacagagcgcgctgatctcccttgacccgaaggacggggcgatccgctcgctggtcggcggcttctccttcgagcagagcaactacaaccgcgcgatccaggccaagcgccagccgggctccagtttcaagccgttcatctacagcgcggccctggacaacggcttcaccgccgccagcctggtcaacgatgcgccgatcgtgttcgtcgacgagtacctggacaaggtctggcgaccgaagaacgacaccaataccttcctcggcccgatcccgctgcgcgaagccctgtacaagtcccgcaacatggtctcgatccgcgtcctgcagggcctgggcatcgagcgggcgatcagctacatcaccaagttcggcttccagcgcgacgaactgccgcgcaacttctccctggccctgggtaccgcgacagtcacaccgatggaaatcgccggcgcctggagcgtattcgccaacggcggctacaaggtcaatccgtacgtcatcgaacgcatcgagagccgcgacggacaggtgctgtaccaggccaatccgccccgcgtgccggtggaagaacaggtcgctgcgccggatgcggaagacgccgggaatcctggtgaccccgagcatccggagagcgccgaaggcgaaggttcgatcgaagcccagcaagtcgccgccaaggcccagaccaccttcgagccgaccccggccgagcggatcatcgatgcccgtaccgcctatatcatgaccagcatgctgcaggacgtgatcaagcgcggtaccgggcgtcgcgccctggcgctgaagcgcaccgacctggccggcaagaccggcaccaccaacgattccaaggatggctggttctccggctacaactccgactacgtgaccagcgtctgggtcggcttcgaccagccggagaccctgggtcgccgcgagtacggcggtaccgtcgcgctgccgatctggatcaggtacatgggcttcgccctcaaggacaagccgatgcacaccatggccgagccgccaggcatcgtcagcctgcgcatcgacccggtgaccggccgttcggccgcgccgggcactcccggcgcctatttcgagatgttcaagaacgaggataccccgccctcggtcaatgaactgccgccaggcagcttccctggcagcccgctgccggatgacgaaggcgcgccgatcgacctgttctga

SEQ ID NO: 363733 - DNA, 1065 bp, Pseudomonas aeruginosa
gtgctagggctcataaagaagaaagcgaacaccttgctggggatcgacatcagctcgacctcggtaaagctccttgagttgagccgctccggaggccgctacaaagtggaggcctatgccgtcgagccgcttccgccgaatgcagtcgtggaaaagaacatcgtcgagctggaaggggtcggccaggcgttgtcacgggtgctggtcaaggcgaaaaccaacctgaagtcggccgtggtcgccgtcgccggttcggcggtgatcaccaagaccatcgagatggaggccgggctttccgaggatgaactggaaaaccagctgaagatcgaggccgaccagtacatcccctatccgctggaggaagtcgccatcgacttcgaggtccagggactctccgcgcgcaatcccgagcgcgtggacgtactcctggccgcctgtcggaaagagaacgtcgaggttcgcgaagcggccctggcgctggccggcctgaccgccaaggtggtcgacgtcgaggcctacgcgctggagcgctcctatgcgctgctgagcagccagctgggtgccgacaccgaccagttgaccgtggcggtagtggacatcggcgcgaccatgaccaccctgagcgtcctgcacaacggacgcaccatctatacccgcgaacagctgttcggcggtcgccagctcaccgaggagatccagcggcgttacggactctcggtggaggaagccggcctcgccaagaagcagggcggtcttccggatgactacgacagcgaagttctgcgtccgttcaaggacgccgtggtgcagcaggtttcccgctcgctgcagttcttcttcgccgccggacagttcaacgacgtcgactacatcgtcctggcgggcggtacggcgtctatccaggatctcgatcggttgatccagcagaagatcggcaccccgaccctggtcgccaacccgttcgccgacatggcgctgaacggcaaggtgaatgccggcgccctggccagcgacgctccggcgttgatgatcgcctgcggcctggcgttgaggagtttcgactga

SEQ ID NO: 363734 - DNA, 597 bp, Pseudomonas aeruginosa
atggcacggatcaaccttctaccctggcgcgaagagctgcgcgagcagcgcaagcagcagttcctggtgattcttggcggcgtcctggtggcatcggctgcgctggtattccttggcgaccagtacttcaccgcggccatcgagaaccagaacgcccgcaacgacttcctgcgcaaggaaatcgtcgtactcgacgcccggatcaaggaaatcagcgaactgaagtcgcggcgccagcaattgctcgagcggatgaagatcatccaggacctgcagggcaaccgtcccatcatcggacgggtgttcgaccagctcgtgcggaccttgcccgacggcgtgtatttcaccgacctgaagatgaccggcaagaacattgccatcgccggcgcggccgagtccaacaaccgcgtttccaatctcatgcgcaacatggacgcgtccgagtggttgaccgccccgaccctgaacgaggtcaaggcggtgacccagggcgcggtggaccaggccaacgtgttccaactgaccgtgcagcagacgcagcccggcgaggaagacgccaaggcgaagcatggggttgcgcaaggagccaagaaatga

SEQ ID NO: 363735 - DNA, 525 bp, Pseudomonas aeruginosa
atgagagcccgcctgattctgagcagcctgctgctcgccagcctggccggatgcggcggcggttccgatttcgccgatctgcagtcctacatggacgaggttcgcgcccgacccaagggcaccatcgagccgttgccgaagttccagccgtacgaggccttcacctatagcgccgcgtcgctacgcagcccgttccagccgccggtgaagatcgacctgaccgtgcggcagaagggcaacaaggtgatcaagcccgacgagacgcgggtcaagcagttcctggaaggcttcaacatcgagaccttcgagatggtcggcaccctgtccaacgcccagggcaccttcgccctggtgaagggcgcgggtggcgtgcaccgggtgagggtcggggactacctggggcgcaacgacggcaaggtcgtcggcatcagcgaaggaaaaatagacgtgatcgaaatcgttcctgacggagaggggaactggctggagcgtccgcgcagcctgactctcaaggaacgctcctga

SEQ ID NO: 363736 - DNA, 2145 bp, Pseudomonas aeruginosa
atgaacagtggcctctcgcgcctcgggatcgctttgctggccgccatgttcgcgccggcattgctcgccgcggacctggagaaactcgacgtggcggcgctgcctggcgaccgggtcgagctaaagctgcagttcgacgagcccgtcgccgcgccgcgtggctataccatcgagcagccggcgcgaatcgccctcgatctgccgggggtgcagaacaagctcggcaccaagaaccgcgagctgagcgtgggcaatacgcgcagcgtcacggtggtcgaggcgaaggatcgcacacggttgatcatcaacctgaccgcgctgtcgtcctacaccacccgggtggaaggcaacaacctcttcgtggtggtcggcaattcgccgaccggcgccagcgtcgcttccaccgctccggtcaaggcaagcccggctccggccagctatgcccagccgatcaaacccaagccgtacgtgccggcgggtcgtgccatccgcaacatcgatttccagcgtggcgaaaagggcgagggcaacgtggtcatcgacctgtccgacccgaccttgagcccggatatccaggagcagggcggcaagatccgcctggacttcgccaagacccagctgccggatgcgctgcgggttcgcctggacgtcaaggacttcgccacgccggtgcagttcgtcaacgccagcgcgcaatccgaccgtaccagcatcaccatcgagccgagcgggctctacgactacctggtctaccagaccgacaatcgcctgaccgtcagcatcaagccgatgaccacggaagatgccgagcggcgcaagaaggacaatttcgcctataccggcgagaaactgtcgctgaacttccaggacatcgacgtgcgttcggtactgcaactgatcgccgacttcaccgacctgaacctggtggcctcggataccgtgcagggcaatatcaccctgcgcctgcagaacgtgccgtgggaccaggcgctggacctggtactgaagaccaagggcctggacaagcgcaagctcggcaacgtactgctggtggccccggccgacgagatcgccgcccgtgagcgccaggagctggaagcgcagaagcagatcgccgagttggcgccactgcgccgggaactgatccaggtgaactacgccaaggccgcggacatcgccaagctgttccagtcggtgaccagcgatggtggccaggaaggcaaggaaggcgggcgcggctcgatcaccgtcgacgaccgcaccaacagcatcatcgcctatcagccccaggagcgactggacgaactgcggcggatcgtttcgcagctggatattccggtgcgccaggtgatgatcgaggcacgcatcgtcgaggccaacgtcggttacgacaagagtctcggtgtgcgctggggcggcgcttatcacaagggcaactggagaggctacggcaaggacggcaatatcgggatcaaggacgaggacggcatgaactgcggcccgatcgccggcaactgtactttccccaccacgggaaccagcaagtcgccgtcgccgttcgtcgacatcggcgccaaggatgccacctccggaatcggcatcggcttcatcaccgacaacatcatcctcgacctgcaactgtcggcgatggaaaagaccggcaacggcgagatcgtctcccagcccaaggtcgtgacctcggacaaggaaaccgcgaagatcctcaagggccaggaagtaccctaccaggaggccagctccagtggcgctaccagcacctcgttcaaggaggccgcgctgtccctcgaggtgaccccgcagatcaccccggacaaccggatcatcgtcgaagtgaaggtgaccaaggatgcgccggacttcgatcgcgcactgaacggcgtaccgccgatcaacaagaacgaggtgaacgccaagatcctggtcaacgacggcgagaccatcgtcatcggcggcgtgttcagcaacacccagagcaagtcggtggacaaggtgccgttcctcggcgacctgccttacctggggcggctgttccggcgcgatacggtctcggacgtgaaaaacgaacttctggttttcctgacaccgcggatcatgaataatcaggccatcgcaatcggtcgctga

SEQ ID NO: 363737 - DNA, 519 bp, Pseudomonas aeruginosa; identical to SEQ ID NO: 318047

SEQ ID NO: 363738 - DNA, 1107 bp, Pseudomonas aeruginosa
atgcgcacacttcacgtcgatctaggcgagcgtagctatcccatttacatcggtgaaaacctgctgggcgacgcccgctggttcgcgccgcatatcgtcggtcgccgggtcgcggtgatcagcaacgaaacggtcgctcctctctatctggaaaccctgctcaaggcactgcaaggccatgaggtcacccctgtggtgctgcccgacggcgaggcctacaagcagtgggaaaccctgcaactgatcttcgatgccctgctgaaggagcggcatgaccgcaagactaccctgatcgccctgggcggcggcgtcatcggtgacatggccggtttcgccgcggcctgctaccagcgtggggtcaacttcatccaggtgccgaccaccctgttgtcccaggtcgactcctcggtgggcggcaagaccgggatcaaccatccgttgggcaagaatatgatcggtgcgttctaccagccccaggcggtggtcatcgacaccgcgtcgctgaagacgctgccgtcccgcgagctgtccgccgggctggcggaggtgatcaagtacggtttcatttgcgacgaaccgttcatcacctggctggaagagcacatggatgccttgctggcactggagccgaccgttgtcaccgaggccatcgagcgctcttgcgcggcgaaggcccgcgtggtgggcgccgacgagcgcgagtcgggcgtgcgtgccacgctgaatctcggccataccttcggtcatgcgatcgagacccagcagggttacggcgtctggctgcacggcgaagcggtaggggcgggaaccgtgatggcactcgagatgtcgcatcggttgggttggctgagcgccgccgagcgcgatcgcggtatccgcctgctgcgccgggctggcctgcccgtggtaccgccggccgagatgacggcggaagattttatggaacacatggccgtcgacaagaaagtgctcgatggccgcctgcgtctggttttgctgcaaggactggggaatgccgtggtcaccggcgattttccccgtgagatcttggacgcgaccctgcgcaccgactatcgggccttggccgaccagcttggagatgaatga

SEQ ID NO: 363739 - DNA, 1656 bp, Pseudomonas aeruginosa
atgaccagcttgcatgccgatgaggccttcctgggccactaccaattcagtcacgacccgttcgcgccgcgcgttccgggtttcaagttcttcccggcgcagcgcaagccggtgctcggccagttgcaccatctggcccgctacagccagctcctgctgctggtcaccgggcccctgggcagcggcaagaccctgctgcgccaggcgctggtggccagcaccaacaaggatgcggtcctcagcgtggtgatctcggcgcgcaccgccgccgacgagacttcgttgctgcgccaggtggcgcagggcctgagcatcaaccaggcgagcctggaggcgatcctgaccaaggtggcgcagctggcgatcaccgggcaggacgtctacctgatggtggacgatgccgaacagctccaggacagcgcgctggaagtgctgttgctgctggcttccggcaccaacgagggacgcctgcatgtattcctgttcggtgagccgtcgttgctgccgcgcctggaggtgttttccgagggtgaggagcgcttccatgccatcgaattgcagccatacagcgaagaggaaacccgcgactacctggcccagcgtctcgagggcgccgggcagggcatcgagctgatttccaacgacctgctggtggacatccacgagcagtcggaaggctggccgggagcgatcaaccaggtcgcccgcgatgccctgatcgaagcgatgctggccaatcgtggcgcagcgcgcaaggcaaccggagggtctttcaacttgcccaagaagcatctggtgattcttgcggtcgtggccatcggcgtgatcgccgcctggttcatgcaaggcaagagcaagccggaggcgccgcagaccgcctctaccgaattgtccatgaatggtggtacgccggcccaggcccagcagccgggcagcggcccggccgtggagttcaacggctccagccagccgttgccgctaccgttggtcggcgagtcgcagccggtcattcgcgagccgctggcccaggccgccgggcaaggtggcgacgacgaaggcggcctgccgtccgccgcggtgccgcctaccgtttccagctcggctcctccggtgacgccgctggccaacaacggcgtcacgccgatgcatccggtgccgccggcgccgaccgaaccgaccgcgcctgcggcgaccccgactccggcgcaggccccggcaccggccgcgccggtcgccagcgccccggccagcaagccggccccggcccccgctccggccaagccggcggcgagcaagccggccaccaccgccgcggcgaagccggccccggctccggccgccaagccggccagcggtggcggtgcgggaagtcagtggtatcgcaaccagtctggtggtaacttcgccctgcagatcctcggtaccggctccgaagccaatgcccaggcgttcattcgccagcagggcggcggcgatttccgctacttcaagaaaaccctgcaaggcaagccgttctacgtcgtcacctatggcagcttcccgaaccgtgccgccgccctggccgcagtgaaaaaactgccgtccaaggtgcaggccggcaagccgtggccgcgtaccttcgccagcatccagcaggagatcggccaggcgcattga

SEQ ID NO: 363740 - DNA, 4446 bp, Pseudomonas aeruginosa
atgaaagcaggtctgtaccatcctgaaacgttcaaggataactgcggatttggcctgatcgcccatatgcagggcgagccgagccatcaacttctgcaaaccgcaatcgaagcactgacctgcatgacccaccgcggtgggatcaatgccgatggcaagaccggggacggctgcgggctgctgatccagaagcccgacctgttcctgcgtgccgtcgccagggaagccttttctgtcgacctgcccgagcaatacgcggtgggcatggtgttcttcaaccaggacccggtgaaagccgaggcggcacgcgagaacatgaatcgcgagatcgtcgccgccggactggagctggtcggctggcgcaaggtgccgatcgataccagcgttctcggccgcctggcgctggagcgcctgccgcagatcgaacaggtgttcatcggcggcgccggcctgagcgaccaggacttcgccatcaagctgttcagcgcacggcgccgctcgtcggtggccaacgccgccgacagcgaccactacatctgcagcttttcgcacaagaccatcatctacaagggcctgatgatgccggccgacctggccgccttctatccggaccttggcgacgagcgcctgcagaccgcgatctgcgtattccaccagcgcttctccaccaacaccctgccgaaatggccgctggcgcagccgttccgcttcctcgcccacaacggcgagatcaacaccatcaccggcaaccgcaactgggcccaggcgcggcggaccaagttcaccaacgaactgatccccgacctggaagagctcggcccgctggtgaaccgcgtcggctccgactcgtcgagcatggacaacatgctcgaactgatggtcaccggcggcatggacctgttccgcggcctgcgcatgatcatcccgccggcctggcagaacgtcgaaaccatggacgccgacctgcgcgcgttctacgagtacaactcgctgcacatggagccctgggatggccccgccggcgtcgtgctgaccgacggtcgctatgccgtctgcctgctcgaccgcaatggcctgcgcccgtcgcgctgggtcaccacgaagaacggctacatcaccctggcttcggaaatcggcgtctgggactacaagcccgaggacgtcatcgccaagggtcgcgtcggcccggggcagatcctcgcggtggacaccgagaccggccaggtcctgcacagcgacgacatcgacaaccgcctgaagtcgcgccatccctacaagcaatggttgcggcagaatgccctgcgcatccaggcgaccctggacgacgaccatggcgtggccagctacgacgccgaccagctcaagcaattcatgaagatgttccaggtcaccttcgaggagcgtgaccaggtgctgcgtccgctcggcgagcagggccaggaagcggtgggctccatgggcgacgatacgccgatggcggtcctctcccggcgcatccgctctccgtacgattacttccgccagcaattcgcccaggtcaccaacccgccgatcgacccgctgcgcgaagccatcgtgatgtccctggaaacctgcctgggcgtcgagcagaacatcttcgaggaagccccgcaccatgccaaccaggcgatcctcaccactccggtgatctcgccggcgaagtggcggaccatcatgaccctggaccgcccgggcttcgaccgccacttcatcgacctcaactacgacgagtcgatgggcctggaggccgcggtgcgcaacatcgccgaccaggccgaggaagccgtgcgcggcggcaaggtgctgctgatcctcagcgaccgccatatcgctcccggcaaactgccggtgcatgctgccctggccgtcggtgcggtgcaccaccgcctggtgcagaccgggctgcgctgcgactccaacatcctggtggagaccgccaccgcccgcgatccgcaccatttcgcggtgctgatcggcttcggcgcctcggcggtctatccgttcctcgcctacgaggtgctggccgacctgatccgcaccggtgaagtgctgggcgacctctacgaggtgttcaagtactaccgcaaggggatctccaagggcctgatgaagattctctcgaagatgggcatctccaccgtcgcgtcctaccgtggcgcgcagctgttcgaggcggtgggcctgtccgacgaggtcaccgacctgtgcttcaccggagtcgccagccgcatccagggcgcgcgcttcgtcgatatcgagaacgagcagaagctcctggccgccgaggcctggagcaaccgcaagccgatccagcagggcggcttgctgaagttcgtctatggcggcgaataccacgcctacaacccggatgtggtgaataccctgcaggctgccgtgcagcagggcgactacgagaagttcaaggaatacaccgcgctggtggaccagcgcccagtgtcgatgatccgcgacctgttgcaggtgaagaccgccgcgcagccgctggcgctcgacgaggtggagccgctggaagccatcttcaagcgcttcgatgccgccgggatttccctcggcgcgctgtcgccggaggcccacgaggcgctggccgaggcgatgaacaccctgggcggtcgctccaactccggcgagggcggcgaggacccggcgcgctacggcacgctgaagagttcgaagatcaagcaggtggctaccggccgcttcggcgtgaccccggaatacctggtcaacgccgaggtcctgcagatcaaggtggcccagggcgccaagcccggcgagggcggccagttgccgggcggcaaggtcaacggcctgatcgcccgcctgcgctatgcggtgcccggcgtgaccctgatctcgccgccgccgcaccacgacatctactccatcgaagacctggcgcagctgatcttcgacctcaagcaggtcaacccgcaggcgctggtatcggtgaagctggtatccgagccgggcgtcggcaccatcgccgccggcgtggccaaggcctatgcggacctgatcaccatctccggctacgacggcggtaccggcgcctcgccgatcacctcgatcaagtacgccggctcgccctgggaactgggcctggcggaaacccaccagaccctgcgcggcaacgacctgcgcggcaaggtccgggtgcagaccgatggcggcctgaagaccggcctggacgtgatcaaggcggccattctcggcgccgagagcttcggcttcggtaccgcgccgatgatcgccctgggctgcaagtacctgcgcatctgccacctgaacaactgcgccaccggcgtggcgacgcagaacgacaagttgcgcaaggaccacttcatcggcaccaccgcgatggtgatcaacttcttcaccttcatcgccacggaaacccgcgagtggctggcgcgcctcggcgtgcgcagcctgggcgagctgatcggccgcaccgacctgctggagatcctccccggcgagaccgccaagcagcagaacctggatctcgctccgttgctgggcagtgagctgatcccggccgacaagccgcagttctgcgaggtggagaaaaacccgccgttcgaccagggcctgctggccgagaagatggtcgagctgtcgaaggccgccatcgaaggcctgagcggcggcgagtacgagctggacatctgcaactgcgaccgatccatcggcgcgcgggtatccggcgagatcgcccgcctgcacggcaaccagggcatggccaaggcaccggtggtgttccgtttcaagggcaccgcgggacagagcttcggcgtgtggaacgccggtggcctgcacctgtacctggaaggcgacgccaacgactacgtaggcaagggcatgaccggcggcaagctggtgatcaccccgcccaagggcagtccgttcaagacccaggaatcggccatcgtcggcaacacctgcctgtacggcgccaccggcggcaagctgttcgccgccggaaccgccggcgagcgcttcgccgtgcgcaactccggttcccatgcggtggtggaaggtaccggcgaccactgctgcgaatacatgaccggcggtttcgtctgcgtgctgggcaagaccggctacaacttcggctccggcatgaccgggggcttcgcctacgtcctcgacatggacaacactttcgtcgaccgcgtgaaccacgagctggtggaaatccagcggatcagcggcgaggcgatggaggcctatcgcagccacctgcgcaaggtcctggtcgagtacgtgaacgaaacggcaagcgagtggggcgcgaacatcctggaaaacctggatgactacctgcgtcggttctggctggtgaaaccgaaggcggccagcctcggttcgctgctgaccagcacccgtgccaacccgcaataa

SEQ ID NO: 363741 - DNA, 1434 bp, Pseudomonas aeruginosa
atgtctgaacgtctgaattccgaccgcctgaacaacgacttccagttcatcgaagtcgggcgcaaggacccgaagaagaagctgctgcgccagcgcaagcgcgagttcgtggagatccacgacctgttcaagccgcagcaggccgccgaccaggcccaccgctgcctgggctgcggcaacccgtactgcgagtggaaatgcccggtgcacaacttcatccctaactggctgaagctggtttccgaaggcaacatcctggccgccgccgaactgtcgcaccagaccaacaccctgccggaagtctgcggccgggtctgcccgcaggatcgcctctgcgagggcgcctgcaccctcaacgacggttttggcgcggtgaccatcggctcggtggagaagtacatcaccgatacggccttcgccatgggctggcgtccggacctgtccaaggtcaagccgaccggcaggcgcgtcgcggtgatcggcgccggcccggccggcctcggctgcgccgacgtgctggtgcgcaacggcgtgaccccggtggtgttcgaccgcaacccggagatcggcggcctgctgaccttcggcattcccgagttcaagctggagaagcacgtcctcagccgtcgccgcgaggtgttcaccggcatgggcatcgagttccgcctgaacaccgagatcggcaaggacgtgaccatggagcagttgctcgatgagtacgatgccgtgttcatggggatgggcacctacacctacatgaagggcggtttccccggcgaggacctgccgggcgtacacgacgccctggacttcctgatcgccaacgtgaaccgcaacctcggcttcgagaagtcggccgaggacttcgtcgacatgaagggcaagcgcgtggtggtcctgggcggcggcgacaccgcgatggactgcaaccgcacttcgatccgccagggcgccaagtcggtgacctgtgcctatcgccgtgacgaagaaaacatgccgggctcgcgcaaggaagtgaagaacgccaaggaagagggcgtgaagttcctcttcaaccgccagcccatcgccatcgtcggcgaggaccgggtggaaggcgtgaaggtggtcgagacccgtctcggcgagccggacgcccgcggccgccgcagccccgaaccgatccccggttccgaggagatcatcccggcggaagccgtgctgatcgccttcggcttccggccgagtccggcgccgtggttcgagcgcttcgagatcgccaccgacagccagggccgcgtggtggctccggcgcaggcgcagttcaagcaccagaccagcaacccgaagatcttcgccggtggcgacatggtccgtggttccgacctggtggtgacggcgatcttcgaaggacgtaccgcggccgaaggcatcctcgactaccttggcgtctga

SEQ ID NO: 363742 - DNA, 1068 bp, Pseudomonas aeruginosa
atgactgccctgaagaacgaccgcttcctccgcgccctgctcaagcagcccgtcgatgtcacccccgtctggatgatgcgccaggccggtcgttacctgccggaataccgtgccacccgtgccaaggccggcgatttcatgagcctgtgcatgaacccggagctggcctgcgaagtgaccctgcagccgctggaccgttacccgcagctggacgccgcgatcctcttctccgatatcctgaccattcccgatgccatgggccagggcctgtacttcgagaccggcgaaggcccgcgcttccgcaaggtggtctcgtcgctggccgacatcgaggcgctgccggttcccgatccggaacaggacctgggctatgtgatggatgccgtgcgcaccatccgccgcgagctgaacggccgcgtaccgctgatcggcttctccggcagcccctggaccctcgccacctacatggtcgagggcggctcgagcaaggacttccgcaagtccaaggcgatgctctacgacaaccccaaggccatgcacgctctgctggacaagctggcgcaatcggtgaccagctacctcaacgggcagatccacgccggcgcccaggcggtgcagatcttcgactcatggggcggcagcttgtcggcggcggcctaccaggagttctccctgacctacatgcgcaagatcgtcgatggattgatccgcgagcacgacggacgccgggtgccggtgatcctcttcaccaagggaggcggcctgtggctggagtcgatggccgaggtcggcgccgaggcgctgggcctggactggacctgcgacatcggcagtgcccgggcccgtgtcggtgagcgcgtagccctgcaaggcaacatggatccctcggtgctctacgccaatccggcggcgatccgcgccgaagtcgcgcggatcctggcggcctacggcgagggtacggggcatgtgttcaatctcggccacggcatcaccccggaagtcgacccggcccatgccggcgccttcttcgaggcggtgcacgagctgtcggcgcagtaccacggctga

SEQ ID NO: 363743 - DNA, 981 bp, Pseudomonas aeruginosa
atgaaaccagcgatcaagcgcgcctgcctgctcggcacggcactgttctccctctgcgccagcgcagcccaggcggccggcgttctggtaggaacctgggacctgcggggcaacggccagctcgccgcggtctaccgcgacggcgccaacctgcaggtggtggaaggcggcagcacccgcaactacagcttcggcaacgtggtctggtcggtcttcggcgccaccgataccgacggccagcccggcgcggaaatcctggtcaaggccggtcccgacctggtgatcgtttcccacgccagcaccacccagcgcaagtacccggtaggcaacgtctcctgggcgatcatgcgcgccaccgacgtcgacaacgtcgccggcgacgaagtcatcctcagcatcggcaacggcgtgcgcaccgtattcgatcgcacccgtacgcaacgcgacgccaccttcagctacaacggcacctggggcctgttcgacgtcgccgacgtggacggcgcgccgggcaaggaactggtgctgaacatgggcaacggcgtcaaggtcatcgacccgcgcaccggtggcgccaaggacttcaccttcagcggctaccacgcgctcgcacagatcgccgacctcgacggccagcccggcgcggagatcatcggccgcaccagcaccggcatctacgtgatcagcaacgccagttcccgcaaggaatacagcatcggcgccagcgcctgggcactctatggcggcaccgcggacaccgacggcaagccgggcaacgagctgatcgtggtgatgcagggcaaggtgcgggtcatccaccacgccagcggcgccagcagcgactaccgcatcggcgacgtcaactacagcatcgattcggtggccgacatggatggccagccgggcgcggaaatcctcgtgcgcgacgccaacggcaagctgttcgtgatcaacgaccgcaccggcaaggtaagcagttga

SEQ ID NO: 363744 - DNA, 1074 bp, Pseudomonas aeruginosa
atgagccgccgcacggactccgacgcaccgaccatcaccgctgcctatccgcgcctgctgctcggcctgctggaggaacgcggcctggacggacgcgcgctgctgcgggaaatcggtctgtcgacgctgcgactggaagagccggaagcacgcgtcacatcgcagcagtaccaggcgatcgccgccacggcgctcgcgctgagcggcgaccccggcctcggcgcacagctcgccttgcgcacgcctcccaccgcccatggcagcctgggctacgcgatgatggcctcggcgacgctcggcgatgccttgtgcctggcgctgcgctacatgccgctgctgcagggcaacgtcgaaatcagcctgctgcgcgaggacgagcaggtgatcctgcgcctgctgccaggccctgcgctcccgccggcgctgcaccggtacttcagcgaagccctgctgatcggcctgtatcgctccggcgcctggctgctcggcgaaccggccctggtcggcaggctcgacttcgactaccccgaacctgccgtgcctgtgcagctgccgcagtgccgctacgaccaggcccacgtccagttggtgttccccgccatcctgctcgcccgctcgctaccgatggccgatccggctgcgttgcgccgcgcccgcgaacactgcgagcgcgaactggcgctgctcgatgccggccgccgggacatctgcgcccgcgtgcggctggagctggaacgccaggaacagcgcttccccaacctggaggaagtagccgcgcgcctgcacctgtccagccgcagcctcaagcggcatctgcatgacgccggcaccagctttcgccagttgctcggccaggctcgccagcgccaggccttgcgattgctgcggcgtcccgaggtgtcgttgcagcgtatcgccctgtacctgggttacagcgatccaaccaacttcacccgcgccttcaagcgctggaccggcgagccgccgagcgacacccgcgcccgcctgctgggcgggcaaccagtttcacgaacaaatgccaagcgctcgacaaatccctcgcgtttcccttga

SEQ ID NO: 363745 - DNA, 1317 bp, Pseudomonas aeruginosa
gtgagcaatccgcaagtccggccacaggccgaagaagaacccgcgttaatcgaggcggcccgcgaagcagccaacgaggtgctggaagccgccaccgaagtcgaacgctatatcgagaaaggcaccccgcagttcatgcgcacctcgctggcgctgttctccggcggtttcgccacctttgccctgctctactgcatccagccgatgatgccggtgctgtccaaggcgttttccatcagcgccgcggaaagcagcctggcattgtccgtcgccaccgccatgctcgcccttggcctgctggtcaccggcccgatctccgacgcgatcggtcgcaagccggtgatggtcgtctcgctgctggccgccgcgctgttcaccctcggcagcgcggtgatgcccacctggcatggcgtgctgctgatgcgcgcgctggtcgggctgtccttgagcggcctggccgcggtggcgatgacctatctcagcgaagagatccatccgcagcacatcggcctgtcgatgggcctgtacatcggcggcaacgccatcggcgggatgagcggacgcctgatcagcggcgtcctggtcgatttcatctcctggcatgccgcactggcggtcctcggcggcctggccctggtcgccgcgctggtgttctggcgcgtgctgcccgaatcgaaacacttccggccggcaccgctgaagccggcgaccctgctcaacggctaccgcctgcacttccgcgacgccggactgccctggctgttcctgatcggcttcctgctgatgggcagcttcgtcaccctgttcaactacatcggctaccgcctgctggccgagccctaccacatgagccaggcggtggtcggcgtgctctcggtggtttacctctcgggcatctacagctcggcctgggtcggttcgctggccgacaagctggggcgacgcaaggtgctctgggcggtcatcctgctgatgctcggcggcctgctgctgaccctgttcgagccgatcccgctgatgctcgccggcctgctgctattcaccttcggcttcttcggcgcgcactcggtggcgagcagctggatcgggcgccgcgccctgcgcgccaagggccaggcctcgtcgctctacctgttcagctactacgtcggctcgagcctggccggcaccctcggcggggtgttctggcattactacggctggaacggcatcgggctgttcatcggctcgctgctggtggtcgcggtattggtctcgctgcacctggcgcgcctgccggccctgcctggcaacaccctggcgcaggccgcccactga

SEQ ID NO: 363746 - DNA, 906 bp, Pseudomonas aeruginosa
gtggaactcaggcacctgcgctatttcatcgccgtcgccgaggagctgcacttcggccgcgccgccgagcgcctggggatctcccagccgccgttgagccagcagatccaggcgctggaggaggaaatcggtgcgcgcctgttcgagcgcaccaaccgccgcgtcgaactcaccgacgccggccggctgttcctcgacgagtcccgccaggtgctggcccaggtagacaaggcggtgttgctggcgcgtcgggcccacctgggggaactgggcgagctgaagatcggtttcacttcctcggcacccttcacctcgaccatacccagcagcatccatgccttccgcaaggcctatccggacgtacacctcgacctgcaggaaatgagcagccgccaggtactcaaggcgctgctcgaggaaagcctgcaggtgggcgtgatccgcccgctggcgctgccggatgcggtgcattgggtggagttgttccgcgaaccgctggtggcggtgctgcgggccgaccatccgctggcggccggcagcgaggatggcctggccatcgccgccctggccgaggagcccttcgtgttcttcccgcgcagctacggcaccgggctctacgaccaggtcatcgccctgacccgacaggccggcttcagcccgcgcatcgcccaggaggccagcgaggcgatgaccatcatcggcctggtctcggccggactgggggtgtcgatcctgccggcgtcgttccgccgcacccgggtcgacggcgtggtctaccgcaccctgagcgatcccgaggcgacgactgcggtatggctggtccgccggcagaacgagggctcgccgctggcgctgtccttcatcgacctggtgacccgtgaggcggccagcctgcgccggcgctga

SEQ ID NO: 363747 - DNA, 768 bp, Pseudomonas aeruginosa
atgcggcgcgtggtgttcaatcagaaaggcggggtaggcaagtccagcatcgcctgcaacctggcggcggtcagcgcggcggagggctatcgcaccctgctggtggacctggacgcccaggccaactccacgcactacctgaccggactgaccggcgaggacctgccggtggggatcgccgacttcttcaagcagaccttgtcttccgggcccttcagcaagaagggcagggtcgagatctacgagacgccgttcgacaacctgcacatcgtcacctccagccccgaactggccgacctgcagccgaagctggagtcgaagcacaagatcaacaagctgcgcaaactgctggacgaactggacgaagactacgaccggatctacctggataccccgccggcactgaatttctacacggtatctgcgctgatcgctgccgatcgctgcctgattcccttcgattgcgacagcttctcccgccaggcgctgtatggccttctccaggagatcgaggaactgcgtgacgaccacaacgaagacctgcaggtcgagggcatcgtggtcaaccagttccagccgcgcgccagcctgccgcagcaactgctcgacgagctggtggcggaggaactgccggtgctgccggtgtacctgatgagttcggtgaagatgcgcgagtcgcaccaggcttgtaccccgctgatcttcctcgaaccgcggcacaagctgacccagcagttcgtcgagttgcacgggctgctcgaaagctga

SEQ ID NO: 363748 - DNA, 816 bp, Pseudomonas aeruginosa
atgatccgccacctcctggtcgcccacgacctcaccccggaagccgacgtcgccctcgcccgcgccgcccaactggcccgccagcacgatgcgcgggtcagcctgctgcacgtgtacgacccggggctatcggcgtcggcggtgaagaccgtcagcgccatgctgcagctcaagcgcaaggaggccggcctcgacgaggacagcgccatccacctgttcaggggccagccggtcgacggcatcctgcagcagacccgggcgctcgaaccggacctgctgctgatgggcgcacaccaccagaagaccttcgaacgcttcggcaacaccaccctcgaccaggtggtgcggcgcagccgggtgccggtgctgctcgccgtgcgcgaggcggacgaaccctaccgccaggcgctcagcgccctggacttttcccagtgcgcctgtaccgcgctgcgccaggcctaccgcctgctgccggtggaagccgacctgcacgccctgcacgtgttcgagtcccccgacgacggcgtgctcggcctgcccaggcagaatgccgcgcacctggccacccaggccgggctgatcgaacaattgctgagcgacgagcaggagcgcctgccgggcgtcgggccgcagctgagccacgaagtggttcccggcgtgctgccgtacagcctggacgccgcgttgaagcagcgccagccggagctgctcgccctcggccggcacagccgcaacgcgctgatgcaggcgctgctcggcaacctggcgcaacgttacctgcgccagccgagctgcgacgtcctggttacctcgtag

SEQ ID NO: 363749 - DNA, 453 bp, Pseudomonas aeruginosa
atgccactgcccaccgaactcgccaggcacctgaccgaagaaaagatcgccttcgtccagcgcagcggactcagggcggaagtcctcgaacccggctacgtgcgcctgcgcatgccgggcgccggcaacgagaaccacatcggcagcatgtacgccggggcgctcttcaccctcgccgaaattcccggtggcgcgctgttcctgaccagcttcgacagcgcccgcttctatcccatcgtcaaggagatgaccttgcgcttccgccgcccggccaagggcgacatacgcgtcgaggcacgcctggatgccgagcgcatccgccaactggaaaccgaggctggagagcgcggcaaggccgaatacagcctcgaactgcaactcaccgacgagcagggggaggtggtggcggaaagcaccgcgttgtaccagctacgcagccacgcgcggccctga

SEQ ID NO: 363750 - DNA, 1278 bp, Pseudomonas aeruginosa
atgaaactggaaaccctggccgtccacgccggctacagccctgacccgtccacccgcgcggtggcggtgccgatctaccagaccacctcctacgctttcgacgacacccagcatggcgccgacctgttcgacctgaaggtaccgggcaacatctacacacggatcatgaaccccaccaacgatgtactggaacagcgcgtcgcggcgctggaaggcggggtcggggcgctggcggtggcctcggggatggcggccatcacctacgcgatccagaccgtcgccgaagccggcgacaacatcgtctcggtggccaagctctacggcggcacctacaacctgctggcccacaccctgccacgcatcggcatccaggcgcgcttcgccgcccacgacgacatcgccgccctggaagcgctgatcgacgagcggaccaaggccgtgttctgcgaaaccatcggcaacccggcgggcaacatcatcgacctgcaggcactggccgacgccgctcaccgccacggcgtaccgctgatcgtcgacaacacggtagccaccccggtgctctgccggccgttcgagcacggtgccgacatcatcgtgcactcgctgaccaagtacatgggcggccacggcaccagcatcggcgggatcgtggtcgactccggcaaattcgactgggcggcgaacaagtcgcgcttcccgctgctgaacacgcccgatccgtcctaccacggcgtcacctacaccgaggccttcggacccgccgccttcatcggccgctgccgggtggtaccgctgcgcaacatgggcgcggcgctctcgccgttcaacgccttcctcatcctccaaggcctggagaccctggcgctgcgcatggagcgccactgcgacaacgccctcgccgtagcccgctacctgcaacaacatccgcaggtggcctgggtgaaatacgccggcctcgccgacaaccccgagcacgccctggcccggcgctacctggggggccgcccggcggcgatcctgtccttcggcatccagggcggcagcgccgccggcgcgcgcttcatcgacgccttgaagctggtggtgcggctggtcaacatcggcgacgccaagtccctggcctgccacccggcgagcaccacccaccgccagttgaacgcagaggaactggcccgcgccggagtctccgacgacatggtgcggctgtcgatcggcatcgagcacatcgacgacatcctcgccgacctcgaccaggccctggccgccgctgcacgctga

SEQ ID NO: 363751 - DNA, 975 bp, Pseudomonas aeruginosa
atgaagatacgcgacctcgatctcagccagagttcgatcaacaccgaacaccaggcgctaggtctgcctcctgtcgaagatttcgtcacccatccggacgaccacccggtactgcgcgccgccatgtgggcggcggtgctgatcctggtcggcctgctcgccttcctggcctggcgcctgttcttcgacaacggcggcagcagcggcttcgagatcatcgagcaggccctgaccagccgaggtttctggagcgcggtggcggtgggcttcttcgcccaggtgatcgacggtgcgctgggcatggcctacggcattactgccaccaccttcctgctcagcgctggcgccacgccggccgccgccagcgccagcgtgcacatcgccgaagtgttcaccaccggcttttccgggatttcccacgtcaagctcggcaacgtcaacaagtcactcttcctccgcctgctgctgccgggaatgatcggcgcggtgctcggcgccgtgctgatcacccgcttcgacggccaccaactcaagcccttcatctccgcctacctgctgctgatgggcctgtacatcctgagcaaggcctaccgccacgtgatcaagcgccgggcaccgcgccacgtggccaagctggcactcttcggcggcttcgtcgatgccgccggcggcggcggctggggcccggtggtcaccagcagcctgatcggctcgggtagcgacccgcgcaccaccatcggctcggtgaacttcgccgagttcttcctgaccatcgccagcgccacctccttcatcctcctcgccggccagccggacacctggaagatggtcgccggactggtcttcggcggcctgttcgccgcgccgttcgccgccctgctgtgcaagaagctttcgccgcgcaccctgctggtcatcgtcggcaccctgatcaccctgatcagcgcctacaacatctacatcggcctgcgctga

SEQ ID NO: 363752 - DNA, 1461 bp, Pseudomonas aeruginosa
ttgaaatcactcgacgacctcgacttcgacaaccgcttcgcccgcctgggcgacgccttctccaccgaagtcctgcccgaccccatcgccgagccgcgcctggtggtagccagccccgccgccctggcgctgctcgacctgccagcggaaaccagtgacgaagcgctattcgccgagctgttcggcgggcacaagctgtggtcggaggccgagccgcgggcgatggtgtattccggccaccagttcggctcctataacccgcgcctgggcgacggccgcggcctgctgctcggcgaggtgatcaaccaggccggcgagcactgggacctgcacctcaagggcgccggccagaccccctactcgcggatgggcgacgggcgcgccgtgctgcgctcgtcgatccgcgagttcctcgcctccgaagcccttccggcactgggcattcccagcagccgggcgctctgcgtgatcggttcgagcacgccggtctggcgcgagaagaaggaaagcgcggcgacgctgctgcgcctggcgcccagccacgtgcgcttcggtcacttcgaatacttctactacacccgccagcacgaccagttgaaacagttggcggcgttcgttctggaacaccacttcgccgactgcaacgcagccgagcggccatacgcggcgatgttccgccaggtcgtcgagcgcaacgccgaactcatcgcccgctggcaggcctatggcttctgccacggggtgatgaacaccgacaacatgtcgatcctcggcattaccttcgactacgggccctacgccttcctcgacgatttcgacgccaatcacatctgcaaccactccgacgacgccggccgctactccttcagcaaccaggtaccgatcgcccattggaacctggccgccctggcccaggcgctgacgccactggtggaagtggacgaactgcgcgccagcctcgacctgttcctgcccctctaccaggcccactacctcgacctgatgcgccggcgcctgggcctgggcgtcgccgcggagaacgaccaggccctggtccaggaactgttgcagcgcatgcagggcagcgcggtggattactcgctgttcttccgccgactcggcgaagaaactccggagcgggcgctggccagcctgcgcgacgacttcgtcgaccgcgaggccttcgaccgctgggccgaggcctaccgccggcgcgtcgaggaagaaggcggagaccaggagtcgcggcgccggcgcatgcacgcggtcaatccgctctatgtgctgcgcaactacctggcacagcaggccatcgaagcggccgagcagggcgactacacggaagtccgcttgctgcaccaggtactgagtcgcccgttcgaggaacagccgggcatggagcgcttcactcggcgcccgccggactgggggcggcacctggaaatcagttgctcctcctga

SEQ ID NO: 363753 - DNA, 3357 bp, Pseudomonas aeruginosa; identical to SEQ ID NO: 318064

SEQ ID NO: 363754 - DNA, 1743 bp, Pseudomonas aeruginosa
ttggacgccgtcaccgtcaataatttcttcctgatcggggcggtgctggtcggcatgagcatcctcgtcagctcgctgtcctcccgcctgggcatcccgatcctggtgatcttcctcgccgtcggcatgatcgccggcaacgacggggtcggcggcatcgtcttcgacaactatccgatggcctacctggtgggcaacctggcgctcgccgtgatcctcctcgacggcggcctgcgcacccgcgtctccagcttccgcgtggcgctctggccggcattgtcgctggccaccctgggcgtgctggtgaccaccggcctgaccggcatcgcggcagcctggctgttcgacctgcactggatggaaggcctgctgatcggcgccatcgtcggctccaccgacgccgccgcggtgttctccctgctcggcggcaaaggtctcaacgagcgggtcaccgcgaccctggaaatcgaatcgggcagcaacgacccgatggcggtgttcctcaccgtgaccctgatcgagatgctcgccagcggccagaccggcctcagctggggcttcgccctgcacctggtgcagcagttcggtctcggcgccctgctcggtcttggcggcggctggttgctgctgcaactgatcaaccgcatgcacctggccggcggcctctacccgttgctggtgatcagcggcggcctgctggtgttcgccctggccaacgccgtcggcggcagcggcatcctcgccatctacctgtgcggcctgctcctcggcaaccgcccgatccgcagccgccacggcatcctgcacatgctcgacggcatggcctggctggcgcagatcggcatgttcctggtcctcggcctgctggtcaccccccacgacctgtggccgatcgccctgccggcactggccctggcgctgtggatgatcctggtggcacgaccgctgtcggtactgatcggactgatcccgttccgcgccttccacgaccgggagaaagccttcatcgcctgggtcggcctgcgcggcgcggtgccgatcatcctcgcggtgttcccgctgatggccggcctgccgaacgcccagctgttcttcaacgtggccttcttcatcgtcctggtctcgctgctggtgcagggcaccagcctgccctgggcggccaggctgctgcgggtggtggtgccgccggatccggcaccgatatcccgcgccggcctggagatccacccgaccagcgagtgggagctgttcgtctaccacctgaacaaggaaaagtggtgcatcggcgccgccctgcgcgagctgaagatgcccggcgggacccggatcgccgcgctgttccgcggcaccgaactgctccacccgtcgggcagcaccatcctcgaggccgacgacattctctgcgtgatcggccacgaacacgacctgccggccctcggcaagctgttcagccaggcgcccgaccgcggcctcggcgcgcgcttcttcggcgacttcgtgctggaaggcgatgcccagctgtcggcggtggcctcgctctacggcctgaagctcgacggcatcgacggcgagcaagcgctgggccgcttcatcgcccacgagatcggcggcgaagcggtgatcggcgaccaggtggagtggaacggcctgacctggaccgtggccgccctggaaggcaaccgtatccgcaaggtcggcgtgaagtttccggaaggccgcccagggcccggacttttcctctga

SEQ ID NO: 363755 - DNA, 1803 bp, Pseudomonas aeruginosa
atgtccgaaaccctgctcagttcccgcaacctggcgttcgagctgtacgaagtcctcgatgccgaagccctgacccagcgcccgcgcttcgccgaacatagccgcgaaaccttcgatgccgccctcggcaccgcgcggagcctggcggaaaagctgttcgccccgcacaaccgcaagggcgacgaacacgagccgctctatgagaatggctcagccacgctgattccggaagtgaagccggcagtggatgccttcctcgacgccggcttcctcaacgccacccgcagcttcgagcaaggcggcatgcagttgccgaccctgctgtcgcaggcctgcttcgcccacttccaggcggccaacgtcggtagctcggcctatccgttcctgaccatgggtgccgccaacctgatcgagagcttcggcagcgaggagcagaagcagcgcttcctgcaaccgatgatcgagggccgcttcttcggcaccatggccctcaccgaaccgcacgccggctcctccctctccgacatccgcacccgcgccgaaccggccgccgacggcagctatcggatcaagggcaacaagatcttcatctccggcggcgaccacccgctctccgagaacatcgtgcatatggtcctggccaagctgccggatgcaccgccgggggtgaaaggcatctcgctgttcatcgtgccgaagttcctggtcaacgccgacggcagcctcgggccgcgcaacgacgtgatcctcgccggcctgttccacaagatgggttatcgcggcaccacctccaccgcgctgaacttcggcgacaacggcgcctgcgtcggctacctggtgggcaagccgcaccacggcctggcctacatgttccagatgatgaacgaggcgcgcatcggcgtcggcatgggcgcggtgatgcttggctatgccggttacctctattcgctggagtacgcccgcgaacgcccgcagggccgcctgccggacggcaaggacccgagcgcgccacaggtggcgatcatccgccacgccgacgtgcggcgcatgctgctgacccagaaggcctatgtcgaaggcgccttcgacctgggcctgtacgccgcgcgcctgttcgacgacagccagaccctggaagacgacgaacagcgccgccaggcccacgacctgctcgacctgctgaccccgatcgtcaagtcctggccctcggagttctgcctgaaggccaacgagctggcgatccagatcctcggcggccacggctacacccgcgaatacccggtggaacagtactaccgcgacaatcgcctgaacccgatccacgaaggcacccacggcatccagtccctcgacctgctgggacgcaaggtcgggcagaacaatggcgccggcctgcgccagctgacccgcctgatccaggacgcctgccggcgcgccgaagcccatccatccctggccgccctgcgccagccgctggaacggctggtggcgcggctgtccgaggtgaccctggcactgctcggcgacctgatgcagggccaggtcaaccagggcctggccaactcggcgctgtacctgaaggtgttcggccatgcggtgatcggctggcgctggctggagcaggcgatccgcgccgaggaagggctggctcgcggcgactgcgccgacgccgacttctatcgcggcaagttgcaggccgctcgctacttcctgacctgggaagtgcctggctgccaccacgaactggcgctgctggaggcccgcgacgacgtgtgttcgagcatgcaggaagaatggttctga

SEQ ID NO: 363756 - DNA, 837 bp, Pseudomonas aeruginosa; identical to SEQ ID NO: 318067

SEQ ID NO: 363757 - DNA, 648 bp, Pseudomonas aeruginosa
atggttctgcgttctgaaatcctcaccaagaaaagcgagctgcccacgccggaccaggccctgccgggtcgcgaaagcgccatgccggtgcccgaagcgcacttcgtcaacggccgcccgctgaccgcgccgttccccgccggcctgcaacaggtgctgttcggcatgggctgcttctggggcgccgagcgtcgcctctggcagcaaccgggcgtctgggtgaccgcggtgggttatgccggcggctacacgccgaacccgacctacgacgaagtctgctccggcctgaccggccacagcgaggtcgtgctggtggtctacaacccgcaggagaccagcttcgaacagctactcaaggtattctgggaagcccacgacccgacccagggcatgcgccagggcggcgacatcggcacccagtaccgctcggtgatctacaccttcgacgcggcccagaaggccgcggccatggccagccgggagagcttccaggccgaactggcgaaagccggctacgatcgcatcaccaccgagatcgccgacgtcccgcccttctactacgccgaggcctaccaccagcagtacctggcgaagaaccccaacggttactgcggcctgggcggcaccggggtgtgcctgccggcctga

SEQ ID NO: 363758 - DNA, 2700 bp, Pseudomonas aeruginosa
atgaaaagtcatcccgatgccgccagccgttcggcggccgaggttgtcacgcagctacccgtgccgtcgcggctcgggctgctgcgtttcgagcggctgaacgagccgagctgggcactgctgttcctcgatcctgcctgcgagcgccagctcgggctgccggcgactaccctctgcgcactgctcgatgcgccttacgccagcctgatggaacccgaggcccgccaccgcctgcacgagcagatccagcagcaactggtgaagcgcccgcactaccaggtgagctacaagctgcacacacccaacggcgtgctgaccatgctggagttcggcgaagccttccagcagcatggccgccagttgctgcacggctacctgatggtcgaggagcgagcggagagcgccgagcgcagcgaacagttgctcgacctggaatcgcagaacctgcgcctgaaggcgtccctggacctctaccagcgctcccaggacgaccacctgcaacacctgctgcgctcgcgcacccagcagaacctgatcgtccgcctggcccgccatcgctacctgtccagcgacccgctgctggaagccgcgcaactgatcacccaggccgcctgcgaagcctacggcaccgcgcgcgccggcatctggcgcctgctcgacgaccagcgcctggaagcggtgaccgtctaccgccgcgacctcgaccagtacgagaagccccagagcatcgacgccagccgctaccccgcctacctcgaggcggtacacagcgggcgcgccatcgacgcccacaacgcccagcgcgacccacgcacccaggaactctacaaggactacctgaggccgctgggcgtcaacgccctgctcgacgccaccatccgcatcggcggcgaggtggtcggcgtgctgtgcctggaacacgccggcgagaaccgcatgtggcagagcgacgagatcgccttcgccggggaactcgccgaccagtacgcgcaggtcctgatgaaccacgagcgacgcaatgtctccagcgccctgcacttgttccagcgcgcggtggaacagagcgccagcgccttcctgctgatcgaccgcgacggcgtcgtggaatacgtcaatccgagcttcacctcgatcacccagtacagcgccgacgaagtgcgtaaccgacgcctgtccgagcttccggcgctggagaacctcagcgagctgctgttcgacgcgcgttccgcgctgacccagcagaacagctggcagggcgagttccgcagccgccgcaagaaccacgagccttactggggccagttgtcgctgtcgaaggtctacgacgatctcggcgagctgacccactacatcggcatctacgaagacatcacgcagaacaagctggcccagcagcacatcgagaaactcgcctaccgcgacaacctcaccggcctggccaaccggcactatttcatcggcgccctcgaggaacgcctggaaagcagcggcgaccgcccgctcagcctgctgctggtggacatcgacaacttcaagcggatcaatgacagcctcggccaccagaccggcgacaagctgctggtcagcctggcccggcgcttgcgcagttgcctaggcgacggcgccaccctggcgcgcttcgccagcaacgagttcgccgtgctgctcgacgacaccgcggtggaaaagggcgaaagcattgccgcgcaggtcctgcacatgctcgacaagccgctgttcgtcgacaaccagttgatcaacatcaccggctccatcggcctggccagcgccccgcagcacggctgcgacccgcagaccctgatgaaatacgccggcctggcgctgcacaaggccaaggccaacggcaagcaccaggtccaggtgttcaccgaggcgctgaccgccgaggccagctacaagctgttcgtcgagagcaacctgcgccgcgccctggcgcagaacgaactggcggtgcactaccagcccaagctgtgcctgcgcagcggccagttgctcggcctggaagccctgctgcgctggcagcatccggaaaaaggcatgatccgcccggaccgcttcatcagcgtggccgaggaaaccgggctgatcgtgccgatcggcaagtgggtgatccgcgaagcctgtcgccaggcccgcgagctggccgaggccgggttgggcgagctgcagatcgccatcaacctgtcgcccaagcagttcaccgacccggacctggtcggctcgatcgcggcgatcctccacgaagagaacattccggccagccaactggaactggagctcaccgaaagcctgctgctggacgccaccgacgatacccgccagcaactcgaacgcctgaagagcctcggcctgaccctggcgatggacgacttcggcaccggctactcgtcactgagctacctgaagaaattccccatcgacgtgatcaagatcgaccgcagcttcatcaaggacatcccggacagccaggacgacatggaaatcacctcggcggtgatcgccatggcccacaacctcaagctcaaggtagtcgccgaaggcgtggagagcgccgagcaactggccttcctccggcgcaaccgctgcgacatcggccagggctacctgttcgaccggccgatccccagcgacctgctcaataccagcctgctgcgctatccctgccgcaccctgcactga

SEQ ID NO: 363759 - DNA, 1644 bp, Pseudomonas aeruginosa
gtgagcgaactcattcgcgtacccgacatcggcaacggtgagggtgaagtcatcgagctgctggtcaagcccggcgacaaggtcgaggccgatcagagcctgctgaccctggaatccgacaaggccagcatggaaatccccagtcccaaggccggggtagtgaaaagcatcaaggcgaaggtcggcgacaccttgaaagaaggtgacgaaatcctcgagctggaagtggaaggcggcgaacagcctgccgaagccaaggccgaggcagcgcccgcccaaccggaagcgccgaaagccgaagcgcctgctcccgccccgagcgagagcaagccggccacccccgccgcggccagcgtccaggacatcaaggtcccggacatcggctcggccggcaaggccaacgtcatcgaagtgatggtcaaggccggcgacacggtcgaggccgaccagtcgctgattaccctggaatccgacaaggccagcatggagatcccctcgccggcctccggcgtggtggaaagcgtctcgatcaaggtcggtgacgaagtcggcaccggcgacctgatcctcaagctgaaggtggaaggcgccgctccggcagccgaagagcaaccggcagccgctccggcccagtccgcggcgcccgccgccgagcagaagcccgccgcggcggcccctgcgccagccaaggccgataccccggctccggtcggcgcacccagccgcgatggcgccaaggtccacgccggcccggcggtgcgcatgctggcgcgcgagttcggcgtcgagctgagcgaagtgaaagccagcggtcccaagggccgcatcctcaaggaagacgtccaggtcttcgtcaaggagcaactgcagcgcgccaagtccggcggtgccggcgccaccggcggagccggcatcccgccgatcccggaagtcgacttcagcaagttcggcgaagtggaagaagtggcgatgacccgcctgatgcaggtcggcgccgccaacctgcatcgcagctggctgaacgtgccgcacgtgacccagttcgaccagtcggacatcaccgacatggaagccttccgcgttgcccagaaggccgcggcggagaaggccggggtcaagctgaccgtactgccgatcctgctcaaggcctgcgcccacctgctcaaggaactgccggacttcaacagttcgctggcccccagcggcaaggcgctgattcgcaagaagtacgtacacatcggcttcgccgtggacactccggacggcctgctggtcccggtgatccgcgatgtcgaccggaagagcctcctgcaactggccgccgaggccgccgagctggccgacaaggcccgcaacaagaagctctcggccgatgccatgcagggcgcctgcttcaccatctccagtctcggccacatcggcggcaccggcttcacgccgatcgtcaacgcgccggaagtggcgatcctcggtgtgtccaaggcgaccatgcagccggtatgggacggcaaggccttccagccgcgcctgatgctgccgctgtcgctgtcctacgaccatcgcgtgatcaacggcgccgccgcggcgcgcttcaccaagcgcctgggcgagctgctggcggacatccgcaccctgctcctgtaa

SEQ ID NO: 363760 - DNA, 2649 bp, Pseudomonas aeruginosa
atgcaagacctcgatcccgtcgaaacccaggaatggctggacgccctggagtccgtactcgaccgcgaaggtgaagaccgcgctcattacctgatgacccgcatgggcgagctggccagccgtagcggcacccaactgccctacgcgatcaccacgccctatcgcaacaccattccggtaacccacgaagcacgcatgcccggcgacctgttcatggagcgccggatccgctccctggtgcgctggaacgccctggcgatggtgatgcgggcgaacaagcacgacccggacctgggcggccacatctccaccttcgcctcctcggcgaccctctacgacatcggcttcaactatttcttccaggctcccaccgaagaacacggcggcgacctggtgttcttccagggccacgcgtcccccggcgtctacgcccgggccttcctcgaaggccgcatcagcgaggaacaactggagaacttccgccaggaagtggacggcaacggcctgtcctcctatccgcacccctggctgatgccggacttctggcagttccccaccgtatccatgggccttggcccgatccaggcgatctaccaggcacgcttcatgaagtacctggaaagccgcggcttcatccccgccggcaagcagaaggtctggtgcttcatgggcgacggcgagtgcgacgagccggaatccctcggcgcgatctccctggccggccgcgagaaactcgacaacctgatcttcgtcatcaactgcaacctgcagcgcctcgacggcccggtccgcggcaacgccaagatcatccaggagctggaaggcgtgttccgcggcgccgagtggaacgtcaacaaggtcatctggggtcgcttctgggacccgctgttcgccaaggacaccgccggcctgctgcagcagcgcatggacgaggtcatcgacggcgaataccagaactacaaggcgaaagacggcgcctacgtgcgcgagcacttcttcggcgcgcgtccggaactgctggaaatggtcaaggacctttccgacgaggaaatctggaagctcaaccgcggcggccacgacccctacaaggtctatgcggcctaccaccaggcggtcaaccacaagggccagccgaccgtcatcctggccaagaccatcaagggctacggcaccggcagcggcgaagcgaagaacatcgcgcacaacgtgaagaaggtcgacgtcgacagcctgcgcgcgttccgcgacaagttcgacatcccggtcaaggacgccgacctggagaagctgccgttctacaagcctgaagaaggcagcgccgaggccaagtacctggccgagcgccgcgccgcgctgggcggcttcatgccggtgcgccggcagaagagcatgagcgtgccggttccgccgctggaaaccctgaaggccatgctcgacggctccggcgatcgcgagatctccaccaccatggccttcgtgcggatcatctcgcagttggtcaaggacaaggaactcggcccgcgcatcgtcccgatcgtcccggacgaggcccgtaccttcggcatggaaggcatgttccgccagctcggcatctactcctcggtcggccagctctacgagccggtggacaaggaccaggtgatgttctaccgcgaggacaagaagggccagatcctcgaggaaggcatcaacgaggccggcgccatgtccagctggattgccgccggtacctcctacagcacccacaaccagccgatgctgccgttctacatcttctattcgatgttcggcttccagcgcatcggcgacctggcctgggccgccggcgacagccgcgcgcacggcttcctgatcggcggcaccgccggtcgcaccacgctgaacggcgaaggcctgcagcacgaggacggccacagccacctgctggcctcgaccatcccgaactgccgcacctacgatccgacctacgcctacgaactggcggtgatcatccgcgaaggctcgcggcagatgatcgaagagcagcaggacatcttctactacatcaccgtgatgaacgagaactacgtccagccggccatgccgaagggcgcagaggaaggcatcatcaagggcatgtacctcctcgaggaggacaagaaggaagccgctcaccacgtgcaactgctgggctccggcaccatcctgcgcgaagtcgaggaagcggccaagctgctgcgcaacgacttcggcatcggcgccgacgtctggagcgtgccgagcttcaacgagctgcgtcgcgacggccttgccgtcgagcgctggaaccgcctgcatccgggccagaagccgaagcagagctacgtcgaggagtgcctgggcggccgtcgcggcccggtgatcgcctccaccgactacatgaagctctacgccgagcagatccgccagtgggttccctccaaggagtacaaggtgctcggcaccgacggcttcggccgtagcgacagccgcaagaagctgcgcaacttcttcgaagtggatcgtcactgggtggtgctggccgcgctcgaagcgctggccgatcgcggcgatatcgagccgaaagtggtggccgaggccatcgccaagtacggtatcgatccggagaagcgcaacccgctggattgctaa

SEQ ID NO: 363761 - DNA, 2949 bp, Pseudomonas aeruginosa
atgagcctgccttcgctggcgaatctgccggccaccctgctgcccgccgccgaacgcgccgggactgccctccgctccgctgtcgccgccctcgatgccgccgccctggcccgcctggaggcctggcccgaggagcgcctggaggatttccgacgggtcgctgcggccagcgatttcgtcgccgagcaggcagtgcgcgacccggcgatgctgctggatctggccgaacgcggcgagctggagaacccccacgcgcccggcgaattgcgcagccagttgcaggcgcggctggaggattgcgccgacgaggacgaactcggtcggcgcctgcgacgtttccgcacacgccagcaactgcgcatcatctggcgcgacctgacccgccgcgccgcgctggcggaaacctgtcgcgacctgtcggccctggccgacgcctgcatcgacctggcttgcgagtggctccatcggcgccagtgcgagcagttcggcacgccgatcggccggcgctccggcgaaccgcagcggatggtggtcctcggcatgggcaagctgggcgcggtggagctcaacctgtcgtcggacatcgacctgatcttcggttacccggagggcggcgagaccgagggggcgaagcgttcgctggacaaccaggagttcttcacccgcctggggcagaagctgatcaaggcgctggatgcgatcaccgtcgacggcttcgtcttccgcgtcgacatgcgcctgcgtccctacggctccagcggaccgctggtctacagcttcgccgcgctggagcagtactaccaggaccaggggcgcgactgggagcgctacgcgatgatcaaggcgcgggtggtcggcggcgaccagcaggcaggcgagcaactgctcggcatgctgcggccgttcgtctatcggcgctacctggacttctccgccatcgaggcgctgcgcaccatgaagcagctgatccagcaggaggtccggcgcaaggggatgtcggaaaacatcaagctgggcgaaggcggtatccgcgaggtggagttcatcgcccaggccttccagttgatccatggcgggcgcgacctgagcttgcagcaacggccgctgctgaaggtgctggcgaccctggaggggcagggctacctgccgccggcggtggtcgaggagctgcgcggcggctacgagttcctgcgctacgccgagcatgccatccaggcgctggccgaccggcagacgcaaatgctgcccagcgacgaatacgaccgcatccgcgtggccttcatcatgggcttcgccagttgggccgcattccacgagcgcctgagccactggcgggcgcgcatcgactggcacttccgccaggtgatcgccgacccggacgaggacgaaagcggcgaggcggcctgcggcagcgtcggcgccgagtggatcccgctgtgggaggaggcgctggacgaggagtcggccagccggcaactggccgacgccggcttcgtcgatgccgaggcggcctggaagcgtctcagcgatctgcgccacggcccccaggtacgagcgatgcagcgtctcggccgggagcgcctggatgccttcgttccgcgcctgctggcgatgaccgtggaaaacccccagccggacctggtgctggagcgggtcctgccgctggtggaagcggtggcgcggcgttccgcctacctggtgttgctgaccgagaaccccggcgcgctggagcgcctgctgaccctctgcgcggccagcccgatggttgccgagcagatcgcgcggttcccgatcctgctcgacgagctgctcaacgaggggcgcctgttccgtcctccacaggccgccgagctggccgccgagctgcgcgaacggctgatgcggattcccgaggacgacctcgagcagcagatggagacccttcgtcacttcaagctggcccacgggctgcgggtggcggcctcggagatcgccggcacgctgccgttgatgaaggtcagcgactacctgacctggctggccgaggcgatcctcgtcgaggtcctcgaactggcctggcggcagttggtgcagcgtcacggccggccgttgcgcgccgacggcacgccgtgcgatccggacttcgtcatcgtcggctacggcaaggtcggcgggctggagttcggccatggctcggacctcgacctggtgttcatccatgacggcgacccccagtgcgagaccgatggcggcaaatccatcgatggcgcgcagttctttacccgcctggggcagaagatcatccatttcctcaccgcgcagacgccatccggcaccctctacgaggtcgacatgcgcctgcgtccgagcggcgcggccggcctgctggtgagttcgctgggcgccttccagcgctaccaggagcaggaggcctggacctgggagcaccaggcgttggtccgcgcccgggtgctggccggttgccggcgggtgcaggcgagcttcgaggcggtacgtgccgaggtgctggcgaggccgcgcgatctcgacgcgttgcgcaccgaagtcagcgaaatgcgcgccaagatgcgcgacaacctgggaacccgcgcgaccgccgccggtaccgcctcgaatgccttcgaggccacggcagccttcgatctcaagcacgatgccggtggtatcgtcgatatcgaatttatggtgcaatatgcggttctagcttggtccggagaacacccggcgctgctcgaattcaccgataacatccgcattctggaaggactggaacgggctggcctgatcgccagcgaggacgtccgtctcctgcaggaggcctacaaggcctatcgcgcagccgcacaccgcctggcactacagaaggaggccggggtcgtgagcggcgagcacttccagacggagcggcgagaagtgatcaggatctggcgcgagctgcggctcggctga

SEQ ID NO: 363762 - DNA, 924 bp, Pseudomonas aeruginosa
atgtcgatggccgatcgtgatggcgtgatctggtatgacggtgaactggtgcagtggcgcgacgcgaccacgcacgtgctgacccataccctgcactatggaatgggcgtgttcgagggcgtgcgcgcctacgacaccccgcagggcacggcgatcttccgcctgcaggcgcataccgaccggctgttcgactccgcgcacatcatgaacatgcagatcccgtacagccgcgacgagatcaacgaggcgacccgcgccgccgtgcgcgagaacaacctggaaagcgcctatatccgcccgatggtgttctacggaagcgaaggcatgggcctgcgcgccagcggcctgaaggtccatgtgatcatcgccgcctggagctggggcgcctacatgggcgaggaagccctgcagcaaggcatcaaggtgcgcaccagttccttcacccgccaccacgtcaacatctcgatgacccgcgccaagtccaacggcgcctacatcaactcgatgctggccctccaggaagcgatctccggcggcgccgacgaggccatgatgctcgatccggaaggctacgtggccgaaggctccggcgagaacatcttcatcatcaaggatggcgtgatctacaccccggaagtcaccgcctgcctgaacggcatcactcgtaacactatcctgaccctggccgccgaacacggttttaaactggtcgagaagcgcatcacccgcgacgaggtgtacatcgccgacgaggccttcttcaccggcactgccgcggaagtcacgccgatccgcgaagtggacggtcgcaagatcggcgccggccgccgtggcccggtcaccgaaaagctgcagaaagcctatttcgacctggtcagcggcaagaccgaggcccacgccgagtggcgtaccctggtcaagtaa

SEQ ID NO: 363763 - DNA, 1038 bp, Pseudomonas aeruginosa
atgagaattctgatcgtaggtccctcctgggtgggggacatggtgatggcgcagaccctgttccagtgtctgcgccagcggcatcccgagtgcgtgatcgacgtgctggcgcccgagtggagccgaccgatcctcgagcgcatgcccgaggtgcgccaggccctgagcttcccgctcggccacggggtgatggacgtcgccacacggcgccggatcggacgcggcctgcgcggtcagtacgagcaggcgatcctgctgcccaactcgctgaagtcggcgctggtgccctggttcgccggaataccgaagcgcaccggctggcgcggcgagatgcgctacgggctgctcaatgacatccgcaagctcgacaagcagcgctatccgctgatgatcgaacgcttcatggccctggccttcgagccgggcgtggagttgccgaagccctatccgcagccgcgcctgcggatcgacgacggcagccgccaggcggcgctcgacaagttcgccctgagcctggaccgcccggtgctggcgctctgtcccggcgccgagttcggcgaggccaagcgctggccggcggaacactacgccgcggtcgccgaggcgaagatccgtgccggctggcaggtctggctgttcggctcgaagaacgaccatcccggtggagaggagattcgccagcgcctgattccggggttgcgcgaggagtccttcaatcttgccggggagacttcgctggccgaggccatcgacctgatgtcctgcgctggcgcggtggtgtccaacgattccggcctgatgcacgtggcggccgcgctggatcgcccgctggtgggcgtctatggctccacctcgccgcagttcaccccgccgctggcggaccgggtggagatcgtccgcctcggtctcgagtgcagcccgtgcttcgagcgcacctgtcgcttcggccactacaattgcctccgcgagctgccgcctggcctggtattgcaagccctggagcggctggtcggcgaccctgccgaggtcgccggatga

SEQ ID NO: 363764 - DNA, 1068 bp, Pseudomonas aeruginosa
atgagggtactgctggtcaagacctcgtccctcggcgacgtgatccacaccctgccggcgcttaccgacgccgcccgggcgattcccggcatccagttcgactgggtggtggaggaaggtttcgccgagattcccgcctggcatccggcggtggcgcgggtgatcccggtggcgatccggcgctggcgcaagaacctctggcagaccctgcgcaacggcgaatggcggcgcttcaagcagcgcctgaaggaagtcgactatgacctggtgatcgacgcccaggggctgctgaagagtgcctggctgacccgctacgtgggcaagacgccggtcgccggtctcgatcgcgactcggcgcgcgagccgctcgccagccgcttctatcgccgtgcctatccggtcgcctggggacagcatgcggtggagcgcacgcgccagttgttcgcccaggcgctggactacccgttgcccgagtcggtcggtgactatggcctggaccgcgagcagttggccgacgccgaccctggcgcgccgtacctggtgttcctgcacggtactacctgggtcaccaagcattggccggaagcctactggcgcgaactggccgagcgcatgtgcgagcgcggctggtcggtgcgcctgccctggggcagcgccgccgagcgggagcgggccgggcgcctggcggcggggttggaaaatgccgcggtactccccagattatccctggccggcatggccaaggtgcttgccggcgcgcgcgcctgcgtggcggtggataccggcctcggtcacctggcggcggcgctggacgtgccgacgctgtcgctgttcggcccgaccaatcctggcttcaccggcgcctacgggcgttcccaggtccacctgggcagcgacttcccctgtgcgccgtgcctgaagaagacctgtacctaccagccgaccgaagaggatcgcaaactgttcgatctcaagcgtgagcagccgctgtgcttcacccggctgaatccccagcgcgtggccacccagctggaggccatgctgctggccccggagaccctccgatga

SEQ ID NO: 363765 - DNA, 1122 bp, Pseudomonas aeruginosa
atgaccctggcgttcatcctctacaaatacttccccttcggcggcctgcagcgtgacttcatgcgcatcgccctggaatgccagcggcgcgggcacgacatccgcgtctataccctgatctgggagggcgacgtgccggacggcttcgaagtgctggtggccccggtgtgctcgatcttcaaccaccggcgcaacgagaagttcaccgcgtgggtccgcgccgacctggccaggcgcccggtgcagcgggtgatcggcttcaacaagatgcccggactggatgtctactacgccgccgacgcctgtttcgaggaaaaggcccagaccttgcgcaacccgctgtaccgccagtggggccgctaccgccacttcgccggctacgaacgggcagtgttcgacccggcctcgaagaccgagatcctgatgatctccgaggtgcagcagccgctcttcgtcaagcactacggcacccaggccgagcgtttccatctgctgccgccggggatcagccaggatcgccgggcgccggccaacgccgcggacgtgcgtgcggaattccgccgcgagttcggcctggaggaagacgacctgctgctggtgcagatcggttccggcttcaagaccaagggcctggatcgcagcctgaaggcgctggccgcgctgcccaaggcgttgcgcaggcgtacccggctgatcgccatcggccaggacgatcccaagccgttcctgctacagatcgccgccctcggtctcaacgaccaggtacagatcctcaagggtcgcagcgatatcccgcgcttcctgctcggcgccgacctgctgatccacccggcctacaacgagaacaccggtacggtgctgctggaggcgctggtctccggcctgccggtgttggtgaccgatgtctgcggctacgcccactacatcgccgaggccgacgccgggcgggtgctgccgagtcccttcgagcaggacagtctcaaccgcctgctcgcggaaatgctggaggacgctccggcgcgcgccgcctggtcgcgcaatggcctggcctacgccgatcacgccgacctctacagcatgccgcagcgcgccgccgacctgatcctcgaggaggcctcatga

SEQ ID NO: 363766 - DNA, 807 bp, Pseudomonas aeruginosa
atgaggctggtgctggaagagccgttcaagcgcctgtggagcgggcgcgacccgttcgaggcggtggaggcgctgcaaggcaaggtctaccgcgaactggaggggcgccgcaccctgcgcaccgaggtcgacgggcgcggctacttcgtcaagatccaccgtggcatcggctggggcgagatcgccaagaacctgctcaccgccaagctcccggtgctcggcgcgcgccaggagtggcaggccatccggcgcctgcacgaggccggcgtagcgaccatgaccgcggtcgcctacggcgagcgcggcagcgatccggcgcggcagcattccttcatcgtcaccgaggaactggcgccgaccgtggacctcgaggtgttctcccaggactggcgcgaacgtcctccaccgccgcggctcaagcgcgcgctggtcgaggcggtggcgcggatggtcggcgacatgcaccgtgccggagtcaaccatcgcgactgctacatctgtcatttcctgttgcacaccgacaagccggtgagcgcggacggtttccgcctctcggtgatcgacctgcaccgtgcccagacccgcgacgccacgccgaaacgctggcgtaacaaggatctggcggcattgtatttctctgcgctggacatcggactgacgcgtcgcgacaagctacgcttcctgcgcacctatttccgccggccgttgcgcgagatactgcgcgacgaggccggcctgctggcctggatggaacgcaaggcggaaaaactctacgaacgcaagcagcgttacggagacctgctctga

SEQ ID NO: 363767 - DNA, 735 bp, Pseudomonas aeruginosa
atggcggggtggaccctcgaacccgattaccgtcacctggccgccgacttcggtagcctcgatagcgtgttcgccctggagggcgagcgcctgacccgcgacccgttgtccgaagtcatccgcatcgagcgcgacggcgtgcgttactacgtcaagcgctaccgcagcgccggcaagggcctgcgccgctacctggcgcgaccgcggatcaaggccgagtggcagaacctcaagcgcttcgagaagtggggcattcccaccgccgaagtggtcgcctgggggctggagcgcaaggccggcgccttccagcgcggcgccatgatcacccgcgagctgccgggcaccgaggacttgtcggtgctcgcctgcaaccgggatccgcgcctgaaggacccgcgctgggtggacggcgtcagccggcagatcgccaaggctacgcgcctgatgcacgaccagcatttcacccataacgacctgaagtggcgcaacctgctggtggacgaccagccgctggtgtatttcatcgactgcccgaacggcgcgttctggtggagcttcatgctgcgctaccggatcaccaaggacctggcctgcctggacaaggtggccaagtaccacctgtcgcgcacccagcgcctgcgcttctacctgcaatatcgccgtcgccggcacctgaacgaatccgacaagaagcgtattcgccaggtggtggctttcttcgaggggcgcgaatga

SEQ ID NO: 363768 - DNA, 759 bp, Pseudomonas aeruginosa
atgagcgttttcatcgccgcgcaggaccacgacctgctccagcgcaaccgtctggacagcttcgacgccctgtgggccttgcagctggatgccgtggacgaaccgaataccgaacggggtggctggagcagcgtctaccgtctcgacctgggcgactccgcctactacctgaagcgccagagcaaccacctgacccgcagcctgcgccatccgctgggcgagccgaccttcgcccgcgagttccgcaacatcgagcgctaccgggcgctgggcattcccgccctgcaggcggcgttcttcgcccagcaggcggtcggcggagagcgccaggcgatcctcctgacccgtgccctggacggttggcaggacctggacacctggctggcgtcctggcacgacctggccgaagagcggcgccgggcgattctccgggcggttggcaggctggcgcgccagctgcacgccgccggacagatgcatggttgcttctatcccaagcatgtattcctccgcgagggggccgatggtgtcttcgaggcctgcctgatcgacctggagaagacccgcccgatctggttcggccgccgcgaccaggtcaaggacctggagccgatgctgcgccgtgccccggactggagcgaagcggacgtgcacgaattcatctccgcctatgtcgacgaacccctcgactcggccgaggtcgagcagtggtatcgccttctcgaccagcgccgccggcgcaaggagtcgcgccgatga

SEQ ID NO: 363769 - DNA, 1479 bp, Pseudomonas aeruginosa
atgagactggccgaactgcaagccgccgggcgccacccgcaactgccattgcgggtgaccctggcggatggcgctggcgctgccgaactgcgcctggacagtctgctgcgggtgctgcccgggcagcgctacgtcggtgccggcgaatggcgtgggcgcaaggtgctggccaagctgctggtgggcggcaaggccgcacggcatttccagcgcgaactggaaggggcgcgtctgctcgcggcccaggggctgaccaccccggcgctgctggccgacgggctgcaggagggcgagggcggctggttgctgttcgactacctcgacgcggcgcagagcctcggtgacgcctggcgtgcggtggaggcccaggcgccgctgggcgatgcccagcaagcggtgctcggcgaagccctggcagccattggcgagctgcatgcaaagggcctctggcaggacgacctgcacctggacaacctgttgcgccacgccggccacctgtatctcatcgacggtggcggcgtgcgtgcggaaactcccggccagccgctgtcgcgacagaaagtgctggaaaacctcggggtgttcttcgcccagttgccggcgctcctcgatcctttcctggaggagttgctggtgcattacctgctggccaacggcgagcatgcgctgccgctggaagccttgcagaaggaaatcgccaaggttcgccgctggcgggtgcgcgacctgctgagaaaggtcggtcgcgactgtagcctgttcagcgtcgtgcgcggtccgttccgcctgttcgccgcccgccgcagcgaggccgagacgatggcgcccctgctggcggacgcggaccgcctgatcgccgccggccacgtctacaaggacggcggcgcggccaccgtcgcccgggtcgaagcgaacggccgcacgctgatcatcaagcgctacaacatcaagggctgggtccattggctgaagcgcttctggcggccgagccgggcctgggcctcctggcgcgaaggcaaccgcctggaattcctcggcatcgccaccgcccgtccgctggcgatgctggagcggcgctggtgctggctgcgcgggcgcgcctacctgattaccgattatctcggcggtcaggatataatcactcgttttaagccttgcctggacatgcccgatggcgccgtttcgccaccggaagccgagttggcggcactggatcggctgttttcgacgttgatccgcgaacgcatcagccacggcgacctgaagggacacaacctgttctggcaggcccatgaacaaggcggcgaatgggcgctgatcgacctggacgcgatgcgcaagcatcacagccaggcgtcctttgcccgcgcctacgcccgcgaccgcgcgcgcttcctgcgcaactggccgcaggacagcggcctctaccggctgctggagcaacggattccccgcctcggcgacgccgccggggcttga

SEQ ID NO: 363770 - DNA, 1758 bp, Pseudomonas aeruginosa
gtggcattgaccgtcctaggcctgtctggcgccgtaagccatgacccgtccgccgccctgtacatcgacggcaagctggtcgcggccgtcgaggaagagcgcttcgtgcgcgacaagcacgcgaagaaccgcatgccctacgaatcggcgaagttctgcctggagcaggcagggatcgagccggccgatgtcgacgtggtggcgattcccttcgctcccatcagcatcatggaaaaggcccgctggcactacgccaagcgctacgcctacgcgccggatcgcgcgctggatgcgatcctgctcggcaaccgccgctacaagcgttactacaagcgcatcgagtggtgcctgcagcaactcggcttcgacctgaagaaaatcaagatccagccggtcgagcaccaccttgcccacgcctccagtgcctaccattgctcggggttcaaggaaaagaccgcgatcctcggcatcgacggcaagggcgaatacgccaccactttcttcggctggggcgagaacggtcggatccacaagatcaaggagttctacgatccggattcgctgggcggcctgtacggcgcgatcaccgagtacctcggcttcgacatgctcgacggcgagttcaaggtcatgggcatggcgccctacggtgacgccagcaagtacgatttctcccgtctcgccaagttcgagaacggcgaactggtgatcaacaccgattatgccaacgtcatcggcttccgccgctacaaggagaaaggcaagggctactacttctcgcccaagctgatcgagtggctggggcccaagcgcgaaggcgacatcgccgacgatccctacatccattacgccgcgagcatccaggcgctgttcgagaagctcgcgctggagatgatggactactacctcggcgatatcatccgcgagaccggcaaggtcgctttcgccggcggctgcgcgctgaacgtcaagctcaaccagaagatcatctcgcgccccgaagtgaaggagctgttcgtccagccggcggccagcgacgccggcaccgcggtcggcgcggcggcctacgtgtcgcaccagcgcggcgtgccggtggagaagatggagcacgtctacctcggcccggagtattccaacgaggacgtcatcgccgcctgcgcccgtcacgaggccaggccgcagtggcagaagatcgacaaccgcagccggcgtatcggcaggatccttgccgacggcaacccggtggcttggttccagggacgcatggagttcggtccgcgtgccctcggtggccgctccattctcggctgcccgagcgtgccgggcgtggccgaccggatcaatgcgcagatcaagttccgcgagcgctggcggcccttctgcccgtcgatgctggataccgtcggcccgcagatgttcaagatcgaccacccggccccgttcatgaccttcaccttcgaagtcaacgaagagtggaaggagcgagtgccggaagtggtgcacgaagacggcacctcccgcgcccaggtgctgaagcgcgagtacaacccgcgctactacgacctgatgaaggaactggagaacctcaccggcaacggcgtggccctgaacacttcgctcaatcgccgtggcgaaccgatgatctgctcgccgaccgacgccctgaacatgttcttcggctccgatctgcagtacctgatcatggaggacatcctggtcgtgaaggagggcgtggactggtatgactcggtcggctga

SEQ ID NO: 363771 - DNA, 1137 bp, Pseudomonas aeruginosa
atgactcggtcggctgaacctcgcgtcctgcagttctgtcacggctacgacgggcctttcctcgactgtgcccgtcagtacgccagcctgttcgccggaaccccgtacaaggtcaccacggtgttcctcaccgggcgttccgatcctgaggtggcggcgcgttgcgcctccgacgaggtactgttcctcgagtacggctccagggacatccgtggcctcaagctgaaggcgatccgcgacttgcgcgagatcgcccgttcgcgcgacttccgcttctgcatcgcgcaccgcttcaagccgatctggatcgccagcctggccactcgtctgccgatcgttggcgtgcaccacgccttcggcgattaccagcggttgtcgcgcaaggtcttcgccggcctgatgagcaagcgcctgagcctgctggcggtgtccgacgcggtgcgcgacgatatccgccgttgcctgccgaagtggccggcggagcggatcgagacgctctacaaccgcatcgacgtcgctgcgctgcaggccgagcaggtcgagcgcctgagtgcgcgccggcaactgcgcctgcccgacgaggcctgggtggtcggcaacgtcggccgcctgcatccggacaaggaccaggctaccctgctgcgcggctttgccgccgcgctgccgcgcctgccgcagaacagcctgctggcgatcctcggcagcggccgcctggaagagcagctcaaggacctggcctgcgaactgggtatcggcgagcgcgtgctgttcctcggccaggtcgaagaggcacggcgctacttcaaggcgttcgacgccttcgccctgagttccgaccacgagccgttcggcatggtcctgctggaggccatggtcgccggtgtaccgctgatcgccaccgcctgtggcggcgcccgcgaagtggtggaaggggtcggcatcctcttcccgctgggcgacgagacggccctggccgagggcctgacccacctggcggcgcttgaccgccgccagcgcgaggcctgtgcgcggctcatgctcgagcgcctggagacacgcttctccgacgctgcggtgcgccgcgaattctggcgcctgccgacgattgccggcttcgcttcggagtctgcatgctga

SEQ ID NO: 363772 - DNA, 897 bp, Pseudomonas aeruginosa
atgctgaacaggttgcgcgccttccgcgaacgcggttggcgcgaagtggacgcgccgacctacgcccaggcctggcagcgtttcggcggcagcgtcgcgacccacccgctggtggtcgagcagctcgccgaaatggctggaatcccggtgcgttacctgggttgggagagcgctggcgaactggttgcggcgatcccgacctggggccgccacctggcgttgtccaaggacgtgctcaagcggcgcggcaagaagggcctgtacgacctgggcaacgccgaactgatcctgccggtggccgacgatgcccgcatcgccctccgccatgcgggacgctacctgtcggcgctgcatgagcggaacatcgtcacgctgcgccctcagaccgagcaactggctttcgctcgcgcccccgaggatttctccaagaagttccgctataaccagcggcgcgaagtgcgcctggtggaggaggctggtggccaggtgcgccaggcagacagcttcgccccggccgagttcgccgccatctatcttgaactgttccagcgtcgctggggtttcccggccaccggcgcggagcgcatggccgaggtcttcgagcggctgcgcgaattgctgcgcggctcggtcctgctgctcaacgaccagcccatcgcggtccaggtactgtatcgcgccgaagcgccgggctggctcagcgtcgagtacatcaacggcggcgtcgatccgcagacccgcgagttcagccctggcagcgtgctcagttacctgaacacccaggccgcctgggaggatgcgcgagcgctgggcaaacccctgcgctattcgttcggtcgcgccgaccgcgaatacaaggatcgctggtgccatccttctccggtcttccaggtctga

SEQ ID NO: 363773 - DNA, 1419 bp, Pseudomonas aeruginosa
atgagcgcacgcaagcagcagttgctcaagcgtcatcgacgcaacaagcggatcggcctactggttgcgctgctggcattgctggccgtcggtctgctggtcagcccctggttgttgccgatcctcctcgtggccctgtgggtcgcccacgaagcctggttcgccgatcacctgttctattcgccgggcgaggactaccgctaccgtttcgcggaaggggtcgagtcgctgccggtacgcctggcggatggccgtctgcgagtcgacggcgagttgcgcgaaggcgatacgctggtgcttggcatctgcgtgcgcgctggctggctggggcgtttcctcgaaccctcggtgctgctggaaggtggcgcagaggccgatgcccaggctttcgaacgtggggtgaacggcttgcgctacctgaacctgacgggactggccgggccgctgggcgagggccggattcgcctgcgcggccggcattgccggctggtcggcgaaccgaccctgtggcgtgcgcgccatcccgactaccgtgagcggcgggtgatggtcatcgctccgcatgccgacgacgccgagctggccgccttcggcctctacagccaggctcgcgaggcctggatcgtgaccctgaccgccggcgagatcgaaaccgagcattaccgccgcatgggcctcgacggaatagctgcggcgcgcctgaagggtcgcctgcgcgcctgggatagccaggccgtgccgacgtggggtggggtgccggccgagcgctgcgtgcaactgggttatttctgcctgcaattgcctgccatgcaggcgaacccgggcgaggtggtgccgtcccgtgaggccgatctcgccgatatccgtccgttccgccagttcaaccgcctgcgcctggccagcgatgccgacggcctgtcgacctggaacaatctgctgtccgatctccgcgagctgatcctgctggcacgtcccgaggtcatcgtcctgcctcatccgcatttcgatccgcacccggaccatgtccgcgcccaggaggccgtgcgcgaggcgctccagggcctggactggcagccgcaggcattgttgcactatgccaatcacctgcacgacaacgatcgctggccgatgggcgatgcgcacatgggggtcagcctgccaccgctgaccgaagaatgctcgccgttgctgccatggacgctggcgctggagcgcacgcgccaggtggacaaggccatggccttgggcatgatgcacgacctgcaacccaggctgccgttcaagcgccgtctgcgccgccgtctgcagggctggctcgccgggcgtctctggccggcttacggcgaggacgagttcatgcgcaaggcggtgcgtcggcacgagttgttctgggtggagtcgctggacggggaggcatga

SEQ ID NO: 363774 - DNA, 957 bp, Pseudomonas aeruginosa
atgaaagttctgtttctggtccagaaagagcagcgcgcgatcctggatcgcctgtacgacggcatcgccgcccattgcgagtgcgatacccgctggctgagcagcgaggagcaggccgacctgcgcggctacttccgcaaccacgtggatgtctcgcgctacgaccgcatcctgttcttcctccgtttcaagaaggaaatgcgccaggtccgcttcatccgcagcgtacccaacctggtgatcctcgagcacgatgcctaccagaactacattccctgcaagtacaccggcaagttcagcgcccattaccggcgcctgccctgggcacgggtgatcagttcgggccatacggtcagcgaacgcctgcgccaggagggattcgacgcggtattcgtgcccaagggctacgaccagaccctgttgcatgacctgggcctggcgcgcgatatcgagctgggcttcgtcggcagtaccggcagcgtggcctacagtggacgcaaggcgctgctcgacgagttgggcggagtggagaacctgctggtgaccaagaccaagtccggcgaggagtacctgcgcacgctcaaccgcatccgtttcttcgtcagcgcggatgtcggcatgggcgaatacatgatcaagaatttcgaggcgatggcctgcggttgcgtactgctggcctacgaccagggcgagcgggaaaacgaggccttgggtttccgggacatggagaatatcgtgctgtatcgctcggtggcggacatccaggaaaagctcgcgatcctgcgcctcgatacggccctcgccgagcggatcgcgcggagcggccaggcgctggccatcgaacgattcagcttcgccgctgtcggtcagagtatcgtcgaggccatgcggcccgcgttgcgcgagccggagcgtcccggatggctggagaagacctggcgacgtatttttacctga

SEQ ID NO: 363775 - DNA, 885 bp, Pseudomonas aeruginosa
atggcgctcgtcgatgatggttcgcagccattggtttccgtgatcatcgcttcctataaccacgaaaagtacatagaagcgagcatcgccagcgtggctgcgcagacataccgcaacgtggaactgctggtggtggacgatggttccagcgatggcagcgtcgagcttttgcgcgggctccaggcgaagtacggcttcgacctcagggtccagcagaaccagggactgtcgagaacgctcaacgaggcgatcaccagggcccggggaaatctcatcgtgcctttcggttcggacgacatcatgttgccgcaacgcctggagaaacaggtggcacacatgtgggacaagcccgaggtaggtatctgcgcgggcaatatcgagatcatcgactccaatggccgggtcatgccgggaaaggagcagcgcaaacgcgacctgcctttccgccgtctcgacttcgatgacctgttcctggaccgcaagccgggcccgatggcgcccaccctgatgttccggcgggaagccctggagaaggtcggcggtttcgatccggacatacgcctggaagatgtctatatcgaactggcggtgaccaaggctggctacgtcatcgacattcttggcgaggtcctcgcccagtaccgcaagcatcccaccaatacgtacaagaacgcccgtttcatggtggacaacgtattcaagacgtacagccagttcagcgatcaccccgattacgagcaggtgatcatgcgcttccgcaattcgatgttcctcaagtgctcgaaccgggacaaggtactggcccgggagctgctctccggcttgccgctgaagtactggaacgagaagaccttccgcggcattgcgcggctgtttttctcctag

SEQ ID NO: 363776 - DNA, 1200 bp, Pseudomonas aeruginosa
atgttcgcagctacccgactgacccgtcttcgccacgataccagccgcatcctcagccactggatcctgccgctgggctggctggccctgctcaccggaatgttctgggtcggcgaccgctccgactatcaccggcttttctacatcctgcttgcagccccgacgctgcttttcgtgattatccagccgcaactgttacgtccactgacccgctcgccgctgctcatcgccattctggccttcagcgcttacatgatgctcagcctgctctggtcaacgccggaaaactcggcgggttcgctgttcaaacggccgctgtacatcgttctactgctcttctgtgtggggatattggcgctacaggcacccgaacgcctacgcaacattacttggctggcggcactgggagcagttttcgccgcagcggtcacggtggtccactaccatctccagacacatcctgcatggatgcgcttgtccggatacggggctctctacaacccactgctgagtgcccatgtatatggtgcattcactgtggtctggctggtttactggatgcaatcacgccatcttcttgcgccactgccgctgctgtccctggcgatactatgctgcctgttgctgtcgaccggctcacgcaccccattgatcgcactcaccgcctgcctgggctggctgctggtcgccggtaatcagaaaaagaccctgatcgtcatcgggttggcagcgctgggcatgatcgtggcttatatcttcaatccagagctggtcacccagcgcggcgtctccttccgcccggaaatctggagcgaatccctgcgccagatcggcgagcacccctggcttggccatggctacgatcacccgatgcggatcaagctggccaacggcatgctgctggccgatccgcacaacatcgagttgggcgtgctgttcgccggcgggatcgtcggcctgctgctatggtctgcgatctacgccctggccttcgtcttcgcctggaagaaccgtcgcgaccccatggtgctgctggcgtctacctggctggtcttcggactggcttccggcctcacggaaggcaacgcgttcatgtcccgccccaaggagcactggttcctgatctggattccattggccctgctgtacgccctgtgggtgcagaaaagcgcccgcgacaaaaacgaaaccgcctcctga

SEQ ID NO: 363777 - DNA, 651 bp, Pseudomonas aeruginosa
atgcgagtcatagactacccctcctacttgcagttgcgtgacaacgcagaagtgctggaagccgatggtcatggggacaaggtactgcgtctgcgcgacgggtccttcctcaagctgtttcgccgcaagcgcctgatttcctccgcagccctgttcccctatgcggagcgcttcgcccgcaatgccagcgaactggcgcggcgcggcatcgtctgcccgaaggtgctggacgtactgcggatcccacatatccagcgcgacgcggtgcactacgagccgctaccggggcagaccctccgccaactcgaccgcaacgacccggagtgcggcgatacagtccggacgcaactgggcgagctgatcgccgcgctgcacgccaagggggtgtacttccgctcgctgcacctgggcaacgtggtgcgcacgccggaaggccggatgggcctgatcgacatcgccgacctgcgggtccagcgctcggcgctcagcgccgcccagcgcattcgcaatttcaagcacctgctgcgctacgaacaggatcgaacctggttcctcgacgacagcgagcacctggtgctcaaggcctatctccgcagcagccaggtccactggacactcgagcagctcctcaagcaactgcaactggattga

SEQ ID NO: 363778 - DNA, 1812 bp, Pseudomonas aeruginosa
atgagcgatagtcctcagaatcccggaccttccagtctcaagatctatttccgcctgttgggctacgtgaagccctacatcggaatgttcctactcagcatcgtcggtttcctgatcttcgcctcgacccagccgatgctggcgggcatcctcaagtatttcgtcgacggcctctccaatcctgacgcggcattgtttccgaatgtgcagtggccctgtttgcgcgacttgcacctggtctacgcggtgccgttgctgatcatcctgatcgctgcctggcaggggctgggctcgttcctcggcaacttcttcctcgccaaggtttccctggggctggtgcatgacctgcgggtcgccctgttcaacaagctgctggtgctgccgaaccgctatttcgacacgcacagctccggccacctgatctcgcgcatcaccttcaacgtgaccatggtcaccggagcggccacggatgccatcaaggtggtgatccgtgagggcctgaccgtggtcttcctgttcctctacctgctgtggatgaactggaagctgaccctggtgatgctggcgatcctgccggtcatcgcggtgatggtgactaccgccagccgcaagttccgcaagcagagcaagaagatccaggtggccatgggcgacgtcacccacgtcgcctcggaaaccatccagggctaccgggtagtgcgcagcttcggcggcgaagcctatgaagagaagcgcttcctcgacgccagccagagcaataccgacaagcagttgcggatgaccaagaccggcgcggtctacacgccgatgctgcaattggtgatctacgtcgccatggcgatactgatgttcctcgtgctgtggctgcgcggggacgcctcggccggcgacctggtggcctatatcaccgcggcgggcctgttgcccaagccgatccgccagctttccgaggtcagttccacggtccagcgcggcgtcgccggcgccgagagcatcttcgagcagctcgacgaagcggcggaggaagaccagggtaccgtcgagaaggagcgggtcagcgggcgcctggaagtgcgcaacctgagcttccgttatcccggaaccgacaagcaggtgctggatgacatcagtttcatcgccgagcccgggcagatgatcgccctggtcggccgttccggtagcggcaagtcgaccctggccaacctggttccgcgcttttaccagcacaatgacggcaagatcctccttgatggcgttgaagtcgaggattatcgcctgcgcaacctgcgccgccacatcgccctggtgacccagcaggtcacgctgttcaacgacagcgtggccaacaacatcgcctacggcgacctggctggcgcgccgcgcgaggaaatcgagcgggcggcgaaggctgccaacgccaaggagttcatcgacaacctgccgcaaggcttcgacaccgaggtcggcgagaatggcgtgctgctttccggcggccagcgccagcgtctggcgatcgcccgggcgctgctcaaggacgcgcccctgctgatcctcgacgaggcgacctcggcgctggacaccgagtcggagcggcatatccaggcggcgctggacgaagtgatgaaggggcgcaccaccctggtgatcgcccaccgcctgtcgaccatcgagaaggccgacctgatcctggtgatggaccaggggcagatcgtcgagcgcggcagccacgccgagctgctggcgcagaacggccattatgcgcggctgcacgcgatgggactggatgagcaggcgccggcgcctgtcggctga

SEQ ID NO: 363779 - DNA, 1425 bp, Pseudomonas aeruginosa
atgaagttgtccatgccccgtttcgaccaggccccggtgttggtggtcggtgatgtgatgctcgaccgctactggcatggcgcgacttcgcgcatttcgccggaggccccggtgccggtggtccgcgtcgaacagcacgaggaccgccccggcggcgccgccaacgtcgcgctgaacatcgccgcgctgggcgcgcaggccttgctggtcggcgtcaccggccgcgacgaggccgccgacagcctggccaacagcctcaaggccgctggagtggacgcgcgcttccagcgcatcgatagccagccgaccatcgtcaagctgcgggtcatgagtcgccaccagcaactgctgcgggtcgacttcgaggaaccgttccgcaccgacgcggcggccctggccgtggacgtcgagtcgctgctggccaaggtcaaggtgctggtgctgtccgactacggcaagggcgcgctacagaaccaccaggtgctgatccaggcggcgcgggcgcgcaacattccggtactggccgatcccaagggcaaggacttcgccatctatcgcggcgccagcctgatcaccccgaacctgtccgaattcgagaccatcgtcggccgttgcgccgacgaagccgaactggtcgccaagggccaggcgctgatgagcgaactcgacctcggtgccttgctggtgacccgcggcgagcatggcatgaccctgctccgccatggccagccggccctgcacctgccggcgcgggcgcgggaagtgttcgacgtcaccggtgccggcgatacggtcatctccaccctggccgcggcgcttgccgccggcgaggagctgccgtccgcggtgggcctggccaacctggccgccggcatcgtggtcggcaagctgggtaccgcggcgatcagcgcgcccgaactgcgtcgcgcggtgcagcgcgagcagggttccgagcgtggcgtgctgggcctggagcaattgctgctggcaatcgaagacgcccgcgcccacggcgagaagatcgtcttcaccaatggctgcttcgacatccttcacgccggccacgtgacctacctcgaacaggcgcgcgcccagggcgaccgcctgatcgtcggggtcaacgacgacgcctcggtcactcgcctgaagggcgttggccggccgatcaactcggtggaccggcgcatggcggtactcgccgggctcggcgcggtggactgggtggtgagcttcgccgaagacactcccgagcgcctgctcgagcaggtgcgtccggacgtgctggtcaagggcggcgattacggcgtcgagcaggtggtcggcgcgcagatcgtcaaggcctacggcggcgaggtacgggtgctcggcctggtggagaacagctccaccaccgccatcgtcgagaagatccgccagaaaggctga

SEQ ID NO: 363780 - DNA, 1284 bp, Pseudomonas aeruginosa
atgagcaccgatgtacagggccgtgccctggctgtactgaaccgtgtcgcccaggccgactggccggatcgcttcaatcttcgcaaacccttcgaaaaactgctctacagcggcagccgtaccggcttccgcctggccagcgagcgttcggcgaagcaggcgaagggaccgcgcaaggccgatccggacgggttgttcgacctgtcgttctccgacgaccagcagatgctggtggacatgctcgaaggcttcgccctggaggtgttgcgtccgctggctcatgacgcggatgccgaggccagcctgccggcggaactgctcaaccaggcgctggagctgggcctgacccactatggggtcggcgaggtgcacggcggcatggccggtgagcgcaccacggtgaccactgcccttatcgccgaggccctggccaagggcgacctgacgctggcggcggccctgctggtgccgttgtcggcggccaactgcatccgccgctggggcagcccctcgcagcaggcgcagtggctgccggcgttcgtcagcgaagagggggcgccgctcaccgccatcgcggtcaacgagccgagtctgctgttcgacccgcagaaactggcgacccgcgcccggcgcaagggcagtcactacctgctttccggagagaaatgcctggtcctgcgcggcctggaggccagccgcctgatcgtcgcggcgaagaccgacgaggggcctgcgctgttcctggtggaagcctccgccaagggcgtcgagcgacgtgccgagccggcgatgggactgaaggccggcggcaccgcccggttgcgcctgaagagcgtcaaggtgccggcggacaaccgcctggccgccaagcatttcgactaccgggccttcctcgatcacgcgtccctggcctggtgtgccctggcgctgggcaccggacaggcggcgctggactacgtgatcgcctactgcaacgagcgcgaggccttcggcgagccgatcagccatcgccagggggtcgccttcatggtcgccgacatcgccatcgaactggacgccatgcgcctgatggtctggcgcgcctgcgccctggccgagcgcggccagccgttccagcgcgaggcttacctggcgcggctgctgtgcgccgagaaggcgatgaagatcggcaccgacgcggtgcagctgctcggtggccacggcttcaccaaggagcatccagccgagcgctggtaccgcgacctgcgcgcggtagcgctgatggccggcggcctgcacctgtga

SEQ ID NO: 363781 - DNA, 1209 bp, Pseudomonas aeruginosa
atgtacctggaaaccccgaagaaattccgcagcctggccaaccaggcgcatcaggtcgcggaaaactatttccggccgatctcgcgcaagtacgacaaggccgaacacgcctatccgaaggagctggacctgctcgcggccttgctggacggcatgaacagcggctcgcccgaggctgtcggtgcgacctcggcgagcaagcgcgccggcaagcaggtagaggagggcatcaagaacggcggcaacctgtcggcgttgctcggcgtgatggaactgtgctggggcgacgtcggcctgctcctggccatgccgcgccaggggctgggcaacgcggcgatcgccgcggtggccaacgaggagcagttgcagcgcttcggcggcacctgggcggcaatggcgatcaccgagccgggctgcggctcggactcggcggcgatccgcaccaccgcgacccaggatggcgaccactatgtactgaacggcgagaagattttcgtcacttccggcgagcgggccgatgccgtggtggtctgggccaccctgaaccgcaacctggggcgggcggcgatcaagtccttcgtggtcgagaagggcacgccggggatgaccgtgacgcgcctggagaagaagctcgggatcaaggcttcggataccgcttcgatcagtttcaatgattgccgggtgccggccgcgaacctgctgggcaacgccgaggtcgacgtgcagaagggtttcgccggggtcatggagaccttcgacaatacccgcccgctggtggccggcatggctgtcggggtggccaaggcggcgctggaccggacccgcgaattgctgaagaaggctggctgcaagttcgactacaggaagccgctgctcaccgtcagccacgccgaggccactctctatcgcctggaggcggagtgggaggcagcgcgcctgttgaccctgaaggcggcatggatggccgacaacaagctgcccaactcgaaggaagcgtccatcgccaaggccaaggctggacgggtggccaacgagatcaccctgaagtgcgtggagctggccggcgccctcggctacgccgaggatgagctgttggagaagtgggcgcgggactcgaagatcctcgacatcttcgaaggcacccagcagatccaactgctcatcgtcgcccgccgcctgctcggcaagtcttccagccagttgaagtag

SEQ ID NO: 363782 - DNA, 921 bp, Pseudomonas aeruginosa
atgccccgtatgctcgcccgcaaggatccgtccgccttcaagaccctgccgctgctggtggaggcctccccggacgggctggtctaccaggccctcggcctgccgctgaacttccagcagatgctcgtacgccgccgccgcatggaggtagccgacccgcagcgcttcgtcgccgagctggccaacctgggggtctcggtgcgcttgaccctgaactggcagggccgcgactactgggtgctggtccgtcagcgccggctggaccgcggcgataccgtgctcaagctgatctccggctacgtaccggcccacgaactgaacctgccgctgctcacggcgatccaggaagtcgccgaggaatgcctggtggagaccgccggcggctggctcggcgggcgcttcggcgacacctggctgccgacgccctaccagggttcgctgcgctaccgggagaacagccacttcgtcctcaccccgctgtccggcgccgcccgtccggtgcaagccggcagcctgcgcttgctggagcgcccgcgcgcctacgtacacctgcccacggcctcgctgcaactggtctacgacatgcgcctggagctgccgcgcgatgcgcgcgagccgagcctctaccatgtcgacgagcggctcgagagcggtccgctggtggcgcgcctggaccgtcggcgccccgatctctacctgctgccgctggatcaggggcgccccaccggcgacctgttcaccctgcgcaagggccagttgcgccctgcggccacccgcggcctgtggttggccgagagctttgccgtacaggacggctggctggtgcatgaggaacgcatccgtttccgcgactggctggcactgtggccatccagcaacggcgaccaggccggcggtgggcgcgaccgcgccagcgcctga

SEQ ID NO: 363783 - DNA, 813 bp, Pseudomonas aeruginosa
atgatcagggataccctccacgacctgcaccgcccgctgggcgacaccggcctggccgtttcgccgctgggcctgggcaccgtcaagttcggccgcgaccagggagtgaagtacccttccggcttcaccatccccgacgaccgcgaagccgccgacctgctggccctggcccgcgacctcggcatcaacctgatcgacaccgccccggcctacggccgcagcgaggaacgcctcggcccgctgctgcgcggccagcgcgaacattgggtgatcgtcagcaaggtcggcgaagagttcgtcgacggccagtcagtcttcgacttctccgccgcgcatacccggcgctccgtcgagcgcagcctgaagcgcctggagaccgaccggatcgagctggtgctggtgcattccgatggcaacgacctggatatcctcgagaacagcgaggtctacccgactctcgccgcgctcaagcgcgagggcctgatcggcgcctacggactctccggcaagaccgtcgaaggtggcctgcgcgccctgcgcgagggcgattgcgcgatggtcacctacaacctgaacgagcgcgccgaacgcccggtcatcgagtacgccgcggcccatgccaagggcatcctggtgaagaaggcgctggccagcgggcatgcctgcctgggcgccggacaggacccggtgcgcaccagcttcgaactggtcttcgaccagccgggcgtcgccgccgccatcgtcggcaccatcaatccgctgcacctggcccataatgtcgcgatggccgcgcaagccctgaaaaaggcctga

SEQ ID NO: 363784 - DNA, 1176 bp, Pseudomonas aeruginosa
atgccccaagccctttccaccgacatcctcatcgttggcggcggtatcgccggcctctggctgaacgcccgcttgcgccgggccggctacgccaccgtgctggtggaaagcgccagcctcggcggcggacagagcgtgaagtcgcaggggatcatccacggcggcgccaagtacgccctgcatggcgccctgaccggcgcctccgaagccatcgccgacatgccgcggcgctggcgcgcctgtctcggcagcgacggcgaactcgacctgcggggcgtacgcctgctttccgaggcgcactacctgtggtcgccgggcggcctggccggcagccttaccagcttcttcgccagcaaggcggtgcgcagccgggtcgagcaggccaagggcgaggatttgcctccggcgctgcgcgacaaggggttcaagggcaaggcctaccgcctcacggaaatcgtcttcgacgtccccgacctgattcgccgcctggcggaactggccggcgacagcctgctcgccggcgagcgcatcgaaccgctgcgcgaaggccgggaactggccggcctgtgcgtcgacggccgggagatccgtgcacagcgcgtggtgctcagcgccggtgccggcaacgaggcgctgctccgcgaactgggcctggaacaaccggccatgcagcggcggccgctgcacatggtgatggtcaaggcggcgaccctgaaaccgctgtacgcccactgcctgggggcagggccgaagccacggatcaccgtgaccacccatccgacccgcgacggccagtcggtctggtacctcggcggcgacatcgccgaagccgatggcgtggcccgcgacgaagccgcgcagatcgccgaagcgcgtcgcgaactggcaaagctgctgccctggatcgacctcggccaggcgcagtgggccaccttgcgggtggatcgcgccgagccggcacagtccaacctgttgcgtccggacaacgccttcctcgccgaacagggacgcctgctggtcggctggccgaccaagctggcgctggcccctgacttcgccgaccgggtctgcgcccgcctggaagaagacggcatccgccccagcgaacatgccgcgctgccgcgactgccgcgtccgccgctcgccgaaccggcctgggaggtggccttcgcatga

SEQ ID NO: 363785 - DNA, 333 bp, Pseudomonas aeruginosa
atgaccaattatctctacctcgccatcgccatcgccgccgaagtggtcgccaccacctcgctgaaagccgtcgccggattcagcaagccactgccgctgctgctggtggtgggcggctacgtgctcgccttcagcatgctcgtgctggtcatgcgcaccctgccggtcggcgtggtctacgccatctggtccgggctcggcatcgtcctggtcagcctggtggcgatgttcgtctacggccagcgcctggaccccgcagccctcctcggtatcggcctgatcatcgccggcgtgctggtgatccagttgttctcccgcgcttcggggcactga

SEQ ID NO: 363786 - DNA, 885 bp, Pseudomonas aeruginosa
atgcagtggaacctggagcagatccgcctgttcgtcagcgtcgccgagcgccagtcgttctctgccgccgcccgcgaactgaagcgggtgcaatcggcggtgagcaacggcatcgcgctgctggaggcggacctcggcgtcaccctgttcgaacgcagcagcggacgccagccgcgcctgaccgacgagggccgggtgctgctggcggaggcgcgcgaggtgctgcgccagtgcgagcgcctgcaggggcgcgcgctgggcctggcgcgcggcgaggagccgcggctgcgcctggcccaggacgaggcgatgccttaccagccggtgctggacagcctggaagcgctggcgcagcgctttcccagtctggaggtgcaggtgtccagcggcggccagggcgacgtgacccgtcgtttgctcgaggagcaggctgacctcggcctgctgttccaccatgagcgcatgcctgagtcgctggagcggcggcgcctcggcagcgtcgagatggtcacggtgtgcggcgccggccacccgctggccgggctgcaacgggtcagtcgccgcgagctggcacagcaccggcaacttttgatcgtgccccagcagagcggctatccgggcggcgagcagatcagcccgcaggtgtggcggctggacagcttctattccatggccgagttgctgatgcgcaacctcggctgggcctggctgccgcggcacgtggtgcagtaccccacctacgatcggctgatggtggagctgaccagcgactggacgccgccgtcgctggtggtcgaactggtctggcggcgcaacgaggtgctcggcccggcggcggcctggctcggcgaaaccttcacccgccacctgcgcgccatcggctga

SEQ ID NO: 363787 - DNA, 1278 bp, Pseudomonas aeruginosa
atgaaccgtaccctctataccctgctgttccacctcggcttgccgctggtggcgttgcgcctgtggtggcgcgcgcgccaggcgccggcctatgccaagcgcatcggcgagcgtttttccctgtccttgcccgaggtgccgcccggcggcatctgggtgcacgccgtctcggtgggcgagagcatcgccgccgcgccgatggtgcgggcgctgctggagcgccatccgcagctgccggtcaccgtcacctgcatgaccccgaccggctcggagcgcatccgcgcattgttcggcgagcaggtccggcactgctatctgccctacgacctgccctgggcggcggcgcgcttcctcgaccgggtgcggccgcgcctggcggtgatcatggaaaccgagctgtggcccaaccatatccatgcctgtgccgcgcgcgggatcccggtggcgctggccaatgcgcgcctgtccgagcgctcggcgcgtggctacgcgcgcttcgccgggctgacccggccgatgctcgccgagctgtcctggatcgccgtgcagaccgaggccgaggccgagcgcttccgtcgtctcggcgcgcgtcctgagtgcgtcagcgtgaccggctcgatcaagttcgacctgcgcatcgacccgcagctgccgctggccgctgccgccctgcgcgaggaatgggacgcgacggcgcgaccgctgtggatcgccgccagcacccatgccggcgaggacgagatcgtcctggcagcccaccggcgcctgctggaaacgcgtcccgacgcgttgctgatcctggtgccgcgccatccggaacgcttcgccggcgtccacgagctatgccgccgcgaaggcttcgccacggtccggcgctccggcggcgagccggtggcacgcgcgacccaggtgctgctcggcgataccatgggcgagctgctgttcctctatgccctggccgacatcgctttcgtcggcggcagcctggtgcccaacggcgggcacaacctgctggagccggcggccctgggcaagccggtgttcgccggtccgcacctgttcaacttcctcgacatcgccgcgcaattgcgcgacgccggggcgctgctcgaggtgacggatgccggcgagctgtgcgacggcctcacgcgcctgtgggcgcagccggaggtcgcgacggccatggccactgccggagagaaggtgctgcgcaacaaccagggcgccctggagcggctgctggcggggttggcgcggttgctcgagcgcggcgggtag

SEQ ID NO: 363788 - DNA, 1947 bp, Pseudomonas aeruginosa
gtgaatttcccgcacctgttcagccccctggaaatccggggcaaacgcctgaaaaatcgcatcatgtcgagcggccacgacacgtcgatgcctaccgacaacctggtcaacgagccactcgtcgcctatcaccgcgcccgggcccgcggcggcgccggactgatcgtcatgcaggtggcgggggtccacgacagcgcgcgctacacctcgcacgtgctgatggccaccgacgatgcctgcatccccggctaccggcgggtcgccgaggcctgccacgccgaaggctgcgtggtgctgtcgcagatcttccatcccgggcgcgagatcatggagtccgccgacggcctgctggcggtggcctattccgcctcggcctcgcccaacgaacggttccgggtgatgccgcgcgaactcgaccagccgctgatcgacgagatcgtcgccggctacgccgccgccgcgcgccgcctgcaccaggcagggctggacggggtggaggtggtcgccagccatggctacctgccggcgcaattcctcaacccgcgggtgaaccgccgcacggatggctacaacggcgacctcgatgcccgcctgcgtttcctccgcgaagtgctggcggcggtgcgcgcggccacctccgaggacttcatcgtcggcctgcgcctgtccgccgacgagcgcgaccccgagggtctcagcgaaagcgagtcgctgcaggcggccgaggcggtccagggcgagctggactacctgcacatcgtcgccggcacttcggcctccctcggcggcgccatccatatcgtcccgccgatggccatcgagccggcctacctggcccgcgaagccggtaccttcaaggcgcgcctggcgatcccgctgttcgtcaccgggcgcatcaaccagccccaggaggccgaggccatcctcgcccgaggccaggccgacgtctgcggcatgacccgcgcgctgatctgcgacccgcagatgccgaacaaggccgaggccgggcgcagcgacgacgtgcgcgcctgcatcgcctgcaaccaggcctgcatcggacatttccaccgaggctatccgatctcctgcatccagcacccggaaaccggccgcgagctgacctacgcaacgcccaatccggcctcgcggcgcaagcgcgtgctggtcgccggcggcggcccggcggggatgaaggcggcggcggtggcggcacagcgcggccacgaggtagtgctctgcgaggccggcgcccagctcggcggccaggtcaacctggcgcaactgctgccgcgccgcgccgaattcggcggcgcctccaccaacctgcaacgggagatgcaactggccggcgtcgaggtacgccgcaacacgccggtcgaccgcgcgctggtggagcgcgagcggccggacctggtgatcgtcgctaccggcgccgaaccctactggccgcctttcgagcgcggcggcgagctgcaggtggtggatgcctggcaggtgctgcgcggcgaggtgcgggtcggtcgttcggtgctggtcaccgactggcggggcgactggatcggccccggtatcgcggaaaatcttgtacgcgagggccaccaggtgcgcctggcggtgaacggcacccactgcggcgagagcctgccgctgtacgtgcgcgaccagttggccggcgagctgcaccgcctgggtatcccggtcacgccctacgcccgcctgtacggctgcgacgataccacggtgtacatgcagcacagcgccagcggcgaggcgatgctgttcgaggaggtcgataccctggtgctatgccagggccaccagccggtggaccgactggccgacagcctgcacggcctggcggaggtgctgcggatcggcgactgcctggccccccgcaccgccgaggaggcgatctacgaagggctcaaggccgcctggagcatctga

SEQ ID NO: 363789 - DNA, 1092 bp, Pseudomonas aeruginosa
atgaaccgttcctttccgttgcgccgcgcggccagcgcccgtccgcatccggtttttccttgccgcgtcctgctcggcgccgtcctgctggcgttcggcggcctcgcgccggtccaggccgatgatggcctggtggtggtcggctacggcggcgccggacagaaggcccaggaggtggcgttcttccagccgttcacgcagcagaccgggattcccgtagtgcagagcgagtacaacggcgagatggcccggatcaaggtgatggccgacaccggtcacgccgactgggacctggtccaggtcgaggggccggacctggcgcgcggttgcgacgacggcctgttcgagcgtctggactggcaggccatcggcggcaagcagcagttgatcgccaatgccgcccaggaatgcggttccgccgcgctggtctggggcgtggcgatcggctacgacgccgaccggctgcaacagccgccggcgtcctgggccgacttctgggacgtccagcgcttccccggcaagcgcggcctgcgcaagcgggcgatctacaacctggagttcgccctgctcgccgacggcgtgccacgcgagcaggtctatccgctgctggcgacccgcgccggtgccgaccgtgccttcgccaagctgggccagctcaagccctacatccagtggtgggaggcgggagcgcagccggcgcagtggctggccgccggcgacgtggtgatgacgtccacctacaccgggcgcatcgccgacgcccaccgcgcggggcgcaacctggccctggtatggcagggcagcctgtacggcatggactactgggcggtggtcaagggttcgaagcgcggcgccgaggcgcgtcgcttcatcgccttcgccaatgccccggatgcccaggtgcgctacgtcgagaacattccctacgggccgaccagccgccaggctgcccagcgcctgcccgcgcaactggcgagctgggtgccgaccgcgccggcgaacctggagcagggcctggcgatggacgacgaattctgggtcgagcatggcgaggagctggaggagcgcttcaacgcctgggccagccagtga

SEQ ID NO: 363790 - DNA, 648 bp, Pseudomonas aeruginosa
atgaaccaggaagtgcgcttttcccgtctggagccagagcagcgcaaggcgctgctgatcgaggcgaccctggcctgcctgaagcggcatggcttccagggcgcctcggtgcgcaagatctgcgccgaggccggggtatcggtgggcctgatcaatcaccactacgatggcaaggacgcgctggtggccgaggcctacctggcggtcaccggacgcgtcatgcgcctgctccgcggcgccatcgacaccgcgccgggcggcgcccgcccgcggctctcggcgttcttcgaggcatccttctccgccgagctgctcgatccgcaattgctcgacgcctggctggcgttctggggtgcggtgggcagcatcgaagcgatcgggcgggtccacgaccattcctatggcgagtaccgggcgctgctggtcggcgtgctgcggcaactggcggaggagggcggctgggcggacttcgacgcggaactggcggccatcagcctcagcgccctgctcgacgggctgtggctggagtctgggctgaatcccgcgaccttcacgccgcggcagggcgtgcagatctgcgaggcctgggtggatggcctggaggcgggcgcccatcgccgcttccggcgtgcgacggaagcttgttga

SEQ ID NO: 363791 - DNA, 735 bp, Pseudomonas aeruginosa
atggcgatggttccgcgcgtattggtggtcgacgacgacccggtgattcgtgagcttctccaggcctatctcggcgaggagggctatgacgtcctctgcgccggcaacgccgagcaggcggaagcctgccttgccgagtgcgctcatctcggccagccggtcgagctggtgctgctggacatccgcctgcccggcaaggacggcctgaccctgacccgcgagctgcgggtgcgctccgaggtggggatcatcctgatcaccgggcgcaacgacgagatcgatcgcatcgtcggcctggagtgcggcgccgacgattacgtgatcaagccgctgaacccgcgcgaactggtgtcgcgggcgaagaacctgatccgccgggtgcgccatgcccaggccagcgccggccccgcccggcaggccctcaggcagttcggcgactggctgctggacgccgaccggcgccgcctgatcgaccacgcgggcaacgaaaccctgctcacccatggcgaattccaattgctcggcgctttcctgcgcaacagcgggcataccctgagccgcgaccagttgatggaccagatccgcaaccgcgagtggctgcccagcgatcgctccatcgacgtgctggtcggccgcctgcgtcgcaagctgcgcgacgacccggccgaaccgcaactgatcatcaccatccacggcgccggctacctgttcaccgccgcggccagcgacgcctga

SEQ ID NO: 363792 - DNA, 777 bp, Pseudomonas aeruginosa
atgcaggcctgctggctggcgctctgcggatggctgctgggcggcctggcacaggctggggagaccatccgctattgcgactatccggtatacccgccgatctcctggagcgacggccagcaggtccgggggctggcgccggagctggtgaagcggctgttcggcgcgctgggctaccgggtcgaggtggtggtgctgggcaactggcggcgctgcctgctcgacgccgccgccggacgggtcgacctgatactggcctaccgcacgcccgcgcgcgatcgcgacctggcgttttccgccgagccggtgctgcgcgaggacgtggcgatcttctacaaccgccagcggccggtgcgcatccaatccctcggcgacctcgccggctatcgcggcgggctgttgttcggcgaaagctacggggcggacttcgaccgcttcgtcggccgccacggcaacgtcgaatgggtttccgacagccgacagaacttcggcaagctggtgcgccagcgcatcgactacatcgcccacgaacgccgcaccggcacgctgttcgccgagcgcctggccggcggcgagaacatccgtgcgctgcccgaaccgctgacggtggactacctgcgggtggcggtctcgcggcactcgccgctggcggcgaagatggacgagatcgaccgggccctgcgtggctatcgcgatgacggcagcatccagcgttggctggacgacagcgtgcgcgactatcggcgcctcgccggcaaccgcgcggacgcctggtga

SEQ ID NO: 363793 - DNA, 2253 bp, Pseudomonas aeruginosa
gtgagcggccacggtggagtgttggcgcggcgcctgctgtggcgggtgctgctgttcagcctgtgtttcaccgtcctcgccggcgccgtgcagctgttcttcgaataccgccgcgaaatgcgcgagatcgaggcgcgcctggaactgatccgcagcggctacctggccagcttcgagcgcagcctgtgggatctcaaccaggagcagttgaacgtgcagttgcgcggcctcggggatttccccgacatcgcccgtgtcagcctgcaaagcgccgacttcaacctgttgcagggcgaccagcgtccacgcggcatgctgcgggtcgagcgctttcccttgagctaccagccgccggggggcgagcgtcggcaactgggcgagctggagatcgccatcgacctggcggcggtctatcgccggctggtttccggcggcctggccagcctcttgtggatgggcagtttcctttgcggcctggcggtggccctcagttggctgttccacagcctggtcactcgccatctgtggcgcatgtccgagttcgccgggcatatcgccgaaggcgacctgcaacagccgctgcgactggacaaggtggaccgcgagcgcgatgagatcgacgccgtcgccgccgccctggaagacatgcgccaggccctgcgcaccgaccgccgccggcgcgatgccgatcgcgacgagttgcgccgacaggtcgagcgacgcaccgccagcctgcgtcgggcgaaggaccaggcggaagccgccgaccgcgcgaagagccgtttcctcgcgaccatgagccatgagatccgtaccccgctgaacggcatcctgggcatggccgagctgctgcgcgaggcatcgctcggcgagcgtgaccgccagcgcctgcgggcactggcgacagcgggggagggactgctggcgatcctcaacgaggtcctccacttcgcccggctggaggaagcgccggatgtgccggaagcggtggacttttccttgcgaagcctgctcgaggacgtcctcaccctgctcgaaccgcgggcgcgggagaacgccacgcggctggacctgtggctggacccgcaggttcatgacggccatcgcggcgccgagcagttcctgcgccaggtgttgaccaacctgctgggcaacgcggtgaagttcaccgaggccggcgaggtgcgcgttcgcgtcgagcggctggtgcgcagcgcaggaagcgagcgactgcggctgagcgtcgcggacgatggaatcggcattcccgaggaaatgcgcgaacgcatcttcgaacgcttcacccagggcggcgacgccgtgacccgccgttacggcggaaccggcctgggcctggcgatcagcaagcggctggtggaagcgctgggcgggcggatcggcgtggaaagccgggtcggccagggcagcacgttctggttcgagatcgagctggcgctggcgagcttgtccggcgcgacgccgccggcggcatcggtgtctgcgctggaggtgctgctggtggaggacgtggcgctcaaccgcgaggtggcccagggcctgctcgagcgggacggccaccgggtgatgctggccgaggacgcggggccggccctggcgttgtgccggcagcggcgcttcgacctgatcctgctggacatgcacctgccggggatggctggcctcgagctttgcgccgggattcgccggcagctcgacggcctgaaccgcgccacgccgatcttcgccttcaccgccagcatccagccggacatggtgcgtcggtacttcgccgcgggtatgcagggcgtgctcggcaagcccctgcggatggacgagctgcgccgcgcgctgggcgaggtcggcaccagcgtgcctgcgcttgcggtggacgccgcgctggaccggcaaatgctcgagacccaccgccgcctgctggggcggcacaagctcgccggactgctgggcaacctgctgggaagcctggacgagcagttgccgctgctggccgaagccctggaccaggcggacctggccgaggcggcgaacatcgcccatcgcctgtccggaagctgccactccatgggcctggtggcgctcggcgccggcctgggcgagctggagcgcgaggccctgggcgcggccggggtcgacccgcgagcctggggcgcacgcctgggtagcctgcgccgcgacggcgccgaagccctgcgccgcgccggcttcctcggcgaagccgactcagcggccggttga

SEQ ID NO: 363794 - DNA, 1413 bp, Pseudomonas aeruginosa
atggctgacggcaaggaaaggctgcaactcacccgggccctggcgagccgccacatcttcatgctgtccctcggcggggtgatcggcaccgggctgttcatgggctccggcgtgaccatcaaccagggcggcccggccggcgcggtgctggcctacctggtggccggggtgctgatgtacctggtgatggtctgcctcggcgagctgtcggtgcagatgccggtctccggttcgttccaggcccacgcgacgcgtttcatcggcccggcgactggcttcatgatcggctgggtctactggatgagctgggcctccacggtaggcctggagttcaccgcggccgggatgctcatgacccgctggttcccggaggtgcccgtgtggctatggtcgggtttcttcgtggtcgtgctgttctctctcaatgccctggcgacccgcgccttcggcgaggccgagtactggttcgccgggatcaaggtggcggcgatcctggtgttcatcgtggtcggggggctggtgatcttcggcggtatcgaactgaagagcggtgcgccggcgcctatgttctccaacctggtcggcgagcggctgttccccaacggcctgtcggcggtgttcgcggtgatgatgacggtggtctatgccttccagggttgcgagatcatgggcgtcgccgccggcgagaccgagcgaccggagaagagcatcccgcgggcggtgcgcaacgtggtgttccgcgtactgatcttctacgtgctggccatcgtcgtgctttccgccatcattccctggcaacaggccgggctgatggaaagcccgttcgtgcaggtgttcgacatggtcgggattccctacgcggcggacctgatgaacttcgtcatcctcaccgccatcctctcggcaggcaactcgggcctgtacgcctcgacgcggatcctctgggcgatgtccaggaccggcatggccccgcgcggcctgtcgaagctcagcgcgcgcggcgtgccgctctacgcgttgctgatcaccctgtgcttcgccctgctctcgttgctgaccagcgtggtcgccgccgacaccctgttcatggtgctgatggcggtgagcgggatgtccggcaccgtcacctggatcgtcatcgcctacgcccaataccgcttccgccgcgagtacatggccagcggcggcacggtcgccgagctgaaatatgccgcgccgctgttcccgctggtgccgttggcctgcatcgccgtgtgctgctcgctgttcgtcttcctcgccctcgatcccacccagcggccgtccttgtactggggcttcggcttcatcgccgcctgctacctggcctattacgtggttcgtcgccggcagccgcagggactgggcgaccccgccctgggacgggccggctga

SEQ ID NO: 363795 - DNA, 792 bp, Pseudomonas aeruginosa
atgactgacctttccccattgcagacgcgggtcgaagccgggatcgcctggctcgtcctgaatcgtccgcaacagcgcaatgcactggatatccccaccctggaggccctgcacgtccgactcgatgcctgcgagcgcgacccggcagtgcgcgccgtggtcctcggcggcagcggacgcagcttctgcgccggggccgatctcgccgaatgggcggcggctgaagcccgtggcgagctggaaagctatggatggaccgaggccgcccacgccctgatggggcgcctgcacgccctcgacaaacccacagtcgccgccgtcaacggcagcgccgtgggcgctggcatggacctggcgctgtgctgcgatttccgcatcgccgccgcctcggcgcgcttcaaggccggctacaccggcatggcctactgcccggacgccggcgccagttggcatctgccacggctgctcggcagcgaggcggccaagcgcctgctgttcctcgacgaagcctggagcgcggagcgcgctctgggcgccggactggtcggcgaggtggtcgccgacgagcgcctggttgagacggtcggcgccttcgctgcgcgtctcgccagcggcccgaccttcgccttcgcccagaccaagcgcctgctgcgcgacggcgccgggcgctcgctggccgagcagttgcgtgccgagcaggccgccgggctgctctgcgggcgcagcgaggatgccgccgaggcgctgcgcgccgtggccgagaaacgttcccctcaattcagcgggcgctag

SEQ ID NO: 363796 - DNA, 1161 bp, Pseudomonas aeruginosa
atggatttcaggctgacccaggaacaggacatgctggtcgaggcggtgcgcagcttcgtcgagaaggaactgctgccccacgaggacgatgtcgaccgcgccgacgcggtgtcgccggagctggccgcacagattcgcggcaaggccctcgccgccggtttctatgccttcaacatgcccgaggaagtgggtggcggcggcctcgactacctgtcccaggcgctggtcgaacgcgagctgtcgaaggtctcctgggccctccacgtattcgtcgcgcggccctcgaagatcctcatggcctgcaccggagaacagctcggcgactacctgttgccctgcgtgcagggcgaaaagaccgattgcttcgccctcaccgagccgggcgccggctccgacgccaattcgatcaagacccgcgcggtgcgcgacggcgacgccttcgtgatcaacggtagcaagcacttcatcagccacgccgggcacgccgacttcgccatcgtcttcgccgtcaccgacagctacgagcacaacggccgcaagcgcaacgcggtgaccgccttcctggtggacaagggcacgcccgggatgaccgtgcgccgcggaccgaaatgcgtgagcaaccgtggctaccacacctacgagatcttcttcgacgattgccgggtgccggcctccaaggtactcggcgaggtcggcaagggctgggaagtggccaacgcctggctcaccgccggacgggtgatggtcgccgccaactgcgtcggccaggcccagcgcgccctcgacctgtcgctgcgctgggcggccgatcgcaagcagttcggccagccgatcggtagctaccagggcgtttccttcaagctcgccgacatggccacgcagatccgcgccgccgagctgatgaccctgcacaccgcctggaagatggaccagggcaccatgaccgacggcgaggccggcatggccaagctgttcgccagcgagaccctcggcaaggtcgccgacgaagcggtgcagatcttcggcggcatgggcctgatggatgaaggaccggtcgagcgcatctggcgcaacgcgcggatcgagcggatctgggagggcacttcggaaatccagcggcacatcgtttcccgcgaactgctgcggccgttgctgcgttga

SEQ ID NO: 363797 - DNA, 2091 bp, Pseudomonas aeruginosa
atgaatcgtgaaaacctcaagcgcctgctggcacccaggcatctcgccttcattggcggccgtggcatggcgcgtgccctgaaacgctgtgccgaaggcggtttcgccggccatttgtggctggtcaatccgcagcacgccgaactcgaaggcgtaccctgcgtggccagcgtcgccgacctgccgtgcggcccggacgcggcgttcgtcgccaccaaccgcgaactgaccctcgacgcggtcgccgcgctcgccgccaaaggcgccggcggggcgatctgctatgcctccggcttcgccgaaaccggcgaacagggcctggccgtgcaacgccggctgctggccgccgccggcgaaatggcgctgctcggcccgaactgctacggcttgctcgactacctgcacggcgccgcgctatggccggtggcacatggcggtcggcaggtggagcggggcgtcgcggtgctgacgcagagtggcaacttcgcctacaacctgtcgatgagcgaccgttcgctgccggtggcctatatggcatcggtgggcaaccaggcgcagctgggcatcgccgagctgatggacgtgctgctcgacgagccgcgggtgactgccatcggcctgcatctggaagggctgaagaacgtcccggggttcgcccgtgcggcctacaaggcgttgcagaaaggcgtgccggtgatcgccctgaagaccggggtgtcggagatcggcgcggccctcgcgctcagccacaccagttccctggccggttccgacgcgctctacgacagcctgttcgagcgcctcggggtgatccgcgtgagcggcccggtgagcttcgtcgaaaccctcaaggccgccgcctgcggccacctgcctggcgggccgagcctggtcgcgctggcctgttccggcggcgacgccgggttgatcgccgattacgccgagcgcaacggcctggggttgccgtctttcgacgccggacagcgcgacgaactggccggggtgctgcccgactacgccaacatcgccaacccgctggacttcaccaccgccatctggggcgatgccgcggccttggaggaaatgctcgacagtgctttgcgcagccctgccgacgccgccctgctggtgctcgactatccgggcgaggaaaccggcgagcggccgcagtgcgacctgcttctgcaacgctactgcgccgcgctgaagcgccacggcaaagtcggcttcatcgcctcggcgttcccggaactgctgccggcccgggcccgcgagctgttgcacggcgagggcgtcgccgcgctgcagggcgtcgaggatggtctcgccgcctggggacggatcgcccgctaccgccagcgccgcgcggcgctgctggagcgcggtgaggcggcgttggtgccgatctgcccagggccgctggcgggcgacggctacctgctcgacgagtggcaatccaagcaggcgctgaaacccttcggcctgccactgccccagggggtgctgagcacccccggccaggcccgcgaagcggccctcgaccttggcttcccgctggtgctcaaggcggtcagcgccgcactgccgcacaagaccgaggccggcggcgtggcgctcggcctgcgcaacgaggcggcgttggaggcggcattgttcgacatgcgcgaaagcctggcccggcacgcgccgcaactggtcttcgagcgtgtgttattggagcgcatggctggcgcgccgctggccgagctgatcgtcggggtcaagcgcgaggagggcttcggcctggcattggtgatcggtgccggcgggatactcgtggagctgctgcgcgacagtcgcagcctgctcctgccaaccaccgacgcggcgatccgcgatgccctgctgagcctgcgcagcgcgccgttgctcagcggcttccgcggtcgcccggcagtgtgcatggaggccctggtggcggcgatccgcgcggtcgccgaattcgcctgcgaacatgccgagcgcttgctggagctggacgtcaatccgttgctggcggatgccgagggagcgctggcggtggatgcgttgatccggctcgccaatggctga

SEQ ID NO: 363798 - DNA, 1611 bp, Pseudomonas aeruginosa
atgcaaccacagaagaccctcaccgccggccaggccctggtccgcttgctggccaactacggcgtggataccgttttcggcatccccggcgtgcataccctggagctgtaccgcggacttccgggcagcggcatccgccacgtgctgacccgccacgagcagggcgccggcttcatggccgacggttatgcgcgggtcagcggcaagccgggagtgtgcttcgtcatcaccgggccgggcgtgaccaacgtcgccaccgccatcggccaggcctacgccgactcggtgccgctgctggtgatttccagcgtcaaccacagcgccagcctgggcaagggctggggctgcctgcacgagacccaggaccagcgtgccatgaccgcgccgatcactgccttctccgccctggccttgagcccggaacagctgcccgaactgatcgcccgggcctacgcgatgttcgacagcgagcgtccgcgcccggtgcatatctcgatcccgctcgacgtgcttgccgcgccggtggcccatgactggagcgctgccgtggcgcgccgccctggtcgtggcgtgccgtgcagcgaggcattgcgggcggcggcggagcgcctggctgcggcccggcgaccaatgctcatcgccggcggcggcgcgctggcggccggcgatgcgcttgccgcgctgagcgagcgcctggccgcgccgctgttcaccagcgtcgccggcaagggcctgctgccgccggacgcgccgctcaacgccggggccagcctgtgcgtagcgccgggctgggagatgatcgccgaggccgacctggtgctggcggtgggcaccgagatggccgacaccgacttctggcgcgaacgcctgccgctgtccggcgaactgatccgcgtcgatatcgacccgcgcaagttcaacgacttctatccctctgccgtagcgctcaggggcgatgcccggcagacccttgaggcgctgctggcgcgcctgccgcaggaggcccgcgacgccgcgccggccgccgcgagggtggcgcgcctgcgcgcggagatccgcgcggcacacgcgccgctgcaggcgctgcaccaggcgatcctcgaccggatcgccgccgcgctgccggccgatgcgttcgtcagcaccgacatgacccaactggcctataccggcaactacgcgttcgccagccgagcgccgcgcagctggctgcatcccaccggctacggcaccctcggctacggcctgccggccggcatcggcgccaagctcggcgccccgcagcgcccgggcctggtgctggtcggcgatggcggcttcctctacaccgcgcaggaactggccaccgccagcgaggaactggacagtccgctggtggtgctactgtggaacaacgacgcgctcggccagatccgcgacgacatgctcggcctggacatcgagccggtcggcgtgctgccgcgcaaccccgacttcgccctgctgggccgcgcctacggttgcgcggtgcgccagccgcaggacctggacgaactggagcgcgacctgcgcgccggcttcgggcagcccggcgtgaccctgatcgaactgcggcacgcctgcgcgcgctga

SEQ ID NO: 363799 - DNA, 1182 bp, Pseudomonas aeruginosa
atgcgctattccgacttcacccaacgtatcgccggcgacggcgccgctgcctgggacatccactatcgcgcgctggcgcgggtcgagcagggcgaggaaatcctcctgctgtcggtcggcgaccccgacttcgagaccccggcgcccatcgtccaggcggccatcgacagcctgctggccggcaacacccactacgccgacgtgcgcggcaagcgcgccctgcgccagcgcatcgccgagcgccaccggcggcgcagcggccaggcggtggacgcggagcaggtggtggtgctggcaggtgcccaatgcgcgctgtacgcggtggtgcagtgcctgctgaatccgggcgacgaggtgatagtcgccgagccgatgtacgtcacctacgaagcggtgttcggcgcctgtggcgcgcgggtggtgccggtgccggtgcgctccgagaatggcttccgcgtgcaggccgaggaggtcgccgcactgatcaccccgcgcacgcgcgcgatggcgctgaacagcccgcacaacccgtccggcgccagcctgccgcgggccacctgggaagccctggccgagctgtgcatggcccatgacctgtggatgatctccgacgaggtctacagcgaactgctgttcgacggcgagcacgtcagcccggccagcctgccggggatggccgaccgtaccgcgaccctcaacagcctgtcgaaatcccacgccatgaccggctggcgggtcggctgggtggtcggtcccgcagcactctgcgcgcacctggagaacctcgccctgtgcatgctctatggctcgccggaattcatccaggatgccgcctgcactgcgctggaagcgccgctgccggagttggaggcgatgcgcgaggcctaccgccgccgccgcgacctggtaatcgagtgcctggccgacagccccggcctgcgtccactacgcccggacggcggcatgttcgtgatggtcgacatccgtcccaccggactttccgcccaggccttcgccgaccgcctgctggaccgccatggcgtatcggtgctcgccggcgaagccttcggcccgagcgccgccggtcacatccgcctcggcctggtgttgggcgccgaaccgctgcgcgaagcctgtcggcgcattgcgctgtgcgccgccgagttgctcggccaggcctga

SEQ ID NO: 363800 - DNA, 705 bp, Pseudomonas aeruginosa
atgaacgtactgatcgtccatgcccacaacgaaccgcaatccttcacccgcgcgctctgtgaccaggcatgcgagaccctggcaggccagggccacgcggtgcaggtctcggatctctacgcgatgaactggaatccggtggccagtgccgccgacttcgccgagcgcgccgatcccgactacctggtgtacgccctggagcagcgcgagagcgtcaagcgccagagcctggccgccgacatccaggccgagctggacaagctgctgtgggccgacctgctgatcctcaactttccgatctactggttctcggtgccggcgatcctcaaggggtggttcgaccgggtactggtgtccggggtctgctatggcggcaagcgcttctacgaccagggtggcctggccggcaagaaggcgctggtcagcctgaccctgggcgggcgccagcacatgttcggcgagggtgccatccacggaccgctggaggacatgctgcggccgatcctgcgcggcaccctggcctatgtcggcatgcaggtgctggagcccttcgtcgcctggcacgtgccatacatcagcgaggaagcgcgcggcaacttcctgcgcgcctaccgggcgcggctggaaaatctcgagcaggatgtacccctgcggttcccgcggctggagcagttcgacgcgctgctccagccgctggcgcgctga

SEQ ID NO: 363801 - DNA, 1449 bp, Pseudomonas aeruginosa
atgctgcgcagactctccctggcggccgccgtggccgctgctaccggtgtcgcctgggccgcccagccgaccccgctgccgaccaagaccgacctgatcagcgtctacaaggaagccgtcgacaacaacgccgacctcgccgccgcccaggccgactacctggcgcgcaaggaagtggtgccccaggcccgcgccggcctgctgccgcaactcggcgccggcggccgtatcggcgactcacggatcgctctcgacgaaccggccgccacggtcaaacgcagcagtcatgtggtccaggccagcctcagccagccgctgttccgcgccgaccgctggttccagtggcaggccgccaaggaaaccagcgaccaggcccggctggaattctccgcgacccagcaggacctgatcctgcgcagcgccgagacctacttcacggtgctccgcgcccaggacaacctggccaccagcaaggccgaggaagccgccttcaagcgccagctggaccaggccaacgagcgcttcgacgtgggcctttccgacaagaccgacgtgctcgaggcccaggccagctacgacaccgcccgcgccaaccggttgatcgccgaacagcgcgtggacgatgccttccaggccctggtgaccctgaccaaccgcgactacagcgccatcgagggcatgcgccacaccctgccggtggtgccgccggcgccgaacgacgccaaggcctgggtcgacaccgcggtgcagcagaacctgcgcctgctggccagcaactacgcggtcaacgccgccgaggaaaccctccgccagcgcaaggccgggcacctgccgaccctcgatgccgtggcccagtaccagaagggcgacaacgacgccctcggcttcgccaacagcgccgccaatccgctggtgcactatggcaagtatgtcgacgagcgcagcattggcctggaactgaacatcccgatctacagcggcggcctgacctcctcccaggtccgcgagtcctaccagcgcctcaaccagagcgagcaatcccgcgaaggccagcgccgccaggtggtgcaggacacccgcaacctgcaccgcgcggtgaataccgacgtcgagcaggtccaggcgcggcgccaggcgatcatctccaaccagagttcgctggaagccaccgagatcggctaccaggtcggcacccgcaacatcgtcgacgtgctcaacgcccagcgccagctgtacgccgccgtgcgcgactacaacaacagccgctacgactacatcctcgataccctgcgcctgaagcaggcggccggcaccctcagcccggccgacctggaggcgctcagcgcctacctgaagcaggactacgatccggacaaggacttcctcccgccggacctggccaaggccgcctccgagcagttacagagcaagccgcgccagcagtactag

SEQ ID NO: 363802 - DNA, 1884 bp, Pseudomonas aeruginosa
atgagcgcaacgcagaagaacaacatcacccgccttgagcagctcgaccgccagtcgacgcagcctttcccgaactcgcgcaaggtctacctgaccggctcgcgcccggacatccgcgtcccggtgcgggaaatctccctcgccgacacccccaccgccttcggcggcgaaaaaaacccgccggtgttcgtctacgacacctccggcccgtataccgaccctgaggtccgcatcgacctgcgcaagggcctgcctgacgtgcgttcgcgctggatcgacgagcgcggcgacaccgagatcctccccggcctgacctccgagttcggccaggcccgcctggccgacgccagcctcgacgccctgcgcttcgcccacgtgcgcacgccgcgccgggccaagccgggcgccaacgtctcgcagatgcactacgcgaagaaaggcatcatcaccccggagatggaatacatcgccatccgcgagaacatgaagctgcaggaagcccgggccgccggcctgctcgaccagcagcacccggggcacagcttcggcgccaatatcccgaaggaaatcacccccgagttcgtccgcgaggaagtcgcccgcggccgcgcgatcattccggcgaacatcaaccacaccgagcttgagccgatgatcatcggccgcaatttcctggtgaagatcaacggcaacatcggcaacagcgcgctgggctcctcgatcgaggaagaagtggagaagctcacctggggtatccgctggggcgccgacacggtgatggacctgtccaccggcaagcacatccatgaaacccgcgagtggatcctgcgcaacagcccggtaccgatcggcaccgtaccgatctaccaggcgctggagaaggtcaacggcgtcgccgaggacctgacctgggaaatcttccgcgacaccctgatcgaacaggccgagcagggcgtcgactacttcaccatccacgccggcgtgctgctgcgctatgtgccgctgaccgccaagcgggtcaccggcatcgtttcccgcggcggctcgatcatggccaagtggtgcctggcgcaccaccaggagaacttcctctacacgcatttcgaagagatctgcgaaatcatgaaggcctacgacgtcagcttctcgctgggcgatggcctgcgtccgggctcggtggccgacgccaacgacgccgcccagttcggcgagctggaaaccctcggcgagctgaccaagatcgcctggaagcacgacgtgcaggtgatgatcgaaggtcccggccacgtgccgatgcaattgatcaaggaaaacatggacaagcagctggagtgctgtaacgaggcgccgttctacaccctcggcccgctgaccaccgacatcgcccccggctacgaccacatcacctccggcatcggcgcggcgatgatcggctggttcggctgcgccatgctctgctacgtcacgcccaaggagcacctgggtctgccgaacaaggatgatgtgaagaccgggatcatcacctacaagatcgccgcccatgccgccgacctcgccaagggccacccgggcgcgcagatccgcgacaacgcgctatccaaggcgcgcttcgagttccgttgggaggaccagttcaaccttggcctggacccggacaccgcgcgggcgttccatgacgagaccctgccgaaggactcggccaaggtcgcgcacttctgctccatgtgcggaccgaagttctgctcgatgaagatcacccaggaagtccgcgactacgccaaggagaacggcctgtccgacgagagcaaggccatcgaggccggcttccaggagcaggcggcgcgcttcaaggacgaaggatcggtgatctacaggcaggtctag

SEQ ID NO: 363803 - DNA, 747 bp, Pseudomonas aeruginosa
atgcgccttctgaaattcgccgccctcggcagcctggtcgttctgctgagcgcctgccagagcctcttcaagcccggcctcgacgacccgctgcccaccgagcgcctcgccagcgagcacctgaagcccggctgtcagggcgaacagtgtcccttggtaaacatcgacaccttgaagttccccgacgaaccgcagttggacccgatcgtcgagcgcgccctgctggaaatgacccgggaaaacaacgaaacacccctgccggcatcgctggcggcctacgagcggcagttcctggacagcgccgagccgggctggagcagctacctgcaagccaaggtgcgcgaacaacatgacggtctggtgatcatcgagctttccagctacctgttcaccggcggcgcccacggcatgcccggtcgcggcttcatcaactacgaccgcaggcagcacaaggtgctgagcctgcaggacatgctggttcccggccaggaagaagccttctggaaacaggccgagctggcgcacaaggcctggctgctggccaacaagctcgaccaggacgccgatttccagaagacctggccgttccagcgcaccccgcacgtggcattgaccttcggcgcggtgacgctgaagtacgacgcctactccatcgcgccgtattcctatgcccaccccgaactgaagatcccgtatccgcgcctgaacggcatcgtcaagccgaacctgttccccggccgcggctga

SEQ ID NO: 363804 - DNA, 618 bp, Pseudomonas aeruginosa
atgtccgaaaccttcaaacccgcccccggtgacgtcgagctcgtgcagcgcgaggaatgcttccgcggcttctatcgtctcgatcgcctgcgcctgcggcatcgccagttcgacggcagcatgggccgggaaatcagtcgggaactgttcgtccgccatgacgcggtctgcgtgctgccctacgacccgcagcgcgattgcgtggtgctcatcgagcaattccgcgtcggggcgatgcagaagctcgccaacccctggctgctggagctggtcgccggcctgatcgacaaggacgagcaaccggaggaagtggcccatcgcgaggcgatggaggaggccgggctgactctcggtgcgctctggccgataacccagtacctgccgtcgccgggcggtaccgacgaagtggtgcacctgttcgtcggccgttgcgacagcgaaggcgtcggcggcgtgcatggcttgccggaggagggcgaggacatccgcgtccacgtctggccgttggaagatgcgctgcaggccgtgcgcgacgggcggatcaacaacgcggcgagcatcatcgccctgcagtggctggccctgaaccgggccgaggtgcgtgggctatgggcctga

SEQ ID NO: 363805 - DNA, 459 bp, Pseudomonas aeruginosa
atgggcctgaacctgctgcgcgagcgctaccgggtcgacctggccagcctgcaggcgacctgcgaagcgaactacgcgcggctcatgcgcctgctcccggacatgcgcgaggcgcaggcctcgcgccgggtcgcgctgagcgaaggggagcggctgctcggcgtacttgcgctggaagtgaccgaggcctgcccctacaccaccacccttcaggtgcgccaggaactgggcctgccctggttgccggcgccgcggctggaagtgcgggtctaccacgatgcgcggatggccgaggtgatcggcgccgaacaggcgcggcggctgatggcgatctatccctacccgaaccaggcgatgcaccagcccgacgagaagaaccagctcaacctgttcctcggcgagtggctcgcccattgcctggcctgcggccacgaaatggagccggtggcccagcgctga

SEQ ID NO: 363806 - DNA, 819 bp, Pseudomonas aeruginosa
ttgtcacgccattcgaacactcccgccaccgacgcctccgtactgctggtgcagctctcggacagccacctgttcgccgaggatggcgcgcgcctgcttggcatggataccgcccatagcctggagaaggtggtcgagcgggtcgcccgggagcagccgcggatcgacctgattctcgccaccggcgacgtctcccaggacggcagcctcgattcctacacacgcttccgcaggttgagcgcccccctggacgcgccgttgcgctggttcgccggtaaccacgacgaacgcgagccgatgcaaagggcgaccgagggcagcgacctgctggagcaggtcgtcgacgtcggcaactggcgcgtggtgttgctcgactcgagcattcccggcgcggtgccgggctatctcgaggaggatcagctggagctgctgcggcgcgccatcgacagcgccggcgaacgcttcctgctggtttccttccatcaccacccggtgccgatcggcagcgactggatggatcccatcggcctgcgcaacccgcaggcgctgttcgacctgctggcgccctatccgcaggtgcgctgcctgctgtgggggcacattcaccaggagttcgaccgccagcgcggcccgctgcgcctgctggcttcgccgtccacctgcgtacagttcgcccccggtagcagcgacttcaccctcgaccgcctggcgccgggctaccgctggttgcgcctgcacgacgacgggcgcctggaaacggggatctcgcgggtcgacgacgtcgtcttcgaagtggactacgacaccgccggatactga

SEQ ID NO: 363807 - DNA, 687 bp, Pseudomonas aeruginosa
atgaagcctggaagctgttaccgttcggctttccctaccgagttgaagcccattagcccgttcccgatgaccgcgaccagcccatccctgctgtatatccacggcttcaacagttcgcccgaatcgcacaaggcgcgtcagctgcaggcggccttcggccacttgggcctggccgaaggcctgcgcgtcccggccctgcaccatcacccacggcaggctatcgcccagttggagcgggccattgccgagctcgggcgaccggtgctggtcggcagctccctgggtggctactatgcgacccatttggcggagcgccatggcctggcggcgatcctggtcaatccggcggtcgccccgcatcgctccttcgacggctacctgggcgcgcagaccaaccactacagcggcgagacctgggaactcaccgaggaccacgtggcggcgctggccgaactggaagtcacgcacctgcaacgtcccgaacgctaccaggtatggctgcagaccgccgacgaaaccctcgattatcgcgtcgcgcaggccttctaccgagcctgcgcgctacgtatccaggccggcggcgaccacggtttccagggcttcgcccggcacctgccggcgctgctggcgttcgccggctacccgtcggcgctgtggcgcgacaccgacttttcgacttttgactga

SEQ ID NO: 363808 - DNA, 1890 bp, Pseudomonas aeruginosa
atggctacttacaacgcagacgccatcgaagtcctttccggcctcgacccggtgcgcaagcgcccggggatgtacaccgacaccacccgccccaaccacctggcccaggaagtcatcgacaacagcgtcgacgaagccctggccggccacgcgaagagcgtgcaggtgatcctgcaccaggacaactcgctggaagtcatcgacgatggccgcggcatgccggtggacatccacccggaagagggcgtgccgggcgtcgagctgatccttaccaagctgcatgccggcggcaagttctcgaacaagaactaccagttctccggcggcttgcacggggtcggcatctcggtggtgaacgcgctctcgacccgggtcgaggtacgcgtcaagcgcgacgccaacgagtaccggatgaccttcgccgacggcttcaaggacagcgatctggaagtcatcggcacggtcggcaagcgcaataccggtaccagcgtgcatttctggccggatccgaagtatttcgattcggcgaagttctcggtcagccgcctcaagcatgtgctcaaggccaaggcggtgctgtgcccgggcctgagcgtggtgttcgaggacaagaacaccggcgagcgcgtcgagtggcacttcgaggacggcctgcgctcctacctgaccgacgcggtcgccgagctgccgcgcctgcccgatgaacccttctgcggcaacctcgaaggttccaaggaagcggtgagctgggccctgctgtggctgcccgagggcggtgagtcggtgcaggaaagctacgtcaacctgattcccacggcccagggcggcacccatgtgaacggcctgcgccagggcctgctcgacgccatgcgcgaattctgcgagttccgcaacctgttgccgcgcggcgtcaagctggcgcccgaggacgtctgggaacggatcgccttcgtcctctcgatgaagatgcaggaaccgcagttctccgggcagaccaaggagcgcctgtcgtcccgcgaggcggcggcgttcgtctcgggcgtggtgaaggacgccttcagcctgtggctcaacgagcacgccgaaatcggcctgcaactggcggaactggcgatcagcaacgccgggcgtcgcctcaaggcgggcaagaaggtcgagcgcaagaagatcacccaggggccggcgctgcccggcaaactggccgactgcgccggacaggaaccgatgcgcgcggaactgttcctggtcgagggcgactccgccggcggctcggcgaagcaggcgcgggacaaggaattccaggcgatcatgccgctgcgcggaaagatcctgaacacctgggaagtggacggcggcgaggtgctcgccagccaggaggtccacgacatcgcggtagccatcggcgtcgatccgggcgccagcgacctggcccagctgcgctacggcaagatctgtatcctcgcggatgccgactccgacggcctgcacatcgccacgctgctctgcgcgctgttcgtccgtcatttccgcccgctggtggaagccggccacgtctacgtggcgatgccgccgctgtaccgcatcgacctcggcaaggaaatctactacgccctcgacgaagccgagcgcgacggcatcctcgagcgcctggccgccgagaagaagcgcggcaagccgcaggtcacccgcttcaagggccttggcgaaatgaatccgctgcaactgcgcgagaccaccatggatccgaatacccggcggctggtccagctcaccctggaggacgccaccggtaccctggagatcatggacatgctgctggccaagaagcgcgccggtgaccgcaagtcctggctggaaagcaagggcaacctggccgaggtgctggtctga

SEQ ID NO: 363809 - DNA, 1014 bp, Pseudomonas aeruginosa
atgcgccgcctgctggccatcctcggcctgttcgggggcctggtccaggcggccgaggcgccgccagagccaccggttccggcagccttgagcttcatctccgaacatgcggtggagggcatgcgcggcggcaacctctccgggctggcctggtgtggcggcgcgctgtggacggtttccgaccgcgacgacgaccgcctgtatcgcctgcaaccctcggccgaaggctccgaccagccctggcaggccgaggccgagagtttcatcgctccgaccccgccggacagcgggttgccctggggcatgagcacgcgggtctggctcagtggcctggtgcgcggcggcaacctcgacttcgaaggcatcgcctgcgatgccgccggcaatcgctacctggtcagcgaggcgcacgcggcggtcctgcaactgccggtgagcggcgcgccgaactggctgcgcctgccgcccggcctgctgccgcaagcgcgggccagcggcatgctgatgaatttcaacgcgctcttcgaagggatcgccgtcgaccccgagggcaagcgcctctggctggctgccgagcgcgagcgccgcggcctgctggtggcccaccgcgacaacagtgcctggcgctgcgagggcagctgcgtactgctcgccgagggcggcaagatcgagccgccgccggaactgggcagcgcgcgcaagctgccgaaggatttctccgacctcgccttctaccgcggcaagctgttcaccctggagcgcctggcgcatcagatctgccgccgcgacctggcccaggccaaggtcgagcgctgctggtcgttcgcctcggcggtcctggcgccggagcgtcgctacgagctgccttatggcgtcgcggaagccctgtcgctggacgacaagggcgcctggctgggcatcgacaatggcgaccatgcgcgcgccgatggcgatgtgcggcccttcgtcctgcgcttcgccgcgcccgccggcggctggttgggggacaagtga

SEQ ID NO: 363810 - DNA, 486 bp, Pseudomonas aeruginosa
atgctggtgctggcctgggtcgccgggctggcgctggcgacgcgctatttcggcgtctgggaagatcgacagcgcaacccgaaccaggcgccgcaatcgatccatggcgacggctacgtcgagttgcgcctggccagcagccggcagggccattacctgctgaacgggcagatcaacggccagggcgtgaccttcctgctcgataccggggcgacccaggtggcggtgccggaagccctggcggcaagactcgcgctggagcgcggcgcgccgatcaccctgagcacggccaacggccgcgccacgggctggcgcacgcggctggaccagctgcaactcggcgatatccgcctgtccggggtcgcggcgctgattgcgccgggcatggacggcgatgaggtgctactcggcatgagcgccctgaaacaactcgaattcacccagcgcgacggcaccctggtgctgcgccaaaacacttctccgtga

SEQ ID NO: 363811 - DNA, 2265 bp, Pseudomonas aeruginosa
atgagcgaatccctcgatctgagcctggaaggggtcgaacgccggtcgttggccgagttcaccgagcaggcctatctgaactattccatgtacgtgatcatggaccgcgccctgccgcatatcggcgacggcctgaaaccggtgcagcgacgcatcgtctacgccatgagcgaactggggctggatgccgattccaagcacaagaagtcggcgcgcaccgtcggcgacgtgctcggcaagttccacccgcacggcgactcggcctgctacgaggccatggtgctgatggcgcagccgttctcctatcgctatccgctggtggacggccagggcaactggggggcgccggacgatcccaagtccttcgccgccatgcgttataccgaggcgcgcctgtcgcgctattccgaggtgctgctcagcgaactgggccagggtaccgtggactgggtaccgaacttcgacggcaccctcgacgagccggccgtgctgccggcccgcctgcccaacctgctgctcaacggcaccaccggcatcgcggtgggcatggccaccgacgtgccgccgcacaacctgcgggaagtcgcgtcggcctgcgtgcgcctgctcgaccagccgggcgcgacggtcgccgaattgtgcgaacacgtgccgggcccggacttccccaccgaagccgagatcatcaccccgcgcgccgacctgcagaaggtctacgagaccggccgcggttcggtgcggatgcgcgcggtgtaccgcgtcgaggacggcgacatcgtcatccacgccctgccgcaccaggtgtccggttccaaggtgctggaacagatcgccgggcagatgcaggccaagaagctgccgatggtggccgacctgcgcgacgagtcggaccacgagaacccgacccgcatcgtcatcatcccgcgttcgaaccgggtcgatgtcgaagagctgatgacccatctgttcgccaccaccgacctggagaccagctaccgggtcaacctgaacatcatcggcctcgacggcaagccgcaggtcaaggacctgcgccagttgctctcggagtggctgcagttccgcatcggcaccgtgcgtcgacgcctgcagttccgcctggacaaggtcgagcgccgcctgcatctgctggatggcttgctgatcgccttcctcaacctcgacgaggtgatccacatcatccgcaccgaggatcagcccaaggcggtgctgatggagcgcttcgaactcagcgaggtgcaggccgactacatcctcgacacccgcctgcgccagttggcacgcctggaagagatgaaaatccgcggcgagcaggaagagttgctgaaggagcagaagcgcctgcagaccctgctcggcagcgaggccaagctgaagaagctggtgcgcgaggagctgatcaaggacgccgagacctacggcgacgaccgccgttcgccgatcgtcgcccgcgccgaggcccgcgcgctgtcggaaaccgagctgatgcccaccgaaccggtgaccgtggtgctctcggaaaaaggctgggtgcgttgcgccaagggccacgacatcgacgccgccggcctctcctacaaggccggcgacggcttcaaggccgccgcgccgggacgctcgaaccagtatgcggtattcatcgactccaccgggcgcagctactcgctgccggcccacagcctgccgtccgcgcggggccagggcgagccgctcagcggccggctgacgccgccgccgggggccagcttcgaatgcgtgctgctgccggacgacgatgcgctgttcgtgatcgcttccgacgccggctatggtttcgtggtcaagggcgaggacctgcaggccaagaacaaggccggcaaggccctgctcagcctgcccaacggctccgccgtggtggcgccgcgcccggtgcgcgatttggagcaggattggctggcggccgtgacgaccgagggccgtctgctattgttcaaggtctccgacctgccgcagctcggcaagggcaagggcaacaagatcatcggcatccccggcgaacgcgtggccagccgcgaggaatacctcaccgacctggctgttctgccagccggggcgacgttggtcctgcaggccggaaagcgtaccctgtcgctcaagggcgacgacctggaacactacaagggggagcggggccggcgaggcaacaagctgccgcgcggtttccagcgcgtcgacagcctgctggtggatattccgccacaggattga

SEQ ID NO: 363812 - DNA, 711 bp, Pseudomonas aeruginosa; identical to SEQ ID NO: 318125

SEQ ID NO: 363813 - DNA, 537 bp, Pseudomonas aeruginosa
gtgaccaccctgatcacccacccgctgccggtcctggcggtgggactggcccttggcagccgggtgatcccgccacgcctgctgctggcaggcatgctcgccgcctgcctgccggacttcgacgtagtcgccttcaagctcggcatcgcctatcacgatgccttcggccatcgcggcttcagccattcgctattgttcgccgcgatcctcggcgcgctcgccgccctcgcctgccggccgctgcatagcggaccgctgaaagccgggctgtgggtagcgctggccaccgcctcgcacagcctgctggacgcgatgaccaatggcgggctgggcgtcgcctggttctggccctggagcgacgcccgctacttcatgccgttccatccgatcgccgtgtcgccgatcggtctgtcgcgcttcctcagcgaacgcggattgctggtgctgcaatcggaggcgcgctgggtctggctgccctgcctgctgctggcgctcgccggcatggccctgcgcttcctgttgcgccgctcacgctga

SEQ ID NO: 363814 - DNA, 1539 bp, Pseudomonas aeruginosa
gtgacccggcccacgtccgtcaagcccgacaatttcttcctcctgctgtttcgtgccttgcgccagcgccgcgtcccgatcgccctgcggctcgccagccatagcctgatcctggtggccctggccctgctgatctacgcctgggtcatgggcatgcagtttcgccaggccatgcaacagcaggccgatgccctgggccagagcctgatcacccagaccgccgcgtccgccaccgagttgctggtgtccaacgacatcctcagcctcaacgtgctgctgaacaacctggtgaagaacccgctggtggcccatgcggcgatctacagcgtcgaccagcgcatcctcgccgaggccggcagccgtccgaagcagagcctgctcggcgccaccgaaggcctgtactcgacgccgatcaccttccaggaagtgatcgccgggcacctgcgcatcagcctggacatgcagcagttccagcagccgatgatgatcagcctgcagagcatgggcctgatcagcctgatcctgctgatcctcgccctgtatttcagcctgcgcctggggcggcagatttccacacccttgttgcaattgcgtgtctggttgcgcgatccggacaatccggcccccggcgccgaactgcagaacgagctgggcgacctggcgcgcgacctggaagagcgcctggtgccggagaagccgccggcgccggagccggaagaagcaccgctgccgcagaacttcgacgacatcctgctggaagacgacgaagccgacctgcgcagccgcaaggtcgaggcctcggccttcgaggaagacgacattccgctgggcgacgccctgctggacgagaccaagccggtggaattcacctccatcgacgaagacccgctggaccaggacgccttcgacgagaacggagccgaagccggggaacagcccgcggcgcccgccgctgcgcgcgaaccgcaacacagtgcggtgctggcgatccagctcggcgcccaggaacagttgcgccggttgccgcgcagccgcctggtggacctcctgcaacgctatcgcgactgcctggaacaggccgcccgccagtacaagggcagcctgcacacgctcagcgacggcggcagcctgattctcttccacagccgcgacaaccgcgccgactacctgaccaacgcgctctgctgcggtgaactgatgcgcgcgctcggccatgccctgcagatcgaggtcgccgacagcggcatcaccttgcagttgcaactgggcctgagcctcggcgaagacctcagcgaacagacccaggccgacctgctgctcaacgaaaccgtgcagaacgccctcgccctcaaccagcacagccgcaacctgctgctggtcgaacgcagcatcgccgacgacgcggtggtccgcgagcgcgcccgtatccgcgccatcgccagtccggaaggagcctgctgcgtcgagcgtctgctggagccgtatccatcgatgctcgagcgccaactggcgcgcatgcacgaccgcgcccgcccgtga

SEQ ID NO: 363815 - DNA, 1215 bp, Pseudomonas aeruginosa
ttgcgcgaaattgtcctgatcaacatcaccggggaagaccgccccggtctcaccgctgccatcaccggcgtactggcccagggcggggtgaacatcctcgacatcggccaggcggtgatccacgacaccctgtcgttcggcatcctggtggaaatcccggataccgaggccggttcctcggtcctcaaggacgtgctgttcaccgcctacaagctggaccagcaggtgcgcttcaccccggtctcggaagaggactaccggcaatgggtcgacggccagggcaaggcgcggcacatcgtgaccctgctcacccgccgggtgactgccgagcaactgcagagggtcagctcgatcaccgccaagtacgcgctgaacatcgaccacatcgaccgtctctccgggcgtatgccgctggacatgcccgccgaccagggcaagggctgcatcgagttctcggtacgcggcgaaccggccgatccggcggcgctgcgtgcggaattcctcagcgtcgcccaggaattgaacgtcgacatcgctttccagcaggacagcgtgttccgccgcaaccgccggctggcggtgttcgacatggattcgacgctgatcgaggcggaagtcatcgacgaactggccaaagccgccggcgtcggcgagaaggtcgccgcgatcaccgagcgggcgatgcgcggtgaactggacttccgcgccagcttcaaggagcgcctggcgctgctgcaggggctgtcggaagacgtgctggaggagatcggcgcctcgctgcgtctgaccgagggtgcggaaaccctgttcgccgaactcaagcgcctgggttacaagaccgccatcctgtccggcggcttcacctatttcgcccgtcaattgcaggcgaagctggggatcgactacgtgttcgccaacgagttgcagatcgtcgacggcaaggtcaccggggtggcggtcgagccgatcgtcgatgcccagcgcaaggccgacctgctgcgcgaactggcggcgaaggaaggcctgagcctggagcagaccatcgccgtcggcgacggcgccaacgacctgccgatgctcggcctggccggcctgggcgtggcgttccgcgccaagccgctggtcaagcagtcggccaagcaggcgatctcgaccctgggcctggacggcatcctctacctgctcggctaccgcgaccgcgaaggacgagcctga

SEQ ID NO: 363816 - DNA, 2076 bp, Pseudomonas aeruginosa
atggccatcgaaaagaaaaccatccgcctgctgattctggaagactcgcagaacgaagccgaacgcctggtcagtctgttccgcaatgccggccacgcgacccgcgtacatcgactgacctctcccgaggacctcgccgaaaccctccagcaaagctgggacctgctgatcgccgcgccgaccagcgagtgtctcgagcccggcgaggcgctcgccaccttgcgccgccagtcgcgcgacatcccgttcatccagctggtggccgacaacagctccgacgccatcaccgacgccttgatgctcggcgcccaggacgccctgccgcaaggcgaggacgagcgcctggtgctggtcgccaaccgcgagctggccggcctcgccgaacgccgcgcgcgccgcgccgccgaactcgccctgcgcgaggcggaaaaacgctgccagttgctgctcgacagctcggtcgacgccatcacctacgtccacgacggcatgcacatctacgccaaccgctcctacatggcgctgttcggctacgaggacgccgaggaactggaaggcctgccggtcatcgacctgatcgcctcctgcgaccagggcgccttcaaggatttcctcaagggctaccagaacgaccagcgccagaccgaactggtttgcaccggggtcaagctcgacggccaggaattcaaggcgcgcatcagcctctccgccgccacgtacgacggcgaaccctgcatccaggtggtgatccgcggcgaggtcgacaacgccgagctggaagaaaagctccgcgaagtcagcagccaggacccggtcaccggtctctacaaccgcagccacttcctcgacctgatggatgccgccgtgcagcaggcggtgaccgcccgcaagccgtcgaccctggcctatatccatctcaacggctacccctcgctccaggccgaccacgggctttccgggatcgacctgctgctcggccagttggccggactgatgcgtgaacagttcggcgaggaagccgacctggcgcgtttcggcgattcgatcttcgccgccctgttcaagggcaagactcccgagcaggcgcaagcggcgctgcaacgactgctgaagaaagtcgagaaccaccttttcgagctgaacggccgcagcgcccaggccaccctcagcatcggcgtcgccggtctcgacgagaagaccgccaaggcccaggacgtgatgaaccgtgcgcatcgctgcgccgatgacgcggcacgcaagggcgggtcgcagatcaagcagtacaacccggcggaagagcttgccgccgccgcccagcgcggcgacgtcatcgcgatcctccagcaggcgctggagaccaacagcttccgcctgctgttccagccagtcatcagcctgcgcggcgacagccacgagaactacgaggtgctcctgcgcctgctcaatccgcagggccaggaagtgccgccggcggagttcctgcatgccgccaaggaagccgggctggcggagaagatcgaccgctgggtgatcctcaattcgatcaagctgctcgccgagcatcgcgccaaggggcaccagaccaagctgttcgtccacctgtccagcgcgagcctgcaagaccccggcctgctgccctggctcggggtggcgctgaaggccgcgcgcctgccgccggagtcgctggtgttccagatcagcgaagccgacgccaccagctatctgaagcaggccaagcaactgacccagggcctggccaccctgcattgccaggcggcgatcagccagttcggctgctcgctgaacccgttcaacgcgctgaagcacctgaccgtgcagttcatcaagatcgatggctccttcgtccaggacctcaaccaggtggaaaaccaggagatcctcaagggcctgatcgccgaactgcacgaacagcagaagctcagcatcgtccccttcgtcgagagcgccagcgtcctcgccaccctgtggcaagccggcgccacctacatccagggctactacctgcaggggccgagccaggcgatggactacgacttctcctcgggagacgaatga

SEQ ID NO: 363817 - DNA, 1824 bp, Pseudomonas aeruginosa; identical to SEQ ID NO: 318130

SEQ ID NO: 363818 - DNA, 870 bp, Pseudomonas aeruginosa; identical to SEQ ID NO: 318131

SEQ ID NO: 363819 - DNA, 816 bp, Pseudomonas aeruginosa
atgtccgtcttctccgacctgccattggtgatcgagcccagcgacctcgcgccgcgcctgggcgcgcccgagctgatcctggtcgacctgaccagtgccgcccgctacgccgaagggcatatccccggcgcgcgtttcgtcgaccccaaacgcacccagtggggacaacccccggcacccggcctgctaccggccaaggccgacctggaagccctgttcggcgagctgggccaccgcccggaggcgacctacgtggtctacgacgacgaaggcggcggctgggcgggccgcttcatctggctgctggacgtgatcggccaccaccgctaccactatctcaacggcggcctgccggcctggatcgccgacgcccaggcgctcgaccgcgaggtcccggcgcctgtcggcggcccgctgccgctgacgttgcacgacgagcccagcgcgacccgcgaatacctgcaaagccgcctcggcgccgccgacctggcggtatgggatgcgcgcaaccccagcgaatacgccggtaccaaggtgctcgccgcgaaggccgggcatgtgcccggcgcgatcaatttcgaatggaccgccggcatggacccggctcgcgccctgcgcatccgcgcggatatcgccgaagtcctggaggacctcggcatcacgccggacaaggaagtgatcacccactgccagacccaccatcgctccggcttcacctacctggtggccaaggcgctgggctacccgcgggtcaaaggctacgccggctcctggtcggaatggggcaaccaccccgatacccctgtagaggtttga

SEQ ID NO: 363820 - DNA, 1512 bp, Pseudomonas aeruginosa
atgacagaccgcctcgccgcctggctcgaagagctcgaccggcaacccctgccgatccccgccagccactatgccggcctgcacgccgcgctgagcgacagccgtcgctcgctgcgcgagatcgccgaccagttgcagggcagcccgacactggctttgtccatcctgcgcgaggccaatcgcgccgagagcgcccgcgacaaccccgcggaaagcctggaggtggccctcagccgcctcggcctggcgcgcgcgagccaacttctgaagaccctgccgagcatccaggatgcggagatgcccagggtcctcgggcagatgctgctgatcagccagcacgccatgcagcaggccagcggcctgttcggcgcgcgcctggccaggctctggcaggaaatccactggggcagcctgctgaccatggctccggtctgggcgctggccaacgcccgcccgcagttgctggagcaatggcagcaacgcgtgctggtacagggcgaaccgaccctgcgagtggagcgcgaactgctcggcatgcgcctgctgccgatctgcctggcgttggccgaacgctggcggctaccgcagtgggtcatccagggctatcgcctgctcgcctgcgaccgtcgcctgctggttcgagccctgcgtatcgcccgcgaccatcagtcgcccctgctccagcaacagcaactcgatgcccagcccgatctcgcccgctggctgacccagccggccaactgcactctcctcgccaatggcctggccatcgccgcgcaccagagctgggacgggccgcacatgctgcgctggcagcgcctgaccggcctgtacctgggccagccgctgaccgaagtccagcagcaggtgcacatgctcgccgcgcaaagcgcgcgcctgcacgcccggccgccgctgtggcatccggcggtggccttgatctggccctggcaggccagccgctggcgtgccgaagcggcacccccgccgccgccctcggcggaagccctggccgagtggcggcagcattgcgccgagttgctccgcgagcccagcccgttcagcaacgtggtgcagctcaccgcctgtgcccgcgatgcgctgcgcgcctgcggcctgcaaaggatgctgctgctggtggccgatcgcacccaggtacacgtgctggcgcagcagagcgccggactcgaaccgggccaggagaaattgcaactggagattgccagcagcccgctgctgaagaaactgttccagcaacccgccctgctgcgcatcggcccgaacaaccaggaccagttgctgccggccctcggcgaacccttgcgccaactgttccccgggcctcacctgctgctgcgctcgctgggcaacggctcgcgggtggtgatgctggtcctggccgacctcggcggccagccgttcagcgacctgcatgcccaggccttcgccaagaccgcccagtgcaccgagcgcgcgatccagcagttcggccgccagcgccgcacggaatga

SEQ ID NO: 363821 - DNA, 852 bp, Pseudomonas aeruginosa
atgtcaaaaatcatcggcatcatcgtcgttttcgccagtgtcctcgggggcttcctgctctccggcggcaagatcggcgccatcatccagcccttcgaggtcctgatcatcggtggcgcggcactgggggcgttcctccagtccaacccgggcagcacgttcatggtggtgctgaagaaagcgccgaagatgttcagcaaccgcttcacccagacctactacctcgaggtgctgggcatgctctacgagatcctcaacaagagccggcgcgaagggatgatggcgatcgaggcggacatcgaagaccccgcggccagccccatcttcagcaagtaccccggcgtgctgaaggatgagcggatgaccgcctatgtctgcgactacctgcgcatcatgtcctccggcaacatggcgccgcacgagctggaaggcctgttcgacatggagctgtccagtctcaaggaggacctggagcatccgtcccacgcggtgaccaaggtcgccgacgccctgccgggcttcggtatcgtcgccgcggtactcggcatcgtcatcaccatggcgttgcttggcgaaggcagccaggcggagatcggccaccacgtcgccgccgccctggtgggtaccttcctcgggattctcgccgcctacggcttcgtcggcccgctggcgggcgccctggagcacgatgccaaggaagagttgaacatgttcgaggcgatcaaggcctgcctggtcgcttccgcttccggcatgccgccttcgctggccgtcgagttcggccgcaaggtgctgctgcccgcccatcggccgaccttcgccgagctcgagcaggccgtgcgtggccgctga

SEQ ID NO: 363822 - DNA, 1044 bp, Pseudomonas aeruginosa; identical to SEQ ID NO: 318135

SEQ ID NO: 363823 - DNA, 1020 bp, Pseudomonas aeruginosa
atggccaaacgccacttgacccgccggcagagctggcgcatcgaaaagatccaggaagaacgcgcggcccgggcggcccgtcgcgagtcgcgtgccgtggaagagctggagggcggcgacctgggaccggagcagaccggccaggtgatcgctcatttcggggttcaggtagaggtcgagtccgccgacggccaggtttcccgctgtcacctgcgcgccaacctgccggcactggtgactggcgaccaggtggtctggcgcgccggcaaccagggcatcggcgtgatcgtcgcgcaattgccgcgccgctccgagctgtgccgcccggacatgcgcgggctgctcaagccggtggcggccaacgtcgaccgcatcgtcatcgtcttcgccccgcgtcccgaaccgcacgccaacctgatcgaccgctacctgatcgccgccgaacatgccggcatccagccgctgctgctgctgaacaaggccgacctggtcgacgagagcaatgccgaaggcatcgatgcgctgctgaatgtctaccgcaccctgggttacccgctgatcgaggtgtcggccttcaatggcctggcgatggacgaactgcgcggcgcgctggacggtcacgtgagcgtcttcgtcgggcagtccggggtgggcaagtcgtcgctggtgaatgccttgttgccaggtgtcgacacacgtgtcggcgacctctccacggtgaccggcaagggcacccataccaccaccaccgcgcgactgttccattttcccggcggcggcgacctgatcgactcgcccggcatccgtgagttcggcctggggcacgtgtcgcgagacgatgtcgaggccggtttcatcgagttccgcgacctgctcgggcattgccgcttccgcgactgcaagcacgaccgtgaaccaggttgcgccctgctccaggccctggaggacgggcacatcatgccgcaacgcatggccagctaccggcacattctggcaagcatgccggaaacggactactga

SEQ ID NO: 363824 - DNA, 543 bp, Pseudomonas aeruginosa; identical to SEQ ID NO: 318137

SEQ ID NO: 363825 - DNA, 1086 bp, Pseudomonas aeruginosa
atgaccccccagcctctggccgacaacctttccccgccggaccccacccgcctcgcccagtccatcaaggactggggccgcgagctggggttccagcaggtcggtatcagcgacgtcgagctgggcgagcacgaagcgcacctgcagcgctggctggaggccggctaccacggcgagatggactacatggcggcgcacggcagcaagcgctcgcgacctgccgagctggttcccggcacgctgcgggtgatctccctgcgcatggattacctgcccggcgacacgcgcatggcgcaggtcctcgcgacgccggaaaaagcctacgtctcgcgctacgccctcggccgcgactaccacaagctgatccgcaagcgtctgcaacaactggccgagcgcatccaggccgaagtcggcccgttcggtttccgcgccttcgttgacagcgcgccggtgctggaaaaggccatcgccgaacaggccggcctcggctggatcggcaagaacacgctggtgctcaaccgcaaggccggcagttacttcttcctcggcgagctgttcgtcgacatgccgctacccgtcgacccggcgatggacagcgagcattgcggacgctgctcggcctgcctggacatctgcccgaccgcggccttcgtcggcccctaccggctggacgcgcgacgctgcatctcctacctgaccatcgagtacaagggcgcgattccgctggagctgcgaccactgatcggcaaccgggtattcggctgcgacgactgccagatcgtctgcccatggaatcgcttcgcccgccccaccgggcagggcgacttccagccgcgccacagcctggacaacgccgaactcgccgaactgttcctctggagcgaggaggagttcctcggccgcaccgagggttcgccgctgcgccgcgccggctacgagcgctggttgcgcaacctggcggtggggctgggcaacgcgccctcgaccatcccggtgctggaggcgctgaaggcgcgccgcgggttcccttcggagctggtccgcgagcacgtggaatgggccctgcggcgccacggggaaacctag

SEQ ID NO: 363826 - DNA, 1509 bp, Pseudomonas aeruginosa
atgaccatgaccttccagcacgacgacctgccactcgccctctattccgccgcccaggtgcgcgacctggatgcgcgcctgatcgccgccggcacgccgggcttcgaactcatgcagcgcgccgcccacgccgcctggcgtgccttgcgccgccgttggccggaggccgcggcgctgacggtgctcgccgggcacggcaacaatgccggcgacggctacctgatcgcggcgctggcgcaacgtgcgggttggcgagtgcgggtgctggcggtcgcggcgccgcagcggcttgccggcgacgcggcgcaggcgcatgccgccgcgctggcgaccggggtcgtggtggagccctggagcgagtgcgccgtgctcgagggcgtagtagtggatgcattgctcggcaccggcctggcaggtgccgtgcgcgagccctttgcgcaggccatccgcctggccaacgccgccgacctgccggtgctggcggtggatattccttccggcttgagcgccgacaccggtgcggtattgggggaagcgatcagggcggatctgacagtgactttcatcggcctgaagatcgggctgttcactggcgaggcgccggcacgggtcggcgagctggtgttcgacgaactcggcagcgacgccgtcgtgttgcaagggctccagccccgggcccaccgcctggcacgaaatgccctgccgagtctggcagcgcggccgcggaccgcgcacaaggggctgttcggccacctgctggtggtcggcggcgacaccggcatgggcggggccgtgctactggccgcggaaagcgccctgcgctgcggcgccgggctggtctcggcggcgacccgcgtcgaacatgtgccggcgttgctgagccgttgtcccgaggtcatggcccatggcgtggcgtcggcgaaccaactgctggcccttgccgaacgcgccagcgtgctgatgctcggtcccggtcttggccagcgcgcctgggggcgtagcctgctgagcgctgtccggtcgcgaccgttgccgcaggtctgggatgccgacgcgttgaacctgctggccctggaaccggtcggagcagggccgcggacatggattctgacgccacatcccggcgaggccgcgcgcctgttgggtcgctcgaccaccgaggtgcaggcggaccgcccggcggcggcgctggaactggcgcgtcgctaccaggcggtggtggtgctgaagggcgccggcagcctggtcgccgcgcccgacggacgacttgccgtctgttcccaggggcatccggcgatggctggtgccggcctgggtgacgtgctgtcgggcatcaccggtgccttgctggcccagcgcgtggaggcgttcgaggcggcctgcctggcggtctggctgcatgccgccgccggtgagcggctcggcgcccagggtcgcgggctggcggcgaccgatctcatacctaccgttcgtcagttgctcgaggagtgcagtccgtgtctgaagtga

SEQ ID NO: 363827 - DNA, 468 bp, Pseudomonas aeruginosa; identical to SEQ ID NO: 318140

SEQ ID NO: 363828 - DNA, 1428 bp, Pseudomonas aeruginosa
atgggttggggcttgcgtctgcggacgttgttgactggggtgatgattctgctggcctgccaggtcggcgaggttctggccgccgcgcaaatcaagagcgtgcggatctggcgcgctccggacaacacccgtctggtcttcgatctctccggtccggtgcagcacagcctgttcaccctggccgctcccaaccgtatcgtcatcgacgtcagcggcgcccaactggcgacccagctcaacggtctcaagctcggcaacaccccgatcaccgcggtgcgctccgcccagcgcacgcccaacgacctgcgcatggtcctcgacctgtcggcgcaggtcaccccgaaaagcttcgtcctgccgcccaaccagcaatacggcaaccgcctggtggtcgatctctacgaccagggcgccgacctgaccccggacgtgcccgcgacgccgaccccgagcgtgccggtcaccccggtgacgccgacccagccggtggccaagctgccgctgccaaccaagggcggcacccgcgatatcgtcatcgccatcgacgccggccacggcggtgaagaccctggcgcccttggcccgggcgggttgcacgagaagaacatcaccctgtcgatcgctcgcgagctgcaacgccagatcaaccaggtgcgcggttaccgggccgagctgacccgtaccggcgactatttcatcccgctgcgcaagcgcaccgagatcgcccgcaagaagggcgccgacctgttcgtctcgatccatgccgacgccgcgccgagccgcagcgccttcggtgcctcggtgttcgccctgtccgaccgcggcgccacttcggaaaccgcgcgctggctggccgacagcgagaaccgttccgacctgatcggcggcgatggcagcgtcagcctcggcgacaaggaccagatgctcgccggcgtgctgctcgacctgtcgatgaccgccaccctctcgtcgagcctggacgtcggccacaaggtactgaccaatgtcggccgcatcacttcgctgcacaagcgtcgtgtcgagcaggccgggttcatggtgctgaagtcgccggacatcccatcgatcctggtggaaaccggcttcatctcgaacgtcaacgagtcgcgcaagctggctagcgccagccatcagcaggccttggcgcgttcgatcaccagcggcatccgccagtatttccagcagagcccgccgcccggcacctacatcgcctctttgcgcgcccagggcaagctctccatggggccgcgcgagcacgtggtgcggcccggagagaccctggcgatgatcgcccagcgctatgaagtgagcatggccgcgctgcgtagcagcaacagcctgtccagcgacaacctgaaagtcggccaggccctgtccatcccgagcaccgccctggcggcccagtga

SEQ ID NO: 363829 - DNA, 1902 bp, Pseudomonas aeruginosa
atgagtgaagcaccgcgtatccagctgctgagtccgcggctggcgaaccagatcgccgccggtgaggtggtcgagcgtcccgcctcggtggccaaggaactcctggaaaacagccttgacgccggttcccggcgcatcgacgtggaggtcgagcagggcggcatcaagttgctgcgagtgcgcgacgacggtcgcggcatccccgccgacgacctgccgctggccctggctcgccacgccaccagcaagatccgcgagctggaagacctggagcgggtgatgagcctcggcttccgtggcgaggcgctggcctcgatcagctcggtagcgcgcctgaccatgacctcgcgtaccgccgacgccggcgaagcctggcaggtggaaaccgagggccgcgacatgcagccgcgggtacagccggcggcgcacccggtggggaccagcgtcgaggttcgcgacctattcttcaacaccccggcgcggcgcaagttcctgcgtgccgagaagaccgagttcgaccatctgcaggaggtcatcaagcgcctggcgctggcccgcttcgacgtggctttccacctgcgccacaacggcaagaccatcttcgccctgcacgaggcgcgagacgagctggcccgcgcgcgccgggtcggcgcggtgtgcggccaggcattcctcgagcaggcgctgccgatcgaggtcgagcgcaacggcctgcacctgtggggctgggtcggcttgccgaccttctcccgcagccagccggacctgcagtacttctatgtgaacgggcgcatggtgcgcgacaagctggtcgcccacgcggtgcgccaggcttatcgcgacgtgctgtacaacggccggcatccgaccttcgtgctgttcttcgaagtcgatccggcggtggtggacgtcaacgtgcacccgaccaagcacgaagttcgcttccgtgacagccggatggtccatgacttcctctatggcaccctgcatcgtgcgctgggcgaggtccgtcccgacgaccagctcgcgccgcccggggcgaccagcctgaccgagccgcgtccgaccggcgctgccgccggcgagttcggcccgcagggcgagatgcgcctggccgagagcgtgctggagagtccggcggcacgggtgggctggagtggcggctcatcggcctccggcggctcctccggctattccgcctatacccggccggaggcgccgccctctctggccgaggccggtggcgcctacaaggcctacttcgcgccgttacccgcgggcgaggcgccagccgcgttgcccgagagcgcccaggacatcccgccgctgggttacgccctggcgcagctcaagggcatctacatcctcgccgagaacgcccacggcctggtgctggtggacatgcacgcggcccacgagcggatcacctacgagcgcctcaaggtggcgatggccagcgaaggcttgcgtgggcagccgttgctggtgccggagtcgatcgcggtcagcgagcgcgaggcggattgcgcggaagagcattccagctggttccagcgcctgggcttcgagctgcagcgcctggggccggaaagcctggcgatccggcagatccctgcgctgctcaagcaggcggaggcgacccagttggtgcgcgatgtcatcgccgacctgctggaatacggcaccagcgaccgtatccaggcgcacctgaacgagttgctcggcaccatggcctgccatggcgcggtgcgcgccaaccggcgcctgaccctgccggaaatgaacgccctgttgcgcgacatggaaatcaccgagcgcagcggccagtgcaaccatgggcgtccgacctggacccaactgggcctggacgagctggacaagctcttcctgcgcggacgctga

SEQ ID NO: 363830 - DNA, 972 bp, Pseudomonas aeruginosa
atgtcttccctgcctcccgccatctttctcatggggccgaccgccgccggcaagaccgacctggcgatggcgctggccgatgcgctgccctgcgagctgatcagcgtcgactcggcgctgatctaccgcggcatggatatcggtacggccaagccttcccgggagctgctggcgcgctatccgcaccgcctgatcgatatccgcgacccggcggagagctattcggccgcggaattccgcgccgacgccctggcggcgatggccgaggccaccgcgcgcggcaggattcccctgctggtggggggcaccatgctctattacaaggcgttgctcgagggcctggccgacatgcccggcgccgatcccgaggtgcgcgcggcgatcgaggccgaggcccaggccgaaggttgggaggcgctgcaccggcaactcgccgaggtcgacccggaatcggctgcgcgtatccaccccaacgacccgcagcgactgatgcgggcgctcgaggtgtatcgcctcggcggggtgtcgatgagcgacctgcgtcgccggcaaagcgctgaaaaggcggattttgacgcgtcaggcaggaatcaattgccgtatactgtcgctcagctggcgattgctcccgagcagcgccaggtgttgcacgcgcggattgcgcagcgttttcgccagatgctggaacagggtttcatcgccgaggtcgaagcactgcatgccagaagtgacttgcatgcaggattaccgtctattagagccgtgggttaccgtcaggtgtgggattacctggatggcaagctgtcctacgctgaaatgaccgaacgcggcatcatcgctacccgccagttggccaagcgccagttcacctggctgcgaagctggagccatctacactggatggacagcctagcaggtgacaatctgccgcgtgccttgaaatacctgaaaacggtctccatattggcctga

SEQ ID NO: 363831 - DNA, 249 bp, Pseudomonas aeruginosa; identical to SEQ ID NO: 339713

SEQ ID NO: 363832 - DNA, 1260 bp, Pseudomonas aeruginosa
gtgcatctggaagggcagaaccccgaggcgcgtgaagacccgcaggagttccaggagctggtgcgttcggccggcgcggaaacggtggcattcgtcagcgtctcccgccaccagccgagcgccaaatatcttatcggcagtggcaaggtcgaggagttgcacgacctggtcaaggccgaaaacgtcgagctggtgattttcaaccacaccttgacgcccagccaggagcgcaacctcgagcgtgcgttcgagtgccgcgtactcgaccggaccgggctgatcctcgacatcttcgcccagcgcgcacgtacccacgaaggcaagttgcaggtggaactggcgcaactggagcacatgagcacgcggctggtacgcggctggacccacctcgaacggcagaaaggcggtatcggcctgcgcggtccgggcgagacccagctggaaaccgaccgacgcctgctgcgcgtgcgcatccgccagatcaagcagcgcctggagaaggtccgcagccagcgcgagcaggctcgacgcgggcgcaagcgcgcggatatcccggcggtctccctggtcggctataccaacgccggcaaatcgaccctgttcaattcgctcaccgcctccgaggtgtatgccgccaaccagttgttcgccaccctcgaccccaccctgcgtcgcctgcaactggacgatctcgggccggtggtgctggccgacacggtgggcttcatccgccacctgccgcacaagctggtggaggccttccgcgctacgctggaagagtcgagcaacgccgacctcctgctgcacgtgatcgacgcctacgagcccgaacgggatgcgcaggtcgagcaggtgctggcggtgctcggcgagatcggcgccaacgaattgccgatgctcgaggtctataacaaggttgacctgctaccctcggtcgagccgcacatccagcgcgacgactccggcaagccggtgcgcgtctggctgtcggcgcagaccggcgaaggcctcgacctgttgcgccaggccatcgccgagctgcttggcgaggacctgttcgtcggaaccttgcgcctgccccagcggctcgggcgcctgcgcgcccagttgttcgaactgggcgcggtgcagtccgaggcgcacgatgaggagggttgtaccctgctgcaggtgcgcctgccgcgggccgagttgaaccgcctggcgagccgcgctggctggcagccggcggagttcgttgcgcaacacactttgcaataa

SEQ ID NO: 363833 - DNA, 1203 bp, Pseudomonas aeruginosa
atggcttggaacgagccgggtgacaactcgaacaacaacgatcgagacccgtggggaggccgccgcggtggtggtggcggcggtggtgaccgcaaggggccgcccgacctggatgaggctttccgcaagcttcaggacagcctgaacgggctgttcggtggaaaaaaacgcagtggcaacggttccggctccggttccggcggcaagggcggtggcctgggcctgttcggcatcggcctggcgatcctcgccgtgctctggctgtacaacgccatctatgtggtggacgagcaggagcaggcggtcatcctgcgcttcggcaagtattacgagacggtcggtcccggcctgaacttctacttcccgccgatcgacaagcgcttccaggagaacgtcacccgcgagcgtgcgtacagcaagcaggggcagatgctcaccgaggacgagaacatcgtcgaagtgccgctgaccgtgcagtacaagatcagcaacctgcaggacttcgtgctcaacgtcgaccagcccgaggtcagcctgcagcaggcgaccgagagcgcgctgcggcatgtcgccggctccaccaccatggaccggatcctcaccgaaggccgcgagcagatggcgaccgaggtgcgcgagcgcctgcaacgcttcctggatacctacaggaccggtatcaccgtgacccaggtgaacatccagagcgcccaggcaccgcgtgaggtgcaggaagcgttcgacgatgtgatccgggcccgcgaggacgagcagcgcgagaagaaccaggccgaagcctatgccaacggcgtggtgccggaggcacgtggccaggcccagcgcatcatcgaagaagccaacggttaccgcgacgaggtgatttcgcgcgcccagggcgaggcggatcgcttctccaagctgctggtggaatatcgcaaggctccggaagtgacgcgcgagcgtctgtacctggacaccatgcaggaagtcttcagccagaccagcaaggtgctggtgaccggtcagcaggggcagaacaacctgctctacctgccgctggacaagatgatcgatggtcgtaacgccgcgcccgctacgggggccggtgcttccgccggtggtggcagcgccagcgcttccgacctggggtcgcggatcgtcaacgatctgcgccagcaagacgcgcgtacgagggagagccgctga

SEQ ID NO: 363834 - DNA, 870 bp, Pseudomonas aeruginosa
atgggcaacaagtctttgatcgctctgatcgtcggtgtcgtcgccgccatcgtcctgtggaacagcgtctacgtagtccagcagaccgagcgcgcggtcatgttgcgcttcggccgggtggtcgagtccgacgtcaagccgggcctgcacttcaagatcccgtacgtcaaccaggtgcgcaagttcgacgctcgcctgctgaccctggatgccccgacccagcgcttcctgaccctggaaaagaaagcggtgatggtggatgcctatgccaagtggcgggtggcggatgccgagcgcttctacaccgctacctcgggcctcaagcagatcgccgacgaacgcctgtcgcggcgtctcgaagcgggtctgcgcgaccagttcggcaagcgtaccctgcatgaagtggtatcgggcgagcgcgacgcgctgatgggcgacatcaccgcttcgctgaaccgcatggcgcagaaggaactgggtatcgaggtgatcgacgtgcgggtcaaggccatcgacctgccgaaggaagtcaaccgcagcgtcttcgagcggatgagcaccgagcgtgagcgcgaggcccgcgagcaccgcgccaagggtcgcgaactggccgaaggcattcgtgccgacgccgatcgccagcgccgggtaatcgttgccgaagcctaccgcgagtcggaagagacccgcggtgacggcgactccaaggctgccgcgatctatgccaaggcctacaaccaggatccggagttctattccttctaccgtagcctgaaggcgtatcgcgaaagcttcgccgagaagcgcgacgtactggtgctcgatccgagcagcgagttcttccgctatctgaacaaggccaacaagtaa

SEQ ID NO: 363835 - DNA, 234 bp, Pseudomonas aeruginosa; identical to SEQ ID NO: 318149

SEQ ID NO: 363836 - DNA, 1185 bp, Pseudomonas aeruginosa
atggcaacggtagaccgctggctgctgccagatgggatcgaagaggtgctgcccccggaggcggcgcgcatcgaagcagcccgccgtcaggtgctggatctgttccaccgctggggttacgagttcgtcgtgaccccgcatatcgaatacctggagtcgctgctcaccggcgcggggcaggatcttgacctgcgcaccttcaaggtgaccgacccggcgtccggccggctcatgggtttccgtgccgacattacgccgcaagtggcgcggatggatgcgcacagcctgcgccgcgagggaccgagccgcctgtgctatgccggcagcgtgctgcatgcgcagccgcgcgcgctgtccacttcgcgtagtccgatccagctgggcgccgagctgtacggcgatccgagccctgccagcgatgtcgaggtgatcagcctgatgctggaaatgctcgagatggcggaagtgccggacgtgcacatggacctcggccatgtcggtatctaccgcggcctggcgcgcgcggcagggctgtccggcgaagtcgagcagcagttgttcgatgccttgcagcgcaaggcggtggacgaggtcgaggcgctgactgcagacctgcctgccgagctgcgcggcatgttgcgtgcgctggccgagctatgcggcggccgcgatgcgctggagcagggccgtgcccgtctggcggcggcgccggccgatgtccaggtggcgctgaacgagctgatcgagatcgccgattcgctggccgggcgcttccccggcttgccgctgtatttcgacctcggcgagctgcgtggctatcactatcacaccggcgtggtgtttgcggccttcgtgcccggcgttggccagtccatcgcccagggcggtcgctatgatgatatcggtgccgatttcgggcgcgcccgcccggccaccggtttctccaccgatctgaaaagcctggtcactctcggccaggcccggttggaccaggctgtatcgggtatctgggcgccggccgaaggggccgggctctggcaggtggtgcaacgactgcgccgcgacgggcagcgtgtcgtccaggctctgcccgggcaggatgcggcttctgcgcgcgaggcgggctgcgaccggcagctggcgctgcgcgatggcaattggcaggtggcgccgctggcgtcctga

SEQ ID NO: 363837 - DNA, 1293 bp, Pseudomonas aeruginosa
atgggtaagaatgtcgtagtcctgggcacccaatggggtgatgagggcaagggcaagatcgtcgacctgctcaccgagcaggcggctgccgtagttcgctaccagggtggtcacaacgctggccacaccctggtgatcgatggcgagaaaaccgtcctgcacctgattccatcgggcatcctgcgcgaaggcgtgcagtgcctgatcggcaatggcgtggtgctggcgccggatgcgctgctgcgcgaaatcaccaagctggaagagaagggcgtgccggtgcgcgagcgcctgcgcatcagtccttcctgtccgctgatcctgtcctatcacgtcgccctcgaccaggcgcgcgagaaggcccgcggcgaagccaagatcggcaccaccggtcgtggcatcggcccggcatacgaggacaaggtggcacgtcgcggcctgcgcgtcggcgacctgttccaccgcgagcgcttcgccgccaagctgggcgagctgctggactaccataacttcgtcctgcagcactactacaaggagccggccatcgacttccagaagaccctggacgaggcgatggagtatgccgagctgctcaagccgatgatggccgatgtcgccgcgaccctgcacgacctgcgcaagcacggcaaggacatcatgttcgaaggcgcccagggatcgctgctggacatcgaccatggcacctacccctacgtgaccagttccaacaccaccgctggcggtaccgccaccggttccggcttcggcccgctgtacctggactacgtactgggtatcaccaaagcctataccactcgcgtcggctccggtccgttcccgaccgagctgttcgacgacgtcggcgcctacctggccaagcgcggccacgagttcggcgccaccaccggtcgcgctcgtcgctgcggctggttcgatgccgtgatcctgcgccgcgccatcgagatcaacagcatctccggcctgtgcctgaccaagctcgacgtgctcgatggcctggacgtggtgcgcctgtgcgtcggctacaagaatgccgatggcgatgtgctggaagcgccgaccgatgccgacagctacatcggcctgcagccggtctacgaggaaatgcccggctggagcgagtcgaccgtgggtgcgaagaccctggaagagttgccggccaacgcccgcgcctacatcaagcgcgtggaagagctggtgggtgcgccgatcgatatcatctccaccggtccggaccgcaacgagaccatcatcctgcgccatccattcgcctga

SEQ ID NO: 363838 - DNA, 747 bp, Pseudomonas aeruginosa
atgagtcagtgggaaaaggtctacggcgtgcatgccgtggaagcgttgttgcgtcatcacccgaagcgggtcaagcagttgtggctggccgaggggcggcatgatccgcgggtccaggtgctcaccgagctggccgccgggttccgtattccggtagggcagcgcgaccggcgcgaactcgacgagtgggcggaaggcgtccaccagggcgtggtcgcggaagtcagccccagccaggtctggggcgaaaacatgctcgaggaactgctcgagcggagcgagggcgtgccgctgctgctggccctggatggcgtcaccgatccgcacaacctcggcgcctgcctgcgtaccgccgatgcggcgggggtgcaggcggtgatcgtgcccaaggacaagtccgcgaccctcaacgccaccgtgcgcaaggtcgcttgcggcgccgccgaggtgatcccgctggtggcggtgaccaacctcgcgcgcaccctggaaaagctccagcagcgcggcctgtgggtggtcggcaccgctggcgaggcggacaagaccctctaccagctcgacctcaaggggccgaccgtgctggtgatgggcgcggaaggcaagggcatgcgccggctgacccgcgagcactgcgacttcctcgccaggttgccgatggccggcagcgtcagcagcctgaacgtctcggtcgccaccggcgtctgcctgttcgagatcctccgccagcgcaccccgctggagtga

SEQ ID NO: 363839 - DNA, 351 bp, Pseudomonas aeruginosa; identical to SEQ ID NO: 354570

SEQ ID NO: 363840 - DNA, 225 bp, Pseudomonas aeruginosa
atgaagcttatgcgcattggggtcgacctggccaagagcgtgttccagatccacggcgtcgactgcaagagaggcctgtctggcggcagcggttatctcgcgaacgctggcttcaagcgatcctggagaaggccgagcccgattgtgagattggcttggagagttgcggtggagcccatcattgggctcggcaacttgaggcgcgtggatttcgggtcaagttga

SEQ ID NO: 363841 - DNA, 810 bp, Pseudomonas aeruginosa
ttgatcgcgccccagttcgtgaagccctacgtgaagagcaacaagaacgacgccaatgacgcggaagcaatctgtgaggcaatgagccggcccagcatgcgcttcgtggcgatcaagacggttgaacagcaggacattcaggcggcacatcgcattcgagcagggttgattgagcaacgcaccgccaaggccaaccaggttcgtggcctggtcgcagagtacggcctgattgcaccgaaagaactgtgtgcattgcgacgcgccattccctgctggctggaggatgcagacaacggtttaacgctgcgctttcggcatttgctggatgggttatggcgcgacttgcgcatgctggatgaacgggtcaaggagctggattgcgagatatccgggattgcggccaatgagtcgagcgctcagagcttgcagcaactgcgcggcgtcggcccgatgatcgccaccgccctcgtcgcggccatcggtgacacccgtcagtttgccaatggtcgacagtttgctgcctcgctgggattgacaccgaggcagcacagctccggtgacaaagatcgactgctgggcatcagcaaacgcggcgatgcctacctgcgaacactgatgattcatggcgctcgatccgtgctgcgcacagcttcatccaaggatgaccggctgagccaatgggccgtccgcttggctgaacgatcgcacaccaacgtggccgccatcgcgctggccaacaagaccgcgcgcatggcctgggcgatgctgcgcgatggcactgcctaccagccggaacggactgcggcctga

SEQ ID NO: 363842 - DNA, 663 bp, Pseudomonas aeruginosa
atggcatctggcagcgaaaatcatggttcgcagcgtgctggagaaccttggctgcggggccaccttggagatgtctggagttggaaactccgggagatggcaagccgacgtttgggcagagtgcgatggcgtcaagctggccttcgagatccagcgctcatatcagtcattgcgcgattatcgccgccgtcaagaacgctaccgggtcgagggtatcaaagccttgtggttgatgcggcacgaccgctacatgaccctgaccaagagcacggcaaaagagcgcctgcgggcagagtttggagtcaaattcccccccgagggcgcttcgggccttgtttcacggatctccctgtagtgcaactacaattggaccctgagcccggcgtccgcggagcggggttcttttcggctaccatcccgcaactgctcgaagcggcgctgaccgaccgcctcttgtgcatcgatggtctgtggtgcatcgacaacctggacgccatgctgcgtattgccgaacagtcgcggacgcaagcctccactatgcgcagcgcgaagccccccctcggctttatacgcgcgctgtgctcagcgcgtaaaagagccttattggccgactgggagtggctatggattggacctgcggcgtcttgtgctgattgcacctag

SEQ ID NO: 363843 - DNA, 1983 bp, Pseudomonas aeruginosa
atgaacctggcccagctcatcaatccgataaccgatggcgatgtggagtgggtcaccaagctcatgaagctggaggcgttggacgagcctcgacgcagcttcctgaaatccatgagcacactggacgtctctgcttgccctggtagcggcaagaccacattggtggtggccaagctggctatcctcgctcgccattggaagagtcgaactcaggggatctgcgtcctttcacataccaacgcagctcgggaggaaattgagcatcgcttgggaggctcggagattgggcagcgcctgcttcgctacccacattacatcgataccatccatggcttcactgggcgattccttgcttcaccgtggctgcgatcgaagggcattccactcactgccatcgacgatgaacttacgcatgccgcccgccggaaagcactgaaaccctgggaatacgcgggcatgaagaaaacgttcgaatcggcgttcatcaaagtggaaagtttgcgcttaaaaactgtcgatttcgacaacccgctcaccggttggagtctgaaattcggggctcatacggacacctataaaaatgcctgcaaagcgatgactcatgcagcgaagacagggcatttttgcttcgatgaagtgttcgtcttggctgatgcgctgctggttgacgagcctgaggtagcgagcgctttgcgagctcgctttccctgtgttttggtcgatgagatgcaagatacgcggtacgagcaggccaacatcttgagcaaagttttcccgcgtcaggatccagatgtttgtgtcatcagggttggggatcccaaccaggaaatcttcgaagtgaaggtggagctaccagagccgtttcctgatcaatcgagcaccatggaaatcgctagtagcttccgtttcaatcagtcgatcgcgtccatcgccaatccctttgcctacctgccgatcactggcggcctggtagggttacggcagagtggtgcaaaccagcctgctcccaacaccatcatcgtcttccctgatggcgacgtgagtaatgtcctggatgcctatgggcagctgttgatccagcacctacctgcaggtgtccggacatcaggtgtctatgcggttggagcggtacatcgactggagaatgacaagccagagcactaccccaaagcggttgagcattactgggctccgtatcagtcagaggttaataagccttcgttcaagccgcgtacgttttcagagggtgtgcacatcgctcgtcgctatgttgctagggatgcaactgcggctctaggcgtggaactgatagcgtcctgcctattaaacctggtgcgcctggcgtttcccagggacgcgattgtggccaggtctcgcagtcatcaatgtgtcgaacagcatcttgccggtcgtgctggagtggtcgccgcttatcgcggatggctcgaacggctgttgttcagccccgctggtattacccaggcggaatgggatgcaacggttgcctcaggcttgatggatcttgctgcggatttggtcttttctgatcaactgctggcagcagcggatgctgaagcctatctcgcctggtcaactgcccctctggtagaagacccaggtgacaacggtggtgcgcttctcaacacatacaggtttgaggtcggttctgagagcgtcaacatccggttgtcttcgattcacgccgagaagggtaaaacgcatgctgccaccctgattctggaaacgtacaaccgcactcacttcgtcaacaagctcttgccgtggctcgaaggcaaagcctcagctgctaagcgtccgaacgaggccgcaaagaagagcatgatgctcatgtacgtagggatgaccaggccgacccacatgctctgtctggccatgcgaaaaagcgcgatgggtgagggtaaagccgagaccaagaggagggcagcactgcagcaggcaggctgggcaattatcgacatttga

SEQ ID NO: 363844 - DNA, 2064 bp, Pseudomonas aeruginosa
gtgtatctatccgtcttgaaactagaaaatttccgccagtttggccaggctaactgcggcttggaagtcacctttaaccgaggtgttaccgcgttggtcggggaaaacgatgcaggtaaaacagccgtcatcgatgcgatccggcatgtactgcaaacccgtgatgccgaatacctgaagcttcaactccaagacttccatatcgatgacagcggagctcaggccagcaccatcacgctgaggtgcacattagatggtttgagtaaggccgaactgggagcgttcgctgagtatgtcacctacaaaaacggcgtaggtcgtctacacatccattggtcagccacacgtgtccaaggctcaactctaacccgcagatgggtggatatttcagtgcgttctggtgagaacggggaagggccgtccctggatgcgggggcccgtcttctgctcgccactgcgtacttgaaaccattacgtgatgcagagcgcgagatgtcgccaggccgcaattcccggctctctcaggtcttgagcagcttcccaagcatcgatgtcggaagcgctttcgataccgcgaccccgcctgctagccccgtcgatgcagaagcgttgagcattgctggcatgggcgactacatgcgctatctggtgaataagcacagcgctatcgtcagtgctgaacatgccattaaccagaactacctggccccgctttctcttgcgggacagcctctgacaagccgtatcagtttcggcgagggggggaccgaggatgcgaggctcaaacagatccttgagcgcttggagcttgggttgcttgatcacgcttcgggcgagtcccggggcgtttatggtttgggctcaaacaacgtactgtttatggcctgcgagctcctcctgcttggaaaggagccagacggcctgccgcttctattggtagaagagcctgaggctcacctgcacccgcagcggcaactacagctcatggagtttcttgagaaggccgcgaaacctgcggacggtttgagaccggttcaggtgattctgaccactcacagcccgaatctgagctcaaagattccgatccagaatcttattctcatgcatcgagggcgcgctttctcgctggctgaagatcagacctgcttgggcgccgatgactatcgattcctcagtcgcttcctggacgtcacgaaagcaggattgttcttcgccaaaggactattggtggtggagggcgatgctgaggcgatccttctgccagcccttgcgcgtaggcttggaaaagacctgaccaagcatggtgtgtcggtgatcaatgtgggcggcgtggggttgcgtcgctactccaagatcatgcagcgccgagatacgagcaagggtgaaatctccattccgacggcctgcattaccgacatggatgtcatgcccgactgcgcgcctgagattcacgaattggtaacggggccaacagatcccaagtggaacagtactacccgtcgctggaaggctgtgcgagatttcggcgcgactgctgtagagcaaaaagccggtatggctgagcaccgccagaagcgaatggcaagcgacgggcagtgcgttcgaaccttcgttgctgaccactggacacttgaatatgacctggccttttccggtcttgcgcgggaagtgcacgcagcggcttatctcgcgatcaacgaggaaaaggttgatcagggaaaggtgactagagcagctcttttggttgaagctgaaaccgcattcaaggccatcgagacagcccactccaccaaggaggcgaggtgttccgctgtctacaaactggtcaagaaagcctccaaaaccatcactgcccagcacctgatcgacctgatagaagagcgtttcgaagctaagaagctagatgcggcaactctgcgtggctcgctatcaaagtctgtgattcacgcgatcgaatacgccaccagtggcttagctgtaccgccgacggggtctacgctcacaccggttgccatgggcacggtagctggcacctcagcggctgttgaggagagcgaggaatga

SEQ ID NO: 363845 - DNA, 504 bp, Pseudomonas aeruginosa
atggcagaagacaacctcaacacggccgccgggtgccgcctcggtttcggcacgaagaccccggcagacgacaaggcaggctacgaagccgacacctatgtggacgtcggcgagatcgaagacctcggcgagttcggcgataccttcagcaacgtgaacttcaccgcgctgagcgatggtcgtgtgcgcaagtacaagggcaccgcggatgccggcgacatgaccctgactgtcggtctggacaacggcgatgccgggcagactgcggtcaaggctgctcacgcagaccgcaccaagggtaactacaacgtgaaggtcacgctgaacgacggcgacccgaccgcaaccccggtgatcctgccgaccacctactacttcggtgtgaaggtcatgaacaacaccgttgctgccggcagtgccgacaacgtggtgcgccgcaacatgaccttcggcatcaacaccccgatcctcgaaatccccgccggcccggcggcaggcccgtaa

SEQ ID NO: 363846 - DNA, 1968 bp, Pseudomonas aeruginosa
atgataatttcactcctcataaggaattacaaaacatatcaaggcatcaactacataccactctcgagaggaaagtcgtttagcgcacttgtcggcgagaatggatcagggaaaagctctatactcgaggctctagacagcttcttcaatggaaacgagtggaatattcaccacagcctgacaaaaggattttcaacaagagagccctttatatgcccgatattcttaataagaaaaactgaactatcaaagctctccgagcaatggttcttagaaaaaattagtgaaattgcctggagagcaaaaagtacagaattcaacccttcaaataaaactcatgccgagctattctgcagccatagagataagatccttcaagaaggatacggacctgatgagtactacctaatacccttcggacttcaaaaagagcatcgaagcgcaacaccaaaaccttttttcgctatatttggaagccacaccgagtttgacaaagcaacccagcactcgacttctgacaaggccattaccgagctctatgaagagataaaacgccattacaactacatctatctgccatcagacatagacttcaaagaatatacaaaaatagaagggcgtactgttcaagcccttttgggccaaaaggtagaaacagtagttagagacttattcaaaaaacaagatatccaaaaaataaacaacaatctaaacgaattcctagacaagatatccagaacactagaagagtacatatacaaaaaaccagcacaaaaacaaaacctagtaaaccaatcacacctatcatcgaaagtaatcgaagcttactttgaatcaaaggttcttaacaaaaaggtaggaaaagatacagtacctgtaggagatctaagctcaggagaaaaacgacaagccctgatagatctagcaaaggcttttttaacaaattcaaaacaatctacagatcaattaacaatactagcaattgatgaaccagagttgtcactccatgtttcatcttgctttaagcagttcgagaagctacgagccatagcagagtctgggatacaggttctaataaccactcattggtatggcttcatgcccataatatctcaaggcgtcgctgtctattgcgtcaaatcggaaagcgagccggtactactagacttgagatgcttccgcgaagagataaaaaaactacgatcatctacagatggccaactaccagtcgaagtagaattaaagggcataaacgatttaattcagtctatagttgcctccataacaggcgtcacttactcatgggtaatatgcgagggctcagcagacaaaatatatctagaccactacttaaaagacactcccactttagttttgccagttggcggatcacccaccgtaaagaaaatatttaactatctactattagccctagatggctcaagcaacgacatccaagggaaagtatttttattagtggacaccgacaagaagttcgaagcattcgaggctaaagactctataaagcaaataaacattcgaagactacaaaactgcgagtcagaattaaaaacaaagttactcaagacttccgacaccagctttcaccctccaactgtaattgaggacacccttaatccagaaacttatgtagaaacgctaaggagctttgaaaaagaccccaatttcggagcatttataaccaaacttgaagcagatttatctttgaggaacgctgaatggccagcatcactagcattagacctaaagccatcagacaggagaatagttgaagacctcttcgaacaacctggctttaaagtaaaattcgcactaaagtatgtagagctaaataaagaaagaaaaaaacccagctggatcacggagattatctccttcttagagactacaaatacaaaggccaggcgcaggtctaaacccagtcaagcaaagccatcgaagtcatag

SEQ ID NO: 363847 - DNA, 645 bp, Pseudomonas aeruginosa
atgaacacgccgcaatctccccggcgtccaactgccgcagtggtgatgcagagcctggtgtggctatggctgatctgcctcagcgtgctggtggtcctgggccaccagacgatgagcaacccggcggagcaggagagactcgatgcccgcctgcaacgccttgaagcgcagacgaccggactggccgagaccactcaggacctgcagcagcggcccgcggccgccaccgccgcaggcctgcaggacacccgccatgccctggaggcgcgcatcgcccaggtcgagcaggggctgagcggccatgctgcggcagacgacctccaggcgctgcgcgcggacgtcgagcagatcaaggcgcgccagacggcgacgcgaaccgctgcatcggcccggccgcgtccacagaaccaacccactgcggccaggcccgaaccaccgccgctgccgttccacgtcgctggcgctgaactgcgggccggtcagcgcagcgtgtccgtcgcaccgaatgacggggacttcgcgcccgaccagcttcaggtgctgctgccgggcgattcggtcggcccatggcgcttgcaggcggtcgaaggcaacaccgcggtgtttcaggccggcgaccagacccgccgcgtggcaattccctga

SEQ ID NO: 363848 - DNA, 579 bp, Pseudomonas aeruginosa
atgcccgcaattcctgtatcccggcacctggccggcgccggtctcctggccgcagtgctggccagcggctgcgcgactactccggtgccgcaagcgcccgaagccgtcgaagaggtttcgcacgcgcccaggccggcaatgcccgagttcgtgcccgtcgcgcgttatggccgctacaccctcgtagaactggcgccgatggcggcgcagcgcgacctgctgctgcagaccatcgatgtcgccatgcccgaggacgcccgcgccacggtgggcgacgggctgcggcatgtgctcaagcgcagcggctacggcctttgccagaccatccatgccgtgatcgagctgtacgcgttgccgctgccggcggcacatctgcatctaggccccatgaccttacgcgatgcgctgctcaccctggccggcccggcctgggagctgcacgcggatgaccgggcgcggcaggtctgcttcgagcggcctggccgcgacgcaggcggcgagccgatttccgagtcgcccactgcggaaacggtgcagacggtcccgctggcgccttcggtttcaggaggccagccatga

SEQ ID NO: 363849 - DNA, 822 bp, Pseudomonas aeruginosa
atggggacggcgctgtacgttggcccgatcgcgcttccgtggtccttgctgatggcggtggcggccgcggcgctcggcatggtcgttggtgtgtcctggggccgacgccaaggtgttgaggtggcggcattggcctggcgggtgttgttggtcacgatcgtggtctcccggctggccttcgtttactcgtaccgcgatgcctacctgcaggcgccgctggatatcctcgacatccgcgacggtgggtggaacggccagatcggtgtgattgcgggctggttctacgccacgacgctggatcgcgacaggcattcgcagtcgcgcaagccgctgctggccggcctgggcgttgctaccgtcgcatgggtgatcggctccgtgagccttcagtggaacatgcacagcgacatccgcatccccgcgggggcggcacttaccctggagggcacgagcgtcgaactgcaatccttcgcgggaaagccaatggtcgtcaacctatgggccacctggtgcccgccatgccggcgcgagatgccgttgctgcaacaggcacaggcggactacccgcacgcatacttcgtctttttgaaccagggcgaggccgccgagagggtgcagagctttctcgtcgggatgaagcttacgctgcaccatgtgctgctcgacccgaagggccaggctaccgccagtgtcggcgggcaggcggcattgcccacgacgctcttcttcgacgctcagggtcgcctgatctcgcggtacatcggcgagctttcccacgaaaccctggcgcaaggcctggctggaatcgggattgagcgctga

SEQ ID NO: 363850 - DNA, 558 bp, Pseudomonas aeruginosa
atgaccacctctctcaacggcatcgacgtcgacggcttccggcagttcgccgaaggcatccgccagaaccccgacaacgcaattgccaggttcgaggtcaacacgcgctgggacggccagacccgttccgccacgaccgtcaagtcctacgacctgtgcggtaagacccatgcgcgcgacttcaccatcacggccgacgaacccgccgaactgctgggcaccaatacctcgcccaacccgcaggagctgctcatggcggccctcaatgcgtgcatgaccgtgggctacgtcgccaatgccgccgccaagggtgtgacggtgcggtcgctggagatccagacggtcggcgaactggatctacgtggcttcctggggctggatgcgaacgtcaaccccggctacgacgaggtcaagtacatcgtgcgcatcgacgccgatggcacgcccgagcagatggaggagatccaccgcgccgtcatcgatacctcgccgaacttctcgaacttcgccaaggccgtgcgcatggtgcccgagctagtcctcgtggagaaaccataa

SEQ ID NO: 363851 - DNA, 684 bp, Pseudomonas aeruginosa
atgaaaatcgtcaaagtggacatctggtccgacttcgtttgcccctggtgctggatcgccaagcgccgcttcgaccaggccgtggagcaactggccgggcagatccaggtggaagtgagcagccgcgcataccggatcgcgcggggcatggcacccatggacttcgcctcggcgctcaggatgaagttcggcagcgaaagcggagcacgccagatgatggcggcggtcaccgcccacggcgccagggagggcctggcctacaacttcggcaccatgcgcttcggcgataccgcggacgcccacgcgctggtcaagagcctgcccacacaggcgtcgcgccaacgtctgatcgaagctctctccaaagccagcatcaccgatggcaaagacatcttcaaccgcgacgagctgcgggccatcgcggcgcaagccggtctgtccgacgcggaatgggccgacctggacttcgagcgcgtgcgcgaggtcgagcacgacgagatgcaggccaatgccatcgccaatggcgtgccgctgtttgtcttcaacgacaaactgtacctgtcaggcgcgcaaccgaccgaaacgttcgtggcggcgctgacgcaggcgggcgcctcatcccccgagccggtggccgcggcggcggacggcgccgcttgcggtcccgatgcctgccagatctga

SEQ ID NO: 363852 - DNA, 900 bp, Pseudomonas aeruginosa
atgggcgatccccacatgccccaggaaactgggcaaccggccggccagggcccactcgcggtcgcgctggcggtctgcgccatgctggcgttcgccgccaactccctgctggccaggctggcgtttcagaccaccatcatcgacccggccacgttcacctttgtgcggctggcctgcggcgccggcgtgttgtggttgctggtcctggcaggtccgcatggccggcgtccggggttcaaggcgtcctgggcgtccgcggtgctgctgttcgtgtatgccgcagccttctcgttcgcctatcgcggcatcgacaccggggcgggcgccctggtgctgttcgcctgcgcacaactgaccatgatcctctacggcgtggcgcggggcgagcgcacgaacgtgctggggctgctgctggccaccggcggcctgatcgcctttcttgcgcccggcgcatcggctccgccgctgctgcccgcgctgctgatggcgctcgccggtatcgcctggggtgggttctcccttctggggcgcggcagcaacgcacccgtgggaagcaccgccagcagcttcatctgggccgtgccgctggcgggtgtcctgctgttcgcctcgccaggcggcctccgggcggatggggctggactaggctacgccgcgctctccggcgcattggcttctgcgctgggctacgccatctggtactgggtgcgcgtacgtatgacggcgatcgccgccggctcgctgcaactgtccgtgcccgtgctcagcgccttgctgggcatgctggtcctgggcgaacatctcgctctgcgcagctggctggccggtgccgtggtgctgctcggcgtcgtgatcaccacccgatcgagttcgcttcgccaggcgcagccgcagcgctga

SEQ ID NO: 363853 - DNA, 900 bp, Pseudomonas aeruginosa
atgcctggcacccacgaccccaccgctgcggcgaggcggcgactccaggggacggcctatctgctggtcaccgctgtcggctgggccgtcaattggcccgccatgaagctcctcctgcaagcctggccgccgatgttctctcgcggccttgcgggggtggccgccgcgatcgggctggcggtgctggccgccatgcagggccatcgcctgatgccgccgcgcaaggtgatgccgcgcctggcgctggccgccttcaccaacgtctttgcctggatgggcttctcgacgctggcgttgaactgggtgaacgtggccgaaggcgtgctgctggtctacacgatgccgatctgggtcactttgctggtctggcccttgcggggtgtgcgccccacggcgagcggctttgccgctctgctgctgggtctggccggtgtcatggtgttgctgggtgcccagggtttctccgtcactggcgggcaggcgctgggcatcggcttcgcgctggctgccgcagtgctgttcgccctgggcacgatcctcaacggcgcgccgcttcccttgcagcccctcgtctcgacggcgtggcaggtggggctgggctgcctgcccatgctggtattcggtatcgtgttcgagcatccccggctggatgctttgaacccttggcagttcgccagcctgatctacatggccctcatccccatggcgatctgctatctgacctggttcgcggcgctgcagcgcctgccggcatcggtggcggcaaccggcatgctgctggtgcccttgctgggggtcctgtccgccgccgtcatgctgggcgagcccatcggcgccagggaagtcatctcgatgctgctgacgctcagtggcgtggcgctggtgctgagacggccctga

SEQ ID NO: 363854 - DNA, 579 bp, Pseudomonas aeruginosa
atgcaaacagccgagtctcttttgtgcacccggggctatgccggcttcagctacgccgacttggcggaggcagtcggcatccgcaaggccagcatccaccaccacttccccgccaaggaagacctgggggtggctgtggtggaggcctatgtggagcgcgtcgcacggggccttgagggcatcgagcacgagtgccccaccgtcgatgaccgcctggccgctttttcgcaatggttcacgcagagcatggggcgtcgccagttgcccttgtgcggcgcgctggccgccgaaatgaccgtgttgcccgagcgccttcagacgttgacccggcaattcttccgcctccagctccagtggctgcaaaaagtgctcgacgaaggcaaggcggccgggcagttgccacaggacgcagacaccgcggcccgtgcccgccaggtcctgggcttgctggaaggcgtcagcttcatcgattgggccttgaacgagaacccgccatcgcttgccagcgatgtcctgtaccggattgccggggtggtccggtcacaggctgctgcgcagcgcaagcacgatgtttcttga

SEQ ID NO: 363855 - DNA, 2220 bp, Pseudomonas aeruginosa
atgcctacgatccttcatcctaagcccgagcccccctcccgcgccacgcagcgactgtttcgagcgcttctagcccgccgttcgcagcttgcggtcacgtttgcggcatgcgtctccctggtatggctggctgctttggcgcaggacacgcctgccacggcgcatgcacagattccccagatcatcgacgatctgcccgccgactatgcagccgacctcacgccgcagcagcgcgagcaggtcgatctcggccgctatgtcgcgcgtctgggcgactgcgtagcctgccacaccggggacaagtccaagcccatgggaggcggcctcgcgctggagacgccgttcggcaagctctactccaccaacatcacaccggacaagaccacgggcatcggcggctacagcttcgagcagttcgagcgcgccatgcgcaagggtgtggcggccgacggccacaacctgtaccccgccatgccgtatccgtcctacgccaagatgacggcggaggacatgaaggcgctctatgcctacctgatgcaaggcgtcaaacccatcgagcaggccaaccggccttccgacatgggtttcccgttcaaccagcgctggggcctgtcgctgtggaactggatgttcctggacgatgaacccttcaagcccctggaagacaaggggcaggtgtggaaccgcggcgcctatctggttcagggcttgggccattgcggcgcctgtcatacgccgcgcggcatcgccttccaggaaaagaccatgaccagcgagggcggcaatgaccatctgttcctggctggagaaaccgtggaaggctggcgcgcactgagcctgcgcaacctctggacgccggaggaaaccgccgagatgctaaagaccgggcgcaatcggcacggcaccgtctcgggcaacatggtcgacgtggtgcagcactccacgcagtacatgaccgatgccgacctgctggccatcggcacctatctgaaatcgctgccgcccggcaaggatgacctgcccatgcaggtcgtccaaggccccgggccagtcatcaccccgcgccaaagcgggggggcggccaagcccggtgacatgcccatcgacatcttcacctcgcgcggcgggctgggctacctgcagttctgtgccgactgccatcgctccaatggtgacggtgtgcccaacgcgttcccgtctctggcgggcaacaacaccctgcagtcgcaggacccgtccacgctgatccatatcatgctcaccggctggcgggctcccgtcacgcaaagccatgctcgacctttgacaatgccctcattcgcgcaactgagcgatcaggaaatcgccgagatcctgaacttcacgcgccgcgcctggggccgcgtcgatgcgcgcgacatcaaggtcagtgacgtgaccagcgcccgcaggcaactcgatgccaaggccgacagccatcgtcccttcgagaccccgcgcctggctgagatgctcaaggaaaagaacggcgagcaactggtgctgggcgcgcgcttgaacatcgacacggcgcgcatgctgcccaacaacgtgggcaacaagctcaactgcgccagttgtcacctgaacgcaggtaccgtggccgatggttctccctatgtcggtgtctctgccttcttccccagctacgctccgcgcgcgggccgtgtcatcaccctggaggaccgcatcaacggctgcttcctgcgctcgatgaacggcaagccgttgcccatcaccagcgacgagatgaaagccatggtcgcctacttcgactggatgaaacgcgagaccaagcccgaagacaaggtggaagggcgcggcgtgggcaagatcgaccagcggctcattcccaacaccgagaacggcaagcggatctatgcggcccagtgtgcactgtgccacggagacaacggcgaaggcgtcaagaacgccaagggggagatggtgtatccgccgctgtggggcgacgagtccttcaatatcggcgccggtatggcccgcacctacacggcggccgccttcgtcaaacgcaacatgcccattgctttcggcacgcacttccccttgggccaaggcgggctgagcgatcaggaggcggtcgacgtggccgaatacttcagccatatgccacgcccggacttcccggccaaggtcaaggactggccccaggacaagaagcccgcggatgcccgctattga

SEQ ID NO: 363856 - DNA, 321 bp, Pseudomonas aeruginosa
atggcatccagcgtgtcttgcgctctcgcatctgcctcaacgtctgcccccgagcttttctctacaggggagatcgtcctaacacccggggtcaaggccctggtccgtcgccgctacatcgatgctggcacctgtctcaaccgccataggcgcggagattggggcgatgtcgatgaagccgagcggcacatcaacgagaactatgggctgcaaggccgagaaaaactgttctcgcgttacccgattgcgaacggcgtctggttggaagtctggaccatgtacgaccgcagcatgacggttcttctgctgccttacgagtaa

SEQ ID NO: 363857 - DNA, 612 bp, Pseudomonas aeruginosa
atgcttgaagctctcgatctggtgggcattcggggggagcaccgactgtttgaccatttgactttccggatcgcgccgggcgagtgcctgttggtgcaaggcgagaacggcagcgggaagaccacgctattgcgatcgctcgcaggcttcgcaacgccggatgccggcagagttttatggaaaggaaagccgctacgcaatcaatggagtgaataccaacgcgaactggtctacagcggccatggcattgggctcaaagaagacctgaatgccttggacaacctgctcgccgcagccgccattgcaggtgagccactcaccccggaacgtgtggaatcagcgctggacgacgttggcttgaccgagcacaggcatctgccggtccggatgttgtcgcaaggccaaaagcgccgtgcaagcctggctcgactgctcctctacaagaggaaattatggattctcgacgagccctccacagcgctggacaaattcggtgcgcgatggcttggtgaagtgatccatgggcaccagtcccgtggcggaatggtcgttctgacaagtcaccaagagctggccgtgaaagcttctcagaccgtccggatgggggcatga

SEQ ID NO: 363858 - DNA, 708 bp, Pseudomonas aeruginosa
atgactcgctctgctctctcgaacatcgcctacgaggctctggtgcgtgcccgccgcaaattcagcaaccgagaggagcgctgcatccacgaaacctggaccgccgaacaggaactggtgctgctgcgcctgtatccggatatgccgaacgaggtcctggcagccaggttgaacaaaacgctccagcagatctgctccaaagcgtatcggctcgggctgaaaaaaagccccgagttctccaagaagatccggcaggactggggcagcgcaactcggttcaagaagggaaacaccccatggaactgcggcatgaaggggcttcccgcgcgaggacgctcatcggaaacgcagttcaagaaggggcagaagccccacacatggctcccagtcggcagcacgcgggtcagcgctgatggctacctgcaacgaaagatctcggataccggctatcccccccgggactggaagagcatccacatcctgctctgggaagaacacgtcggccccatcccaaccggccattgcgtctgcttcaaggacaacaacaagcagaacgtcgtcatcgacaacctggaactcatcacccgggccgaacgcatgcgccgcaactccatccatcgctatccacctgagctgaagagcgcaatccgcgtcatcagcaagctcaagcgcaccattcaggaggtcgagcatgaaaaacaagattga

SEQ ID NO: 363859 - DNA, 219 bp, Pseudomonas aeruginosa
atgaaaaacaagattgaggatctgcgtaatcacctctttgccaccatcgaaggcctgctggacgaagagaaccctctggatatcgaacgcgcgaaagcggtggctcatgtgggttcggtgatcatcgagtccgccaaggtggaggtgaaagcgctggagatcatcggcgccccgggcggaagcacgttcatgcagatcggccgggaggactcgaagtga

SEQ ID NO: 363860 - DNA, 1344 bp, Pseudomonas aeruginosa
gtgagtgttctggaactcacgccgccgcactccgtcgaggcggagcaaggggtactcggtggcctgatgctggacaacgcggcatgggacattgtcggcgatcacctgcagaaggaggacttcttccggcatgaacatcggctgattttcaccgccatcagcgagttggccgcgaaggacgccccgtttgacgtcgtgacggtgtcggaagcgatcgaagaccttccagaagccggcgggctggcctacctcggccagctcgctgacaacacgccctccgtggccaatatcgaggcttacgcgcagatcgttcgcgatcgggcgcacctgcggcagttgatgtctctcgggcaccactgcaccagaaccgcctcgaaccaccaggcgaatccctgtgaggttcaggaggagatcgagcagaagctgttcgccctcggccaagatcagcacaagtccgactttgtcgatatcaacaagggcctcgcgaagatcgtcgacaccatcgattaccgcttcaacaacaacgtgacggtaacgggggtcccgactggcctgaaggatctcgacgagctcaccggcggactacagaaatcggatctcatcatcgtcggtgcccgccccgcgatgggcaaaacgtcgtttgccctcaacttgatcgacgccgcgctgcagagcgaacaacagaagtctgtccaagtttacagcatggaaatgccagcagagcagctgctgttcaggctggccgccctgcttggccatctggaccttggcaagctgatgaaaggccaactgcaagaggaggattggccccggctgtctgtcgcgatcaagcgcataaacggctatggcagccgcctggtcatcaacgaccagggcaacctcacgccgacagagctgcgcgccaaggttcgccgcgcggccaggaagtacggccaccccgtactgatcttggtcgactacctgcagctgatgcgctgcccaggcctggaaaaccgagccaccgagatatcagagatctcccgctcgctgaaagcgctggccaaggagatggactgccccgtcgtggccctatcccagctcaatcgcaccctggagaaccggccgaacaagcgaccgaacaacgcagacctgcgtgagagcggcgcgatcgagcaggacgcggacgtgatcatgttcgtgtaccgcgacgaggtctaccaccccaacaccgaggccaagggcattgccgaaatcatcatcggcaagtaccgcaacggcccgatcggcaccgtccgcgccgccttcatcgccaaccagacccgcttcgccgaccttgcaccaacttggcagggagctcttgcatga

SEQ ID NO: 363861 - DNA, 825 bp, Pseudomonas aeruginosa
  misc_feature (789)..(798): n is a, c, g, or t
atgagtagcagagtagatgaggctaggagagtcgctatcgagttgctggacaatctcgaaggttctccgtcaaaaattgacacagtgttaatgaaggcaaaaagactgtctcgattaatgcgtgatcctgatgctcagaattggctggatctagaaaccagaggttaccccgataattttgttttttcagagctagggacttgtttaaagtacgcagcagcaggggggagagttgatttaaaagaatccaaatattacaaaggtagtcttcccgcaattgaagcggagtctgattctgatgaggcgctcctaaactctctgagggtcgctcgtgctcctacagagtctgtcaaagactttattgaaaaaaacgcaactgaagcgctaatggcaactcagttaaagctccagatacagcagcgtgaacgctattcgaagaataagtcattgttttcttcgttaaagtctgcaattcataactatgcaactgatgcatacttggcagtagagctgggcgatgtggcagaaggagtgtttgatagtgctagaaatttagtggactcattcattcgttcgcattgccccaaagcagctgagaagttggtagcaatcaatgaaagaattcaagatggttctgatgagtcgagctcagcggcgctgacatcatgccgaagattactaatggatattgcagactctgttttcccagccagagatgatgtgtggaaggacaggaaagggaaggaaagaaaagttggagtagatcaatacaaaaaccgtcttcttgcnnnnnnnnnntcttcttgcctatctcgcagagcttga

SEQ ID NO: 363862 - DNA, 876 bp, Pseudomonas aeruginosa
atgtcgaaacacagaaaaaccactcatattcatatcaacaacaaacggatactgacagaatactcaatgaatactaacgatctaattagcctaattttatctggagcgacaggtgcaggaattacagtgggagtactaataaagtacggagagcgcttgctttttaagcacttagaccacaaatatagcgagcgactatcagaaagaaacactgagcttcagaaagaactggagcagacgaagaataaattggaattctccctgcagcaatctattgttaatcataaagcagatttggatgtacttctggggcagcgagcaaagtatctagaaagaaaaattgattgtattttgagtataaacagaatgcacgtgcaagcttcgcgcgctgcaaatagcttttgcaaatgggtgcttgacgggctagttgatgcagaaacacaactctcaggaatgaccgaagaagaggctagagagcaagttgggatggtagattattcttttagaatgaggttggtggaagaaagactcccaccggtaaacgaattattgatttcatatttcgatgagattgtattgaacttacccatcctgccggctggatttacatctcatgaattggacttgcatgctgtgatgcgcaaaggtttagactcctcccactatgcctatcgtaggctagcagggatatttggtgagatcgcagccccagaagaaggctatacatataatgagcttaaaaatgagataacaaaatccaagaccaagatcatggagcaagcctatctacttaaccagatcgaaagcggaattattaaaaaagccgcagaggggcgaaatctcatagagcttttgcttcgagagaataaaaactaa

SEQ ID NO: 363863 - DNA, 468 bp, Pseudomonas aeruginosa
atggaaaagcgcgagactgacgaacaactcaaaatccagagtttcgacatggacgaggaaatcgacgatcgcaacgaacgtcgaggccggaaagccgcgccacctcgccacgcccacactcccatggaccccagccacgccatcatcttggccgccatcatcatcgtcggcggtctatggggcggaaagcttctctacgactacatccaggaacagcggatcaaagctgcgttcaacgaagctgctgcccacatgcagcagaccatgaagcaggccgaggaatattccaaacgcgcaaaggcagccgaggaagaggctagagaacaacggcttactcaagctcaggcagaacaagccagagtggaacaagaaaagcgtttcaaatcatcccagtgtcaattctggtcgcaacagcacaaccagagccctacggaaagaatagctaggaagaaggctgaagcttgctag

SEQ ID NO: 363864 - DNA, 981 bp, Pseudomonas aeruginosa
atggcgctggtcggtcggcgtgacggtcgcaactttggctacggtcgccaactgagctacgccggtcgacaggccctggaagatctgtttgccaacggccacttcgccaccgtcaaagcacacagcgatcgctggcaagccttcgtgcgctggtgtcggtcagaggacggccctggctacaacgatgcacgccagattgatcgagacacgctaaatgaatacgccgcctatcttcggaagcagatacagctaggcgaactgtgcatcgctaccgcgcaaaaccgcctaagcagcgtcaaccgcacccttgctgcgctgcgcggtgatcaggaagtgagagtcatcagcccgaaccaggcgttagggcagcagcgctccaacgtacgctcccaagctccagacggccaaaactataaacagttgcagcgcgtgctgcaggtattgcttgaacagcagtacgagcgagtggccgcgattgtcctgttggcccgagcaaccggtatgcgcctgcgcgaagcaatcctggcggacctgccacgcttgcaccacgaggccaagcactttgatcgcatcaatatccagaacggcaccaaaggcggccgctcaggggcatcagcgccgcgctggatcatagccaatgaacaagtgaacgcagcactccggttggcgcgcgaagtatcgccgcccggcagccgcaacctactggcccggggcgaaagctacgctgttttcttgaagcagtccgtactcccttcccgcgaggttttgcatgaacatgggttgaaaggctttcatgaactgcgagcggcctatgcctgcgaacgttacgagcaactcactggtcacgcggcaccagtacatggcggcaagggctatcgcattgatggcaatctcgatcagcaagcgcgccagcaaattagcattgaactcgggcacttccgctttgatgtggtctctgcctacattggaggtcgctcatga

SEQ ID NO: 363865 - DNA, 1398 bp, Pseudomonas aeruginosa
atgcaactgcgcgaagtacaagggccaccacgccccttgttggaacagcagataacgcccctaccctacccggtcgcggcgcttggcgatctattggggcctgccgtggaacgcatggccgatgtgatcggcgtgccctgcgccatggccgcgcaatccgttctggccacggcagctttggcgagccaggcgcacgccaatgttcacctcgacggccgaatctatccgttgtcgctgtacttgctgacggtagcttgctcgggtgatcgcaaaagcgcggtggaccatgttgctctgcaggccgtacgcgactgggagagacagcagtggatcgcctatggcgaacagctcaaggcgcaccgagctgcaatgagcctgactgcgaagtcaccgacctcgaaaaagtcagcacagctagcgctggacgcccaacctgaacctgtccaaccaagactgctcactgctgagccgaccattgagggcctggtcaaaagcctgtgccacggtttgcccagcatggggctgttcagcgatgagggcgggcagtttttgggcggctgcaccatgagcaaggacaacatgatcaaggcgatcactcacttgtcgacgctgtgggacggtagcccgattgatcggtcgcgcgcgatgactggagaaagtctgcgtgcctatgatcgccgcctcagcatgcacttgatgcttcaaccccgtctggcagaccgcttgctgcaggacgctgatatcaaagaccagggcatcctgggacgctgtctgatcagttggccagagcgtctggttggacaacgactgtacaaagccatcgacctgacccgagatccaaaggtgcgcctgtaccagcagcgcattgccgcgctcatgcagaagccttggtcacgccataaagacggtggcctcagccctgtaaccctagagttaagcccccgcgcccgtgaagcatggattgccattcacgacaccattgaatgcgagtctggggaattcggcgagctggtcaacgtgcaagctgctgcgggaaaggccgccgcgaacgttctgcgcatggctggtgtgatggcggtggttgaggagtcagctgtcttggaagacgtacatattcaacgcgcctctacgctgatggattactacctggccgagaaccaacgactgactgaacaggagcctctgaacaagcttcgcgcagaggccgactgcctgcttcgctggttgataaagaagaactggccaccgtttcgcctccgcgacatcacacgcaacggccctcgctttgcccgtaaaagcacgcggcacaccttcgagttattgctgcagctggttgcccataactggctgaacaataccggagacatattcgaggtgcgtcatgttccgcctcaatga

SEQ ID NO: 363866 - DNA, 726 bp, Pseudomonas aeruginosa
atgtgcgctcaaacagctcgcctctccgaccgccagctcaaggcggtcaagcccaaagacaaggactacgtcctcacggatggcgacgggctccagctccgagtccgggtcaaccgctcgatgcagtggaatttcaactacaggcatccggtcaccaagaatcgaatcaacatggcgctcggctcctatcccgaagtctctctggcgcaagctcggcgaaaagcggttgaagctagggaagtacttgcccaggggatcgaccccaaagctcagcgcaatgatctcgcgcaggccaaactaaccgagaccgaacatacgttcgagaaagtcgctagcgcctggttcgagttgaaaaaggactcggtcacgccggcctatgctgaggacatctggcgctcactcacgctgcacgtttttccgagcatgaaatcgactccaatctcggaagtcagtgcaccgatggtgatcaagatccttcgccctatcgaagccaaaggcagcttggaaacggtgaagcggcttagccagcgcctcaacgagatcatgacctacggggtcaattcgggaatgatcttcgcgaacccgctcagcgggattcgggcggtgttcaagaaacctaagaaagaaaacatggcggcacttccacccgaggagcttcctgagctcatgctggaaatagcgaacgctagtatcaagcgcacgacccgctgcctgatcgaatggtag

SEQ ID NO: 363867 - DNA, 738 bp, Pseudomonas aeruginosa
atgtcaaaaaagattaagcctgactcttttcgcagacaaattgcatctgaacttcggcaattaggcggcgttctgaatcgcaacgtgagtgatgtttgcttcgacacaggccccataacccaagctgcaaacatgtgcgggatctctaaaccttatggtccggagtcttggggctatcaagttgatgatttacgctttagggtgaaaacacctcagaaagtcataccgagcacagtaggtgactatctgcatgtcatgatgaactttaagattcaagggaaatgctcaagcgatcttacagacttgataaagctgcttgaattcagcattgtggtcaccaatgaagataactcctatctatcgtcttggcattttgacaaacacttagtctctgacgacggcggtgatggagacccagaagatgctcacccactttatcatttccagtatggtgggaagaacttaggacctctcggggggaatcatggaggaatcctgataatgccaagccctagaattggccaccctccaatggatgtcgttttggcaatagacttcgtattatcaaatttcgctggtatccattggaaagggttacgtgagcagcctgactaccgaagccgtctagtagaagcacagggaaaatatcttcggccctatgtcgaaagtatgctttcttggtggaatactggccgtgactcggattttgtaaagagtctctggccgcatttgatatag

SEQ ID NO: 363868 - DNA, 399 bp, Pseudomonas aeruginosa
atggccaaatcccgcaacccgtcgctcggccaggtcagcgatttcgatatccgcctgctgcgcatcttcaagaccatcgtcgagtgcggcagtttctccgccgcggagagcactctcggcctcagccgctcggcgatcagcctgcacatgggcgacctggagaagcgcctgggcatgcgcctgtgccagcgcggccgcgccggcttcgccctgaccgacgagggccgcgaggtctatcgcgcgacccagaccctgctggcggcgctggaggggttccgcgccgaggtcaacgacctgcaccagcacctgcgcggcgaactcaacatcggcatcatcaacaacctggtgaccctgccgcagatgcgcatcacccacgctctcagcgcgctcaaggggtag

SEQ ID NO: 363869 - DNA, 255 bp, Pseudomonas aeruginosa
atgagcccaacccaggagatgcgcgaagcgctcgctgatgccgttgctgcggcagggggacaagtgggctttgcgcaggtattgacgaccccggacaggccggtgtctcagcaaatcgtttcctactggtcgaagcgcggttacttgccagcagagctggtaattcgtgtggagctgaaggttggggtatcgcggtatcgcttgcggccagatgtgttctgcgttccgcaggatctattgccgctggtggcatag

SEQ ID NO: 363870 - DNA, 258 bp, Pseudomonas aeruginosa
atggagccggtacttccagacggcagcaccgttggcgtcgacaaaggaaagacctcagtcaaggacggtgatatgtacgtccttcgccacggcgaccacctaagggtaaaactcctttatcgcctccccaggggcggcatccgcctacgcagcttcaaccacgacgagcacccggatgaggaataccctcaggcagccatgattgaggaagagatcgaaatcatcggccgtgttttctggtattcggtcctacggtag

SEQ ID NO: 363871 - DNA, 210 bp, Pseudomonas aeruginosa
atgcaatcggcacagcacacgcccaaagtccgctgcccggtgtacctgcacccggcagcggccaccagccgcgccgccgtcgaggccatccaggccgacactggcctgctggtgatagtcagcacctcccagcgcgcctgcctctaccagccgcgccctgtcgcccccagcacggagaccgacagcggcccgtggggaggtgctgcatga

SEQ ID NO: 363872 - DNA, 1071 bp, Pseudomonas aeruginosa
atgcaggcctattacgactgccggcgcagcaagcgcaacagcaagtcggcccttgcattcgagttcaacctggagcgcaacatcatgcaactccaccatgagctgaacaccggcgcctaccaacccggcgcctccatctgctttgtcgtgacccacccgaagcaccgcgaggtgtgggccgccgacttcagagacagaatcgtccaccacctgctgtacaaccacatcggcccacgcatcgagcgctccttcattgttgatagctgcgcctgcatcaagggccgcggcacactctatggcgtccagcgcctggagaagaaggtgcgcagtatcacccgcaactggaaacgccgcgccttctacctgaagtgcgacctggccaacttcttcgtcaccatcgacaagcatgtgctcaccgcccagctacaacgcgcgatacccgaacaaccgtggcaggccttggccctgcagatcctctggcacgacccacgcaccgactaccacctacgcagcccggcgcgcctgctcaaccgcgtgccgcagcacaagcggctgactgcccagcccgagcacctgggcctgccgatcggcaacctgagcagccagttctacgccaacgtctacctcaatgctcttgaccaattcgtgaagcaccgcctcggcgtgcgccattacatccgctacgtcgacgacttcgtgctgctgcaccacagcccgcagcagctcaacgcctggcgtgagcagatcgaggccttcctggctgaacacctgcacgctcgcctcaaccccagcaaaaccatcctgcagccgctggcccgcggcgtagacttcgtcggccaggtgattctgccccatcgccgtatcgcccgccgccgcgtggtcgacaacgccctgcgccgcgccgctactgtgccggcacagaatctgcgcgaaacggccaacagctacttcgggcagctacgccaggccacccacagccagaccgaccgccgccgcctgaccaaggccctactgctgcgcgggcgcaccgtcgacctgggtatgaccaagatgttcaagggggcgaaatga

SEQ ID NO: 363873 - DNA, 384 bp, Pseudomonas aeruginosa; identical to SEQ ID NO: 362386

SEQ ID NO: 363874 - DNA, 1026 bp, Pseudomonas aeruginosa
atgaaacagagtgtgattggtatggacatcgccaagaaggttttccaactgcataccgtcgatcagcgctccggaaaaatcgaacgtttcaagctgcggcgtgaagaggttttggcgtttttcgccgagcgtcagccctacttggtagcgatggaggcttgtggcagtgcgcactggtgggcgcgccagcttcagcagttggggcatgaggtgcgcttactggctcctcgctcggtacgcccattcgtactcaggaacaagaccgatgtggctgatgcccaagcgatatggacagcagtgcagcagcccgacgcccaccaagtcgcaatcaaacaagctgatcagcaggccatcctctcgctgcaccgcatccgcgctcaactgctgaaatttcgcattatgcaaagcaatgcattgcgcggcttgttctatgagttcgggattgtgttgccggaaggctacaccccgctgaccaaggcggtgcctaacgccttcgtcgatgcggaaaatcaagtaccccatgtgctgttggaaagtctgcgcgagcagtgggcacgggtaatccggctggacgaagaaatccaagcgattgaactccgtttgaaacactgcatgcgtgagcgtctcgattgtcaaaaaattgcagaaatccccggagtaggcttgttgacggccacagccgcagttgcctcgctgggcgatgccaaaacctttcgctccggtcggcagtttgccgcttgggtgggactggttcctcgacagacaggcacaggtggtcgagttcggcaactggggctgagcaagcgcggtgacacctatctgcgaacactgtttatgcatggtgcccgctcaatcattgccagggggcagaagtctgagtgggttgagcgcttgcttgccaggcgaccgtataacgtggtggtggccgcagttgccaataaactcgcgagaaccgtttgggctgtgctggtcaaaggctcccgatatcgcgcagaactctttacggcatgccctgtagggcattga

SEQ ID NO: 363875 - DNA, 216 bp, Pseudomonas aeruginosa; identical to SEQ ID NO: 322351

SEQ ID NO: 363876 - DNA, 186 bp, Pseudomonas aeruginosa
atgacgcgcaacgaatacgacgagattgaaaccactgcaaccgtggcattggctggtcttctggctagcggctgccagttgggaaaaaccctcaacggactggcggagcatgcattcgaaatcgccgaagccttcaacgccgagaagaagcgtcgcctcggcgagcgtccggaatgggacaactga

SEQ ID NO: 363877 - DNA, 1737 bp, Pseudomonas aeruginosa
atgagtgatgcgcaagcaaaaatgactcatcgtgaaaccgatatttttacggtagcgcaactcagtcaggagtttttgcggcctgagcgaattcgtatacaactcaataaggacgtaaaggcgttgcctattgatataggctgctttgcttatgtggagcgcgggagaaataagagccatattgatagtcgatgtaatccggttgtagaaatgtcacttttcaaagatcggctcgaattgattaggagaataatagcatcgttcgccgttatgggtaatcacagaaccatccatagtgagtgtaggtattttgcgcaattgctgacttggtgtgataccaataaccacactgatgtattttcgacggcgagttcaacaataactgcgtatcagagttatacgcagcatcttaatcatttaattgctgtaggcaaaattgttccggttagtgcttgtaattttcaacgagctttcatcaggctcattgttctgcgctttcccgaagagtccagatatataatcggcaatgctatccggattaggtttaatagaggtggggttaaaccaccgagggagcagcatgttgagatttacttgaaagcatgtgtcgcactcgcccgcaacctgagcgagtttgtaataggtgaaaatccgtttccatgtgttgtcgagtacgataattgccaagtcgttatttttccatctaataaaggagtgttcagtccttacatagaaagaaagcttcatgtttataattattctgctcgccgaatttctacaattgaagagtatatagattcccttgtgggtgacggtgcttatgtaaggcgttccgcagttcgccgagcagtggatggcgccttagataatttcaagtcagccaactgtgatcctaggcacgaacagcgacttcgattggcggctctagctgccaaggcgtacgcttgcatttttcttgtaattactggtgcttcaccagcagagttcgtgcagtttgattatgaagaagatacagctcttgagaagtctctggttaaaaaagaattctctgctattaaatttagggcgggcggtaagaaaactcgatacgccatcggaaagcaaaacggactaagcctcttgaggggatatctcaagcttagagcatggattttgaatggagaaaccttcggcaaaatgtttttcaatatgaataaatgtggtgggtatacaggagggtgtacgcaactgccgcaggcgttttctagcgttttttataaaacgatcagtggcatctatcttgatccggactgtccgaatattagctccagagccgtaaggaaattcaagagtgttgtactgcatgggctagggctttcaccgacaacggttgcagatgtcatgaatcatacggtttccaccaatgtgtctgattacgtacaaacgtctatcgagcagcaggagagcgagtttggtagttattggcagtctgttcgcaaggccgcatcggtcatacgcgagcggagaggtgccgactccttcgctacggctactgggcactgtgatgactttaacaacccctctaaacgttctattgaaatttgttcttttgttattctgagaaacaaaaactgcgaaatacactggtgttatcagcaactgccgcatcgacaaaacacctaccaacggcttatttttttgatcaaagcaaaaccgagcagcaatacgaaactctacaaaatattgcaaaagtgttga

SEQ ID NO: 363878 - DNA, 1482 bp, Pseudomonas aeruginosa
atgtcctatgtgaatccgcgataccacggccgtttggtgcttgttccgcgcgttcggaatgcctttgcagagatttacgtctctcaaaagccacgtggtgctatcgagaatttgcttgcggcgtctgagccatcgagaacgctttatcaactcaatgagttcggggcgcaggagggcgagggagaccttttcaatttcccgttccttttccatagggatggcagaccctggttcgaagcgaattcgtacttgctgaatcatgtgaggcataaacctcttgttggcagacccatagatgatgttcgtcgtcgggccagcaaattgcttgattatctgaccttttgtgaagatgaagcgcttgattggctggatttctctggccgtcgtcctgctttgcgccctacatacaaatatttcgctcatttggttaacgaaggaaaacgtagcgcggcagtcatcaatcaattcactggagtggtattcgatttttataaatatgtggcggctaattggcatgacatcgacatcgaacgtgttgattcagttaagaaggttcagttcctatttaaaggctcattcggtagcaaattaataactgccgaaaaacgcagtcaaactaaatcgacgccggcttctagccctgtgccaattgggtttgttcgggaggacggtgaagacctccggccattggccaatgttgagcttggcgaattgttgggtatgttgaagggcaaaggatggacggtccaacaacgacttattctactgactgcattgatgacaggtgcacgaaaacaaacagttctgacaatgcgactgaagcatttgaattcatttacagaaggaaatttgctgaacgacggtacttatctaatgcgtgcaggtccgggcacgggtatggatacgaagcgagatagaagccagcaactatatttgcctagccagctagttgaagaattaaaggttatggctaatagtccagcggcggccaagcgacgctcaaagctgcggagccattttgaaaaagagtatcctgaactccccgctttggatgaaggtgatatgtacgtattcctgtctgaccaagggggatgctattacatggcaaaagacgatcctcgctatccaatgattaaatcccggccgactggtcaggttacagataccatcacgcgcaagctgttggtcaaagcatctgataagtttccaaaaagtttttcttaccactggcttcgggcgacttatgcttttcagctctatcagcatctgttaccacttttggcgtccggtcagattcgcccaggggaagagatttcttttattcagcaccgattgcatcataaaaatagagaaatgactgaacattaccttaagctcttcaagatgcactctgaaaagtttgcagcgcaagaactgtatgaagaggtgctgtttcgctttggaagttatgaagatttgaaattggagacgctcgatgagtga

SEQ ID NO: 363879 - DNA, 498 bp, Pseudomonas aeruginosa
atgcaccagaccaagaagggaaaccagtattattttggcatgaaggcccacatcggcgccgatgacgaatcgggtctggtgcacagcgtagtgggcacggcggccaatgtggcggatgtcacccaggtggacaaattgctgcatggcgacgaaaacgtggtctgcgccgatgcaggctacaccggtgtcgaaaagcggcccgagcatgaaggacgtgaagttatctggcaggtggcggcacgccgcagcacctacaaaaaactcgataagcgcagcgtgctgtacaaagccaagcgcaagattgaaaaggccaaggctcaggtgcgcgccaaggtcgagcatccgttccgggtaatcaagcgccagttcggttacaccaaggtgcgctttcgcggcttggccaaaaacacggcgcaactggtgacactgttcgctctgtcgaacctgtggatggcgcgccgacatttactgacgaatgcaggagaggtgcgcctgtaa

SEQ ID NO: 363880 - DNA, 912 bp, Pseudomonas aeruginosa
atgcacgacgtgacctggatcgggtcccgcttcttcacggacacggccggctactacgacaactatcgctccagcacaccgcgcaccgactggccttatgacagcacccgcgacgccgggctggcccaggtgtccggcggcggtggctacccgacctgcaggcaatggtgggccgatggcagcaacggtctgcgggcacgcctgctgggacaggtggacccgagcctgctcaaccgcctggcgggctgggccgggttcctgagccgagccgaggtagacgactcggtgatccgcacgatcgcgtcaccgcggcagcagaaattgaaccagggcagcgtctataccgactacggcggccagatcgacaagaccctgccgaacatcgtgacgcgggccacgggcgatgtcgggatggcagtcggcgcgattgccgcgtttccagccttggacgtcgtgagacaggcgctgcccatggtgctcgcattgctcaagatggcactggtcatctgtatcccgctcgtgctggtcgtcggcacctatgacctgaagacagtggtcacggtcagcgtcgtgcagttcgcgctgttcttcacggacttctggtttcagcttgcgcgctggatcgattcgacgatccttgacgcactttatggctgggggttcggctggaaccggccgcataccaacttcgacccattggtggggctgaacaacgccttcggagacatgctcctgatgttcgtcacgggcacgatgttcatcgtactgcccacattctggatcatggccttggcttgggcgggcgttcgtgcgggtaacgtgctgcagggcctcgctggtgccaccggagatgctaaggccgctggcgggaggggaggaagcattgcaatcaatgcagtgtcgaagaagtga

SEQ ID NO: 363881 - DNA, 282 bp, Pseudomonas aeruginosa
atgttctcgcccttcatcgatgcggcctccaaggccagctatgccgagggtaacctggccagccggttcgcctatgtcgatgcgcatctggccagccatgagtacctcatgggcagccagttcagcgtggccgacgcctacctgtacaacgtgctgtgctggccgccgcgcgtgggggtggatatcaccaggtacgcggctatacaggcgttcatgacgcgcatggaacagcgcccgagcgtgcaggcagctttggaggccgaaggcattcaacgtcagtaa

SEQ ID NO: 363882 - DNA, 909 bp, Pseudomonas aeruginosa
atgaacaagctgcaagcgatggaagtgttcgtgcaggtggtggatgccggtggcttcacccgcgcagccgagaacatgaagctgcccaaggccacggtgtcgaccctggtgcaggcgctggaggcctcgctgtcggccaagctgctgaaccgcaccacccggcacgtcagcgtgaccgccgagggagcggcctactacgagcgctgcctgcgcatcctgtcggcggtgcgcgacgccgaggacgatctggcgcacaaccagcagagtcccgccgggcgcttgcgcgtggatgctcccacctggcttgccagcgaagtgatcgtcccggcgctgccggaattcttcgccgcctaccccggtatccagctggagctgggcagcagcgacaggccggtagacttggtcgaggaaggggtggattgcgccatacgcggcggccgccagctggccgactcgcggctggtggcaaagcgcgtcggcagcatgcgctacctgacctgcgcttcgcccggctacctcgaacgccatggctgcccgcagcatccggacgaactggccgggcacgcctgcgtcaactacttctccgcacgcacgggcaaggtcttcgactggtatttcgctcgcgagggcgagcgtgtgcaggtggggttgtccagccatatcgccctgaacgacagcgtcgcctatacagcggcgggggttgcgggccttgggatcgtgcagatggccgagcacctgctggccgcgcacctgcaagagggacgcctggtcccagtgctacaggactggcacaacgacccgctgccgatctacctggtgtacccgcagcaccggcacttgccggccaagctgcgggtgttcctcgattgggcggtgcagttgttcgcaagccacccctccttgcactga

SEQ ID NO: 363883 - DNA, 303 bp, Pseudomonas aeruginosa
gtgaccacggtcgatgtgcgccacttcctgcacttcgacctcaacaccctggtgactttcctggtggtgtaccaggagggcggcgtgtcgaaagcggccaagcgcctgaacgtgacccagcctgcggtgagcaatgtgctcggcaagctgcgcgtgcgcttcgccgaccccttgttcgtgccttgcgggcgcagcgtgcgcccgacctcgaaggctgacatgatcgcccaggacctggcgccagcgctgttcatcctgcaagtgctgattgccggggccagccaccacgaggatcgtccatga

SEQ ID NO: 363884 - DNA, 1089 bp, Pseudomonas aeruginosa
atgcctgtctcggacttgttcaaacccctgtccctgctgcacggcccggccatgcgcaaccgcttcatgctggcgcccttgaccaaccagcaaagcgaacacgacggcaccgcctcggcattcgatgtcgactggatggcccaggtcggccaaagtggctacggcctggtacaaacctgcgccagccatgtcgaagccggtggcatcggcttcgaacgccagctgggcatcttctgcgacgaacacctcgaaggcctgacccagatggccgatgccgtgcgtgcaggcggcggcttgtccgccgtgcagctgcaccacgccgggcaccgcgccaacccgctgatcggcggcaccccgtcgcccgcttcaaatttcacggtgccaggcgtgcgggcactgagcaccgagcaggtcgaacgcatccgcgacagcttcatcgccggtgcgctgcgcgccgaacgcgccggtttcgatggcgtggccatccatggtgcattcggctggattctctcggagttcatgtcgccgcatctcaacgaccgcaccgaccgctacggcggcagcctggagaaccgggcacgcctgaccctggaagtgatcgaaggcatccgccgcgtctgtggcccggacttccagatcggctggcgcctgtcggtggagcgctacggcctgcgccttgaggaactgcgcgaagtcaccgccgatatcctcgaccgcgagctgatcgactacctcgacctggcgttgtgggacagcgcgcagatcgtccaggaaggcgacttcaagggcctgcgcatgctcagcgtgttcaccgaactgccgcgcaagcgcgtgcgcctgggcgcggcaggcaagatcatgggcgcgcaacgcgctgcacagctgctcgaagagggctgcgacttcgtgctgatcggccgcgctggcatcctgcaacgcgacttcccgctgcaagtgcaggccaacccgctgtacgacagcccggcgaccccggtcaccgccgagtacctgcgcgcgggcggcctgagcgagcgtttcatccgccacatgcgtggctggcagagcttcgtggtacggggaagcctgtga

SEQ ID NO: 363885 - DNA, 1506 bp, Pseudomonas aeruginosa
atgaaccactcgaccccatcgcctgcacgttgtgccctggccatcgctatcgcgttgctcgcggcttgctcggtcacccccgaccaaccagcgctcggcctgaacgtgccggctcgcttcgccgaggccgaaccgggtgtcttcacacccctcaagcctgcggaaacgccaggccagtggcgcccggccgagcccgccgaccagcaggcgccatcgccctggtgggaggtgctcggcgacccggtgctgatgcgcctggaacaggaagcgctgaaggccaaccccgatgtcagcatcgccatggcccgcctgcaacaggcccgcgccctgaccgcacgtagcgaggcagcgcgcgtgccatcggtggacgcaggtttcggccccacccgccagcgcacctccggtgccgccgacggcgatggcgacggcgcccccggcacctcgcagaccttgtggcgcgcccaggccacggtggcctacgaggtcgacctgttcggccgcgtggcggcatcggtggatgccgcgcaggccgacgcggcccagcagcaggccctggcgcaccagatgctgttactggtgcaggccgatgtcgcccgtacctacttcagcctgcgccaactggaaggcgagcgccgcctgctgggcgagaccgtgcgtctgcgcgaagatgcccaacgcctgctgcaacgccggctggacgatggcgacgtcgccagcttcatcgtcgaccaggccagcaccgagctgttctcgacccgtgccgagcaacaggccgtggaactgcaatacaccctcaccgcccatgccctggcgaccctgctcggccaggcgcctgccaccttctcgctggcgcctgcgcccttgcaggcggtgaccgtacgcctaccgccgggcctgccctcgagcctgctcgaacggcgcccggacgtggccgccgccgagcgcgccatggctgccgagaacgcgcgtatcggcgtggccaaggcggcgttcttcccggcgctgaccctgaccggcagcctgggctacgagtcgcaggaactgggcaacctggcccactggtcgcaacgcaccttcctgctcgggccgctggtgggcacggcgctgaacctgccgctcttcgacggcgggcggcgcgatgccgacctggcccgcgctcgggcgctgtaccagcagcgcgtcggcgaataccgcaaggccgtgttgcaggcctttcgcgaggtcgaggacggcctggcttcgctgcgcaccctggacctgcgcatcgctcaccagcgcggcgccgaacaagcgtccacgcgggtggcgggtgcggcgcagtcgcgcttcgacgagggcgatgtcgactacctgaacgtggtcgatgcccagcgcacgctgctgcgcaaccgccaggcgctgatccaggccgagggcgagcgcgcccgcgccaccgtcgacctggtgcgggcactgggcggcggctggagcaacgccaacctcgaccagcccggcaaccgcggctga

SEQ ID NO: 363886 - DNA, 3207 bp, Pseudomonas aeruginosa
atgaatatctccaagttcttcatcgaccgccccatcttcgcctgcgtggtctcggcgctgatcctgctggccgggatcgtctcgtcgctgaacatgccggtgtccgaatacccgcaggtgattccgccgtcggtggtggtgcacgcccagtaccccggcgccaacgccaagaccatcgccgaaaccgtggccgcgcccctggagcagtcgatcaacggcgtgcaggacatgctctacatggactccaaggccgctggcgacggccacctgtacctgaccgtgaccttcaagctgggcaccgacccggacctggcccagcagctggtgcagacccgcgtgtcccagacccaggcgcgcctgcccgaggatgtgcagcgcctgggggtgacggcggtcaagagctcgccggcgatcaccatcctcgtgcacatggtttcgcccaagggcacctacgacaacaactacgtcagcaactacgccatccgccatgtgaaggaccgcctggcgcgggtgccgggcgtgggcgaggtgtcgatctggggcccgggcggctatgccatgcgcatctggctgaacccggcggcgctggcagaacgcgggctgagcgccaatgatgtggccgacgccattcgccggcagaacctgcaagccgccgtgggcaccatcggcagcgcccctgcgcctgccggcacggccttccagctcaacgtcaatgccgacgggcgcctgaagacccccgaggagtttcgcgacatcgtcatcaaggccgacgcccaaggcgccatcacgcgcctgggcgacgttgcccgggtggaactcggcgcagaggactatggcatccgcgcaaccctggacaacgccccggccgtggcggtggctgcccaggaagcaccgggggccaactcgctggcgatctcccgcgaagtgcaccgggtgatgaaagagctggagaaggactttcccgaagacctcacctaccgcatcgtctacgagcccagccgcgccgtgcaggcgggcatcgatgcggtgatcgagaccctgctcgagtcggtggcgctggtggtgctggtggtgttcctgttcctgcaaacctggcgtgcctcgatcatcccgctgctggcggtgccgatctccatcgtcggcaccttcaccttcctgctgctagcgggctactcgatcaacaccctgtcgctgttcggcctggtggtggcgatcggtatcgtggtcgacgatgccatcgtggtggtggagaacgtcgagcgcaacatcgcctgcgggctgacgccgcgcgaggccacctaccaggccatgcgcgaagtcagcgggccgatcatcgccattgccctgacgctgtcggcggtgttcctgccgctggcattcctcagcggcttgacgggcgagttctaccagcagttcgcggtcaccatcgccatctccacgctgatctcggcggtgaactcgctgaccctgtcgcctgcgctgtccgccctactgctcaaggggcatggtgaagcgccggatgccttcacccgcctcacccagaagctgttcgggcgcttcttcaaccgcttcaaccgcaccttcgatcgcgccagcgaacactacggcagcggtatccagggcctggtcaagcgcaaaggcgccatgctgctggtgtacgtaggcctgctgggcgccaccgcctggctgaccggccacgtgccgggcggtttcgtgccggcccaggacaaggaatacctggtgatgctggcccagctgcccgaaggctcgaccctggaccgcaccgagcagaccatcaacaagatgaacgaaatggccctcaagcacccggcggtgatgggcacctcgacctacagcgggctgtcgatcaacttcgtgaccaagagctccagcaccgccctgagcttcgtgatgctcaagccgttcgatgaacgcaagggcatcagcgccgaccaggtcgccgctgagctgggcaaggaattcgccagcatcggtaatgccttcaccggtatcttcccgcccccgccggtgttcggcctgggcaccaccggcggcttcaagctgatggtcgaggaccgtgccgacctgggttacgaggcgctgtacagcgcgacccaggcgttcatcaagaaggccgccgaggcccccgagctcagcccactgttctccacctacacagtgaacgtgccgcagctgaagatcgacatcgaccgcgccaaggcccagcagctgggcgtggacacctcggcggtgttcgataccctgcaagccttcctcggctcgtactacgtcaacgacttcaacttcctgggccgggtgtaccaggtgcgcatgcaggccgacgggcagttccgcaccaaggccgacgacatcgggcaactgcacgtgcgcagcacgtccgggcagatggtgccgatcgcttcggtggccaaggtcagccagacctacggccccgaccaggtagtgcgctacaacggcttcaccgccgccgacgtcagtggcagcccggcgccgggctattcctctggccaggcgatggaagcgatcgaccgtattgcccgggaaaccctgcctgccggcatgacctacgaatggaccgacctgacgtaccagcagatcatcgccggcaacagcgcggtgtggatcctgccgctgtgcgtgctgctggtgttcttcgtgctggccgcccagtacgagagcctgaccctgccgctggcgatcctgctgatcgtgcccatgagcctgttctcggccctgatgggcgtgtggctgaccgggggcgacaacaacatcttcacccagatcggcctgatcgtactgattggcctggcctcgaagaacgccatcctgatcgtcgagttcgcccgggagctggagattgccggcatgcccacgctcaaggcggtaatcgaggcctgccgcctgcgtttgcggccgatcctgatgacctccatggcgttcatcatgggcgtggtgccactggtgttgtccagcggtgcaggcgccgaaatgcgccaggccatggggatctcggtgttcttcgggatgatcggcgtgaccttcttcgggctgttcctcacccccttgttctacgtgctggccagggccctgggcaaaggccggcccctgcactcggcggcgcagcaccagccccccgccatcgtcccgcatcaccctgaacaacagcagccggagggccaggcatga

SEQ ID NO: 363887 - DNA, 1155 bp, Pseudomonas aeruginosa
atgaaacccttgataaagcctcaactggcagccctcacagctgcgatcgccgtgatcggcgtgggcgccaccctgtgggccgagagcaccgaagtgcacgccgaggccgctgccgcgctgcctatcgtcaagtaccaactggcccagcaacgcaccatcgccgacacccaggactacaccggccgcctggaggccgtggagctcgtcgacgtgcgcccgcgcgtgcccggcactctgctgagcgtgcatttcaaaccaggccagcaggtgcgccagggcgagttgctgttctccatcgacccggcgccctaccagacccaggtcaaccaggcccaggccaacctggccgctgcccaaacccgcaagcaactggccgagaccgaccaggcacgcgcacgccggctggtggacgccaatgccatttcacgccgtgaattcgacgccctcgacaacgcctcgcgcgaagccgccgcggccctcaaaggcgcccaggccgcgctcgaacatgcgcaactgcaactgggctacacccaggtgcgcgcgccgatcaccgggcgcatctcgcgggcggaaatcaccgctggcaacgtgctggccgccggtggcgacgcggcgccgctgacccgcatcgtctccaacgacaagctctacgccgcgttcaacgtcgacgagcagagctacctgcgcatcatcgcgccctcgctgcgtgccggtaagccatcgcaggtccatgtgggcctggccaacgacagcgccttcccctacccggccaccctggaggcgctggacaaccgcatggacgtgcgctccggcaccgtgcgggtacgtgcgcgcatcgaccaggccagcgccgagatgctgcccggcttgcaggcccgcgtgcgcttgcagggcggggtgagctacgacgcggtgatggtcgacgatgcactggtcggcaccgaccaggaccgcaagtacctgctgatcgtcaacgcccaggacaaggtggagcggcgcttcgtcgaactgggcgtgctccagggcaaggagcgggtggtgcgcagcggcatcgaggctggcaccagggtgatcaatgacggcgccttccgcgcgcctcccggcacggccgtgaacgccgtggccgccgacaacgcaggcgcaggccagccatga

SEQ ID NO: 363888 - DNA, 1044 bp, Pseudomonas aeruginosa
gtggaccgcctccaatcgatgcagatctttgcccgcgtggtcgaaatgcacagcttcggccgtgccgccgacagcctctcgctgccaccttcgcgggtgacccgcgccgtgaaggagctggaggccttcctgggggtatgcctgctgcgccgtaccacccggcacatcagcctgacccccgacggcacgctgtactacgaccactgccgacgcctgctggcggacatcgaggcggtggagtcgggtttcccaggctcggctggcactccacgtgggcgcttgcgggtggacatgaccctgtcgctggcgcgtctcgtcgtgctgccacgcatcaaggatttccaggcgcgcttcccggatgtcgagctcaccctgaccatgaacgaccgcacggtggagctggtgcaggaaggcatcgattgcgtgatccgcgccggtaccccggaagactcgcccaccctggtggccaagcgtatcggcgcgttcgagtgggtgacctgcgcctcgcccggctacctggccgagcatggcgagcccaagaccctggaagacttggccgaccaccatgccgtcggctacctgtcgagccgcaccgcgcgttcgctggaatggcacttcgtgatcgacggcgaggaccgctgcgtgcgcatgcgcgagcggctgatcgtcaacgacaccgatgcctatgtggcctgcgccgtggagggcctgggcctgatccgcgccggcagctacatggtgcgcgaccagttggccagcgggcgtctgcgccaggtgctgcccgactgccgctcgcctgcggtgccgttgtcggtgctgtacccgaagaaccgccacctttcaccgaccgtgcgagccttcgtcgactgggtcgacgaggtggtgcgcgagtcgcaggccagctggggggcatcgccctggccaagcaacgtggcgcttaccggggtcgcaagaaagccctgtccgaggaacagaccgtcgcagtccggcaacgggccgctgccggcgagccgaaagcccagttggcccgtgagttcggtataa

SEQ ID NO: 363889 - DNA, 705 bp, Pseudomonas aeruginosa
atgaaacgagcgatcttgaactacagcggcagcatcggcaaaaccactattgcagcgcacctgctctaccctcggatgccaggcgcggcattctttgccatcgagtcgattaaccagtctgctttggacctgggcattgctgaggtcaagaccatgcgtggtcgcgaagttggcgacctgatcgaagagctggtacttgaggacgtggcgattattgacattggcgcgtcgaatatcgagtccttctttgaagccggttcgcgctaccatggtttcatagatgaaatcgaacaattcattgttccggtaacgccagagcaaaaagcgtggcaagagagtttgaaaactgtagaagcgctggcgacgatgggcgttacggctgatcgcattattctgctgccgaaccgcattcaagataatcccgaaactgagatcccgtcgatctacaactatgtgaagaaaaccaaaaaggccactatcaagccaggcgcgttcctgttcgatagtgatgtatatggctatctcgctgctaataaaatgtcattcgatcagttgattggcgatgacaccgactacaaggcgctggcacgggccgaagcggatgaggtccagcgcagcaagtatgtaagcctctatcgctggacaagttatgcaaagcctattcgtcaaaacttggacgaatgctacgccgctctgacggcataa

SEQ ID NO: 363890 - DNA, 633 bp, Pseudomonas aeruginosa; identical to SEQ ID NO: 337262

SEQ ID NO: 363891 - DNA, 390 bp, Pseudomonas aeruginosa
atgatcaacattcctaccgcatcctttcgtgttacgccgtgcggcgaggtggacgccgccgcattggagaagctacgcaacagcttcgacacgtcacagctactcggactcgtcgataggctggacactagcctatccgagctgggtgggatgattgctttgcgcgacgacttactgatgctgcacgcaatgtccctggctttgcttgaaggcactcttccgccggttacgaccgaggaatcctgcgtctgggaggtagccgaatcagtgctattagatcttgaagcattgagttcctggattcgcactgctcagatgatgatcgcgccgttggtcaatctgatgccagagcatgggttcagtgagctgccagatcgtgaaggcaactga

SEQ ID NO: 363892 - DNA, 600 bp, Pseudomonas aeruginosa
atgtccctctcgcttgatgccacttccgctgaccacacccggtcaggcttggctcgtctcgatccggcatatgccttggcggccaatctcgccgagcgacacttgctgggctacctgatgctcaatgatgaggcgtggcgtgtagtggcaaaagttatcgacccaggtgatttcgaaggttatccgcattgccggatttacctggccatggaaacgttagccagccttggcgaaaacatcgacattgtgacgctctgtgagttgcttgagccggacgaacattacaaggccgcagggggcattcagtggctggggcaactggccactgagactccgattcgtttcgaccaagtgagcggtctggcccgtctaatcagaggttttggtgtattgcgctccagcctcaatgaggcctatcagggccagcgccggttatgcagcctgctggatgcaaagctattcgggctctcgcacgggaagtcatgggttgccactatcgaggatacaattaggcaggagcagccatttcctcaggcctggctagggcagcgcgtctgctatatctacgatgaacccgtttccgaacacgcgcctcaatga

SEQ ID NO: 363893 - DNA, 939 bp, Pseudomonas aeruginosa
gtgttcagcacgtcgcacaaggtcgccagcgaggcgctgttcagcgctgtgcacgagtacaacatggcgatcaccaccggccgggtgatgatggactgcaacgccccggacggcgtacgtgacaccgccgaggccagttaccaggaaagccgcgagctgattgcccgctggcacggtaccggccgtcagcgctatgccgtcaccccgcgcttcgccgccacctcgacccatgcgcagctgacttacgccggcaagctgatgaccgaggcagagggcctgctgatgcagacccactgggcggaaaacaaggccgagatcgcctggattgccgagctgttcccggaccgcgccagctacctcgacgtctacgaccacttcggcctgctcggcccacgcagcgtgctggcgcacggcattcatatcgacgatgccgaccgcgcccggctggccgaaaccggcacccgcatcgctttctgcccgacctccaacaccttcctcggcagcggcctgttcgatctggccagcgcccgcgcggcgaatgtcgaggtcggtctggcctcggatgtgggcggcggcaccagcctgtcgatgctggtcaccatggccgaggcctacaaggtctgccagctgcgcgggcagagcctgaacccgttccaggcgttctacatggcgacccttggcaacgccaaggtgctgcatcaggagaccgagaccggcaacctggcacccggcaagatggcggactttttgatcatcgaccgcgccgccagcccgattcagcaactcaagcacagcgccgagcgcgatctgtcgggcatcctgttcgacttgatgatcctcggcgacgaccgcagcatccgtcgcacctacatcgccggccaatgccgttacgaccgcgacgccgcacaaggagcagcccatgctggtctatctgtctga

SEQ ID NO: 363894 - DNA, 1230 bp, Pseudomonas aeruginosa
atgctggtctatctgtctgattggctcagcctgatcatccgctggtttcacgtgattgccggggttgcctggattggcgcctcgttctacttcgtctggctcgacaacaacctgcgtgagccgccggcgtggaagaagcagaaaggcatcaagggtgacctctgggccatccatggtggcggcttctatgaggtggccaagtatgaagtcggccccgagcagatgccgactgacctgcactggttcaagtgggaggcctacagcaccctgatgagcggtctggcgctgttgttcgtggtctactacctcggcaaccccggttacctgatcgacccgagcaagctggatctcagcgccgccggcgcgatggctatcggtatcagcaccctgctgggtgtgatggtgatctacgaggcgctgattcgcagcccactggcgcgcaacggcatggccttcggcgtggtgctgtatctgattctggtggcggttgcgttcggtctgtatcaggtgtttgccggtcggggcgcgtacattcacgtgggggcggtgatcggcaccatcatggtcgccaacgtattcctcggcatcgtcccggctcagcgcgccctggtgaatgcggtcgcccgtggcgagaagcccggtgaagaagtggtgatgctggcccagcgcgccatgctgcgctcgcgccacaacaactacctgaccctgccggtgctgttcatcatgatcagcaaccactacccgatgttctacgccaatgcctacggttgggcggtactggcagcgatcggtgcgattacggcctacgcacggcacttcttcaacctgcgcaatcagggccagttcaagccgtcgattctggttatcagtgcgttggcaaccgttgccctgatctgggccatggcgccgagtgcaccggccaagatcgagagtcatgcgacggaggaaggggctgcagtaacccgagttgccgacgccgaggtcagccagctgctcgccacccactgccaggcctgccacgcggtcaagccgaccagcccggccttccaggccccgcctgccggcatcgtgctggacagcctcgagcacctcaagcagaaccgcgacaaggtctatcaggccgccgtcgcctccggcctgaacgcgggtgagcaggttgttgcggccggtggcaacgagctgagcgagggccagcgggtacgtccctggatccgtgagcgggggctgtaa

SEQ ID NO: 363895 - DNA, 3069 bp, Pseudomonas aeruginosa
atgaatattgcggcctacttcatcaagcgccgggtcaccagctggctggtggcactgttgctcggcattggcggggttattgcgtttctcgacctcgggcggctggaggatccggccttcaccctgaaaatggcgatggttgttaccccgtatccgggtgcctcgccgcagcaggtcgaagaggaactgacctacccgctggaaaatgccatccagcagttgccctatatcgacaccattacctcgaccagcagtgcgggtctgtcgcagatcatggtcgaggtacagaaacagtacggcccggagcagctgccacagatctgggacgagatgcgccggcgcatcaacgacctgcgccccaacctgccgccgggggtgggcgagccgcagatcaaggatgatttcagcgacgtgtacggcaccttcttcatgatcagcggcgacggttacgactaccgcgagctgcgtgattacgccgattacctgcgccgggaactggtgctggtggacggcgtcggcaaggtcagcctggctggcgtgccgcaggaagaggtgcatctggagatatcccgtgcccagatgaccgctctgggcatcgcaccgcagcgtatctacgacctgctgagccgccagaacgtggtgtcagacgccggccgcatgctggttggcagcgagtctatccgactgcatccgacgggcgagtttcaggatgtcagcgagctggaacggctgatcatcagttcacccggcagctctaagcgagtttatctgggcgacgtggcgaagatcagtcgcggttttgccgacacccccaccagcctttatcgcgcccagggccagccggcgctgggcctcggtgtgtcatacgcggcccacgtcaacgtggtcgatgtgggtaacgcggtggcgctgcgactggccgagctggagcaggaccgcccggccggcatgcaggtcaccatgttctacaaccaggccgccgaggtagaaaactcggtcggcgggtttgtctggaacttcctcgcttcggtggtcattgtcgtcgttgtgctgctgatcttcatggggctgcgcagcggcctgctgattggtctggtgctggcgctgacggtgctgggcagctttatctttatgcagatgatcggcatcgagctgcagcggatttcgctcggtgcgctggtgattgcgctggggatgctggtggataacgccattgtcatcgtcgagggcattctggtcggtcgtcagcgcggccagaccacgctgcagtcggccggtgatatcgtcggtcagaccaagctgccgctgctgggggcaaccgcgattgccatcattgcctttgcgccgattggtctgtcggacgactccaccggcgagttctgtctgtcgctgtttcaggtgctgctgatctcgctgaccctcagctgggtcaccgccatcaccctgacgcccttcttcgccagcctgttcttccgtgatcagccggcgcaggccggtgatgccgaagcagaagacccgtatcgcggcatggtcttcgtgctctatcgcaaactgctgggcacggcgctgcaccaccgggtgctgacgctggtacttctgggcgcgctgctggtggcgtcggtatttggcttcagtcaggtgcgtcaggcgttcttcccgccgtccaacacgccgatgttctttgtcgacgtctggctgccgaagggcagcgacattcgctacaccgagcaggtcgtggcggagatggaccgctatgtgctcgcgcaggacggcgtaaccgaggtcaccacgaccatcggccagggcgcgctgcgctttatcctcacctacttcccgcagcggattcacgccaactatgcgcagctgctggtgcgcaccgagcagcgcgagcagattgccccgctcatcgccgagctggatgagtacttcaagacccagcaccccacggctaaagtgaagctcaagcaattgatgctcggacccggcagcgacagcaagatcgaagcacgctttactggcccggacccgcaggtgctgcgcgagctaggtgcgcaggccatcgcgatcatcaaggccgacccggtggccgacgccgtgctgcatgactggcgcgagcgcaccaagctggtccgcccgcagtttgccgaagcgcaggcccgtgagctgggtgtcgacaagcgcgatctggataccctgttgaagatgaacttcagcggcgtcaacgtcggcctgtaccgtgacggcacccgcatgttgccgattgtcgcgcgcaccccggaagacgagcggctggatgccgggaccctcaacgacctgctggtctggagcaccgtgcgcagtacctacatcccgatctcgcaggtggtcaacggcttcgtcaccgattgggaagacccgctcatcctgcgtgaggaccgcaagcgcaccctgaccgtacaggccgacccgagcatcatcagcggccagaccgccgccgagctgtttggccgcatccgccctcagatcgaagccatcgaactgccgcgcggctacgagctggagtggggtggtgagtacgaaagctcgcgcgacgcgcagaaagccgtattcggcagcctgccgctgggctatctggcgatgttcctgatcaccatcctgctgttcgactcgatcaagcgtgccgcgatcatctggctgaccgtaccgctggcagtcatcggcgtgaccttgggctttttgctcaccggcatcccgttcggctttatggcgctgctcggttttctcagcctgagcggcatgctggtgaagaacggcatcgtgctggtcgacgagattcgtctgcagatcgactccggcaaggaagcctacagcgcgctggtggactcctcgatcagccgggtgcgtccggtgtcgatggccgcgttgaccacgatcctcggcatggcgccgctgctcaccgacgccttcttccagagcatggccgtggtgatcatgttcggcctgggctttgccaccatcctcacgctggtggtgctgccggtgatctacagcctgttctacaagatcccggtcgaagggcggcgggtataa

SEQ ID NO: 363896 - DNA, 891 bp, Pseudomonas aeruginosa
atgagcagccaccccgtcagcgcccaacgcatcaccgcccgcactgccgaaatcggcggcaccctgccggtcaatcgtgtcctgcccacccgccaacgccgccagatcggcgcctggtgcttcctcgatcacgccggccccgcccgctttgaatcaggtgagggcatgcacgtaggcgcgcacccgcacacctgcctgcagaccttcacctggatgatcgaaggcgacgtgctgcaccgggacagccttgggaatgagcaactgatccgccccggcgaagttaacctgatgaccgccgggcgcggcatcagccacaccgaagactccaccgacgtcaccgaccgcctgcacgccgcccaactgtggatcgccctgccgccacacatggcaaacgccgaccccgcctttacccactacccagacctgcccacctggcagcaaagcggcatcgacttcaccctgctggtcggcgacttcgccggccacacctccccggtcgaggtctacagcccactactcggcctggacatccacagcccctacggcggcacctgcgagctgatcctaaacccggcttttgagcacggcctgctggtgatggaaggcgaactggaactggacggcgaacgcttcgccgaaaacgaactcgccgccctcgaccccggcccaaccaccctgcacctcaccctcacccccggcagccgcctgatccttataggcggagaaccagccgagaaagtgctgatgttctggaatttcgtcggttacagccgggaatacatcatcgaagcgacgcgggagtggcaggcggagtctgtgcgcttcggcaaggtggcgggatttgatggggagcggttggcggcgccggcgttgccgtggcggagtgcgtaa

SEQ ID NO: 363897 - DNA, 939 bp, Pseudomonas aeruginosa
atgatcgagctgctggtcgaacacagcctcggctttgcccagctgcaagacggcggtcgctttggcgtgcgccatctgggcatcacccagggcggggcgctggactgggtcgccatgcagcaggccaactggctgctcggcaacgccgccgatgccgccgtgatcgaaatcccccttggcggcctgcaactgcgcgcacaagccagcggctggctggcgctgaccggcgccgacctggacgcgaaactcgacgagcaaccactgacacccggtcaggcattccaactgcaccacggccagaccctgcagttcaacagccccaagcgcggcgtacgcgcctacctcgccacccccggcggctttgccgcagacccggtcatgggcgccgtcgccaccgtcatgcgcgaacacctcggcggcctgcacggcaatggccgcggcctgcacaacggcgaccgcctgcagggtaaggccagcgacgcagcaccacgaaccctgcccgcagacgcgctctggtatccgggcaatgaagtcgtgctcgacctgatccccggcgcacaaatcgccgccttcgccggtgccagcctgttcgccgccttcaaccaaagctggaccctcgaccaacgcgccgaccgcatgggcatgcgcctcaccggccccgcgctgcgctaccagggccaagccctgatctccgaaggcatccccctcggcgccgtccaagtaccgcccgacggccaaccgatcatcctgatgaacgaccgccaaaccatcggcggctatccaaggctcggcgcagtcacgccgctgtcgctggcgcggttggcgcaatgtgcgccggggcagaaggtgaggttcagggtggtgagtcaggaggccgcgcgcagagcaatgctcgcggcggttaaagcgctagcaacgtccggcctaaccacgccgtag

SEQ ID NO: 363898 - DNA, 699 bp, Pseudomonas aeruginosa
gtgaatctacgcatcgagagcgccgccatcgacagcctgatggtgcgcctgtttgatgagatcgacgaagccaacatgccctggctgatcgccgccgcagaaaagctgcgcgcagccttcggtccgcagctgatcgatctggtgccgtcgtacaccaccttgctactgcactacgacctgcacgccctgagcgaaagcgacgccatcgcgctgatccgcagctgcctgcgcaacctgcaaccgctggcgagcgacaccggcaccctgcacgccatcccggtctggtatcacgacagcgtcggccccgagctgaccagcatcgcccagcgcgccgggctcagccccgagcaggtgatcgagcaacattgcagccgcgactacccggtgttcaccctcggcttcgcgcccggctttgcctacatggggctggtggatacagcgctcgcctccgcccgcctcgctaccccgcgccaacgcgtgcccaaaggcagcgtcggcatcgccgaacgccagaccgccatctacccgctgacctcacccggtggctggaacctgattggccgctgcccgctgaccctgttcagcgccgagcgcggcagcctgctgcaacccggcgaccgggtgcgctttgtgtccatcgaccacgccgaatttatccgcctcggcggcgacgatacggcgatggaggccagcgcatga

SEQ ID NO: 363899 - DNA, 744 bp, Pseudomonas aeruginosa
atgcaacagctacaactcaactgcgacatgggcgaaagcttcggcgcctggaccatgggcatggacgaggccgtcatgccgcatgtgcacagcgccaacatcgcctgcggctttcacgcctccgacccgtccaccatgcgccgcaccgtcgcgctggcggtgcagcacggcgtgcgtatcggcgcccatccggcctacccggatctcgtcggctttggccgccgctcgatggcctgttccgcgcaggaagtggaagacctgctgctctatcaacttggcgcactggacggtatctgccgcgccgaaggtgccagcctcagctacgtcaaaccccacggcgcgctgtacaacgacatgatgaaacagcccgcgctgctcaccgcagtgatgcgcgccgtcgcccgcttcaacccgcaactgtcgctgatgctgctggcccgccgcaacaacagcgaagccgaacaactggccgcagagcaaggcatcggcctgctgtttgaagccttcgccgaccgcggttacgacccggatggctacctgctgccccgcaaccaaccgggcgctgtccatcacgaccccgagcgcattctggcccaggcactgaccttcgcccgtggcgagccgatcaccgccagcgacggtagccaactgaccctgcgcgccgacagcctctgcgtacacggcgacaacgccgaatcggtcgccgtggtcgcgcgcatccgcgccgcgctggacgcgctgtga

SEQ ID NO: 363900 - DNA, 432 bp, Pseudomonas aeruginosa
atgaacccgaaagacatgaccggcctgcagatcatgcaagccgccgccgctggccacctgccgattgcacccatcgccaagaccatccccatgcaggtgaagctggccgaagagggccgcgtagtgtttgaagccaccgccgacgagagccacaccaacccgctgggcggcgtccacggtggctttgctgccaccgtcatggactcggtcaccggctgctccgcgcacaccatgctgggtgcaggtgagggctacggcaccatcgagctgaacgtaaagatgtgcaaaccggtgccgttcaacaaaacgctgatcgccgaaggcaaggtcatcaacaagacccgccgcctgatcatcagcgaaggctacctgcgcgacgaaaccggctcgctctacgcctacgccaccgcgaccaatatgattctcagctaa

SEQ ID NO: 363901 - DNA, 882 bp, Pseudomonas aeruginosa
atggccactgaatcccttgccccgcacgcactgacactgaccgccgccgacggctatccactcgccgccaccctgtatccggccagcgagccgcgcggccagattctggttggcagcgccactggcgtgccgcagggcttctaccgccgcttcgccgagtttgccgccagcaacggtttcaccaccctgacgctggactaccgcggtatcggtgcctcggccccagccagcctcaagggcttcaagatggactatctggactgggccgacaaagacctcgccgcgggcgtcgactatctcagccagaccgacctgccgctgtacctgatcggccactcgttcggcggccatgcctttggcctgctgcccaaccgcgacgccatccacgccgtctacaccttcggcaccggcgccggctggcacggctggatgcccaaaggcgaacgccgcaaggtgcagttcatgtggaatctggtgctgccgctgatcgtcgccatcaagggctatcaggcgtggaactggctcggtctcggcgaagacctacccatgggcgtgtaccgcgactggaaacactggtgccgctatccgcgctacttctttgaagacccgaagatggcctggctgaacgaccactttgccgccgtgcgcacaccgattgtcggcgccgtctcgctggacgatctctgggccggcccggaatcacgcgacgcctttatgagcgccttcagcagcgccgcctatcaaccgcgggacatcgaccccaaggcgctcggcctcaagccgctgggccacatgggttacttccgcccctacgcagaaccgctctggcgcgatgcgctggactggtttgccagccaaccccaggccgccgcagcggcctga

SEQ ID NO: 363902 - DNA, 555 bp, Pseudomonas aeruginosa
atgcagagcgccctgcaaagcaaggggcttcatggtgtggggttgagcgagattctgaaagccgcgggcttgccaaagggcagtctgtattaccactttcccggcggtaaggaagagttggccctggccgctattgccaacgccgaggcagagatggcgcggtttctggagcagatgtttgcgcgcttcgatgacccgctggaagcgctcgcagcctggatcgacagcgcgttgcagcgcatcgctgccagccgcttcaaacttggctgcccgctggcggccgcagcgctcgactgctcgcccgacgacaccgacctgctgctggctctcaacggcgccttcggcaatctgcgcgacctgctcacccgacatatcagccgcgccggcttccctgccgatgccgccgcggacctcgccgtactggtgctgaccagttacgagggcggcctgatcatggcccgcgctgcgggcactaccgaaccaatcgaacgtgccttccgagccctgctcagccacgtccgtctgcaacagaaggagcttgcccatggccactga

SEQ ID NO: 363903 - DNA, 570 bp, Pseudomonas aeruginosa
atgtccgatttcaccctgcacagtctggaaagcgcaccagaagccgcccgcccactgctggaaaactccctcaagggctttggcatgatccctggcctgcacgccgtgatggccgaagcaccggcgctgctggaaggctatcaacttctgcacgcactgtttcagaacagcagcttcaacgccgacgagctgaccgtggtgtggcaaaccatcaacgtcgagcacggctgccactactgcgtcccggcccataccggcattgccaaggcgatgaaggtgtcggacgagatcagcgaggcactgcgcaacgaaaccccgctgcccgacagcaaactcgaagccctgcgcaccttcaccctggccatgctgcgtcagcgcggtgaagtcgatcaggcccaactcgccgccttctacgccgccgggtacggtcagcgccaagtgctggaagtgattctcggcctggcccagaaggtcatgagcaactacaccaaccacgtcgccgccacgcctgtggatcgcgtctttgcgccgtttgcgtgggagccgaaggctgcgcgcaaggcgtcttga

SEQ ID NO: 363904 - DNA, 195 bp, Pseudomonas aeruginosa
atgcccagacccgcccgtcacgatcgccagcaggcgctggatcgcgccgttgatctgttctgggagcgcggctatcacgcgacctcgatgaagcacatcgagcaggcgctggatatgcgccccggcagcctgtacgccaccttcggcagcaagggaaactcttatatggacgcctcccgaagctcaatggggtag

SEQ ID NO: 363905 - DNA, 795 bp, Pseudomonas aeruginosa
atgtcttggtttgataggttgtttcatttctcacgcaccaatgacatacctcaacctacatcgcgccctagaccacctcgcaacgagccacccaagccagcggtcattggctcttacagcgatattggcgacccgctatacatccaggcaatcagcttcgtactagatgccaggcgagcttccatcagtggggtccagcggcatctgaaaatcgggtacaaccgggcagctagatttattgaagccatggagtttgatgggttcgtatcgccacttaacgctgcaggtgagcgtcgtttgctatcgaccgaagaacgcagtgcccaccttcttggtcgcaccggacaaaagccaggcagtccaaacgctgagctcgaacaaaagccgactcgcagtaaggcactcccttgcccagaaagagttgagattccaccgcttacgggcagaatcaaaggcactagggatattgggttcgacatcgttggagagtcgcattatcaggcggctttgagaacactcaggaactccagatgcttggccgaggataatgactttgaagcgttcattgtgaccgaacctaacaacccccatgacgccaacgcatgtgcagttttcatagatgggttcaaagtgggctatctgccgagagaggcggcagccagttttgtcgcacagattggggaccaaggaattcacggtgtttcatgtttccagctcagagccaaattggtaggtgggtacggcactaaattgaaaattggtgtgatggtcaatctaccccccggcgatgagtga

SEQ ID NO: 363906 - DNA, 264 bp, Pseudomonas aeruginosa
gtggatgccatttcttccagtgctgccgcacagcgtttgtcggagctgcttaccgtgaccggcccattcatcgtcatgcccatcgagctgacgcttgccagccagaacgccgcacacgctggaatctgggtggttaagtccgtgcaattacccaccgaaccttggctgaactcgtgcgagctcccgctccaactcccttacccgctcatacagttgcagattctgtgtaagtacaacatctcgctggtgacaggcaacttttaa

SEQ ID NO: 363907 - DNA, 1218 bp, Pseudomonas aeruginosa
atgagtgacgagttcgcctgctcagaccgaagacaattatctaggtcgttaatggcaatgcaatgtgtagtaaaaactattattcatctctacaccggcatgcgggatcaggaagtactccgattatcctataactgtctaagtcaagaggtagctgtatccgagactgtggatgatcatggctcagtgcgagatagcgctaggatgatcagtatcatttctactactaccaagttcgagggttatagaaaggaggagtcctggctggccaccgaagaagtgatcaaagccataaaggtagcgcaagctatttgtcgaggcctttgtgtattatacagaattgataatcccgagaaatgccccttgtttctaaactctgcaattttgcttcatgaagacacggaggttggggttggtaggttggataagcgtgcacgggaaatgaattggtctagaggtattttgatccagtcagctgatctgcgagagctcacgctaagtgatccggaacgtgactactctagtgataatagatacgctttaggcaagccatggccaataagttctcatcaattacgacgctcattggcattttatgcaagtagtagtggctttgtgtcgttgccgagcttgaagtcgcagtacaaacatatgacgattcagatgactcggtattacgcgaacaatttcgaaaacctgaaaactatttttggctatttcgacgtaaaaaagaacgagtttgttctgcccgcgtcgcatgttgccttggaatttcaggtgggaatgcccatggctgtggcaaatcagcttctagcagatttgcttggtaaggagacatcactctttggtggcaccgggtcctatatggagaagcaaaaagctcgagtagagagcggggagttgtgcgtggaagatgtccgcgctgaaacccttagcagggttaagaacggagagctttactaccgttcaactcttttaggcggttgcacgaaagtaggtagatgcgattctttcctgctcggcgactttgttgagtgcttgtcgtgtgaaggagcaataataaagtcggaaaaaatagctgatgctattgtaacaatgaattccgaaattgcgtcctatgaaaaaaattctgttgagtatcaaataacaaaaatcgatctggacaaactcgtgagctttcaggctcgtgtgattgagactagaagggttgagcgatga

SEQ ID NO: 363908 - DNA, 570 bp, Pseudomonas aeruginosa
gtggccgcggaagcacacgagagccacaagctcgaaaagctgtgccgctacatcacgcgcccggcgatcagcgagcagcggctgtcgatctcaccgcagggtagggtgcgttaccagctcaagacgccgtggcgcaatgggaccacgcatgtcgaatgggatgcggtggacttcatcgccaagctggcggcactggtcccgccacctcgcgcgcatctcacccgcttccacggcgtattcgccccgaatgcaaacctgcgcgcgcagctgacgccctcggggcgcggcaagcggcctgcgagcgatgcagtgccggtggacgtcagcgcccacgacgaaccgcgcagccccgagcagaagcgccgtgcgatgagctgggcgcaacggctcaagcgggtcttttccatcgacgtcaccacctgcgcccactgcggcggcgcggtacggatcgtcgccagcatcgaggaacccaccgccattcgcgccatcctcgcccacttcgagaaacacggcgcgctggagcaagcgcactaccggcccgcagcgcgcgccccgccgcccgccgcgtga

SEQ ID NO: 363909 - DNA, 606 bp, Pseudomonas aeruginosa
atgaagctgtatttctcgcccggtgcctcttccctgtcgccccacatcgccttgcgtgaggccggtatcgagcccgagctggtgcgggtggatctcgccacgaaaaaactcgctgatggcggtgactatctggccatcaaccccaagggctacgttccggcgctgcaactcgacgatgggacgctcctcaccgaagggccggcgatcctgctctacatcgtgcagaatctggcgcgcacgccccttggtcccaaagaggggatggggctggtgcggttggtggaatggctcaacttcatctccaccgagatccacaaaggattctcgccgctcttcaagccgaactgcccccaggagtggaaggcggtggcgaaagagaccctgctcaagcgcctgcagtgggtggatgggcagctcgcgcagcgtccctggctgctgggagaggaattttcggtcgccgatatctacctctacgtgtgcgcgggctggacggccttcgtgcagatcgatctggggcaattcccagccttggcacgcttcgtcgagaatatggcgcagcgccccgccgtgcaggcggcgatcaaggccgaagggctcaagcagtag

SEQ ID NO: 363910 - DNA, 1305 bp, Pseudomonas aeruginosa
gtggtcttgcttgatggatcgcggctcggctatgtgctcgaacgcatggacgaacggctcgcgcgcaaagccgagcgcgaagtgaagcgcaagaccgcgacgtcggcccgcaagctgcggctgcccggcaagctcaccgattgttcagccgacagccccgagggtaccgaaatcttcatcgtcgagggcgattcggccggcggctcggccaagcaggcgcgcgaccgcaagacgcaggcgatcctgcccatccgcggcaaaatcctgaatgtcgcgagcgcgactgccgccaagatcggcgccaattcggaaatcgccgatctgatccaggcgctcggctgcgggacgcgcaaggaatgccgccccgacaatctgcgctatgagcgcgtggtgatcatgaccgatgccgatgtcgacggcgcgcatatcgcgactttgctgatgactttcttcttccaggaaatgcccgagatcgtccggcgcgggcacctctatctcgcgcagccgccgctttaccggctgacggcgggcaccaagagcctctacgcgatggacgatgccgaccgcgcgcggatcgaggcgaccgagttcaagggccgcaacgtcgatgtcgcgcgcttcaaggggctcggcgagatgaacccgatgcagctgcgcgaaaccacggcccaggggacgctgctcgacatcgaccacggcacttaccccttcgtcacctccagcaactgcgtcgccggtcaggccgccgccggtgccggcctggggccagggcggctgcactacgtgctcggcatcaccaaggcgtattgcacccgggtgggtggcggtcctttccccacggaactggacatcgacaccgagggtacaccgggctggcagatgtcgatcaagggccgtgagttcggcaccgtcaccggacgaaagcggcgctgcggctggctcgatctggccgcgctcaagcgctccatcatcatcaacggcgtctcgggcttgtgcatcaccaagctcgacgtgctcgatggactcgagcagctcaagctgtgcatcggttacgaactcgacggcgagcggcgggaattgctgccgatgggggccgatgaggtcgcccgctgcattcccgtctacgaaaccttgcccggctggcaggagagcaccttcggggcgcgccgttgggaggatcttccctacgaggcccgtgcctacctgcaccgcatcgaggaattctgcgagattccgatcgacgtgatctccaccggccccgagcgggacgaaaccatcctgcgccgtcatcccttcggcgcctga

SEQ ID NO: 363911 - DNA, 1530 bp, Pseudomonas aeruginosa
gtgccgcgcctgaccgcaccccggcggcaggccgaggtgtgcgcgccactgccggccgcccacgccgctgcgcgttacgcgcgccacctgcccgagcgcacgctgctgtacgcgctggtcgaggcgcactacccggacttcatcgcgcgtcttgaggccgaagaccgcccgctgcccgagtatgtgcgcgaggagttcgagacctacctgcgctgcggcgtgctcgagcacggcttcctgcgcgtggtctgcgagcactgtcgtgcagagaggctggtggcgtattcctgcaagaagcgcggcttctgccccagctgcggcgcacggcgcatggccgagtcggcgcggcacctggtggacgaggtgttcggcccgcggccggtgcggcaatgggtgctgagttttccgtacccgttgcgcttcctgttcgccagcaagcctgaggcgatcggcccggtgctgggcatcgtgcatcgtgtgatcgccggttggcttgccgatcaggccggcgtgccgcgggatacggcgcaatgcggtgcggtgaccctgatccagcgcttcggcagcgcgctgaacctgaatgttcacttccacatgctgtggctcgacggcgtgtacgaggacaccaccgagcgtccgcagcgcaagccgcgcctgcgccgcgcccgtgcccccacctctgcgcaactgacgcagctcgccaacatcatcgcgcatcgcgtgtgccggcacctgtcgcgccgcggctggctcgaaggcgaagacgaatccgtgttcctgtccgacagcgcgggtagcgacgacggcatggatgggctgcggatgagttcgatgacctaccgcatcgccaccggtcgcgacgctggccgcaaggtcgtcacgctgcaaacattgcccggtgacgcaggctcgctggagggcgatgccggcaaggtcggcggcttctcgctgcatgccggcgtggccgcggaagcacacgagagccacaagctcgaaaagctgtgccgctacatcacgcgcccggcgatcagcgagcagcggctgtcgatctcaccgcagggtagggtgcgttaccagctcaagacgccgtggcgcaatgggaccacgcatgtcgaatgggatgcggtggacttcatcgccaagctggcggcactggtcccgccacctcgcgcgcatctcacccgcttccacggcgtattcgccccgaatgcaaacctgcgcgcgcagctgacgccctcggggcgcggcaagcggcctgcgagcgatgcagtgccggtggacgtcagcgcccacgacgaaccgcgcagccccgagcagaagcgccgtgcgatgagctgggcgcaacggctcaagcgggtcttttccatcgacgtcaccacctgcgcccactgcggcggcgcggtacggatcgtcgccagcatcgaggaacccaccgccattcgcgccatcctcgcccacttcgagaaacacggcgcgctggagcaagcgcactaccggcccgcagcgcgcgccccgccgcccgccgcgtga

SEQ ID NO: 363912 - DNA, 606 bp, Pseudomonas aeruginosa; identical to SEQ ID NO: 363909

SEQ ID NO: 363913 - DNA, 795 bp, Pseudomonas aeruginosa
gtgctcacccaggctttccacgccgagccgctcgagttcgagcccatctacgaacaggcgctcgccgatgcgaaggaagtcttgccgctggtgaccgacgtctcggagcggctctacgagatcaacaaggcgggcggcaaccttctcttcgagggcgcccaggggacgctgctcgacatcgaccacggcacttaccccttcgtcacctccagcaactgcgtcgccggtcaggccgccgccggtgccggcctggggccagggcggctgcactacgtgctcggcatcaccaaggcgtattgcacccgggtgggtggcggtcctttccccacggaactggacatcgacaccgagggtacaccgggctggcagatgtcgatcaagggccgtgagttcggcaccgtcaccggacgaaagcggcgctgcggctggctcgatctggccgcgctcaagcgctccatcatcatcaacggcgtctcgggcttgtgcatcaccaagctcgacgtgctcgatggactcgagcagctcaagctgtgcatcggttacgaactcgacggcgagcggcgggaattgctgccgatgggggccgatgaggtcgcccgctgcattcccgtctacgaaaccttgcccggctggcaggagagcaccttcggggcgcgccgttgggaggatcttccctacgaggcccgtgcctacctgcaccgcatcgaggaattctgcgagattccgatcgacgtgatctccaccggccccgagcgggacgaaaccatcctgcgccgtcatcccttcggcgcctga

SEQ ID NO: 363914 - DNA, 1614 bp, Pseudomonas aeruginosa
atgggcattcatctgccgatccaacctgttcaaggggtcgaacgtaatcgggccgcctccgcgattgaacatcgtgatgccgggatgccccgtgccctgggcgcggccccacaccggcgacaggttcgccgcgtgctgggcgaacatcagctgcgtgtaccagcggtgccgatccttgccggggctgtagcagcacggcagccagcgcagatagctgttgagcggcgccacctcgtcgtcctcgcgcaccggctgcaggccggcgttgagcatcacgttcgcgagatccagcccgcgccggtccagctccgcctcgtcgcgaccgcgcaggtagaacgccagcgtgccccggtagagcttgtgcgcgctgccgatcagcgagcgggcctcgtgcacgtccttgagggtctgctccgacgccagcgtctcgcccacggccttcttcgccaggtggttcagatccgattccaggatatcctgcggcgtggcgaccatcgtgagacacatcaaggtgtcctcgggcatctggtcgaacagcgtgttgatcgcgtcccccttgcgggtctcgccggtcaggtgcccggtgccgggcggcatgcgcagccggtcggtgatcagcacgcggtgcggcatgccgtcgaagtaccaggccccttgcgccacgtccgagcgcggctgcccgaagaacaaccgctggctgaaatcccgcccgctcgccagctcgatctcgccggcctcagtctcgtccgggtagcgcgccagcgagtagaagcgctcccggtcctccaccccagggccgagcagcgtggggcgcgggttgaaccatcgcagcagccagtcgtgaacgtccgctgcaaccatgcgtcgggcctggatgccggcattcgccagcccgccgcacaggcgatcgcaaacgatgcccagcatctgctcgggtgtctggccgcggcggtttgcctgtccctgaccgctcgcgcggcggtacaccaccatgcgcacgcgccgcgtctggccgcgccagcgcagccgcgtgaccaccgtgtcctcgaacaagcctccgggcttggccacagcgcgcaggtggtggccgaagaagcgcaggtagaactcggtgaacgccgagccgcgcgcacgtggctgcacgtaatcgcgcaaggtctgcatgtactggtcgaagctcggttcgtcctgggcatagagctggagcacccacgggttctcgtccagttcatcgaaactgtcctgaagcgcgttttccagggcgtcgcgggcatgcgcgagccagccaggctcccggccctcggtgcccagaggcaccagctcgaagaaggcggccacggactgaccatcctccagcagcatggatttcgactcgggcaggaactccacccagggcagcagttccacgaaggacggcgcgacgtcgtacagcgcctgttcgtcggccacggtcgccggcttgcggccctggaccgcggcaccgggttcggggatgccggcttgctgcaaggcctcgacgtggcactgccagccgtccggctgctcgtcagcggcggtgtcttcggcgctgactgcggccagcttcggccatggaagtttccaccgcatcagtag

SEQ ID NO: 363915 - DNA, 213 bp, Pseudomonas aeruginosa
atgtatgacgaccagccacccttcgcaccgttgcctcctaagaatgactgcccggacggcatgagccacgaccgcacggtctactacggcatggcgcagggcttgctgtcggccctgttcgtttcggggatcatcaagccgtttgactatgagcaacgccgcgctggactggtgtgggagtaccagtggggcaatcaggacaacccggagtga

SEQ ID NO: 363916 - DNA, 951 bp, Pseudomonas aeruginosa
gtgacccatcgcccattcgacctgctgcgccgcctgcgcgtcgccgtggcctcgctgctgctgatcagcgccacgggcagctacgccttgaacaccgccaccatcgtgtcctccgtcatgtcgccggactgcctggagtaccgggtggtgggcatctgctactggctctactgcacctggacgggctgcacggtgcgcacatccaccaaggtccggcactacgtgcccgatgcggtcgtctccagctacagcaacaccggagagaacccctgggtcgaggtgcaggcgatgagcacgcccaacccatccgcacaggcaggtggggatgggaccacgaacgaagaccacgaaaacaacctcgccaaattcaagaacagcgatgtcatcggccatcctggcggcgaggtattcaaccagttcgcatcgtcgtcgggctatttctgccaaggcgcgggcacggccttcatgccgtatctactcagcaccctggacacgctggcttggcgctacaacgtgcctgaaatggcctacccggaggcgttgattccgggcatgcgcgaggtcggtgcgcgcaccacgatgaacctctggggcaatgtctatccgcgcggcggcttcctgcatcagaccgatgactacaaatccggggccgtcgtggcccagcgcgccggtgatgtcgtcacgcgccgcgggcagatccacgtgtaccagccgctgcttgccaacgcccgcgacggctactggccggccggcgcgctgatggagggtgatgcctctacgggcaagtggcaggagctgacgccgcgcctgtccaacacctgcgtggtgttcccgcacagcggcacgctgacccaggcccaacaaggcgactacgcctgggcgctgtggcgtccctatgcgtgctgcgaacgccgcgggcaggtgttcctgggcagcgtcgatttcctctga

SEQ ID NO: 363917 - DNA, 1074 bp, Pseudomonas aeruginosa
atgttcggttgcggcaaatggatgattgatacgtatccggtgctcagctattactgcaatgaaattattcctctttcacgatcgataatgaatgagtcgaatgtttcagtatttacggcgttatccatatcagaagaaactgttccgataccagatggactggtctctgcttttgatgtttacagacgaatgcaggtggatcctcttatctctgaggcaaaaattagaactcagtttccattctcgattttcttgttgaggcttcatacggctgtctgcttctgcttgatcggtgtcctgactagttgtcgcagaagtgagctggttgatctagatggaagcgctagctatgaggttgacggtagattctatctttctgttttactgaggaaaactgggtttgataatattcgtgaaccgatggaaaagccggttccgcgccttgtttatgagtgtttattatctttgaatgcgctaaaagaactttggcaaatcatagtgccttcaagtgatgttttatttaagtcgcaggcgttttttaaagttaacgtcagaggtgcctatccactaagtgtggctgatgcttatgtttttctaaaggaacttagtgagttcctaaaactggttgataactcgggagaacgatgggtggtgctcccacaccaacttcgccgctattttgctgtgacattttttcacttcggaggattggagaattccttgccggcgctttcttggtttatggggcatgaagatgttggggaaacctggcgctacattaaagaaagcttaacaggaaaagaactcagtgcatccgaagctgctttggctacttctgcagtttgctcagatgatcaatctcatggcgtgcagcaactcaggaatatccttgttaagcatttcggcactgaaaaaatcaacgtcatgcatgaggatgagttaagagattacctagagttactgtcggaaaaaggtgtatacaccgctaccccgattcagattaatgttggaaaaagaaagaggtatacggtagcaatttcagttagggagggtgccgatgcctcgacttggtaa

SEQ ID NO: 363918 - DNA, 201 bp, Pseudomonas aeruginosa
atggctgatgttctggaaatcgattgccccgcgtgcagcacgccgtaccccgaaatcaccgcgcgctctgcagctcatgacccgagcctgatcgacctggtgatcacctgcagcaactgcggacacatcctgaatgcgttcgtctccctggctgagatgagcgttgtaccgaatcccgaagaggaaacctcccatggctga

SEQ ID NO: 363919 - DNA, 612 bp, Pseudomonas aeruginosa
atgaacaacagcacaaagcggaaccagtgcgacggctgccaggccggcgtgccgctggaggacggcaaacatcgaatgggacgtcctggtggctaccccgacctcatgagctgcacagcccatctctatggggcaccgcaagtacagcctgtggcatgggccattttcgacggcgcctggatctcggaccacacggctgacccaaaccgagcagagcaatgggctgaggatggtaagaacgtgatcgcccttttcgcgatgccggtccagcagccggtatctgctttcgctcgggatgtgctggcagaacggcagcgacagatcctccaggaaggcttcagtcccaaccatgatgccgagcaccggggcggtgaacttgcgctggccgctacctgctacgccgacgaagccgttacgcagatctgccagccagagcgagagccgtgcctgacgcaactggtgccgggctggtggccgttcgagccatcctgttggaaacccagcctggacgctcgaacgaacctggtgaaggccacggcgctgctcctcgcacagggtgacgcgatcgacctgcagattgataccgagctggagggtcgtccccatggctga

SEQ ID NO: 363920 - DNA, 297 bp, Pseudomonas aeruginosa
ttggtcgacgcggatccggtcgatcacgtcgcggccgtatcgcgccactacatggaacaggtcgtacaccacctcggcctgcgggcaatgctgccgcacctccaggtcgaaggcggtgttcatgtccatggccaccgcctcgatctgctggcagtgctcgccgagcagctcgaagaacgggcggatcgcctcacggctgttgccatgcccgacccacagcacccgcgtccgctcggcatccatgatcaccgtggcgtagcgatggcccttgtgcagggcgaactcgtccatcactag

SEQ ID NO: 363921 - DNA, 741 bp, Pseudomonas aeruginosa
atgcaactcgacgccgactacctggccctggtcagccagtcgctggggcattcggccaaggccgttcaggtggtgggactcaataccctccaggagatcgcggacgacccgatgttgtccggacgcaccttgccgtcgcggctgcaagtgctcgccgagcgcctggccgaccagggcatcaccgcctccgaaagttatccacaggaggatgcggtccacgattccgaagaagggcccgcgagccttcttcggaatggcgatcgcccatcttcggaatccgaagcagggccgaaacccgcgccagacggcgctcttcggaatccgaagcaggaccgtacagtacgtagtagtcgtattgatgaagtacgtactaccgcgcaggcgcgcgcgctgggcgacctgcaatggcccaaacgcttcacggatctgaaagcggaacagcaggccggcgtcaggatggcgttgcagcaagtggacgctgccctgcggcaggccgtgctggacgaatgggccgcacggtgcggcaagcatggcatccgcaaccccgccggttatctgttcggcatcatccagcgcgccatgcgcggcgagttcaatgcctgggccaagcagaccggcccggcaccgccaacaccatcggcgacgcgagcgccaccatccgagccgccgcgcaacgtcgtgccgcccgaggtggcccggcagcacatcgagcgcctgcgcgacctgctgcgcaagacctga

SEQ ID NO: 363922 - DNA, 327 bp, Pseudomonas aeruginosa
atgacgccgcgcgtgatcggcagcgacgtgctgccggcctcgcgcaagttctcgaaggtggtattgcgcgcacccgaaaccagctcttgcaagacctccagcttggcttcgtactcctcctggatcagcggcgtcagcccgacgccgggcaccgtctcggtcttggtgcaggaatcgcacgtgcgctgcacctgttccccgaggacccgggtggcccattcggtcgcctgctgcggcgacgtccaggtctggcaggacaggctcgcgcaactggtggacgcgatggaggatgtgtccgtcacgccgcgcccgttgaccaggttgtag

SEQ ID NO: 363923 - DNA, 447 bp, Pseudomonas aeruginosa
atgccagcagctttgtccaagttagcaccaggctggcgaacccttggcctggccatcgtgctgccggcgtcgttcgctgcattcagcccggccgcacttgccgccgatgtggtggtcgtcaccgacagccgccacccggtcaagaccatgggcggtgagcggctgatcgagttggaccgggcatccgggctcgaagcagagctttccgcagatctgccagccgaccccgagcgcgcagcagccatcgtccggcaacgcctgaaccaaggcggcaccgatcttcagcgccgcatcggcaccgcctaccagggcgtcgctgacgcatggagcctgggcgtcacctccatcccggccgtcgtggtggatcaacgctatgtggtctatggcgagccggacgtggcccgggccgtttcccgcatcgagcaacaccggaggacgcagccgtga

SEQ ID NO: 363924 - DNA, 165 bp, Pseudomonas aeruginosa
atgcgcggcgctgtccgcgacggtgcgctccagcgcgtcgagctggcgcagtgcggcgaccagctcctggcgctgcgcaggggactcggccaaggccatcggggactgacccagcaggagggccgtcacgagaagagtgggtacgccgcgatgcgcggcgcgtag

SEQ ID NO: 363925 - DNA, 129 bp, Pseudomonas aeruginosa
atgaacaccagcgtcctcgagggcgtgaacaaccggatcaaggtgatcaagcgcatggcctatggttttcgggactcggcctacttcttcctgaaaatcaaggccgctttccccgggaaagcgcgatga

SEQ ID NO: 363926 - DNA, 129 bp, Pseudomonas aeruginosa; identical to SEQ ID NO: 363925

SEQ ID NO: 363927 - DNA, 876 bp, Pseudomonas aeruginosa
gtgccggcgacgacttggtgggagcacaaggacgttggccataacgacgaagcgaaaaaagaaatcaggtcgctattcgaaagcaatctttttgacacgccaaagcccgaacgactcttgaagcgcatcatcgagctttcttctctgccgggtgacattgtgctcgactccttcgccggttccggcacgaccggcgcggtggcacacaaaatgggccgccgatggatcatggtggagctgggcgagcactgccatacccacatcatcccgcgcctgaagaaggtgatcgacggcgaggatcagggaggcatctcaaaggcggtgaactggaagggcggcggtggcttccgctattaccgccttgcccccagcctgatcgtcaacgaccgctggggcaacccggtcatcaatcccgaatacaacgctgcgcaactggccgaggcgctggccaagctggaaggcttcaactacgcgccgtcggaaacgcattggtggcagcacggccactccagcgagcgagacttcatctacgtcaccacgcagaacctgtccgctgagcaactgcaagccctggccgatgaagtcggcccagagcggagcctgttggtgtgctgcgccgcattccacggcattacagcggccaaagcggcggaacgctggccgaacctgacgcttaagaagatcccgaagatggtgctggcccgttgcgagtggggtcacgacgactacagcctgaacgtggcgaacctgccgatggcggagatcgagaaggccgagcctgcagctcccggcaatggcgccaggaagaccaaaagcagaaaagcggcccccgtcaacgcggggcaggtcggcctgtttggggagaacgagcaatga

SEQ ID NO: 363928 - DNA, 1590 bp, Pseudomonas aeruginosa
atgccatccacgcccgtcaccgttaccgccgccgagctgcaactgttgcgagacgccgagcgcgagctcaaggcaatactcgcggaacgcgaggcaatcaagggcgagctgcgtgtgatgacggtccagcgagacctgctcttggaacagctcaaggcgttccagcgtaagctgttcgccgccaagagcgaggcgcgaggctcggagcagaaggacttgttcctcaatgaggccgaagccatggcggcagcggccgcgcagccggcgcaggaagaagaaggtacgcccgagaccgaagtggccgggcacacacgcaagaagcgtggccgtaagccgctcgacccggcgctgccccgtgtcgaggttcgtcacgaactacccgaatcggaacgcgtctgccccctcgatggccagactctggtcgagattgccgttgaggtcagcgaacagctcgacatcgtgccgcaacaggtccgcgtgatccagcaccagcgggtcaagtacgcctgcccatgctgcgacggcggcatcaagacgacgccggcaccggcacgcattattcccaagggactccttaccgaatcggcgctggcctggtgcatcacctcgaagtatcaggatggcctgccgctgtaccgccaggcagcgctgctgcatcgcttcggcggggacctctctcgcggcaccctggccgcaagcatagtgcgagtaggccaagcggtgcagccaatcatcaacctgctgcgtgaccatctgctggaagcagacgtcgtgtacggtgatgagacaacggtacaggtgctcaaggagtccggcaggcctgcccagagaaagagcttcctatgggcgcagatgaatggcacgggcccgccggtacggttgtttgcctatagccccacacgcgagacaaagcaggctacggctctctatgccggcatcaagcctgggtcggtgttgatgaccgacggctatgcaccatacgacgacgtcgcaaacacctatcagttggtgcacctcggatgctgggcgcacgcgcggcgctacctggtcgaggcggagcaagccttgcccaaggacaagcgcgccgaccacacggtcaccggattcctgcagcgcatcggcaagctgtttgccatcgaacgccacacgctcgagatgaggccggaacaacggcagcaagttcgcgccgaacaaagccagccgctgctggccgagatcgaaacgatgctgctgcaacacctgcataccgtactgccgcaaagcctgttcggcaaggcgctgcactacctgcatgggcagtggccaaagctcgtgcgctacatcgagaacggaacttggccgatctcgaacaatccctgcgagaacgcgattaggccattcgtgatcggacggagaaacttcctcttctgcgacaccgtggccggtgccaacgccagcgcaagtctttactcactggtggaaacctgcaaggccaacgacgtcgatccgtatcagtatctcgttgccttgttcaaggcgttgccacacgcacagaccgccgacgactacgaggctctgctgccctggacgctcaagtcctcagacgcctag

SEQ ID NO: 363929 - DNA, 351 bp, Pseudomonas aeruginosa
atgttccgcctcgacgctgggctgcgggtgtacctgcatcgcgacgctgtggacttccgtaagaacatcaacggcctggcactgctggtcgagcaggcgctcgggctggatccgtttgcatctgctgtatttgtgttccgcaaccagcgggccgatcgcatcaagattctcggctgggatcgcaacggcttctggctactgttgaagcgattggaggcggaccggtttgcttggccacgcgaggcgtcggtggccacgctgacggtcgaacagttgcactggctgctcgagggaatcgacatcgaggcgatgcgccggcacccgcaccgagaataccatcgcgctgcgtga

SEQ ID NO: 363930 - DNA, 252 bp, Pseudomonas aeruginosa
ttggatcatgtttgcgtccgcaaagtctttgcggacgcaagcctgccaacgttcagccttcaataccagacgtcgtcaattgagcgcttaccgacctactacaagtggaagtcgaagtacggcggcctggaggcctccgagctgcggcgtgtcaaggacctggaagcggagaacgccaggctcaagcggatgtacgccgagctggcgctcgataacgccgcgatgaaggatctgatcgcaaaaaaactgtag

SEQ ID NO: 363931 - DNA, 2124 bp, Pseudomonas aeruginosa
atgagtttgtcaccgctggcctatgccgactccttgcgcatcggcagcatcgagttcgtctctcccgacgaaatcaaggtgctgctggacattgaggctcccgacggggtggcgctcaatactggtacgccgcgctcgtttccgcgcatcaacggttatgtgctgatccccagcgacgaggggcacctggttgcccaggtcgaatggatcaccatcgagcggtcacagtaccccaagcgcaaagggctgcaggacttcggcttggtggacttgccttacccgctacgcaagatgagcctgaatccgctgggttgtctcatctgtgaaggcagcaatgaacaaggtgaggaggtctaccgtttccggcgcggtgtcgagagctaccccaccgtcggtgctccggtactgttgcccacgcaaaaccagttgcgctcgatcgttgagtcgggcgacaaccggcgggtgctgataggcagcagtccattggcggccaatgccaaggtgatggtcgatccggaccgtcttttcgggcgccatctggcggtactggggaacaccggcagtggtaaatcctgctcagtggcaggcctgatccgctggtccatggacgaagctcgaaaagctcgcggaggtgcagaccccaatgcacgcttcatcgtgcttgaccccaacggtgagtacgccaacacctttcgcgatatgagcaaggtacgggtgtatgccgtagaacccagcgaaggggtagatcaactacaggtgcccctgtggttctggaacagcgcggagtggagtgcgtttacccaggccagcgcaaagatgcaacgccccctgctcaggcgagcactgcgtgacatcaaggcagggagagccctttcaacgtcctcaccagaagaggaaaagctcgcgctacgccgctacctctcatccagactgatctcaatccgtcgggacctccgttccggtgacatccagaccgatgagtcaaggttcggcttccgcctgaaggcgatcgctacggatatgcaaggaaaaattgctgtacatggcaataacaagttggatgacgttctaactgcgatcaataccgcgttgacggccgcgcacaacagctttgtcaaagacggcaagacgattgaatactaccgggcctttaatgaggctcacgtgcaggcaatcatcgcagcgctggaggcctctgttgatacgctgggcggtgtgcttctccaagagggtccggatgaggacgttccaatagccttcgatgggtctcagctcccagatcacctcgaagttctggcggagcaagagaacgccagtcagttcactgacttcctagtgtcgcgcatccgcacgctcctgtccgatactcggatgcgttcgattatttccaaccagagtggcatcaatcttcacgactggttgagcatgtacatcggcgaaagccaagcttccaacggctcggtcaccgtcatcgatctatcgctggtgccggcggaggtggtgcatatcatcacggcagtgatcgcccgcatgacgctggagaccttgcagcgttaccggaagctaaaccacggcaagactttgcctaccgtattggtgatggaagaggcgcatacattcattaagcgctacaaggacgacgccgaaaaccaaaactcggccaccatctgctgtcaggtgtttgaaaagatcgcccgcgaggggcgaaagttcgggctagggctggtgttgtcctcgcagcgcccaagcgaactgtcgcccaccgtgctctcccagtgcaatagctatctgttgcaccgcatcagcaacgaccgtgaccaggaactggtgcacaagctcgtgcccgacaacctgcgcggcctgttgcgcgacctgccgtcgctttcctctcgtcatgccattctactcggctgggcatcggagctgccggtcttggtgcagatgagagcactgcccgagaaccatcgtccgaaatcggacgatccagatttctgggcagtgtggtcaggccaagaccttgacggcaacatggtcgaacgcaatgtggattggaaggctatcgcggatgactggcagcaagtgcagccttctgaagatgctcaagatgaacatttggaattttga

SEQ ID NO: 363932 - DNA, 477 bp, Pseudomonas aeruginosa
atgggcgcagtcacagcccaccgactgatgatctaccccaacgctgcaaaggatagggaaaccgccgactacccctacgtagagctgtttcgcgatcttgccgccgccgtctgccgcccgaacagcacattggtgacctatggctacagctttggtgacgagcatatcaaccgtgtgatccgcgacatgctcaccatcccttcgacgcatctgctggtgatctcatacgacgatcgacttggtcgcatcatgcagacctaccaggaattaggcaggccatcgcagatcagcttgctgattggccctgcgttggccgacctgaccacgctgaccgagaactatctgcccaaggcagccatcgacaagacgaccttccgcatgagcgaactgctcaagcagcgaatggggacagaactgccgcctgccccacgccctgccgcagaggctggagccttcgacgggagcgatctggtatga

SEQ ID NO: 363933 - DNA, 825 bp, Pseudomonas aeruginosa
gtgaatgtcggctcgacgttcgaagcgaatgcgaagacgacgaaagttgtgaagccacgcgtgagtacgttcgacaacccagcggaatttgcccaagccactgccgtgttctgtccggcgcttggcgagcaccggtttgatgccgcgctcgcgaagccgctgacgatgcggctcggagtcgtagccacggtctgcgtagatgactttgggcttttgaagcgggcgaccgcgcacgccgcgaattggcgggatcgcgtcgacgagcggcagcagttgggtgacgtcgttgcggttcgccccggtcaggattgcgctgatggggacgccatttgcgtcgacgaggatgtgatgcttggaacctggtcgcgagcgatccgtggggttcggaccagtttttcgcccgccccaacggctcgcacagacgatgaatcgacggctgctcgggagaagtcgagttcgccggcctcgcgtaacttcgccagcagtagctcgtgcaatcgcttccaaacgccggccttctgccaatcgcgcaagcgcctccagcaggtcggccccgacccgaatcccaacttggtcgacaggtcgcaccagcgtatgccagtcttgaacacgaacaggatgccgttcagtgcagcccggttcgaaaccgggagccgccctggatatttcttgcgtcgcggtttcggcggcggcagcaaaggttcgatcagtgcccacagttcatcatcaatgatcggcgcgctcatcccctcggttccagttgttcagatggccaaggttaacagcttgccgaaaaggttaacagccccccggggctctttttga

SEQ ID NO: 363934 - DNA, 939 bp, Pseudomonas aeruginosa
atgatgtccgataaggccgagaaaatgccccccaatatcttgaaggtccgtgatgaccatcgaccagtgttttttgaaaaaggggccgaaggaggcagtttcaagatttgcgacggttccgacgccccatgggctggtgaaaactttggtcccgaagcactgcgccgccagatcgagccttggctcaccgcactctttcagtccgagcatctttcgctactcgcaggtgccggactcacccatgccgtgcatcacctcgccgtgggggaaggtgctgctgccggaatggacaaactgacgctgagcaatcaccaggccgaaatcgatcaagcagcagagaaagcagcggaagcggccgggcgtaagaagggtaacctggaagatcaactgcgcgttgccaacgaactgctgcgcggccttgagattctgcagcaagacagcaaggccgacgctctgcgtaacgaactgcagagcggcatgcaggcgtttgcgcagtctattttgagcagcgaagcgagaattgccacggccgaggaaagaaagcgcaagcaggcgttcaataccctggtcaccttcctgatgagctttgccagccgcaccggggtacgcgatcgtctgaatattttcactaccaactatgaccggctgatcgaggctggggcggagttggctggcctgcacctactggaccggtttctcggcaacctcatgccgatctttcgctcttcgcgcttggatctggatatgcactacaacccgcccggtattcgcggcgagccgcgctatctggaaggcgtggctcgctacaccaagttgcacggttcggtggactgggtgcaagtgggcaaggacgtccgccgtatcggcctgccatttggagcagagaacgtcgatccctatcttagagactgtttcaaaaagacggctcagcgcgcctga

SEQ ID NO: 363935 - DNA, 1305 bp, Pseudomonas aeruginosa
atggagatgtcagcgaaaaaacgcaggaccgtcgaagccgatttgactgcgctccttaagccgacagcgtggatgcctaaattgcaggcctacaaaactctcgatttgatagagagactgcgacgagaaatccgaacgcctggcgggcattcgttgtatttttcggaaaagggtctggaaagcttcttaaggctcagtgacacaatggaagaggttttgccaagccgatcagtgcttgagccgcagaacatccatgttgcttgcaagactgccctcggacacctgcgcgagcaagacaccccttcgagagatattgtgtcttacatgacggaagtggacagaatcgcccaggagtcaatcagcacacacaggttctacacgtccttagcgggtcttgaatttgacggtgttgatgaattcagcatcggttatttatccatacaaaggccggacctcgacgtattaaaaagctgtgttgcatatgacgatttggtcaccagcacatggaaacagatgcaacaggggttatgggtgacggctgaggttgcaggcagttttgaatacgcagagcgtcgtttcttcgacgacgtaaagaacgcctgcggattgctagctgtttcgttcacaaccgtgttggagcgcggcggcgcagcggtgaggctgattccgagcatggatggtcgttttaaacctggtgcggtcagttggttttctttttcgacaacattaaaggtgctccgcgcgacaaccaatatggtgggctttcaaaggctcacattcggtgaggagcataagagcggactgttgagctgcgactggtatcacgatttagttcgaatcacccaaaatagtaaagggtcagatgcggagctcgccgtccgtagagcgatttattggttttttgatgctcaaacagacacttctcctgaaatgcaattggtgaaattttggagctgcattgaatgtattttttcgattgggaagagcgataccacgaagaaaataaaacgtggagtgactgcgatactcacatacggacagtacaggttttcagaaacgagcaattggaagcggcttgaaaaggaaattggccacctctacgatttgcgttgtggagcggtgcatatggctgaacatagtcatgtgaaagctgagcacgtcacgacgctcagcaaatgggcggcttgggtgttgctagaggtggttcaactgatcaccgacggattcgacacgcgggtcaagataaaggcggaagtagatcgagtacatggattgcggcaggctgataaggccaagccagactaa

SEQ ID NO: 363936 - DNA, 1083 bp, Pseudomonas aeruginosa
atggattttgtagaacgcttaaatgcaatgtcagcgaaggttaatcagttagcgtcgacgatacaaacggaggaagcaacgaaaactgctttcgtcatgccgttcattcataccgtgctgggctatgatgtgttcgacccctccgaagtggttcccgaatacgtgtgcgatgtgggcacgaagaaaggggaaaagattgattacgcgattttgaaagatggtcaaatccagatattgatcgaaaccaaaaaagtcggcgagccgctcaatatcaaccatgcgagccaactcttccgatactttcatgtcaccactgcacgaatctccatccttacaaatggcaggttttatcggttctacaccgatcttgatgcaccaaacaaaatggatgaaaagccgtttctagaaatcgacctgcttaacattgatgagcacgtcatccctgaacttcaaaagcttacaaagtctgctttcgacgttgattcgatcatcaatgccgcgggcgaactgaagtacgtgggcaacataaaaaaggaaatggctaagcagttcacccagcctgatgatgacttcgttcgcttcttcgcatcgcgagtctacgaaggagtcatcacccaaaaagttcgagatcagtttactctgctcacaaggaaagccgcagcccagtttctcagtgaccaaatcaacgataggttgaagtcagcaatgagcaaagccacatttcccacgctcgctgaatcggtcgtcgctgaaaatcaggctgaagcccaagaagagcctgaagatcgtattctgactacgatggaggagctggaaggttttcatattatcaaagcgattgtccggaccgtcatagatgcaaagcgcatagccagcagagacacccagagctacttcggcatccttctagacgacaacaaccgcaaacctatcgcgagacttcacttcaatcgtagccaaaaatatctagggattttcgacaaggacaaagtcgaaacgcgccaccctatcaactcactcgacgaaatctatgagttttcagcctcgttgaaagagacgatatctttttaccaagaagcctga

SEQ ID NO: 363937 - DNA, 1023 bp, Pseudomonas aeruginosa
atgcaccttggcgaagtacaggcacagcagcggcgtcaccgtgatgctcagcagccaggagccgagcagggtcaggccgagtacgatcggcagcgaacgcaggtattcgttggtggcggtctggccgatgaagaacggcgagaacgccatcacgatcaccagcgaggaggtcagcagcggcaccgccagcgtgcggccggcctcgatacatgcatggcggcgctcttcgccggcggccaaccgtcgttcgatgtcctcggcgatgacgatcccgttgtccaccagcaggccgagagccatgatgatggccgcgatcgataccgtctgcagttccacgcccagcgcgcgcatggcgatcagtgcgccgaggatggtcagcggcacgatcgcgccgacgatcagaccggtgcgccaacccagaaacagcatcacgacgaccatgacgatcaggattgtctcgcccatgacctggtgcatgcggcccatctcgcgcgcgaccacgtcggcctggaaggtgaccacgtgctgctcgaagccggccggcaactgccgtgcggtctcttccagcttagtacgcagctgcgcaccgaagtcgccgatgttgtagccggtggccatcgacaccgcgaccaccaccgccggcatgccctcgtagaccgcggcgctctcgggcggatcggccggcatcacctcgatccgggcaagatgtcccagcggcacctcgcgcgtaccgcccgcaccggatgtgtccgacaccgagaccagaaagtggcgcaactcctcggtgctgcgcaactcgccggaagtggccaccgtcatcgccagccccgaagccgacaccagcccaccgggcgcgaccacgttctgcgcctgcaactgctgcatcaccgaggccgggctcagcccggcctcgaccaggcgcccgcgatcgaacgccacgtagacccggtcttcctgcaggccatagaatgtcacccgctcgacgccaggcaaggtatgcaactgcgcgcgcaggtcgcgtag

SEQ ID NO: 363938 - DNA, 483 bp, Pseudomonas aeruginosa
atggacggcccaggtgccgggctgcacctcgtcggccaggcccaggcgctgcaagtgttgcaggcggccgatcagcagcaggcgctggcgttgcagccggggttcgttgaagcgttcgatctgcacccggccatcctcgccggcctcgcgctgcaacgtgcggtcgaggctcgtccaccgctcttgctccacctcgcgctgcaaggtctgctggatctccagttcggtgcgcggccccagccattccgtcgccagctcggcggcgcgatggcggaagccgtgggcgatgtagtcgcccgcgatgatgaggtctttgccggtatcgtcgcgtccgcgcacgatcaggtgcgtgtgcgggttgtcggtgttccagtgatcgaccgccacccaatccagccgcgtccccaggtcggcctccatccggttcatcaggtgccgggtgtaggtgcgcaggtcgtccagctccgcactgtcttcaggtga

SEQ ID NO: 363939 - DNA, 588 bp, Pseudomonas aeruginosa
atgacgaccgtttccgcttcgtccgccccgccacgtcctcgctcgcacctgcgcgcccgtatcgtgctcgcgggtctgaccgcctgcggcctcgctgcgctggcctgggcggctttcgtgtcgccgcttccgcgcctgacgtacaacccatccgacagcgtagcggtcggctggtatcgcgtcgatccactcgaccatcggcccgcctcgctgccacgtccgttgtccgtgggcagcatcgtcctgacccgattgcctgccgacgctgccgcgctcgctgcgcagcgcggctacctgccggctcacattccgctgctcaagcgcgtgggtgcagtcgcgccgcaacacgtctgcatcgttgccggtcaggttcgcatcgacggcgtgccggtggctgccgcgctgcctgccgaccggctgggccgcccgctgccatcctggcagcattgccggccgctggccgacggcgagctgttcctgttgagcgtggcgaatccggcgtcgttcgacagccgctatttcggcccggtcagcgcatccgccgtgatcggcatcgcgcatccggtctggctggagtcccgcccatga

SEQ ID NO: 363940 - DNA, 1890 bp, Pseudomonas aeruginosa
atgcaagccagtcagtggacacccgagatcatcgtgatctgcgcagtgctcgccctcgccgcagctgtcatcggctttgtgctcgcaaccttgcgccaaagccggcaaataaaccaactcggtgcacagcttgaacaagtggcagaggccaagacttcgacagaagcacagtcgcaaatacttcagagccagcttcgcgagtcagagggccgtagccaggcgcttcaagtggaggagggcaagctcaaggtgcagctccaggcatcggttgaaaccaacgctcgcctgatgcaagaactacaggatcacaaagctgtggcaagtgatctgcaggtgaagctcgaccaagctaaccggcaacatcacgaagctgccaagcgcttggaagcagcacagaccagtgttcagggtcagcaagagcagatgagggagttgcgcgaacgtctcgatacaacgagcacggccaaaaccgcgctgcaagaggagcgtgatcgcctgaaggatgcattggcgaacgaggaaactcgcgccaaggtggcggaaacctccgagcacgatgcccgcgcgcagttggctgaaaccaagcagcaactgcatgagcaggtaaaggcgttcggcgagctccaggagcgtttcaataccctgtcatcggagcacaccaagctcaaaaccaccctgagtcagcgcgaggagcacttccaggagcagatgacgcagctggctgatgcgcgcaagtcgctgacccaggagttcgagaacctggccaacaagattttcgaggagaagggcaagaccttcacccaaaccagccaaaccagcatcgacggtatgctcaagccattccgcgagcagatcgaaggtttccagaagcgcatcaacgaagttcacgatgcgtccctgcagggcaacaccagtctcaactctgaaatcaaaaaggtgctggaaatcggcctgcagatgagcaaagaggccaacaacctcacctccgcgctcaagggcgactcccagcaacgtggggcctggggtgaggcgcaactgcgtcgcacgctggaaatgagcgggctgatcgaagaggcacactacgaagtgcaggcagccttcaaagatgccgagggccgctccaagcaaaccgactacctgatcaaactgcctgacggcaaacacattatcatcgacagcaaggtctctctggttgcttacgaccgcgccgttggctccgagtcaccagaggaataccagctggccatggctgaacatgtcaaagcggtgcgcaagcatatcgatgacttggcatccaaggactacaccaacctagccggcattcacagccctgactttgtgctcatgttcatgcccattgagcctgcctacattgaggccatgaagcacaacaaggatctgttcgaatacggctacaagaagcacattgtgctggtttcccacaccaccctaattcccattctgcgcaccgtcgccaacctgtggatgatcgagcgcagcaatgccgaagcgcgtgagatcagcgagaaggctggcgagatctataaccaggtatgccttgtggctgagcgcatcggcaagctgggcggtacgctgaatacggcgagcaatcactacaacagcgcgataacagcattggcgggtcaacaggggctatacggcaagattgatcgcttcagccagctgtcagccaaagtcagcaagaccctgccgacgctggagcctgttcatgttgatttccaaaacgagcgactctcgctgatcgtcgaggccctcgacgagtcgcctgagccaaacgagagcctgccgcagctaccagccgacgaccacgaaggcgagcagtcctctcacacagaaaccagccttaaaaacgaattcgagttcttctga

SEQ ID NO: 363941 - DNA, 1152 bp, Pseudomonas aeruginosa
gtgagttggccgctggttcagattggcaggtgtgtcgagaaggttcggacgtggaaccctactggtgggccggagtgtattttccagtatgtggatcttagctctgtcgataaaagcaaaaaaattattgacttagatgatgtggcggagatttcttctgcagacgccccaagccgtgctcgtcagttggttgtgacaggcgatgttttggttgcaacagttcggccgaatctgaatggggtggctgtggttcccgcggagctgaatggtgcgactgcttctactggatactgtgttctccgagctgacgaaaaaaatctgcatgggcggtatttgttttattgggttcaaacagattcttttgttgaggaaatgatgtctaaagctactggagctaactatccagcggtttcggacaagataataaaagagagccaaatccccctcccccccctgcccgaacaaaagcgcatcgccgccatcctcgacaaggccgacgctatccgccgcaaacgccagcaagctattcagctcgccgacgacttcctccgcgccgtgtttctggacatgttcggcgacccggtgagcaatccgaaggggtgggaggtcaagcctctgggtagtctggtcgtcaacaaggatggaaaaaggatacctataaaagcttcagatcgtgctgatatggcaggagagtatccttattacggtgcgagtggcgtaattgactatgtgaatgattttatatttgaggggcggcaccttcttattggtgaagatggtgcaaatcttctagcaagatcaacgcctattgcgtttattgctgatggccggtactgggttaataatcacgcgcatgtcttgggcgagaagaatagtctatcgttagactaccttgcgttttcaataaatatgcgggggcttgagtcttttgtgagtggtagtgctcagccaaagctgaatcaagagaatctgaataagattccaattcaagtgccgcctctgattttggttgataagttttcagccattctgaatgggcgccaggaatatatggaaaaaatgattatctcagagccagaggttctgtttagttcgctcagccaaaaagccttttcaggacagttatttgccagggaatctccatgcgtctag

SEQ ID NO: 363942 - DNA, 894 bp, Pseudomonas aeruginosa
atgcacgccatatttgccatagagcctgaagccatcaataactggcaagacttgcgctatgccttggagaagtttggttatagcaaggggctgctgatcgcgcgctatccgaagacctggatgcggctcgtgatggaggcttgccgtagcagaggacttggcgatatcgaattgaagcgtatagaggaaaaactacagagtgccaaggatgatcgcttggtacggataggcttgccctacgtgggtactagctggttggagagtgtcaatgctgaggctgttttaagtcaactatcagcggtcttggtgcgaaacaaagtcgacctagataagtttcatcggatcgatgatgcaagtgagagattattcgataatcgccgagatttttgtgttaagcggaatgcaaatgcgctagcagaagctgctaagtatgtattggctgcatcggatcaagtcgtgcttgtagacccctattttcaatccaggcgaaaatgcataaaagtgctaaattctatgcttagcatttgcgtggcaagtggtgacctgccgaaccatatctttatcttctcagaccacagtaaagatcaccgccaactaggggaggtgaaacttgagtatgagaatcaacttaacgcctgggtgcagcgcggagtcagattcagtattttcaggatggcgggtgaccagttggatcaagacgtccatgcacgctatctatttaatcaaaaggcaggtcttcgctttgatcggggctttgttgagcccgaagctcataatgaacgggaacatgagactgacgttgtctgtatggatacagatctcgtcaatagattgtatgcgcgtttcattgaggcacgcgcaacgatcgatgtggtagatgaaattttgctgtag

SEQ ID NO: 363943 - DNA, 1113 bp, Pseudomonas aeruginosa
gtgcccactccagccggtccagatagtgacctcgctgtcgcggaaccgaatggtgtcgtgagacttctcccacggggtcgccatccccattaccaccgggttgcgctcaaagaactcagcacaaacgtcatcggcgaaggtttcggctcctaccagcttctccggatcaagggtcttggccttggcgtagcagtcgtcaatgtcgtctcgcgtgtagaacagggcgtccagggcttcgttgaagtccttgcagcccaggtcaaggatgcggcagcgctcacgcccaagacgcttgatcagttcctcggtcgcctgcttcccagcctcgtcgttgtccatcgcgaggtagatcacgtcgaaccgggagagccgcgagtattcgtgctcgatccacgcctgcttctcgcctttgccgcccccaaatggcaccgacaacgccggacgaccgtactgccaggcggtcatggcatcgatctcgccttcggtgatggtcacctctcgggcgccttccggaatcgcctgccagccgaagaggcacggctccgaatccttcgaggcaaagattttcttcttgccgttctcgcggtcgatgcacagcgttttccagtggatcagggtgccgtcgcgcagaaacggaaacacgatgtcgcggcccttctcgccgatcttgaacgccgcgatagtttccggcttgagcccacggccagcgaggtaagccatgaccggagactcatcggcaggcgccttgcacttcgggcgatcagggcggacgtaggccttcctcgacggcgcttcgagcttgggctcggcgatccccaggtaggacttcgcctcggtgagtgcagtgcccatgtcacaactgcgaactgcacgccacaggtccagcaagtcgccggtttcaccggtcgagaagtcgcaccagacacctgctttctcgcccttgaggtgaacccccaggctctggcccttctcgccgttcacgctgcctacgcgccactccgagccctcacgcttgccaccgggcagcaggtggtgagccacgtcgatcacgcgatctgcgaggcgctgggcgatctgcgagggagtcatgccagccccctggagcgcaggtag

SEQ ID NO: 363944 - DNA, 351 bp, Pseudomonas aeruginosa; identical to SEQ ID NO: 355963

SEQ ID NO: 363945 - DNA, 1113 bp, Pseudomonas aeruginosa
gtgaccactccagccggtccagatagtgacctcgctgtcgcggaaccgaatggtgtcgtgagacttctcccacggggtcgccatccccatcaccaccgggttgcgctcaaagaactcagcacaaacgtcatcggcgaaggtttcggctcctaccagcttctccggatcaagggtcttggccttggcgtagcagtcgtcaatgtcgtctcgcgtgtagaacagggcgtccagggcttcgttgaagtccttgcagcccaggtcaaggatgcggcagcgctcacgcccaagacgcttgatcagttcctcggtcgcctgcttcccagcctcgtcgttgtccatcgcgaggtagatcacgtcgaaccgggagagccgcgagtattcgtgctcgatccacgcctgcttctcgcctttgccgcccccaaatggcaccgacaacgccggacgaccgtactgccaggcggtcatggcatcgatctcgccttcggtgatggtcacctctcgggcgccttccggaatcgcctgccagccgaagaggcacggctccgaatccttcgaggcaaagattttcttcttgccgttctcgcggtcgatgcacagcgttttccagtggatcagggtgccgtcgcgcagaaacggaaacacgatgtcgcggcccttctcgccgatcttgaacgccgcgatagtttccggcttgagcccacggccagcgaggtaagccatgaccggagactcatcggcaggcgccttgcacttcgggcgatcagggcggacgtaggccttcctcgacggcgcttcgagcttgggctcggcgatccccaggtaggacttcgcctcggtgagtgcagtgcccatgtcacaactgcgaactgcacgccacaggtccagcaagtcgccggtttcaccggtcgagaagtcgcaccagacacctgctttctcgcccttgaggtgaacccccaggctctggcccttctcgccgttcacgctgcctacgcgccactccgagccctcacgcttgccaccgggcagcaggtggtgagccacgtcgatcacgcgatctgcgaggcgctgggcgatctgcgagggagtcatgccagccccctggagcgcaggtag

SEQ ID NO: 363946 - DNA, 423 bp, Pseudomonas aeruginosa; identical to SEQ ID NO: 330189

SEQ ID NO: 363947 - DNA, 186 bp, Pseudomonas aeruginosa
atgcaacctcgaacgctgacttacaacgccttggagcttcgtccggcgaagaactccattgccatctgccaaggtgatcaggtcgtgaccatcactctggatcaactccaccagttcacaagcgatctctgcatcctcgccgcctccatgcgcgaagacatgcgcaatccgctggaggacgaataa

SEQ ID NO: 363948 - DNA, 312 bp, Pseudomonas aeruginosa
atgtcgacgagcaagttaacccccgagcaagagtcaagatcacgcgatttcgaggcgctgttcttgagccagcttctgtcggtgggccagaaggtcgtcgccgacgcaatcggcgtgagcgaatcgactgtcagtcgttggaaagagggcgagatagagcggtggtgcaaggtgcttgcgctgctggagcttcaggtcgtcccgatgtcggctcagtgtcatccatccgagtacatccaggcgctcaagaccctggccgagcttggcttgcaggccgagaagaagcggcctggaccgttggggtgggattga

SEQ ID NO: 363949 - DNA, 216 bp, Pseudomonas aeruginosa
atggacgtggacgcccatttcgtgggcaaagccaacgatggcttccatggcctgtttctggccgttgtagtcatcctcagccatgccaagcttcgccaagctgtcaacgacgaactgtttcaccccgtaccgccgtgcggcatagcggaaggtgtcgatcatctcggcggtattggcggaacccatctggttgtagatccacagccgacctcctag

SEQ ID NO: 363950 - DNA, 240 bp, Pseudomonas aeruginosa
atgccggtgtacgccctgtccgaggatttgccgatgttccatacactcctggtcgccatcgacggcggcccgcagacccgtcgcattgctgagctggcgcggcaggccgccgcgccgggcgcgcgggtccacctgctgtgcgcggtggacgccggctatgcgttgccgggccggccgacgctgctcgactatccgcccgccgcgcacgagtgtgaagaggcaccggcaggtgctcgatga

SEQ ID NO: 363951 - DNA, 165 bp, Pseudomonas aeruginosa
atgggtaacgtaagtgaactgctgataaacgccgtaatgataaacatgccaaaactgctgtcaggcatggaccaaaaggtatggggccagttattcctgtgggatgtgggaatacgtcgctacaaggcctccggtgaaaaggcagaccctaaaccaatcgtgtga

SEQ ID NO: 363952 - DNA, 261 bp, Pseudomonas aeruginosa
atggagcaagcaatgagagaagagtttgaagcgtgggctaccaagcaccgtatgccgattcatcgcgacggtgttgtcaccgactatgcagccagatgcacagatgaatgctggcaagcctggaaagccagccgcgcggctctgagggtggtgttgccgaaatcgtacgcggcattggaatacgcgcctaaaaccaaggttttcaacataatcgacatggaaatagccctccagcaagccggaatcgaggtggcgaaatga

SEQ ID NO: 363953 - DNA, 444 bp, Pseudomonas aeruginosa
atgaccgaccacgcagagctgcggaggcttgctgaggcggccacgccggggccttgggaatatcaggcaccgctaaaggtattagcagcagataggacatggatcgtccttatcgcgctatctcacgctaattgtcgtgaggacaaagcaaacagcagatttatagccgccaacaaccccaagaccgtcctcgccctgctggacgagatcgacgggctgagcgacgagttatccgcatgcaccgagcatcctggcggatgtgggtattggcgcgaggccgccaagcgtagagcggaagaacgcgatcagttcaaggaggagaacgaagccctgcgcgagagcctgcaagcgctgattcatatttcagacgctacaggctgggaagaccatacctgcggagagatagccaaggcgcgagcagccctggaaggagccaagccatga

SEQ ID NO: 363954 - DNA, 249 bp, Pseudomonas aeruginosa
atgagagaagagtttgaagcgtgggctaccaagcaccgtatgccgattcatcgcgacggtgttgtcaccgactatgcagccagatgcacagatgaatgctggcaagcctggaaagccagccgcgcggctctgagggtggtgttgccgaaatcgtacgcggcattggaatacgcgcctaaaaccaaggttttcaacataatcgacatggaaatagccctccagcaagccggaatcgaggtggcgaaatga

SEQ ID NO: 363955 - DNA, 228 bp, Pseudomonas aeruginosa
atgagctacagcgtggagaaagtcatgcgcgtctatgacgacaaagaaggcgtgtacatcgaggtcaggcagcacccggatgcaccggaaagcggcctggaaatccataccgtaggtcaccaagcctgcatcgactggtacggcgagcagcgaatcgtgctgaacagtcgggagcacgctcttgccctggcaagggccatcaccgaaatggcggagatgatcccatga

SEQ ID NO: 363956 - DNA, 684 bp, Pseudomonas aeruginosa
atgagcctcttcatccacggccgcctgggccactacctcatgaatgaagcaaatgttgacggtgcacaatccggggccgcgaccacaaccgcaagcggtgccgagggtgaacagtcgcagggcgaaggccagcagcgacagtctgccgaccagagccagcagcaagcccagcaagagcaacagcagcaggctgccgcaacggtagccccagaagtctatgcgttcgccaacctgcccgaaggctactccatcagcgaagagcaactggccgcattctctccagtgctgaaggaactgggcctgacccaggagcaggctgacaagctggttgcattcgatgcccagcgctctctgcaggcccaagaggcaagccagcagcaggccgtcgagttccgcaaccggcaggtctccaagtgggaatccgagctgaagcaagacgcggcattcgggggcgccaatttcgaggccaacgttggcatcgcacagaaagccctggccgattacggcacccctgagctgaccgcgatgctgaaggaatccgggcttggatctcacccggaagtcgtccgcttcttccaccgagtcggccaggaattggccgagggcaagctgcatcgcaccaccaccgaagtcccaaccgaacgctcgctggccgagcggatgtaccccaactaccccgcttaa

SEQ ID NO: 363957 - DNA, 207 bp, Pseudomonas aeruginosa
atgagcgatcgtatctgcgaatgccatcgctgcatccgtgagcatagactcggcaagggcagtccattcggctggctgcctctatccagcgtcaaaatgatcctgtgccctacctgcgggaacaagcgctgcccgcatgccagtgatcacgatctgtcctgtactggcagcaatgagcgtggccagccagggagcatcttcgaatga

SEQ ID NO: 363958 - DNA, 1713 bp, Pseudomonas aeruginosa; identical to SEQ ID NO: 340495

SEQ ID NO: 363959 - DNA, 1437 bp, Pseudomonas aeruginosa
atgaagcgattcgtggatggcgttgatcgttcccaagggcttttgctccctgatcggctggaagacttcgtccacgatgacaacccggtgcgggtggttgatgccttcgtggaagcactcgatctgagcaggctgggcttcgaggccgccaatcgcgtggctggggggcgtcctgcgtatcaccccgcggcactgctcaagatctatatctacggttacctcaaccgcatccagtccagccgtcgtctggagcgggaggcacaacggaacctggagctgatctggttgactggccggctggcgccggacttcaagaccatcgccgacttccgcaaggacaacggcagcgcgatcaccgcggtgtgcagccggttcgtcagcctctgccggaacatgaaggtcttctcgcacgcgatcgtcgcgatcgatggcagcaagctcaaggcggtgaacagccgggatcgcaacttcaccgttggcaagatcaaggggcgccggcagcaactggaggagagcgttgcgcgctatctggccgagatggaccgcgcggatcgtgatccaagcttgttgccagaggggcgcgttccgcacctgaaagacaagctggcgaagctgcgcgcgcagatggagacgctcgacgctatcgagaagcagctcgaggctgcgccagttaaccagatatcgctgacggatccggacgcgagatcaatgacctcaagtggtcgtggcacgggaacggttggctacaacgttcaggtggcggtcgacgccgagcgtcatctgatcgtcgctcatgacgtgacgaacgacggtcacgaccgcgcgcagctctcgcgcatggcaacgaaggcaagggaagcccttggcaccgaacgcatgacggcactggcagatcgtggctacttcaatgcgccagagatcctggcgtgcgaggaggcaggcgtcattccgttggtgcccaagccgctcacgtcgaacagcaaggccgaaggccggttcgacaagcgggactttgtttatgacgaagccgcggatgagtacgaatgcccagcaggcgaaagagcgatccatcgcttcacggccgaagaaaagggcctgaccctgcgtaagtattggtcctcggcctgcccccgctgcccgatgcgggcgcaatgcacgaccgcaagctatagacgaatcacccgctgggagcacgaacacgtgctcgaacgaatgcagatgctgctggatgccaagccggaagcggccgtagcacggcgacagacggttgagcatgtcttcggcacgctcaaatcgtggctcggaacgacgccattgctgaccaagacacttccaaaggtcaaaacggagatcagcttggcggttctggcctacaacatgaagcggatgatcaagatcatgggcaccgatggcatggtgcgggccatcgcggcctaa

SEQ ID NO: 363960 - DNA, 279 bp, Pseudomonas aeruginosa
atgagcaagcaatcgcatacgccggggccttgggtgtctcgaaataacatggtcttcggtgggaaaaagtgtatctgttcaaacgtcaatgccgcctcgccgaccccgcaaaacatagctgaagacgttgctatgtcgattgcaaacgcccgcctgatggctgcggcgccggagcttctggatgccctggtaaatcttctgccgctgattagtccgctgaaagcggaaatccagcaggttgcgaatgcatccgccgcaatcgcaaaggccaccgcctaa

SEQ ID NO: 363961 - DNA, 756 bp, Pseudomonas aeruginosa
atgactggcctgacctcaattggcggccaggccgccaccatgaccagtatcgagctgttggaactggtgaatcatgctcgagctgagttcggcgaaagccccgttcgccacaacgatttcgtggccaggtgtcgggatgagcttgatggcgaatattacgaaagtttcgtagtaaagcaggaggggcctggtcgtcctcctgaggctctgcgcctcacccgcgaccagtgcgaattagtggccatgcgcgagtcgaagggcgtccggcgcgcggttcgtgatcggctcaaggcgctcgaagccagggctctgccggacgtgtcgagccacgagggcaccttgctcgtgctccaaggagcgattcagcgcgagcttgcgctgatcagcgagaacaagcagctcgccgctgagcgtgaccacgccatcgccaccaaggcgcagatcggcagccgccgggaggcccaggctatggccgccgcgtcctccgctgttcgccaggtgcgtcgacttgaaaatgagctgggccgcggcactcgcttcgccacggtcacggctgtcgagatcgccaccggcaccaagtacccgttcaacgcctatgtccacctgcgcaagtggtgcaaggccaatggcgttcagcccgagatcgtccccgaccgccgttttggcgaagtaaaggcgtggcctgcaggagcttgggcagccgtttatcaaatcgatctggcgaccttgttcggcgcctctggagcaaaagcatga

SEQ ID NO: 363962 - DNA, 342 bp, Pseudomonas aeruginosa
atgagcaacctgcttcagcaccgcggctactacggttctatcgaggctagcccggaagacaactgcctgttcggcaaactgctgttcatccgcgctctggtcagctatgagggcgagaccgtggcagaactgagtgcttcgttccgggcggcggtcgatgattatttggcctattgcgcttcgaagggcgaggatccggaagtaccctgcaagggatcgttcaatgtgcgcgtaggccatgaactgcacatggcggccagcattacagccagccggcagaacatcacgttgaacgatctgacgcgccgggcgctaagcgaatatatcgaccatcatgcctga

SEQ ID NO: 363963 - DNA, 249 bp, Pseudomonas aeruginosa
atgtcgaagcatgagaagctggttgccaagctgctgaacaggcaggcggccttcacttggcaggagttggtggctctgcttcgtgggctgggttatcggcagcttgagggagatggaagtcgcgtcaaattcgacaatggtgacccaaaggcaatgatcaacctgcaccggccccatcccggcaacgagctcaaggcatacgccaagcgccaggtgattgagcacctgaagaacggaggacttatctga

SEQ ID NO: 363964 - DNA, 765 bp, Pseudomonas aeruginosa
atgactgatctggcccccttcggcggccaggccgccaccatgaccagccgcgagatcgcggatcttgttgggtcgcgtcacgacaatgtacgcgtgaccattgagcgactggccgagcgcggggtgattgctttacctgcaatgcaggaaaagcccaccgctggccgccccactcaggagtacgtcttcaccggcgaccagggcaagcgcgacagcatcatcgtcgtcgcccagctctgcccggagttcaccgcgcggctggtggatcgctggcaggaactggaacagcaggcttcccggccactgaccgccgccgagcaactactggccagcgtgcaactcaccgtcgatctggagcggcggcagcggctgaccgagcagcaggtggcagcgctgaccgaaaccgtcggcgacatggaccgatcgcacccgctgctcgactcgatccccaacggcatggagagcatcaccgctatccggcagcggatagggaagcagtacggccttccgcccagggtgatcgacgcggtggtgcgcgacatgccgcacagcccgcgccccttcgccatggtgcgcagcaagcacgaggaactgaacgcgcgcccctacgcggtctgggcaaaggccgagatcagcagggtgttcgagcgcttcgcgcgcggctgcaccttcgtgacccaacaccgagccacgcacccggatttcggcgccggccgggagcgcttccagatgcgcggcaccccttcgcaggagatcggcgaatga

SEQ ID NO: 363965 - DNA, 1062 bp, Pseudomonas aeruginosa; identical to SEQ ID NO: 351467

SEQ ID NO: 363966 - DNA, 414 bp, Pseudomonas aeruginosa
atgaccggcggcgatgcggcgctcgacctgaccgcaatgccggccgtggtgttcaccgatccgcaagtggcgaccgtgggctacagcgaggcggaagcccaccacgacgggatcgagaccgacagccgcaccttgaccttggacaacgtgccgcgtgcgctcgccaacttcgacacacgcggcttcatcaagttggttatcgaggaaggcagccatcggctgatcggcgtacaggcggtcgcgccggaagcgggtgaactgatccagacggcggctctggccattcgcaaccgcatgacggtgcaggaactggccgaccagttgttcccctacctgacgatggtcgaggggttgaagctcgcggcgcagaccttcaacaaggatgtgaagcagctttcctgctgcgccgggtga

SEQ ID NO: 363967 - DNA, 366 bp, Pseudomonas aeruginosa; identical to SEQ ID NO: 96026

SEQ ID NO: 363968 - DNA, 639 bp, Pseudomonas aeruginosa
gtggctgaatccaccgtatggcgacctgtccaaggacgtcaacggcaacatcggctatcagggccagggccgtgcccgcctcgaaaagctgttctatcagcgttcgctgtcgctgttgcaatacggcggcgtgctggtcttcatcgtccccggctacgtgctcgacgcggagctggtcggctggttgacgcgccactacaccgatctgcgtatctaccgagcggtggaaacgcagttcaagcaggtggtgatcttcggccgccgggtccgtcagcgggagctggcacccgatggcgtcaaggccgtgcgcaatctgctgctgcaggttgggcttggcgaagtcgaagccgaggaactgccgagcgaatggccgttcctgccgtacatcgtccccgccagtccggccgagccggagcatttcttccgcgtgacgatggagcccgaacagttcgccgacgaggttggccggctgcaaggcctttggccgtcgctggacacgcacttggggaccgcgcagcagtcgctgcgtccaccggcgcgggccttgtcccactggcatctcgccctggctctggccgcgggcgcgatctccggcgtcgtgcgctcccagacggggcgcgtgctcgtcgtcaaaggtga

SEQ ID NO: 363969 - DNA, 618 bp, Pseudomonas aeruginosa; identical to SEQ ID NO: 327950

SEQ ID NO: 363970 - DNA, 828 bp, Pseudomonas aeruginosa
atggcaatccgaatcttcgcgatacttttctccattttttctcttgccactttcgcgcatgcgcaagaaggcacgctagaacgttctgactggaggaagtttttcagcgaatttcaagccaaaggcacgatagttgtggcagacgaacgccaagcggatcgtgccatgttggtttttgatcctgtgcgatcgaagaaacgctactcgcctgcatcgacattcaagatacctcatacactttttgcacttgatgcaggcgctgttcgtgatgagttccagatttttcgatgggacggcgttaacaggggctttgcaggccacaatcaagaccaagatttgcgatcagcaatgcggaattctactgtttgggtgtatgagctatttgcaaaggaaattggtgatgacaaagctcggcgctatttgaagaaaatcgactatggcaacgccgatccttcgacaagtaatggcgattacaggatagaaggcagccttgcaatctcggcgcaggagcaaattgcatttctcaggaagctctatcgtaacgagctgccctttcgggtagaacatcagcgcttggtcaaggatctcatgattgtggaagccggtcgcaactggatactgcgtgcaaagacgggctgggaaggccgtatgggttggtgggtaggatgggttgagtggccgactggctccgtattcttcgcactgaatattgatacgccaaacagaatggatgatcttttcaagagggaggcaatcgtgcgggcaatccttcgctctattgaagcgttaccgcccaacccggcagtcaactcggacgctgcgcgataa

SEQ ID NO: 363971 - DNA, 288 bp, Pseudomonas aeruginosa
atgatgaagcgggttctctacaaaggggcgttcttcactgagtgggacggcccgctggcggccatcgctgaaactgccggggtgagcctggacgatcttacgttccaccctggcgacgcgctggccgaggtccaggagctgcgccggcaggcataccgggacgaggctgacccgctgcgcttggaggccgagtatgacgccatcgctaccggtacagagccggacctgtcggcctgggtcgaagctgtcaaagcgatcaaagaacgctatccgctcccccagtcctaa

SEQ ID NO: 363972 - DNA, 1083 bp, Pseudomonas aeruginosa; identical to SEQ ID NO: 361589

SEQ ID NO: 363973 - DNA, 597 bp, Pseudomonas aeruginosa
  misc_feature (530)..(539): n is a, c, g, or t
atgactgcgatatatgcagaggatcaagttagagataaagagctgtttgatgaaatctatgttgcaatgcgtcacgaaaagatgctggtgcttgaaagtgtttttgaagaagatgcattggtttctggtggtttggcagagaccattcgtatttttcgatcctctgatgaggcgattcggacgtacaaaagccgccgtgaaatggttcagtttgtatcggaggttgtgcatctgagaagtactggtattgcatggtgtactgcagatagtacgggctgctccggtggcagtgtattggataaaactcgatgcggtgattgctcgaaaagtcttatcgatgaatcgcggctgccacattgggtaggcatatatgctcaaatgttggagcttaaagctatcgctaatgactgtggtccaggtgcgggtgcacgaattgacagcgatattcgacggtgtgaagtcgtccttcaagagcttggagctgatattgaggagcttaagctcggtgttttacttgaaggggggcttcnnnnnnnnnngggggcttcgtcatgcataaagaagatcgaatatcgggaaccgaaaaaaagttgctag

SEQ ID NO: 363974 - DNA, 705 bp, Pseudomonas aeruginosa
atggcagcgcggcccgcacaacctgcgcgaccgcctgaccgaacgcgaaatcgacgcctaccggcatccgctggtgcgctttgtcgggctggacggctacgagcaggaaggcggtggcatccgccgcgacctgttcgcggagggcgacaaaggcgtgtatctgaccgatgccgcactgctggaacggctggcgcaggacaagctggcaggtatcgccgccaaggtgcaggccgagggctgggcgtgggtggatgccacgccgggcatgacccatgccgatctgcaagccttccagcgtgcgccaagggaacgccgcagtccgaacaagcgcgacgcgcagcgcatcgagaagctgcaaaccaagctgcacgaactggccgaggcggtggatgccgcgctggacgacgaggacgaggaaaaggccgatgccttgcaggaagaaggcgaacgcctgggcgagcagttgcaggcgctggaagatggcttgctggactatgcggccaacgtgaaggccgcagccggtgccattgtcaccatcgaccgcgacgggcaggccgcgattcatcgcgggctgctgcgcgaagcggaggccaaggcactgcgcacgctggagcggctgcggcagggtttcggcagcgaaggcgaagccgcgaacgaggacgcaggcgaggacgacgagcagcccaagaccgccgccatgtctga

SEQ ID NO: 363975 - DNA, 150 bp, Pseudomonas aeruginosa
atgcccagcggcgtgccgctggcgtcggccagttccttccactcgttgatccaggagaagcggtgcaatcgccgcccggtcgtctcgcggatggacgtggctaccgtggtcgattgcaggcgatccaaggccgccttgaggcgctggtag

SEQ ID NO: 363976 - DNA, 678 bp, Pseudomonas aeruginosa
atgcttgcgcaccaggcggtacagccagcgttcgataccgcccttcaagcggaaataggccgggtcgatggtcagcaccagggcggcgtcgagcacgccggcatagaaccagtccggcaagatcagctcgatgcccagcggggtgccgctggcgtcggcgagttccttccactcgttgatccacgagaagcgatgcaagcgccttcccgtggtttcgcggatggacgtggccaccgtggtcgattgcagccggtcgagggcggccttcaggcgctggtagtcgttgagggacgtgccgcgcccgatgaagcgcaaaatctcgtaaggcgtggcgcgtatccagcgcgacgggcgcaggcccgcgtcgcgcgcctccacgatctgcgaggcggcccatatcagcacgtcggcatcccatatcgttgcgatgccgtgctcctgcgtgccttccacgcgaatggtgacgttcccgctgcggaagtcgatcggcgccgtgcgccgcgacttggcaagcgagaagaacggaaaggccatcaagtcctgggaatcgcgtggcgccatgtcgcccggcagcgcgcggaacagatcgagctgttcgcgctgcggcaaggcttgccctggcgggctggacatggcgaaggccacccacgcgccgacgatcagcggccatcacggtag

SEQ ID NO: 363977 - DNA, 771 bp, Pseudomonas aeruginosa
gtgaagcggcccgacattgccgggctgatggagaagctggcctacaagccgaccgaggcgaacaagaccttcggcgtgctgcgcaagatgttcaacctggccgaagtgtggggctaccgcccggacggcacaaatccgtgccgccacgtcccgatgtacccgccgggcaaggaaacccggctcatcgtggacgaggaaatggtgcggctcttccgccatctggagaagctggaggcggaagggctggagaactacgtcatccctctggcgatccggctgcaattcgagttcgccgcccggcgctccgaaatctgcccgctcgaatggagctggctggacttcgagaaccggcgcgtggtgtggcccgacagcaaggtcggcggcatttccaagcccatgagcgaggaagcctatcggctgctttcgacggcgccgcgccgggagggctgcccttatgtcctgccgtcgcccaacgacccggccaagcacctgacctttggcgaacactatggcggctggtgccgggtgctcaaggccgccggcgtcccgcacgtcggcacgcacggcatccgccatcgctcgacgaccgacattgccaattctggcgtaccgaccaaggtggggatgaagctgacgggccacaagaccgtggcgatgttcatgcactacgtccataccgaggacaagccggtgcgcgatgccgccgagctggtggccagccggcgccaggccatcacgggcgcgcgccagcttgcggaggcggcagcatga

SEQ ID NO: 363978 - DNA, 771 bp, Pseudomonas aeruginosa
gtgaagcggcccgacattgcggggctcatggaaaagctggcctacaagccgaccgaggccaacaagaccttcggcgtgctgcgcaagatgttcaacttggccgaagtctggggcttccgcccggacggcacgaatccgtgccgccacgtcccgatgtacccgccgggcaaggaaacccggctcatcgtggacgaggaaatggtgcggatcttccgccagttggagaaactggaggcggaggggctggagaactacgtcatcccgttggcgatccggctgcaattcgagtttgcggcgcggcgctccgaaatctgcccgctcgaatggagctggctggacttcgagaaccggcgcgtggtgtggcccgacagcaaggttggcggcatttccaagcccatgagcgaggaagcctatcggctgctttcgacggcgccgcgtctggaaggctgcccttacgtcctgccgtcgccgaacgacccggccaagcacctgacctttggcgagcactatggcggctggtgccggacgctcaaggccgccagcgtgccgcacgtaggcacgcacggcatccgtcatcgctcgaccaccgacattgccaattccggtgtgccgaccaaagtgggaatgaagctgacgggccacaagaccgtggcgatgttcatgcactacgtccacaccgaggacaagccggtgcgcgaggcggccgagctggtggccagccgccgccaagccatcacgggcgcgcggcagcttgcggaggcggtggcatga

SEQ ID NO: 363979 - DNA, 276 bp, Pseudomonas aeruginosa
gtggtgcggaccatctacggcgccggcggcaagatgactgccacattcttgttcccgggcgggtacgaggtggacgccgccagcggcgcggagctgccgggcaactaccgcgtcgagtcgatctccctggaccaggtcgtactcaccgacaaggacggcaaccgcttgcccgtgggcttctccagcgttgccccgacccaagccgcctcctcggcccaaggcgcctccgttccgccggcgctgcccggggcggtaccgcagccgttcatccagtag

SEQ ID NO: 363980 - DNA, 276 bp, Pseudomonas aeruginosa
gtggtgcggaccatctacggcgccggcggcaagatgactgccactttcttgttcccgggcgggtacgaggttgacgccgccagcggcgcggagctgccgggcaactaccgcgtcgagtcaatctcgctggaccaggtcgtgctcaccgacaaggacggcaaccgcgtgcccgtgggcttctccagcgttgcccccacccaagcctcctcttcggcccaaggcgcctcggttccgccggcgctgcccggggctgtaccgcagccgttcatccagtag

SEQ ID NO: 363981 - DNA, 1149 bp, Pseudomonas aeruginosa
atggagcttgtgtgggctacggaagatttgatgattgctgggcaaccctatccggggttcccgattctgctgtgggactcgatggagagttgcgtcccggcaaatcagttctttcgtcactacctgcttcgcggagccattggctccaagcgttcctggcccagcaccgcgcgtgcgctgtacgacttctttagcttcatccaggctcatgagctggactggcgcgacgttgatcgtagcgaggccaagagccttgtggcggcctatcgggactactgcatggtggcgtgcggactggcccccaacaccacgagccagcgcctgcattacatctgcaagttctacgaattcgcgctgacgaagggatgggtgacccagctgcccttcacctatgaagagcgcactgtaaagcgaaaaacagactttcttgcgcacgtcgatgcaagtggcggtaagacaatggcaaatgatgtgatgccacgtcgccacaacatattgccaaagtttttaagaatggccgagatcaaggcgctcctgactgctgcggagaacccccatcaccacatgatgatgcgcttagctctgcacacaggcctgcgtcgcgaggaaattgctactttcccgctccactatgtcctcgacccggacaagtcgctacgcaaggagcggaacctccgtatccagctcgatccattcgacggcagtggcatgcagaccaaaggcagtaagccccgggcgatttacataagccgccaactgatggccgaactctaccactacgcaacgaaggtgcgcggcgagcgcgcctcgctgagcgagacaccgcaaagggctttgttcctcaacaagtccggggtgccctatagcaaagatggcaagagcctcaaccggatcatcagcgaggctggcaagcgcgctggagtcaaagtccatacgcacatgctccggcatacttatgccacccataccctgatcagccttcaacgcaacccttcgagcgggctagaacccgtggtgttcgttcagcgccaactcggccacagctcgattcagacgaccatggtgtacctgcatttggtcaatgaaatggccgacgaggcggtgctggcctatgacgatgagttgatagcactggcgggggcggcctga

SEQ ID NO: 363982 - DNA, 1680 bp, Pseudomonas aeruginosa
atgggcaagcgtaaggtatttgccaagaccgaccttggcgtcccacaagtcgagcacagccgcgacgcggcagacaatgtggtcattctgcccgaggtcatcccctcgaagaaaactatggtcgagttcagacggaacacctccaacagccgtcgttttgactttgcccgctggtacggcgtcggcatcgaccccatcacctacgcctgccagcgtcagatcgagcgcttcctcgtcggtcaggagggcgccatcgcgacttgtaccgtggttagctactgtacgaatgggctgcgcaatttcctcgactgctgtgtgctatgggcgacggcgttgggtcgtgacttagccctggccgatgtgaaccgagatctgatcgacggctatctcggccatctggccgggctgggagtgacgactaccactcagaagtccctctacacgcagaccaagcccgtgctgctcgctttggggcgacgtgggttgatcccgctaatcacttccggagatgcggccaccttcccgcgcaaccctttcccgaacaacaatcgcaaaatcaaaggcgagacgtcgctgtccaagcgcgagcggcagacgttcacggtggcgctgcggcaggccatcaagccaatctgggccaaagacgtgtctccgaccagcgaactgctggccttcgcccttctaatcgtggcgctgcacaccggacgcaatactacgccgctacttgaaatgacccgcaactgcctgcgcccgcaccccaaggacaacatcgcgttcctaacattgtggaagcggcgcggttacaacacaagcaaggtggcgctgcgcgccgagttggacaccgagctcgtgctagagtccacaccgagcgtgaaatcaaacgtggaacgcctgatccgtcgcgtgattgccctaaccgagcacctagacgcagaggcatcggaagacctcaagggccgcgtatggctgtaccgtgctcgcactggcaagactatcaatcaagtcacagtactgagcgaaaatatgctgcacgcagcgacgaaccgcctcgtaatcgagtatggcctgaccgacagtgacggtaagccactgcgcatcaacatctctcgcctgcgcaaaaccttcgccaaccgcatcttcgaactgaccgatggcaatttggcgactactgccgcagccctcggcaataccctcaaggtggccgaccaacactaccttgcgcccgacgaggatgcccgtcgtgactggcggttcatgggcgaggtactggtacaagagttgctgactcgaaccatcggtgcgacttattgggacacccccatgggccgctgctcggacccggtgaacggccaatacgccccgaagcgcgagggtgcgagctgcatgaacttcatgaactgcctacgctgcaagcactatgcggtgaccagcgacgatttatacaagttgttcagcttttacttccgcgtactggccgagcgctcgcgcatggacaagcggcgctgggcacgggagtacgcccacatcccccgtttgatcgaccactacatcgttgccgaggggctgcggcgtggcaccttcaaggccgcagccgtagaggctgcccgtgagcgcgcccgcacccaaccgcacccattctggtcggttgatctgatcgacagcctggcggtctttgcatga

SEQ ID NO: 363983 - DNA, 1890 bp, Pseudomonas aeruginosa
atgagcaacaacaccttggcgacaccaacctggccaccctttgcctcccagcctggcgatgtgcgcgggcttcccgaaaccgaacgcgacgctctgataatcagtgcaactcaggtcgacgggcagtgggtcatcctcagccgctacggtgacgacacctggcacctcgacggcttcaccagcaacataaaagcaagccagaagttgctgaaattcgataccgtgcccccggcatttcgggcggtgatgaaggcgatcttgtaccgctacctgcggcgtgggcgtcttggtgcggtccgacctaaaggcagtgtggttcgagactatttttctaattcaaggccattcctacgccacctggaggcgctcaagctcgaccacctgggcgcagtaactaccacggtttgctcaacctatgtgactgcctgcaagggacacaagcagaccagtcgattcaagaataagccgctgtcgcaggctgggctaaaagcccgtttcatggccgtcgaagcgctgcacgaactcagccagtacactgacgacccaatgccacagcatccctggccagacacttccgcgagggcgatggcgggacttaccggcagtgtccaagacagcaagacgctgttgattcccgacaatgtgttctgcaccctattcgagcgggcctatcagcaggttgagcacggccagcaattgcttgacctgcaggatgctctgggcactctcgcggcgcagcgtaataggcagcctcgcgagacagtcatttcggctaagaaccgccacctggaggccttgggttgggaggggggcctgagggcattcaacaatgcgctgggcgacctacgcacggcctgctatatcgttctggccagcacctcaggctgtcgtaaccatgaattggccaacgtgcaatccggtgcgcaccatcgcacccatgacgatgatggcaatgtcttccattggatgcattcacaatcggtcaagaccgatgcaggtctgcatgactggatgatccccgaggcgtccgtgcgtgccctgcgtctgatggagcgttgggcctcaccctatcaagccatgatcgcttccgagatcgagcaacggcggcgggccaaccgccatgacccacagatcgccgaggcgcagaagcaccgccatgcgatcttcctcggcgtgagctcgagaggaggtaaccaagtccgcacgctttcgagtgaaacttgggctaccaacctcaaggcgttcgccaaggattgcgggctgagctggaacctcgcaagccaccagtttcgccgcaagttcgccaactacgccgcgcacagccgcttcggcgacctccggtatctcaaagagcattacgcgcactggtcgctggacatgacccagggctacgccatggacgacagctgggggcagcacctagaccttgagttgtacaacgatattcaattggagttggacgatatcaaactcggtgtcgtcgataactggctgggggacgcctccctggccgggggctatggccgtgcactcaaacactggcaacgagagccgcagaatctactgatattcaaggatcgcgcctcgatgctaaagtccatcgccgagagcaccgcgatacgcagcaacggccatgcctggtgcactgcggacgatgacggctgcgtcggtaacacccttgatcgcacccgctgcggcaacggctgcagcaatgccgttatcggacgccaacacacgcccttttacaaacaactctacgaggatctgaaagagctgctgcactgcccggacataggtgagagcggacgccaacgcgttgagcgcgacctgagtcgctgccgcgacgtattggcccagctgggcatcgactcggagactctgatcgcatga

SEQ ID NO: 363984 - DNA, 429 bp, Pseudomonas aeruginosa
atgaaaaccaaggaaaaaccagccaactataagccggctgaaaatcgcgagaaggacctgaagctcgccctcctccgtatccaaaagggccgtgccaaaacaggggaaaccaaggttaccatcgccgcagtagcccgtgaggcaggcgtatcgacagcgctgattcacaaccactacccaggcgttgccgaggatatccgcgcggctcaaggacgctccagtcgggccatgcgtgatgtgaagcaccaagacttgcttgccgagcgaaaaaagtccgcagtttaccgtcaggagattgaggcactgcggaccaaggtcgccaatctcgcgtccatcaacgaagtactattggacgagaaccgcgtgctcaaggccaagataaacgaccgtaaggtcatcgatctagcttcacggaagccgcctggatag

SEQ ID NO: 363985 - DNA, 6597 bp, Pseudomonas aeruginosa
atgagtgacgacgaagccggtacagaacagattgcaatcgacaagctccgcgcatccaaggcggggcatgcctttcatgaagcctgggctgcgcgcaccgctcttgaactcctgccgccgtcgaccgaccttaccgcgatcacgctcgagggtttcgatgaacgagacgaagagagcttgggaaccggcgcgatcgagattgctgatcttgtccggtaccacggcgccaccgatgttgcacgggcgcatcgagtcacggtcgttcagttcaaatattccatcgcaagcgccgacacggcagtgcgagctgctgacctggcatcaactcttaccaagtttgccctgagcgatgctgagcttcgagcaacgcatggcgatgatcatgttcttgccgtggtccggtatgaatttgcgacgaacaggcccatacacgagaacttagggaaggcgatctcagcggtcgtcgcaggcacgcaagaagccggtgatattgcccgccaagcaggtcagcttgagcaagctctaaaagactatccccatccctttgttgacctgttacggcgactggaattagtcggcagcaagggaagcttgaccgaggctgagcgtgcgatttcaacaactctcgcgtcatggagtgaaccaggggatccggatgcggagaaacgcctgctcaagttgcggaatctcatcaggatcaaggccggtcccggtagcgaaacagataaacgagttgatcgggtagcggtcttggctgagctggaagtggagcacgaggatcgtctgtatcccacgcctgacgcgttccccgaggtcgaggtagtcattcagcgcgatgttcttggcgacattgcaaccatcgcccgagaagctggtcctcctctcgttattcatgctgcgggtggaatgggcaagacggtcttgatgcagggcctcgcagatcaattgcgagccgatggccccgtggtgctcttcgatggctttggtgccggtcgctggcgagatcctgccgacggtcggcacctcccggaaaggacacttgttcaccttgccaatctcatggccgggcaaggcctgtgcgacattctgttgccagtggcggacgtcacgggcttgctgagggcgttccgccgacggctcgcccagtcggtagagacggctcggcgaactcgcagcgatgcatgtgtttcactggtacttgacgcgatcgaccacgccgggctggccgcgcgggataccgcgacatcatcgttcgcacaccttctcatgcgcagcatcagcgtcgatccaatcgatggtgttcgcatcgtcgcatcgtgccggactgaacggctcgcgctggcaaccggcgatgcctcgcatcgtcccttctcggttccactgttcactgacgtggaagtacgttcccttgttgagcgacgtgtactggatgcttcggccgacgagattgccgctctgcaaacacggtcaggtcgcaatccacgctgtcttgacaacctgattacgaccggacggccatttgatcccgtgtccttccctgacgccccgggagagccgcaagatctgctcgacgtgctgcttcgcaagcgtcttactgaagcgcgcgaatctgcacgcgctcgcggtgcaagcgatgcggacattgacctcctgctcacaggcatcgccttgctggtgcccccagttcccattgaagagcttgctgcggcacacggcttgatcgcggagcaggttgaaagcttcgcggctgacctcgcccccttgcttgagcgaacgccacacggcctgatgttccgcgatgaaccgaccgagaccttgatccgatcgagctacggcgcgagccaagccggtcgcgatcgcgttaccgccgctctccaagaacgccagctcacctcaaactatgcagcccgggcactgccagcgttgctcacctcgctacgagatgccgatcagctcatccaactggcctacgacctgcgtgttccccgaggcgcttcacaagtaagcgcacgcgacatccgtctatcgcggatcactgccgcgatagcactggtgggagagctgaaccgacgtgacgatcttctgcgcctacttctggaagcgtcgctcgttgccgcaggccacgagcgatccgaccgttttctatatgagtaccctgatctcaccgcagtagccggtgaccccgaagccttgcgacggctttctgctaccaatgttggctggcctgggggaaaacacgccgcacttgcacttgcgaacgccttcgcaggcgaccgagacgaggctcgtcgtcacgcccgccgatcaatcgattggcacaattgggctgcgcaggccaaaagcaacacgcgctttaacgaatcgagcacctcaaggcagtgggacgatattggtttcgcctatgtggagatgctggcgggcaatgacgtgcgcgttgcggagttcttcgctcgtcgagaagacggtacggccttcgctaagtttttggacttattcgatcttctggatcgacaccagcattcggcacatccacccaagacgcgcatcgcaaggcggctgttgcgttgccgaataccatctcgcgcgctctacgccgccgcgcttccattcgtcggtcgtgatccatctcacgccagaagacttgtcgcggcacttgctgccgcatcttctgcgaatggcaaaagcgacgacttggcgatggccagcatgctggcatcggcgctggctatagagctcggcatggagagagaggcagcgagcatcctcgctggaactgcatttacaccgccaagcatctatgactattccagtcagtatctgagcgaccgcgcgatccatgtgaccgtaatggccgccggcgttcgagctgcattgaagcggaagcgcgccgccttgattgacatggcgccgacggaattcatcggattggtgcctgcaagtgctcgattgcggggggcagcgaccttcagtcgagcacttaaccagaagctggcggctccgaagttcgatggaagtcggtgccggcggaaaaggcgtggcggactcgatgaggagaagcgatcggagtattcgcgcgcgcttagcagccggatcttgccgttgctgaactatgcgcaggatgtcgctgacatcattcgtccgccaagtgggacgtcacgggacgagatggtatccgcagcctttgaccggcttgtccatgatgtcgagcagtcatccaactatccatatcgggacgggaaggcatatctcgcgcgaactggtttccgagtgatcttcgatcttgccgatgcgttgggtgcgctcaatgccacgcttgcgaagcgcatggccgagtgggcagcgagtgcaccgggcctgttcacgccggtgcttaccaatgcggttgctcgactatcgcgcatcccccagtgccatgatgctgcgctcctcctttccggccatatcgagcgtaagatccaactcgataccgatgttggaaccaggatctcatcctacggtgacctcgctcgcgcagcctggcgagtgagcaccgaagaagcagcagcctattttcgccgtgcgctcgatcttgccgaggcaattggatcggatgacttcgatcgtgccaatcacttgctggagctgaccggccactattcgggtcccgaactttcgccggcggcagcgcacaccctggcgcgtatcctcgaactgaatcagaacgaggatggcaaattcccctggactgaatacgcgaaaacgatggtgccgattgctggtcgggcgacgttggctacgctggcacggctggacgatcgtgacgctgctcggctcggactttcactcggcccagcgctaactatcctcgttcgtgactcgaagctttctgttgaagtcgccgtcgctctatttggtttggctgctccggtcgaaacgtggacgtggcacatctcgggcttcgcgtcagaggtcatttgccgtctacctcatgagcgacgggaatggttcttcgatctccttctggtcgagatcgatcgcggggatcaattgtctcccgcacgagaaacgatcgaacggctacatcacctcgctgagcgcagtcttcccgccgcttctcgtgctcgaacacgaatcgagggcctgcttactcgccttggcccccgatccgaatcgcgaacggctatacccccctcgaccgcgtcggagccactacccgtcttcccagtggatctcacggactcagacgatattgaccgtcagatcctcagcgaggagattgaccagtcagggaggcgctggccggtttggacactgattgatttggccaagcgagcaaactctcccgccgagcgcctcgggttcgtccgcgcagtcgttgaagcaacggccgccacgcttgccgacaaaatccacgcgctggacgactacttggaggcgtggggtaggtcgtcggcagctatgcgtgatgctctgcctgacttgggactgcgccttgccaccaagcacgccgccgaacttgccagttcaagcaccgacgcgtggggtaactggagggggctggagcagcattttcatgccgaccgtgcagcacttgttgagcatgtagtagcagcactccggagcaccgcggacagtctcggtggtaatgcctggctcgcactcgccgcgagactggcacctgacgtcagtgccagctccattgcggaaggcctcgaacggtttctggctaacacagatgaaaagctgccgcccgaagttggggacgggccgtgggacgcgcgttttatgattccgtctgatgaggcgacattcgtggcgggactcgtgtgggcgaggcttggccatgctatcgccgcaatgcgctggcgcgcagcccatacggtgcggcatcttgtggcggccggacgtttcgatgtcattgaaggactgatcgagcgtttcgggtctgcttcgagcttacctttcggcgatgcgaagctgcctttctacttaatgcatgcgcagctctggcttttgatagcgctcgctcgcgtagcgaaagatgctgctcccgcatttgccccccaccgcgcgttctttgagcgcatcgccttttccgctgagtttccgcacgtcgtcatgcgtgcgttcgcgatatatacacttcgcgagcttgcgcatgcactggcacccgaagagcgtgaagctcttatcgccaagcttggcccggcaaaccaatcgccctttccctccgctccccgagccgaatatcgcgagttccggtatgcccccagaccagatagctcgccgcgaccagaggacggcttccacctcgactacgacttcaacaagtaccaggtcgagcgcttgtgccatgtcttcgcttgtccaggctgggaggtggaagaccgtatcaacgcatgggtgcggcgttgggacacagctgtccgaggaatgcacgattgcccacgtagcagaagcgatgacacatcttggtcgtcgggatatgttccggaccgagatcgctacgggggatatctcggatggcatgcactcatgcttgttgctggtgagttgctggcgacacgggcggttgtcggcgaggactggaacggtgatgcttgggctgcgttcctgagggaatacacgctatcaagaaacgacggtctctggcttgccgatctcaccgacccgtttccgctcgaccttactgatgaggcggacatgcatatgccggagagcggtaagagaggcaacgcctgcgaagacagcaatctgctggcaccgttgctcggcttgctggacggaaaggtggcgaaggattggcttccggtcgcaggacgttggtcgatcgggcgcgacacaactgtcacgcttaaaagcgtactcgcgaatgccagcgattcgcgagcggtggtcatgtcgttgctgtcagacgaagaattttttagatggctgcccgatgatccagatgagattacccgtcaattcggcgctgatggccatacggtccagccatgggtcgaaaaaacatcgaacaccgaatacctgctcgatcggcatgatccctacggtgcggtcaccgcgctcgacagaccttatccatcgagttggactcagaacctgttggggacagtcgctgatgatgcagtgggacggaactggtcaatcggcgggatggcagcatatcgcgctgaggcctggggggcagagggtggacggggtgagtacgcttggagtgaaactggataccgattgttcgccacccgttgcacattgctttcattgctcaagcaaaccgtccgtagtcttgttgttgtgctcaagctccaaaaatatcatagaggtaagtcgagcggacgcggcggggacaccagcgcctttacgcatcggtcgcttgtggtcgtaataaacgaacgcggccagatttggtcaccgcgacgtatctctcgactagccaaagaagccctcacgaagctcaatcctgatcaccgccaagatttttattcgaggttccgcgcgattgctggcctgccagatgaaaggctatctcggcgtaaagagctaccaaattacgatgagctttatcgtacctttctcaaaagacgctcgcccgatcaggcagatgaggagctttga

SEQ ID NO: 363986 - DNA, 993 bp, Pseudomonas aeruginosa
atgccgtacgaaattcgtagatgggaagagattgccggtgacttcgagcggggtaccgttctggtcggtaacggcgcaagtatcgcgatcgatagaggctttgcgtatgaagcgcttctacaagaggcgcgtcgacgcggcttgcttaccgctcaagtagaagatcttttcaggtcattcactacgaacgattttgagttggcactgcggctcgtttggcatgcgaccaaggtgaactcagcgctccagatccctgatgatcttacgcgtcaggtttaccaagatattcgccaagcgcttattgaaaccgtgcgtgctgtgcaccctgcgcacgccgatgtggctacacgtcttcccagtatgtatcgcttcctgaagcggttcagcacagtcctctcgctgaattacgacctgcttgtgtactggacgatgacttacgggctagacgtgccggatcggcaccagttcaaggattgcttcttggatgggagcttcgacgacgactggaagcgattcagaggccgtatctgggagcagacaaatacgctggttttttacccacatggcaacttggctctgcgtcgagacgtggtggaccgagagggcaagattcacgaccaaggcgcagggcttctcggggcaattctgcatgcctggaacaccggcagttacatccctctatttgtgagcgaaggtacgtcggcacagaagctctcggcaatccagaacagctactacctatccacagtgtatagggaggttatcccctcactggagggggcccttaccatcttcggctggggaatgggtgagcacgatgcgcacttacttcaacggctagcgcatgcgaatgtggctcgggttgcgtgctcggtataccagggcaatcagcagttttgtgagactgcatcccggaccatcagagatcgcctcggtgagatagacgttgtattttttgacagcgcgagtgctgggtgggctgttggcgcttag

SEQ ID NO: 363987 - DNA, 1302 bp, Pseudomonas aeruginosa
atggaaaaactgtccgccatagagagtgatgcccaatcccaagcttggttgaagcagttcaatttgggcgaccgagccctagccaagaggctgcttgaagcattcgccctcgtttcacgggatgacttcgtcgaccacatgcgcgccatgctcctgcgtgaagccgagagtgtaggcggaatgattgccttgtatgccgagcgagagcttagacatcggtacgggatcccacaccgcttattcaaggaatctaaaggggctaaaaaacgagcacttggtgcattaggccctgcagcagtaaagccaaccaaagcatacgacccttccgtaggaagcgaaggtattgtcgcccagatgatttcacagctgtgcctggaacatcctcgaaaatttcttgatcatcctggccctgacagaattcgctcgaaacaagttagagcattctgggtcgttacagacttgatcggaagtggtgagcgggcatcacgctacctagaagcggcatggagagtgaggtcagttcgtagttggtggtcttacaggttgatgcaatttgcagtcatggcttattcggcgacaaagtcaggagaggcccgtgtggcgagacatcccagcaagcccaagattcacatcatcattccttgccctactatagacagtagcttttcagaaaaggaagcagagcaaatgaagcggctttgcaccacctacgatccaactaatggtgaaatccgcaacgctccttggataacaggcggtccaagtcttgggtatggctctggaggggcgctgattgctttcgcccacggagcgcctaataacactccgctgatgtttcacaaggcatctaagaacaggaagaagacgtggatccccctgttccctgccagagtatctgctgggatcagcaaggaagcatttggggttgatctcaccgctgaaaagatcagcagtcgtctagccaaactaggtgaccaccatcttgccaaatcaaaagcgattttgaggtcggacatatcgaccagtcagacgttcttactcttgagcgcactgtcacgccatcagcgatttaatgaccgaattcttgctgaacgtacaggcctcaaggtgcatgagctacgcgggcttttggagaaggtgacccaatatggctggctcgactctcagcgcagactgaccgatcaaggagcaggccaattagcacacgcgagaaagcacatgcaccttgatacgagcgccgaacctgttggcattcacgagccagagccttactatcctacctcgttgaggcaaccaatctag

SEQ ID NO: 363988 - DNA, 1167 bp, Pseudomonas aeruginosa
atgaaggattggaagcctcagcactaccgccgcgcctctggcgcgagcaaagtatccgttccagttttggcggcggctatcgcaactagcgagaagactgtcgcagttcacccttcacttcccccgatactgaccctgaagcacctggctcatttgaccggggtgccatacaagcatcttcgtgattacgtttcgcgcgacaccgaagcctacaagattttccgggttcgaaagcgggcacgccctggtacgccaacatcgtttcgtgtcatttgcgtgccacctccgagcctggcgattgctcaaaaatggattgctcagcacgtactggccaaagcaaaacctcactctgccagtacggcgttcgcaccaagttgtcgcttagtcgatgcggccaaacctcattgcgcaagccgctggctgattaaggtggatgtgcagcgcttcttcgagtccatctcggagatcgattgttaccgcgttttccgcagtctcggctaccaaccacttgtgtctttagagctttcacgactttgtacgcgcgtcggtcgattcaacgggatgcggcatggcattaaatggcgacgtaaagcctccattaagaaatctaagatcatgcgatacgctttgctgaggcttggccatcttcctcaaggggcggcaaccagtcctatgctggctaacctcgtgatgagggacgccgatgaactgctgaccagtatggcggatcaattgggaatgacttacacccgatatgccgatgacctcaccttctctaccgcgagccctgtgtttgagcggcagacagcacgccgagtaatcaacgagatttaccaggtactgcgacggtatggtctcacgccgaatctggcgaagacgacgattgtcccgccccgaagcagaaagatcgttctaggactacaagttgaccaagatgaacctaggctcacgagggccttcaagatgaaaatgcgcatgcatcttcattacttggagcgtgaagatgttgggccgctaaagcatgcagagcgccgaggcttttcggctgtagctggaatgcgcaatcacctaatggggctcgctgcctatgcgagccaaatcgaacccacctatggcagagatctcaaagacagactggagaagctggactggccgctgctctattag

SEQ ID NO: 363989 - DNA, 1662 bp, Pseudomonas aeruginosa
atgacgctcaattcatcggaagatctctgggtaaaggctaattcgtggacggatcgatggacacttgtcaaacggggtgtcggatctggtgggcagggcgtaggacatagggccacccgcaacggacaggacgcatttataaaggtcattagcggcgttagccgcgaacgtcgcgcgcgcttcttgaatgaagcagaagcctatgcccagctcgccatagatcatattcctcgactaatcgagtctaacgctcggcatttcttagataagtcggtagagctctatattgccactgagtttgtagagggtgagacacttcggctgtggcgaagtagacaccagaagttgacattggagcaagcagtatcaattactctcttgcttctagatactattgaacaaacccatcaggctggcgttgtacatcgcgatattaagcctgaaaatataataatgccatttgcagaggaaggatctcctgtcttggttgattttggtatcgcctacaaccagaatgacagaaaagacaaatcattgacccaagttaacgatcagcttggtaataggtttcttgcgcttccagagcttatcggtgcgagcaaagataagcgaagtgtcgtctctgatgtaacagcgctcgctgggattctattttatcttttgactcgaagaaatccagttcaacttaaagataatttcatgagaatgccacatcaaagggacgatattcgccctgatctaattaattatgagcgcagtggcattcagggcttcttcgataaggcattcgctcatgcatcgtcagaaagataccaaagtgcgaaggatatgcgtgccgcattgcaccatgtattagcccgtgcctcacgtacagagccactgactccaggagagcgtataagagagctcattggtaaccactctgacaaaatgcatcgggaaaaattagaaaaaatacgtgaagctcttagatgggcgatgaacgcatacagcagcaaggtcaaggagattacggacggcgctctgactgcatcacaaacgttgatactcgaaaatgccgaccctggatatatccgtatccggtgggatcgtttcggtgaccaccgtatatgcacctacctatgggttcaactagttggcgatgaattagtctggtacacaacctctggcgaggtatttagattgaaggcagcaaaagattttccaagtcgcttgcctcccagttttttcgagaaagcaatcgaaatggatactcttcgaattctagagcttgaccctattgacttgacagaagagttccctgcgcgtcaaagtttgcgagagtatctaactaactctttgggcgatgcggtagggctatcaaaagctcttaatcgaccagtgttcgcagttgtatatgatgacagcaggccagcttcgcaaagggattttcttctggagtgtgtattcgctgagaaaatcgtcgtagaaataatctgcacaacgttcgttctactgatcatcaagcgatctcaagctcccgaccttccgcaggtttctattactggtgactattgcgctgtcattgaaggcggagtgtggacacgtatcaaacacttagctgcaaataaggccgcagcggtagattatttcgtcgagctgaaaaagaccttctctcaatag

SEQ ID NO: 363990 - DNA, 702 bp, Pseudomonas aeruginosa
atgagttacatcaacttgcctctagatcagcggcgcaaaatctccgcgatcgacgtaagagcacttgaagcagcggtggataagtgtgtgagagatgagcacatcgccccgatctacgcccttggcctaagtggttgcggcgagttcatcgcctccgaataccgtgtgtttgaacgagcgatcactgcacacggaaaagtgaaggctcatgccaagcgacaacataccagggctgatgtgttgcgtgcgggcagcaacctgcttcatgccgtagaacagatgcaggagcgtgttagaacggagcaggaacaggctcagctttttgtcgtggatgatcaggttttggcgccgcccagattcagcaatcggctgacggtcaccgttcgctaccgttggcgcccatcttcggatgcgcaatgggctcatgggcaggcgaagtttatccacgaatacatgcctctgtctgactacactcagtcgatcccgatacgtaaacccagttcggtaaaggtagatagggatttgcaggaaaaactctacagcgagtgggagcatctgaaaatgcaggcactctgtgctgtccgggattttctccgcgatggcggtgacggtgccgatatccctgagtcatttgcggtgcgggctagccagtacggtggacacctgaacaatttcagctgtaggttctggttaccggcttag

SEQ ID NO: 363991 - DNA, 582 bp, Pseudomonas aeruginosa
ttgcgttcagaggtccctttcgacgtcttccgcaagctcgtcgagtcgccggacgacttcctgggcttgcttgcctactcactctacaaacgccacaagattgaatggatcgaagctcacccagatgacaaccatgaggcttttaaaaaggtcgcgtgcacgccacagcagcttgggatgtaccgctatcaggccgagcagatggcaaaaagcttcattgacgtctcacttgaccagttggaagccgagatgcgtagctcgatcatggaaggcgaggtgatcaccaagatccaagatctgaatagcgcccttcacacgaaagtctctacgttggaaactaccgttaccaccaaggttgacgggttgaaatggaaattctggcctgccttcggcaatcacatgctcagtggcctagcctctgtgatcgtcgcactgctgatcttcggctgcttctcgctatacagcgtgtaccagaagcagggaggtctggagggtatggcgaaacaagtgtctcaacaggcaaaccagcagcctgcagatctttctgcaactcccttagtcgcacaacctccccaaggctga

SEQ ID NO: 363992 - DNA, 150 bp, Pseudomonas aeruginosa
atgtcgaacgtctcgattgcgctgatcaaagagagcaacaaaatgctttcggcgtctgcaaagaaagtcgttgctgctcgttcctcgaagctgtcgtctgacacgatcaacagcatgatgaagaaggcgttcaatcgcctgtcacgctga

SEQ ID NO: 363993 - DNA, 183 bp, Pseudomonas aeruginosa
atgcacctcataacgctcgccatcatgcttggagccatacccccagtgggcctgaagggttccaaactggaaaccatgaccttcaacgcgagtactctgacaacacacatcacaggtaatgtctgcgaccgtttcagtcggcaaaacaacaaaatgcttcacgaacagcacctccagcggtaa

SEQ ID NO: 363994 - DNA, 627 bp, Pseudomonas aeruginosa
atgtccgtcgcgcaagcaattttgaatcgattcatgcacatgccaaaggggagaccctttgtcggcgcggcgttcgcgcaggttggttctcgcgcgtcggttaataaagcgctttctagactggtgcaatcaggcacgctggagcgagtggctcacggtgtctacatgcgccctaaaacgagcaagtacaccggcaaggtggtgcgcccgagtgcgctggctgtcatggaggtcatcacgaaggcgaacggtgagacgatccagatacacggcgcggaagctgttcggaggttgggtctcagcacgcagatgcaggtattgccgactttttacaccagcggatctactcgcgagatcaagattggcaatgcggtggttcgcctccgccacgtatccaagaatcgcttgcagcacgccggcacgaaggtaggggtggcgctcacagctctccactacctcgggaaagaggggctgtctgtgaaggtggcttccaagattgctagtgcgcttagcaacgaggagctgatgcagcttcaggcctgtaagatgccagaatggatgcggacagcgctgagttttgcagccagggaaatggagatggagtcgtgtgcgatagcgcctatttga

SEQ ID NO: 363995 - DNA, 990 bp, Pseudomonas aeruginosa
atgacgcccttcgcctatgccaagccggccgacatcgagcaggcgctgggcctcgccggcccggagtcgcgctacatcgccggtggcaccaacctgctcgacctgatgaaggaaaacgttgccaggccccggcgactcatcgacatcaccggcctcccgctgcgcgacatccgccggacgcccaccggcggcctgctggtcggagccctggtcagcaacgccgaactggcctggaatcccgccgtggaggcggactatcccttgctagcccaggcgatcctcgccggcgcctcgccgcagttgcgcaacatggccagcaccggcggcaacctgttgcagcgtacccgctgccagtatttctacgacaccggcacgccatgcaacaagcgcgagccgggcagcggatgccccgcgcgcagcgggctgaaccgcaaccatgcgatcctcggcgccagcgaacactgcgtggcggtacatccatccgacctgtgcgtggcgctggcggcgctggaggctcaggtactggtgcgcggccgcgctggcgagcggcgggtcgctttcgccgacttccatcgcctgccggcggacacgcccgagcgcgacaactgcctggccgtcgacgaactggtcaccgccatcgagctgccagcgccgcgcttcgcccggcattgccactacctgaaggtgcgcgaccgggcctcctacgccttcgccctggtctcggtggcggcggccctggaaccggacggcgagcgcattggcgaactgcgcctggcgctcggcggcgtggcccacaagccatggcgcgtcgcagagctggaggaacgtttcaggggccacccggcgaaccgggacagctatgtccgcttcgccgaagcgctgctgcgtgacgccaggccgctggcccacaacgccttcaagatcggattggcgcgcaacgccatcgttcgcgcactggaagaagcccactcgggagggatcggccaatga

SEQ ID NO: 363996 - DNA, 510 bp, Pseudomonas aeruginosa
atgcttattgccaagatcgactgctccggcccagcgccaaacgataagaagtcattcgttattggcctgaaacaggattggcatgaacagatggtcttggacagccaactcaactgggttcaagaaacgaatgaagcaggagcatgccggcacgtagtcgaatggatgaggaaacaccaacctgagcaggagtttcccgaaactgccccgcagaccttgcaagagttgctgatcgcctcagacgcgtggacgtggagcgacgttgagaggaaatattgcatttccaccgctagacgcttatggcgtcaggctttgcgccgcaagaaagcgaaaggaaagaagcagtacaacttcatcctgagtgacaaggcgatcaagcgtctggatagattctccaaagaccacgagatctctagagcccgcgtcctggaaatccttctgcagatggaggatgagaaggatctctatctcaaagagcagattcgtgtcctgcgagggatcgagctctag

SEQ ID NO: 363997 - DNA, 333 bp, Pseudomonas aeruginosa
gtggtttccggcggcaccgacaaccacctgatgctgatcagcctggtgaagcaggggctgaccggcaaggccgccgacgcggcgctcggagcggcgcacatcacggtgaacaagaacgccgtgccgaacgatccgcagagtccgttcgtcacctccggcatccgcatcggcaccccagcggtgaccactcgcggtttccgcgagggcgagtgccgcgaactggctggctggatctgcgacatcctcgacgatatcgacaatcccgaggtcggcgaacgggtcaggggccaggtcggcgaattctgccggcacttcccggtctacgctgattga

SEQ ID NO: 363998 - DNA, 4245 bp, Pseudomonas aeruginosa
atgactactgccggaggttccatccagttaaaggtgtcgaagagcaccttgtcgatgttcctacgaacaaaatgcgataaggagcttttcctgtcgttgcacgacaagacggcgatggctggtgcgggtcttcctgagcccataaagcgacccggcattggcatcttggctgtgcatggcaaagagtttgaggttgttcggaacgatcagcttgtgcggctttttggcggcatcgtgcggtactcgaagagtaccaatcagtatgggaacgtcgacttgcaagcggcgctgagtgcagtgatctcagccccacagcttatcttgcaaggtctcttttctattggagcacagcagccgtctgttctatccactatcggaatcgatgcctcggacatccctttggttccacccatcaccgatttcattcccgatatcctctacatcaggaacgctcaggcaggggatcaagaggttctgccggacggggcccgtggcccaatagacgagctgcttgaggcgcggaaggcgatttgcgttctcgacatcaagcacacggcagaagcgaacccgagttactgctcggaaattgcgatgtacaccgtgatgcttgcgaactggctgcaagcgaaaccacaactagccagccgcttctttgtcagcctcgacgcaaggctgtggacacgacacaaccaagtaggcagcgaactcgacaaagttgagagccgtggtggcgcgacccaacaggagctccttgatgcgctgatagtcgactcggaggacgctcagcttcggttctacctgccgactatccgcagcttcttcaccgatgtggcccgggtgatgcgcatcggacaaacaccaggtcagggctggcaggctctggaatggcacatttcgggaagttgcagcgcctgcgactggttaggtgacaggcgtcacatgggcccggcccatcgtggggtagtcgacggaaacccaggacactattgcatgccacttgccgagtccacggggcacttgtgcctggtgcccggcatcacgcgcggcgccaaaaaggtcctccaacagaataccgtggctgacacttcagcccttgctggcgcggtgggccaccctgcactgcagcaacatacgctcctgaagaaggaagcgaaggcctttcctgcgcgctcggctgccatcaactcaggcaatgtgtctcgagatgcgacagggaccattgcctctttggtccgtagtgcgaacatcttgctgtacgcgagcattaactttgactctagctccggattcttgaccggcctcgcactcagtggcactgcaactaccttcacagttgggcagccaccgcgccggttccgcccagtacccttcattgtcgacgataagacattgcaagcagagtgggtggcattggagggctttcttactcagattgcctcgtggattgaagctgcagagcagatgaagggtggagcgtcaattaccgggcaagtccacttctgggagcagcgtcagtttcaagagctttgcaacgcgatgggtaggcatctacccagggtgcttgccctgtccgccagaagagcaaaggcgcttgcgtgggtatttgcagctgatgaaatgctagagcgggccgacgcggtggaagctgcaaccatcgtgacagtcgaggacatcgttcggcggttagtgttcgcacctagccggcacgtcataacactgttcgacaccgtcgagcgctaccggcgtggcacatactcgcctgcaatcacggactcctactaccgagagtacctaagcaatggcatccctcgtgagcgcatttacgaactgtgggcgcacacgccgcaggtgaagcgaggcgccaccagtattcctcggaacactcttattgctcagtactcggacgctttggaaaggcaatcctctgccttggaggccgtgtgcgagaagctgcgagaggactaccgtggccagtttagggcgaaggaggcgcgaattcctgtctccgtccctcgcggggcctcgaacgttgcgttcgacgccaagctttggctttggtgggatgagttggacttcaatacctcgcagcttgaagcccatatcgcactgtcgatggacggtgagaggctggaggcgacctacgaagccatcgttctacaagggggtgtacacctcagtggggacctttaccaattcaacgtcgctccaagttcgtctgaggccaaattcaaagaggactccaggctgactatcggcaaagtcggtatgcctggtatgcctttacaacgagtgggtagcatcgtgagttctggtgcgccattcttccaaggtgcaccggaggtgttgcaaatgcctctttggtccgcggtggaggctcgcctggtttcatttgatcgcgttcgccttgtcgcacaagttgaaattgcgtgccgcagggagcccaacctggtgccatacctgatgcagtacagcaccatgccgcttatgagcgacatattccttgtcgaagccaagaagcccaagatgtttaactgggcggaacttagccaacctatccttcaggccattggtaatcctcgcatcgcagttcctgaccccaatgccgtgcgcgctattggcgtagctccccctgcccgtcgaaccttcgacgcagagaccccagcagcaagggttctatgggctcctggtgctcttcagcaacaagttgttttggcaggtgctactgcaggtacgcttgctgatgccgtttgtacctttcactcgcttaacaaatcacagcgcgacgccattgcgcatgcattggagcgtcagctaactgttatctgggggccgcctggcaccggcaaaacaaacacgcttgccgctatgctccacgcaatgaccgtgcatgcggttgcctcgaacacaccgctgcgggttctggtcaccggaccaacatacaaggcggtggaggaagtgatgcaccgcgctgccaagttcttgtccaaagaccctacggcgcggtgcgcgatgtacgttggctattctagggggcgagcattgggagctgcaccccaaggacttgcatcgcacatcacgtacaacgccatgatttttgagaatggcaatgccgagtggcaggggtgtactcagcttcttgcgggtgacacgggagtgaccattgttggctgccaggtgatgcacggccgtcaattcgcaaaagcgctgggtacgagcgcgctgcaccccgtgtttgatgtcgttgttgtagatgaaagctcacaagtcccggtggctaagtcgctcgctgctttcagcgggttacgggatgatgctcgggttgtggtggcaggggatcaccttcagatgcctccaatcaccgcgattgaggcaccgaaggaggctgcataccttgttgggagcatccagacttacttgttggagcgaccctttgcagtgccggtacagaaatgcgtgctggataccaactaccgctctgctgaccacattgttgagtttgcgcggacgattggctacccaccgggcctaaccgccgcttacggcaactgcagactgcatctggttcagccgcttccatcgcgtgcggactactatcccagtttcccttggtcacaggtcttcgaccgcgtgctgcatcctgacaccagggtggcaagcgtgttgcacgatgacgacatctcgtcgcaaggtaacaggtacgaggcgcaggttgtggctaacttggtacgcgggctgcggcactcggtaagtggtgcactcgacaattggggcctcaattccaagccacactccgtgccaggcgctcaacagttttggtctgagtgtgtaggtattgtgactccgcaccgagcacaacgagccttggttgtgcaggcgctaactgatatatggcctacagaggcggaccatatttcagacgcggttgacactgttgagcggttccaaggaggcgagcgtcacaccatcatcgtgacgttcggcgttgctgatgtggacgtcatcagcggcgaggagacttttctcatgcaactcgagcgcaccaacgtcgccatctcccgagcgatggcaaagtgcattgttgttatgccacgtgcacttgctgcgcatgtgcctgaggacaagcgtgcgctggagacggccttcgccattaaagactttgtcgaggacttttgtagtcagcgcgtggacgacatacttcagtctcccgcgggtaatcgcggagttcaggttcgattccggccctga

SEQ ID NO: 363999 - DNA, 1125 bp, Pseudomonas aeruginosa
atgcctcgatctctcgcctatgagcgtgacaacgcactcaacgccatctgcccttactttacgatgttcccgcttgagtacccgctcggggtactcaagcagtaccgtaaggaaaaccctgtagtgatggacccgttctgtggacgcggaacgacgctgtttgctgcacgcaaactcggattagcagctcgaggtattgatagttctccgattgcggttgctattgctcgggcgaagctagcaacggtagacacggcgaaagccttggaactggcaaagttctatatggaaatgcatgagcaagccgcggtgccagacaacagcttctttcaagctgcatttcatcccaatgtactgcggaaagtctgcgcgatacgtgcgggactccttcgggagaggcgtgactccgacacgaccgtcatcttgcgcgcggcgatgttgggctgcctgcacggcccgactagcaagacgccggagcggcgttcgtatttttcaaaccagatgccgcgcactttttcttccaaaccggactactccgtacgctactggaagaacaaacaactcatcgcacctgacgtcgatgttctgaaggttttggaacgcaagctgacacgccttgacagtgctcagttgccccacgtcggcgtgctgacgaatgtacggaaaggtgattcccggatggctgcttctctgccgacggcttgtcgggacttctccgttgtcgtcacctcgccgccgtactacggaatgcgaacgtacgtcgaagatcagtggctacggaactggtttttgggcggtccggaccacgtcgtctatggcaagagcacgcagcttcagcatgcaggctttgaatcgttcgctgagtcgctcggcaaggtctggaagaacatggctaggacgatcgcagaagatctggacatgcatatccgcttcggaatcatcccgtcttcaaaggtagacgcaaaagctttggttcgtgcttctttggaggcatcgggcgtgcgatgggatgaaatctccgtgcgcagcgccaaatcggctgcatctggcaagcgccaggccgaccacatggcggcaggatcggctgctgccagagagtacgacttccacgtgagaaggagttag

SEQ ID NO: 364000 - DNA, 621 bp, Pseudomonas aeruginosa
  misc_feature (487)..(496): n is a, c, g, or t
atgattgtcattgacaaaaatctagaacatcttgttgcgcaatgcgctatatgtgaaaaaactttatttgacgagttttctctcaagattcaattggggcatacatattacgagccaaaatctttgcccgcctctgcaagcattgtatatgggtcgcatccagccccgtcgacgttttttttggaaccaaaagaaattcagcaaaatttggtgctgaaatccggtgagcaagtcatcacctgcagtaaacatcgatacaaaataccgttagattattttggtctggtgcaaaccaaaggaacccttgcgcgattgttcgtgcaggtaacctgtaatgacggtcaggtagagccggggttcgacgggtacgtaacccttgaaatcgtcaatatgtcgccttggacgatagaaataccggccgtgagcgatatagcacaactttatttggtgaaatgcagtaccagcgcatctgagccataccacggtnnnnnnnnnnccacggtcggtatatggacgctgccaaaaaaggacctacccttgcagtgtttcgaaagtagatcaccttaccgctgcagtcgacgccgaggaggaagattgtccattgaacgctttcagaattaa

SEQ ID NO: 364001 - DNA, 1020 bp, Pseudomonas aeruginosa
gtggatagagaattggatcagccccttcagcgcaatctggagcggctatacaattacctagaaaatccagaacgagaggaggcacagcgtgttctgctcgcagcggaaccagagccgatccgaattactcacggaattcctgacctctataccgactggctgtcatcccccagctactcagcacaaggtgggttgacggggcaactgacgcaggtcataagccagactgccgggcggcccgttctagtgttcgacgactacttcaaggttcatgaggtcactattcgtacggtcgccgaaaccggaggagccaacagtatttcggtgagcgacctccaggtgcaattgaaccagcagatcaatacctttatccaagaccgcatcgatggtgacaaagccgataaggtcagccgcctccagtccaatatttcctatctgattgaaatgggtattaatatcgatttcaccgcccgtcatgagcttccacctggtgggcgaggcaacagagctactattccgacctctgaccccaacggtgaatcaggtgtaacgattggctatggcttcgatgtcggccagcacgatgaatccggcattcaggctctgaacatcgctgaatccacgcgcaaaaaaattcgccccgccctcggcttgaaaggagcgaacaccgcgaccttccaggcattagcccaactcatcccggtactcacagatgaagacgggctgtccctctttaccgccaagatgatcaaggtcactgatcggatgaaggtgaagttccagcagtggagcaccttacctccggcggtcaaaaccatagtgacagacctgtattaccactatggtgagtattcctcgttcccaaactttgagactgctatttctcagagcgactggccagccgccattagggagttgaggaactggaatggtactcccaacagtaccgatccgagcgatggcatagccaggcgattgaacaatcgcgcggactatctccaacgatccctgggactctag

SEQ ID NO: 364002 - DNA, 303 bp, Pseudomonas aeruginosa
  misc_feature (280)..(289): n is a, c, g, or t
ttgttccttgcgagcttgagcctcttcttcccgggctttgcgaacagcctcttcttcgtggaagcgctctacagcttgatcgatcagagcgggaatctctttctcagctaccagagcgaagcaacgtttgatttcagcaatgttcgcttcgagggcagctttgtactctgcactatcaggcttgacgaagtaggcagcggcatggcctgtgcgggatacaacgtctccagccttaacgtaaccctcgcccatcttatccatcatcagagggacaagagcnnnnnnnnnngctataagagctaa

SEQ ID NO: 364003 - DNA, 297 bp, Pseudomonas aeruginosa; identical to SEQ ID NO: 362327

SEQ ID NO: 364004 - DNA, 1119 bp, Pseudomonas aeruginosa
gtgcagatcggtgtccccctcgagacccatgccggtgagacgcgggtttccgccaccccggaaaccgtcaagaagctgatcggccaaggccaccaggtgatcgtccagagcggcgccggcgtcaacgccagccagccggacagtgcctatgaagccgccggcgcgacgatcggcagcgccgccgaggccttcggcgccgacctggtgctgaaggtggtcgcgcccagcgccgccgagctggcccagatgaaaagcggtgccgtgctggtcggcatgctcaaccccttcgacaacgagaacatcgcccgcatggccgagcgcggcatcaccgccttcgccctcgaggccgcgccgcgtacctcgcgggcgcagagcctggacgtgctctcctcgcaggccaacatcgccggctacaaggcggtgatgctcgccgccaaccactacccgcgcttcatgccgatgctgatgaccgccgccggcaccgtgaaggccgcccgcgtgctgatcctcggcgccggcgtcgccggcctgcaggcgatcgccacggccaagcgcctgggcgcggtgatcgaggcttccgacgtgcgtccggcggtgaaggagcagatcgagtcgctcggcgccaagttcgtcgacgtgccctacgagaccgacgaagagcgcgagtgcgccgaaggcgtcggcggctacgcgcggccgatgccggcctcgtggatggagcgccaggccaaggccgtgcacgagcgcgccaagcagtcggacatcgtcatcaccaccgcgctgatccccggccgcaaggcgccgacgctgctgcacgaggcgaccgtggcggagatgaagccgggctcggtggtcatcgacctggccgccgcccagggcggcaactgcccgctgaccgaggccgaccaggtcgtggtccggcacggcgtgaccatcgtcggccacagcaacctggccgcgctggtaccggcggacgcctcggcgctatacgcgcgcaacatcctcgacttcctcaagctcaccctgaacgccgaaggcttcagcgtgaacctcgaggacgacatcgtcgccgcctgcctgatgtgccgcgacggccaggcggtgcgcaagaacggctga

SEQ ID NO: 364005 - DNA, 900 bp, Pseudomonas aeruginosa; identical to SEQ ID NO: 320952

SEQ ID NO: 364006 - DNA, 903 bp, Pseudomonas aeruginosa
atgagcaatgcagcacaagccctcgccacgccggtacggctcgacgtccggccggtcgccggacggatcggcgcggagattcgcggtgtgaccctgtccggcgaactggacgccgccaccgtcgaggcgatccaggccgccctggtacgccacaaggtgatcttcttccgggaccagagccatctcgacgaccagacccaggaggccttcgcccacttgctcggcgaaccggtcgcccaccccaccgtgccgtcccgcgaaggcacccgcttcctcctcgagctggatggcgccgaaggccgccgggccaactcctggcataccgacgtgaccttcgtcgaggcctacccgaaggcctcgatcctgcgcagcgtggtggccccggagtccggcggcgacaccgtctgggccaacacggcgagcgcctacgccgacctgccggcggagctgcgcgagctggccgaccggctctgggcggtgcacagcaacgagtacgactacgccggggtcaagcccagcgcctcggtggagcagttggagaactaccgcaaggtgttcacctcgaccgtctacgagaccgagcacccggtggtccgcgtgcatccgcaaagcggcgagcggacgctgctcctcggccacttcgtgaaacgcctgaagggtctttcgcagcatgactcggcgcatctcttcgcggtgctgcaggggcacgtcacgcgcctggagaacaccgtgcgctggcgctggcaggccggcgacgtggcgatctgggacaaccgcgcgacccagcactacgcgatcgacgactacggcgaccagccgcgcgtggtgcgccgggtgaccctcggcggcgacgtgccggtaggcatcgacgggcaacgcagccggacgatccggaaggcatga

SEQ ID NO: 364007 - DNA, 2373 bp, Pseudomonas aeruginosa
atgaagcaccactaccgcctgccgctccgccgaacgccgcccggcggctccgactacgccctggccctgctgctcgccctcggcggtgcgttgccggccagtgccgccgatgctcccgcgcccgccgaggaagcgccgccgctggccagcagcgtcccggacaaggccgatacggccctgggcaaggtcactgtcaccgcgcgtcgccgcgaggaggattcgcagaaggtaccgacgccgatcaccgtgctcggcggcgagactctcgaggcccagcgcatctcccgggtgcaggacctacagcaggtgctgcccagcgtcaatgtcgcctacatccatgcgcggcagtcgagcgtcgccgtgcgcggcatcggcaacaaccccgccagcgacggcctggaaggcagcgccgggatctacctcgacaacgtctacctgggacgtccgggaatggccgtgttcgacctgctggacatcgagcaactggagctgctgcgcggtccgcagggcaccctgttcggcaagaacaccaccgccggggtgctgaacatcagcacccgcgcgccgaccttcactgccgagcgtaccgtcgaggtctccggcgggcaggatggctacttccagggccgcggcacggtttccgggccgctcggcgaaaccctcgccggacgcctctcggcctatcgcacccgcgacgacggctacatcaagaacatccacgacgacaactatctcaacggcggcgagcgccagggcgcgcgcgggcaattgctgttcgagccgaacgaggacttcagcctgcgctggatcgccgactacaacgaggaggattcgagcaacggcagcatggtggtctacggcggcgccgagcgtttctggcagcgcgccgcgctggtcggcgcttcgccgttgcgcgatccgcagcgcaggaaggtcaacatcaacggccgccagcacgtcagcgtgcaccagggcggcagctcgctggaggccaactggaacctcgccggcggctaccgcctgacctccatcagcgcctaccgctactggcacttcaccccggccaacgacgagcaactgaacgtctcggcgatcaacgacaccggggtggaagtgcacgaccggcagttctcccaggagatccgcctggcctcgcccaccggcggtgccttcgactacgtggtgggcgcctacgcgttcaggcagaacctcggcaacaagaccttcacctcctacggaccgttggccgacctgtacctgctcggcgccaatctcggcgcgctgaacgacacctactcgaaggccaacggcaagatcgagaccgacagcttcgcgctgttcgcccagggcacctggcacctcaccgaacgcctggacttcaccgccggcctgcgtggtacctacgaggagaagaacgccaaggttgagcgcttcgctccgctgggcggcgcggcggtcggcggggtcggcgcggcggtgcgcaacggccagctcggcgcctacgattccggcgatctcagccagtacaacttcgccccttcggcgttgctcagcctcagctaccagttcagcgacgacctgctcggctacgccagcctgtcccacggcgagaagtccggcggggtcaacctggcggtgggcagcgcaccgagcgccggcgccgattcgctgctggtcggaccggagcgcgccaacgacgccgagctgggcctgaagagcacgctcttcgaccggcgcctgctgctcaacgccaacctgttctggaccggcatccacggctaccaggccaccaccctgtaccaggcgccgggctcgacccagttggtgcaggtgctggccaacgccggcagcgtgcgctcgcgtggtctggagttcgaggccaccgcgctgccgttgcgcggcctgaccctgaacttcaacggctcctataacgacgtcacctacctgtcgttcaaggatgccccgtgccctgcggaagtcagcacccggcccggcgcgccgagcagttgcgacctcaccgggcagcgcgtggtcggcgcctcgaaatggatcgccaatctcaatggcgaataccagtggcgcctcgacgaccgcttccaaccctacgtcagcgccagctacgcctaccgctccgccgccgagggcacgctggacaactccgacctttcgaagatcgacggctacgccctggtgaacctcgccgccggtctgcgcagcgatctcggcgacggccaactggacacctcggtatggctgaagaacgccttcgacaaggactactacctgagcgccttcgccagcatcaacggctcctacaccgcatcggtggggcagccgcgcacgctcggcgtatcgctgcgctacgacttctga

SEQ ID NO: 364008 - DNA, 918 bp, Pseudomonas aeruginosa
atggatctgcgccaactgcgttacttcatcgccctcgccgaacaccgcagtttcgtccgcgcggcggacgccatgggcatcacccagccggccttcagccgcagcatccagggcctggagcaggagcttggctgtcagttggtggaccgtggcagcaaggacctgcgcccgacgccggaaggccaggtggtgctgcaacacgcgctgagcctggtgcaggggtcggccaacctgatccacgagatcgcccagttgaacaagctggatgccggcgagctgcgcttcggcagcgggccggcgccggcccagcaactggtgccggacgcggtggccgacttcatcaaccgccacccgcgggtgcagatcagcctggacgtggacaactgggaaaagctcagccgcgccctgctccgcgaagagatcgaattcttcgtcgccgacatccgcgacttcgaggccgacccaaacttccagacgcgcccgctgaccccgcgccgcggccagttcttctgccgtccgcaacatccgctgctgggcaaggacagcctgtccaccaacgacctgttcaactacccgctggcctcgaccctgattcccccgggcatccgcaagctgctggcgaacctcagcggcaagatcgacttcgccgccaacatccgctgcgagaacatgcacgcgctgatccgtatcgtccgccagaccgacgccatcggcatcgccagcgacgagaccctgcgcccctacctgcagcgcggcgaactgcaaccgctacagtggcgcaacctgccgcagaacctggatagcctcagcgcccgctgcggcatcatcagccgcagcggctaccggctttcggcagcggcgaaggcgatgatcgagacgctggtggaactggaccaggcgcaacacgcggcggcctga

SEQ ID NO: 364009 - DNA, 726 bp, Pseudomonas aeruginosa
atgaacaacaagaccctatgcccttcgctcttgctctgcctttcgctgcttgcaccgctgtcttgtctcggggagaccgccgccgcgccctatccgctggcccacccaccgcgcctggccgactacctcccgccgccgccggcggcggactcggctgcggccgtcgccgatctcggcgcggtgctggaggcgcaacgcctgcgcacgcccgaacaggtacgccgggtacgcgcccacgaccagtggaaggacaacgtcttccccttcgccggcgacctgctgggcgcctcgttcgacaaggaacgcctgccgctgacccggagtttcttcaaccgcgcccaggaaaacctggtcgaggtgctgatgccggcgaagaagcacttcgcccgcccgcgtccctacgaagtgacaccgaaggtgaagccggtgctgccgccgccggagggggagtcctatcccagcggccacaccatggacagctacttcaaggcctcgctgctgagcatgctggtgccggagcatcacgatgcgttcttcgcccgcgccgaggagcatgcgcagagccgtgtgctggccggcgtgcacttccccagcgacctggaaggcgggcagaccgccgccgcggcgctggtggcgagcctgctggccgatccggcggtggccgccgacttcgccgcggtgcgcgaggagctgcgcggcgcgctggggttgccgaaactccagtag

SEQ ID NO: 364010 - DNA, 1359 bp, Pseudomonas aeruginosa
atgcaaaatctcagacgcgctgtattcgccggcctggtcgccggcacgctttccgaaggggcggccgcgacggccggggatgggggcttcgtcgaggacagcgaactgcagttcctcgctcgcacctactacttcaaccgcgactaccgcgacagcccgaacaacgccgggcgcaaccgcttcaagcccaggagcgagcgcaacggctaccgcgaggaagccacccagggcctgcgcctccagttcgcctccggctacacgccgggcagcctcggcttcggcctcgacgcccatgccatgctcggcctgcaactggacagcggcggcggccgcaccggcaccggcaacctgccggtcggcgccgacggccatcccgaccatcgctacggcaaggtcggtggcgccctcaggctacgccacggcgaaacccgcctgaagtacggccagaccaccaccagcgcgccggtgttcgccgccagcagcaaccgcacgctggccggcatggcctacggcctgctgctggaggacagctcgttcgacgggctgctgctcgagggcgggcgcttcaccgccgcctccggccccggcgaatccaaggtccgcggcgacatcagcaccgtctacggacgcctcggcgcctatccggtgcgcctcgacgcggtcggcttcctcggcggtcaatggcaggccacggagcggctgcaactgtcgctctacgcctcgcgcttcgacgacatctggcagcaggcctatttcggcgccagccatcgccagccgctgggcggggagcgcgcgctgcgggtcgacctcgacgcctaccgcacccgcgacagcggccagagccgcttcggccgcatcgacaccctggccagctccctggccctgggctacgaacaggggccgcagcgcatcaccctggcctaccagcgtgtccatggcgagcagccgttcgactacatggccttcggcgacgggcgctccagcgcgtccatggtactggccaactcggtgggctactccgacttcaacggaccgggcgagcgttcctggcaattacgctatgacctggacctcggcgcgctcggcctgcctgggctcagcctgcatgcgctgcatgcccgcggccgtgccggggccagcgccagcagtgccgccgagagcatctacgccggactctacgggcgtgacgggcggcaccgggaaagcgacctcggcttcgcctatcgggtcaaggcgggccccctcgccggcctcgcgctgcgcgcctcgcaggcctggcaccggggcaacgcgagctatctcgacggcgacatcgacgaaacccggctggtcgtcgattactcccgctcgatctggtga

SEQ ID NO: 364011 - DNA, 882 bp, Pseudomonas aeruginosa; identical to SEQ ID NO: 320958

SEQ ID NO: 364012 - DNA, 816 bp, Pseudomonas aeruginosa; identical to SEQ ID NO: 320959

SEQ ID NO: 364013 - DNA, 1062 bp, Pseudomonas aeruginosa
atgaaagcgcttacgtcttccctgctcggtctgttcgccgcgcctgtgctcgccggcctgctcggtgcctacgtgccgctggcgagcgccgctccgccgaaggaaatccgcatcgcggtgccggacgtcagcgccggcagttcgcactcgggcggcggcgtggtcgacgtgctctacacccgccagttgctggagaaggagttcgccaacgacggcatcgcggtgaaatggagcttcttcaagggcgccggcccggtggtcaacgaagcgttcgccaacggccaggtggacttcgcctacctcggcgacctggcggcgatcatcggcaagtccggaggcctggacagccgcctgctggccgctaccgcgcgaggggtcaaccactatctcggcgtgcagccgggctccgggatcaagaccctggaggatctcaagggcaagcgcgtaggcatcttccgtggcaccgccagccagttgtcgttcgacaatgccctggccagcgtcggtctcagcgagaaggacctgaaggtgatcaacctcgatttcagcgccgccctgtccgccctcgcagccaggcagatcgatgccacctggggcctggccggactgttcgccctgcgcgaccgcgggctcgcggaaattccgctgagcacccgcgacctgaacggcgccggcaccctgcaggcgctgctggtcggctccggagccttcgtcgatgcccatccggacatcaccgagcggctgctcaaggtgcagttgcaggcccaggactggctggcccgcgaggagaaccgcgacgcctacatcgaactggtgtcgaagcaggccagctacccggtggtgatcctgcagagcgagtaccgtggccgcaagctgggcgacgccctgtcgccgcgcctggacgccgatttccttggccggctggatgcttcgatccaggcggccaagcgtttcggcctgatccgtcgcgaattcagcgccgagcagtgggccgcgccggaactgctggaggcggccggcaagctggcaaaggccaaggccgtggcgcaggcggcggagtga

SEQ ID NO: 364014 - DNA, 840 bp, Pseudomonas aeruginosa
atgaacgcattcaccgcgcccgccacgggcaccccgctggtcagcttccgccaggtgcgcaagcacttcgccgtggacggccggcgactggaagcgatccagcagttcgacctggagatcggcgagggcgagttcatcgccatcgtcggcgccagtggctgcggcaagtcgaccctgctgcgcctgctgatcggcctggaccgcgactacgacggcgagatccgcgtcgacggccggccaatcgccggcatcggcggcgaacgcggcatcgtgttccaggagcaccgcctgttcccctggctgacggtgcagcagaacgtcgccctcggcctggtcaacgaagcccttggcgaaaccgacaaggcggcgcggatcgacgaatacatccgcctggtcggcctgcacggcttcgagcgtgcctacccgcaccagttgtccggcggcatggcccagcgcgtggcgatcgcccgtggcctggtggccagcccgcgcctgctgctgctcgacgagccgttcagcgccctcgacgcactgacccgccagcagttgcaggaagagttgctggcgatccgccggcgcacccgtatcaccaccctgctggtcacccacgacgtcgaggaggcgctctacctggccgaccgggtggtggtgatggagccgcgtccggggcggatcaggcgggtggtcgaggtgggcctggcgcatccgcgcgagcgcggtggcttcgacttcctgcgccagcgcgaagcgctgctgcacgaactgaccgccgacggcgagtacgtcgcgccgccgccgcgacgggtggaaaacctgcccttcgaattcctcgcttgctga

SEQ ID NO: 364015 - DNA, 1611 bp, Pseudomonas aeruginosa; identical to SEQ ID NO: 320963

SEQ ID NO: 364016 - DNA, 753 bp, Pseudomonas aeruginosa
atgtccgtatcctctgcatccctcgccggcaaagtcgccttcgtccagggcggttcccgcggcatcggcgccgccatcgttcgtcggctggccgccgaaggcgccagcgtcgccttcacctacgtcagctcggcggataagtcccgggccctggcggccgaactcgaaggcgccggagccagcatcctggccctgcatgccgatagcgccgacgcggccgcgctcgtcgccgccgtcgacgaagcggcggctcgcttcggacgcatcgacatcctggtcaacaatgccgccgtcctcgccctcggttcggtggaagagctgccgctggccgacttcgagcggaccctggcgatcaacgtgcgcagcgtcttcgtcgccacccaggcggcggtcaagcacatgggcgacggcgggcgggtgatcagcatcggcagcaccaatgccgaacgcatgccgttcgccggcggcgccacctacgcgatgagcaagtcggcgctggtcggcctgaccaagggcctggcccgcgacctcggcccgcgcgggatcacggtgaacaacgtgcagccgggtccggtggataccgacatgaacccggacgacggcgacttcgccgaggtcctcaagggcctgatggcgctgccgcgctacgcccgcagcgaggaaatcgccagcttcgtcgcctacctggccgggccggaagcggcctacatcaccggggccagcctgaccatcgatggcggtttctcggcctga

SEQ ID NO: 364017 - DNA, 933 bp, Pseudomonas aeruginosa
atggaaaccctcagcaacatccagtgcttcgtccgcagcgccgaggccggtagcttcgccgaggccgccaggcgcctgggcctgacgccggccggggtgggcaagaacgtcgcccgcctggaaagcaacctcggcgtgcgcctgttccagcgcagcacccggcgcctgaccctgaccgaagccggggagcgtttcctgcaagaggtcggcggcagcctggagggcatccagaccgctctcgccaacgtctccagcgtcggcaaccaacccagcggcacgttgaaggtcagcatggggctggccttcggccgcgactacatcctgccgctgctcggcgagttcctcgaacgctatcccgacatcgtgcccgactggcatttcgacaatcgccaggtcgacctcatcggcgaaggcttcgacgccgccatcggcggtggtttcgaactgccgcccggggtggtggcgcgcaacctgacgccgggccacctgatcctcctcgcctcgcccgcctacctccacgacaagccgccgatccgccatccaggcgacctgggcggcttcgacgggatccgcatccgctcgccgcagaccggccgcgtgcgctcctggccgctgcgccggcgcagcggcgaggaggcgccgatcgagctgcgcgaacgcatgaccatgagcgacccggaagccacctgcgaggtcgccgccatgggcctgggcatcaccctggtatgcatgcagcacgcctatgcctacctggagtccggcgccctggtgcgggtcctgccggactggtacgtcgacgccggcaacaccagcctctactacgcggcgaacaagctgctaccggccaagacccgggtcttcgtcgacttcgtcgtcgactacttccgccgccaggacctggcccggcgcttctccgccttcccaaccggctag

SEQ ID NO: 364018 - DNA, 1173 bp, Pseudomonas aeruginosa
atgcgcgagtccctcggtgtttcgttaccatcccggcccctgctgctgaagctgggcctgctttccctaccctgggcgttgtgcgccgggctgcatgccgtcggcctcggcgtctggctggccctggcgctcggttggttcgccagcctggccatgctcgtcctcctcctgcgcgcccctcggcaagcggtagcgaatgccaacccgcaggcggatgccgcttcgccggcctggagcgcggcgcaacgggcgctcgccgacgaaaccgcgcaactggacggtcacgcccggcagatcgacgaactgctgcattcggcgatccgccagctcagcgacagcttccacggcctcgccgaacgcatcgatacccagcgcggcctgtcccattcgctgatcgagcgctacgacgggcgcggccaggtcgacgaaggcatcaacttccaggacttcgtcaggaccacccagcagaccctcagcctgttcgtcgaggctaccctggaaaccagccggacctcgcagcaactggtggaacgcatggaccaggtgcggctgaagatcaccgagatcctgcagtcgacccaggacatggacgccatcgccaagcagaccaacctgctcgccctcaacgccgccatcgaggccgcccgagccggcgagagcggccgcggcttcgccgtggtcgccgatgaagtgcgcgcgctgtcgacccgctccacggagttttccgccgccatccgcaagcacgtcgacgtggtccaccacgagatccaggacgccgagagcgcgatctcgcaactggccgacaaggacatgtccttcgccctcgattccaagcagaagatccagggcatgctcgatgacctggaggcgatgaaccggcacaccctgaaggtcatccacgaactggaccggctctcgctggaagtcggccagggcgtcgacgcggcggtcaccgccctgcaattccaggacatgggcagccagttgctcggccagatgcgcaagcaccatgcgcgtcttggcgccttcgccctcggcctcggcgcgctggaggcgcggccgcgccaggaatggcccgaacgggtcgcgcgggaggtcgaggaactgcgccggcccttgcccagcccggtgagccagaacagcgtcaacgtgggcgaagtggaattgttctga

SEQ ID NO: 364019 - DNA, 366 bp, Pseudomonas aeruginosa
atgggcaaaccgattctgatcgtcgacgactcggcgtctatccgccagatgctgagcttcaccctgaagtccgccggctacgaggtggacgaggccgcggacggcaaggaaggcctcggcaaggcccagagcaagagctacagcctggtgttcaccgaccagaacatgccgaacatggacggcctgtcgctgatccgcagcctgcgtaacctggccggctaccgcagcgtgccgatcctcatgctgaccaccgaatcgagcgacgcgatgaagcagcaggggcgtagcgccggcgccaccggctggctggtgaagccgttcgacccgccgaaactgctcgaagtgacgcgcaaggtcctgccctga

SEQ ID NO: 364020 - DNA, 1920 bp, Pseudomonas aeruginosa
atgccccaggatatgagccagtttctccaggtgttcttcgaggaaaccgaggaacacctggccaccctcgaactcctcctgatcggtctcgacctggaccggccggacagcgagacgctgcacggcatcttccgcgccgcgcattcgatcaagggttccagcggaatgttcggtttcgacgacatcaccgccgtcacccacgaactggagaccctgctcgaccgcatccgctgcggccagatgcacctgcggccggacatgatcagttccttcctcgaagcccgcgacgtgttgcagcgcctgctcgacgcccatcgcagcggcagtcccgaccccggggtgccgttactggagacggtcgagcggctgcgcggctggctgcgggtgccggagcaggaagcggcggaggaaggcttcggcctgttcgacgacgcgcccgccagggaaaccgcggacgacgatgccttcggcttcttcgacgaaggcccgggcgctccggaacgagcggccgcgccggaagcgttcgggctcttcgacgaggcgcccggcgcaccggccgcgagcgaagcgttcggcctcttcgatgaggcaccgggttccccaccggcggaggaacgcgccttcggcctgttcgacggcgcccccggcagccccgccgcgcccagtgcgcccgcgcaagccgtcgccgcgccggccaggggcgcagtcgcgcccgtgcgtggcgacggcgagtccggctcgatccgggtcagcgtggaaaagatcgacagcctgatcaacctggtcggcgaactggtgatcacccaggccatgctcggccagctcggcgagcagctcgacccgagccgccacgagcgcctgcagcacgccctggcccagctcgaacacaacacccgcgacctgcaggagtcggtgatgtcgatccgcatgctgccgatcaacttcatcttcagccgcttccccaggctggtgcgcgacaccgccacgcgcctgggcaagcaggtcgagctgcacctgcacggcgagcacaccgaactggacaagagcgtgatcgagaaactcagcgatccgctcacccacatcgtccgcaacagcatcgaccacggcatcgaaacgcccgccgaacgcctcgccgccggcaagccggcgagcggcacggtgaagctcgccgccagccaccagggcggcagcgtggtggtggaggtttccgacgacggtcgcggcctgtcgcgtccgcgcatcctcgccaaggcccgcgagcgcaacctgccggtgcatgacgggatgagcgacgccgaggtctggcaactggtgttcatgcccggcttctccaccgccgagacggtcaccgagctgtccggacgcggcgtcggcatggacgtggtgaagcgcaacatcggtgccatgggcgggcgcatcgacatcgactcggcgcccggcatgggcactcgcatcggcatccgcctgccgctgaccctggcgatcctcgacggcctgatcgtcgccgtcgaagcggtcaactacgtgattccgctgacctacatcgtcgagtcgctgcaggcgcgcagcgacgacgtgcgcggcctcggcggcgaagacaacgcgatgatccgcgtacgcggcgagtacctgccgctgttcagcctgcacgagctgttgcgcatcggcggcgaagcgccggcgccggagcagggcatcgtggtgatcctcgagtccgaggggcgcagcttcgccctacaggtggacgaactggtcggccagcagcaggtggtgatcaagagcctggaacagaatttccgccgcgtggagggtatcgccggcgccaccatcatgggcgacggcagcgtcgccctgattctcgacgtcgatgcgctgccacgcctggcggcgcgggaggacaccgccgatgaacggcactga

SEQ ID NO: 364021 - DNA, 486 bp, Pseudomonas aeruginosa; identical to SEQ ID NO: 320969

SEQ ID NO: 364022 - DNA, 399 bp, Pseudomonas aeruginosa
atgttggtctggaaggcgatgccgtcgatcaccccgatgatgtcggcgatcttgcgcgccgactcgttgatcgaggacatggtgctgaccaccttctgcaccacggtgccgccctgggtcgccacttccgaggcattggccgccagcgagttggcctggcgggcattctcggcgttgagcttcaccgtgctggtcagttcttccatgctcgaggcggtttcctccaggctcgacgcctgctgctcggtgcgcgccgacagttcggcgttgccgctggcgatctcgctggcggcggtgttgatggtgtcggcggcctcgcgaatctgcccgagcatccgcgacaggctttgtgcggtgtcgttggagaaatccttgagctggccgaaggtgccctggtag

SEQ ID NO: 364023 - DNA, 1326 bp, Pseudomonas aeruginosa
atgaagagatttataggtggtgcgagtctttttctattttcggtggtttgccatgctgctgattactcttgggcgtatggcggtgctgcgtttccgtctgctgatgcggcgtgtaactcttacttcctgaccgtaaaacttagcgttaactcggttaatcgttactcggtcaagatgcaatcgtctacgactgctttgtgttcggtatatgtccctatcggaagtgcagagggcgtttattcgtcaattaatttgaatcgtaagggcgattcttgtccgaatggcggaacgtatgatgcgacaacgggaagttgcattacgcctccagagtctgatccgtgtagagagaaagcagggcaacccacgtcctggtcgttgttgcgccccgatttaaatggcatggggccgattgagtatttgtgccagaacggttgccgtgtgacgtatggggcagcgacttgcggaccgttgaactccgatccgagcagaggcttttgctccggtactggcacgtttactggccagcagtgcgagccaactgatgaggctacgggcggcaacaaccccgaccccaaccccgatccgccggaccagccagacccgccggataagccagacgagcacggatgtgttcctccagctcagtggtccggtaccacgtgcgtcatgcctcccaaagagccaggagacgggggtggcgatggtggggagggtggtgatggcggtagcggtggcggcggtaataacggcggcgatggcggtggagacgggggaaacaacggcggtggcgacggtactggcggtggtgatggctccggtaacggtgatggatcgggcgatggtggcggtactggtggtggtgataagccgggcgaggaggagggtaagtgcgacccggccaaggaccccagttgtaagcccagttcagtgactggcgaggcttgtgaaacctcgttgcaatgtgatggcgacgcgattcaatgcgcgattctgcggcaacagaaacaggcccgttgtgacgcccaggaaatgaatgatttcgagaagaacaaagagaagatttcgaagttattccagggtgaagagtttaaggcgcagcctgaccaggaggttgagattccatcgtttatctcgcagtctggccggtttttaccgtcgggttgcccgcctgataaacagttcagtctgtccactggtggcggccactcctttacattctcttataagccgctgtgtgcgtttgcttctgacctgggcgtgcttattgttgtggcggcaagtatttttgcgacgctctatgttggtcgcggttttgggggtgagtga

SEQ ID NO: 364024 - DNA, 762 bp, Pseudomonas aeruginosa
atgtggcatttgatttccgggttgaactcaagggtcttaagcctactcaaaattaaaggtgattatgtagggttttcgggactggttctaatcctgttctatatcgctttttttgggcttttgagttcggttcttgtttttctccttgtagctatacaagggggggtgttttacctaccagtatgctggaagaatcagtgtataataaatttctttgacagcataagtgttgttgtttatttggttcaggctgttgtgggtcttttagctttaatagggacgattggagctttgattgtggctctgttaagctatttggcttcggataggacggcaaaatttactaattatatttcgcacttaactttgtttcaggcctattttgtttcggaagtttctaaactagagtctctgtctttgtcgagttttgatgtccatcgaatgtactcttttattttttcaggtgcaaaggatggggttatggttgtttcgcctgagtatgagaagtttattgattccataaatgaagaaattgatcgttcaaattctatggcgcaggctgctattggggggagctttcgctacaaagagcatcagggtaggatgcgaaatgtttttaagatggtagggtttaatcttccttttcaaccaaaaaatgatttctatgaaattgagaaccaattgatagctctggttgatagtatttctttgtctttctgctcatcctctgagctaaaaattaaagaaagattttataggtga

SEQ ID NO: 364025 - DNA, 1209 bp, Pseudomonas aeruginosa
atgagcaagttcatcccgcaaggtaagaatcctaggaaaatttccaaaggggctatttcgtctatagcctccctttgttcaactctgaatatcaccctgccggagttagaggatgtgttatcgcttccggataatattctctatactgaaaaagagattcctaaggctggtggtaaagtaagggttgtatacaatccgcatcgtcttctgcggagggtacaaaggaagataaatacacaaattttttcatcttctaatattattgaatggccaacttatctttatgggtcaattcctaatcaagaatatgaagctgaacttaagcatttgaataataaggattatgtttcttgtgctgccaggcattgtggggcccgaagtgttcttaagttagatgttgaaagtttctttgataatgtgcatgaggacgttgttcggagtatttttgcagattttcttaaatgtagtcctgaagtttctgacgttttgacaagcctttgttgtaaaggtgagcatattgtacaaggggctttgacttcgagctatttagcgtctctttgcttgtatgatgtcgaaggaacggtggctgaaaggctgcggcgtaaggggttcgtatatactcgcttagtcgacgacattactgtgtcgtcgaaaaagttaggggtcgatttttcgtatgctaaaagtttaattgtcgatatgttaaaggagaaagatcttccggtaaatgaaggtaaaactaaagtctatagggcatctactgctcctttaaccgtgcatggtttgcgaatagggttttcaactcctcgtttgccttcggatgaggttaggaggattcgggcggcagtaagaaatgtagagctcttggcaaaggaaaataattataggactagtcatgcatataggcatgattttaaccgatgtatgggacgtgttaataaacttgagcgggttaagcataatcaacaccagtccttggttcggcgactgaaggatataaagccgctgccgtcaattcgagatatcggtcgtgcaaaaaagatgctagaacgattgagaaaagattataagcttagatctcatacctactggtatcgagctaggtatttcaaggttttagagcgacttaatgttcttcaaaggacatatgaacatgtggcatttgatttccgggttgaactcaagggtcttaagcctactcaaaattaa

SEQ ID NO: 364026 - DNA, 630 bp, Pseudomonas aeruginosa
atgcccatcactgagcagcaactgctgcgtatttacccgaacgccggccctcgcgccggcgtttttgttggtgcgctgaatcgcgggatgacgcggttcggtatcacgtcgccggtgcgggtcgccgcgttcctcgcccaggtcggccacgaaagcggccagttgacccgcttggtggagaacctcaactacagcgcccgtggcctggctgcgacctggccgagccggtaccgcgatgccgacggccagcccaacaccctggcgcagcgcctggcgcggaaaccccgggctatcgccaacaacgcctatgcctcgcgcaacgggaacggcgacgaggcgtccggcgatggctggtgctaccgcgggcgcgggctgctgcagatcaccggccgggcgaactaccgcgccgccggcgccgggctgggccagccgctggaagcggagccggaactgcttgagcaaccggagtgggcggcgatctcggcggcctggtggtgggccagtcacggcttgaacgacctggccgaccggggcgagttcgccgccatcactcggcgcatcaacggcggcacgaacggtcaggcggagcgcctggcgctgtgggagaaggccagggcggtgctggcatga

SEQ ID NO: 364027 - DNA, 285 bp, Pseudomonas aeruginosa
atggcgatggcgagggtcgccctgcgcaagccggacggacgcgtagacggcccctggagggcatcgagaatcgacgaataccgcatgtgggtaccctcactgggtttcgtccccgatctttcctggacccgtgaaccaccgcatctcctgttcggccgcatccacccggtgctgatcaccggcgtggacccgaagggcctcgagagctgctccgtccgcggcgtgaactacgacgagcggctctacatcaacgacaacgccaccgcgccgcctgaggcggtctga

SEQ ID NO: 364028 - DNA, 603 bp, Pseudomonas aeruginosa
atgctcagcactaatcaagcccagtcggtatccgcccggattgcgcaacgagtcaagcgcctacctcaagggcagccgttcagcattggccgtttcacagggtttggaacgaaaaacgccgtatccaaagcaatagctcgactggtcaaccgaggcgagctcgaacgggtgtatcgcgggatttatatgcgccctaaacccggactttacgttgctagggctcgtcccaacttctggcaattgatcagcgtaattgccaggcagcagcatctgtctttacaaatccatggtgccaatgccgtcaggaggtttgggctcagtacccagatgccgctcattccgatctattacaccaacggagccagccgttcagtattcatagggaaggcggaggtccggctgatacatgcgacccctatggtcatgcagcatgcagggactgaggtaggggtggctatcagcgcactgttttatctcggtaaagacggctctactcccaactgcgttgccgcaattaagaaggcgctcaggcctgaagacctaaccacattaatagcctgcaaaatgccgaaatggatgcgcatggcgttggaggcggcgtga

SEQ ID NO: 364029 - DNA, 795 bp, Pseudomonas aeruginosa
atgcgtaacgcgaccgtctggcccagtgatttagccatgcaagcactcggcattcgcccgaatgagtttcttggcgcagataccccgatctggagagccccgcccgcaccttgcgggcggtgcggtcgcccaatacatgccggggaaccatacaaatatgccctggccagggacacgttctcggacacacgggacctatccgcccctggaaatccgatatgcggagcgtgtgtcattcttgggctcaagcctgccatgaatcgactgtctttcagcgttctgacaaaaaatggtgtttaccccatagctaaggacactcacaaagcctggctctttctcagcccaccacccccccctttcgttgcagtaatcagcgcctcgaccatggcccacctggtttggcggaccccagtctcactatctaaggaaaggttcttcctacgctatgggaatgatctattcaccatacgccccgagaaaatcacctcagccatatcctgtgcaaaagccctgaagcaacggcgcgaagagcagcaagaaccaaagagagcaaatgccaagggagccagtgtccgcctatcgccttatctcgcccttgaccgagacctggccaaccacaatcacggccagctctcctctgcagcccttgaacacatgaagccggctgaaaaagcccttttcttgagcctgacccccggagaggtatgggcgctcagctttttgttgacgacgaaaccgcccattcccgaacaaccccagcccttgtcgattgatctcaaaaaaggatcggactga

SEQ ID NO: 364030 - DNA, 210 bp, Pseudomonas aeruginosa
atgaaaaagttcgttcgcaaactcgctgtaggcactggtgctgtatcggctgccgtcctgggcgttgtcactcaggtttcggcagcggttcccgaagaggctaccaaggccctgacgaccgctggaaccgatgtgaacactatcggttgggccgtgtttgggctgctggtcgcggcggcttcgttcaagtacatgcgccgagcgctgtaa

SEQ ID NO: 364031 - DNA, 210 bp, Pseudomonas aeruginosa; identical to SEQ ID NO: 364030

SEQ ID NO: 364032 - DNA, 873 bp, Pseudomonas aeruginosa
  misc_feature (16)..(25): n is a, c, g, or t
atgaaaccgcggagannnnnnnnnntcaaagaggaaattactagatccgagcctgactccgaagatttcagagaaaagataaacgagttgtcgtggaaatacaccgcgtcactcaaaaatatcgatatggcgaatttatctcaactcatcgttcgccgcgcggccatcgtccaaatactagacctggcgtgcggaaagaacctagcaatgcagaagattgatagtgatgcacgccgcaaggatgagagagtaattcacagcatatttttcccaatgcgaagagacagttcagaggttgctgaccacgatatctggcttctgagcgaggagtatcattactacgactatatttcttcagatcttccgctctcgaagcttacttgggatgatggcagcaaaatattttcagaggacattgatcagggtattcagaaaatacttgagaaacgtgccgatgaaaatggtggcaagcgtcctgatattgccatttttagcaaggaagggtcagctattattgtggagttcaaagctcctggcgtacagatggacgaacatataggtgaccttcaagagtatgcctaccttctgaatgcaatgtcaggtggcaagctaaagaaattttatgggtatttgataggcgacactgtcaatccacttcgagtgggtggtagttggacaaagtttccgatgggcaacggatggttccaatcgagtccactgagcgaccctgaaagcggggtcaagcttggcgaaacctatttcgaaatcctgcactttaaggatgttattgaacgggccaagaaaagaattagcgtatatcaaggcaagctaaacctgaagttagactttcaagaggaaacacctcgaaactag

SEQ ID NO: 364033 - DNA, 855 bp, Pseudomonas aeruginosa
gtgggcaaagaactggtcgctgagctgaaggaagttccgaagaagatcgatgccgagcgcaagcgcatgcgcgacctgctggacggctggcaggaagaggtgcgccgacctctgactgagtgggaagaggccgagaaggcgcgcgtagccgagcatgaacgccgcatcagcgagttgcgatgcgtggatgttgaaggccgcagcgccgccgaaattgcttcggccatcagcctcattgaagagtatgagattgatggaagctgggaagagttcgaagccgaggcgcatcgcgtcaagtcggcatcgctgtccaccctgcgcgaagccctggccaagcgtcagcagtacgaagccgagcaggccgaactggaacgcctgcgcgccgaagcagcagcacgcgagcagaaagagcgcgaggagcgcattgcccgggaagctgctgaagctgagcgcctcgccgccgaacgccgtgcccaggaggagcgcgacgccgccactcgccgtgaagccgaagccaaggcagcagccgagcgtcgcgaattagagctgaagctacaagctcagcaagcggagcgcgaaaagctagaagcccaacagcgcgccgaacaggcagagcgtgatgcgcaacgacgtgctgaagaagccgcagcgcaagagcgtcagcgccaggccgacgagcgggcccgcatcgaacgcgaggctgctgcacgcgaagccgacaaggcgcacaagaaagccatcaacaacgaagcgctggcggcgttcgtcgctggtggcatggatgagtcatccgcgagacgggcggtcacattgatagcccaacggaaaattcctggcgtccacatttattattga

SEQ ID NO: 364034 - DNA, 1092 bp, Pseudomonas aeruginosa; identical to SEQ ID NO: 324657

SEQ ID NO: 364035 - DNA, 249 bp, Pseudomonas aeruginosa; identical to SEQ ID NO: 221922

SEQ ID NO: 364036 - DNA, 618 bp, Pseudomonas aeruginosa
atgaccaacgctttgccgcctgggttgaccgactgcctgctctggtctgaagagcttggaatgggtttccaccctcgtcctccgatggactatagcgggccgtacttcgagaagtatcaggtgctcgatgctaccccgatgggcgctgcgctgacccgggcccgtattgatctggtgcgccgtcactttgccggccaggtggtagatatcggtatcggcggaggccgcttcgtcacagagtccggcgcgatgggctttgacgtgaatccggaagcggtggcttggctgagggcgcaggagcgctactacgacccgtaccagcaccacgcagaagccgtgacctgctgggacagcctggagcacattcccgagccggagaagctgctcgaccacgttggcgagtggctgttcgtgtccatgccgatctacaaggatgctaaggattgtctggcgagcaagcactacaagccaggggagcatttatggtttttcagccatgacggctttgttagatggatggcaaaacatggatttgagatcgttgagttcaacgatatcgaatcgcagattggacgagaggagattttttcctatgccttccgccgatacagaaattga

SEQ ID NO: 364037 - DNA, 237 bp, Pseudomonas aeruginosa; identical to SEQ ID NO: 324688

SEQ ID NO: 364038 - DNA, 1068 bp, Pseudomonas aeruginosa
atgtccgcagaaacccaactggtcgaagtgccggccaaagaaaccgcactccaagtctactcggccgctaatggccttgacccgttcctggccaagatccgcgaagagatcgacggctttacgccggacgtgaccacccgcaagggtcgcgaggcaatcgcctctatcgcctacaaggtcgcccgctccaagacggcgctggacaacgtgggtaaggaactggtcgccgagctgaaagaggtgcccaagaagatcgacgccgagcgcaagcgtatgcgtgacctgctggattcctggcaggacgaggttcgccggccgctgacggagtgggaagaggccgagaaggcgcgcgtagaaaagcatgagatggcaatcgactggctgcgcaaccgcgacgacggtgtagccgatatgcaatctgcagccatcctgcagcgcattgcagaaactgaagcggtagaggtcggcgaggcctgggaagagttcgaagccgaggcgcaccgcgtcaagtctgcatcgctggcaaccctgcgcgaagcattgaccaagcgtcagcagtacgaagccgagcaggccgaactggagcgcctgcgcgccgaagccgcagcacgtgaacagaaagagcgtgaggaacgcattgcccgcgaagcagccgaggccgagcgactagcagcggagcgccgcgcccaggaagaacgcgacgcagccgcccgccgtgaagcagaggcaaaggccgcagcagagcgccgcgaacttgagctgaagctggccgccgagcgtgccgaacgcgaggcactggaagccaagcagcgcgccgagcaagccgagcgtgacgcccaagcgcgcgccgatgcagccgcagcagccgaacgtcagcgccaagccgacgagcaagcccgcattgagcgtgaagccgccgctcgcgaagccaacaaggctcaccagaaagcgatcaacaacgaagccctggcagcgttcattgccggcggcatgcccgatgaatgcgccaagcaggcaatcaccctgatcgccaagcgctgcattccgcacatcactatcagctactga

SEQ ID NO: 364039 - DNA, 1023 bp, Pseudomonas aeruginosa
atgcctgaaatgaagaagccccaggtgctgcaacacccagggcttcggggaaacgtcgaaatctacgaggaaaccaacgtcatgcacgataatagcacagatgtagcagatgtaaccccagagaccgtcccggccatggtctacgccggccatcccgtagtgaccacagctttgcttgcccgcctgtatggcgccgaggcaaagcatatccagaacaactatgcacgcaacaatgctaggttcgagtctgggaagcacttcttcaaggttgaaggggctgatctcgcagacctgaagaacaaaccctctttgagagggtttgttggtgtgaaggccaaaagcttgatcctctggactgagcgcggtgcggcccgacacgcgaagatgctggagacgaacgaagcctgggatgtcttcgagaagctagaggactgctatttcggcaaattcgaatctgcgcgtcaggttccagcgccggcgaaccagactctgctcggtaccaccattggcacagacggcttccactgcctggctgccgtactggatggtaaagttcgccacctgccttcggcgattcgccgaggcgccaagaaccacatctggagccaggtgcacaaggcgttcagcgtcgtgaccgccgaggatattcctgccgatcagttggacagcgctcgaagcttcatcgcttcgtacaacgtgcatgatggcgaatggctcccgaaggaagagaagaagtccggcaccttcgtgctggacgaataccaggctcagttcgtgcacagcctcatccactacacccactgggtatgctgccgctgggatcagggtatcggagcagcggtgaaggcgttgaatccgaaattccacgcgaagacgtgggagttcttccgcgacttgagggtgtgcgcggaggtgctcgaaagcgcggcgcctgagctggttgcacacttccgcagtcgtggcgctctccgcccgcatgactgcattgcggcaggtcatcccgtaggtcacccggcagactga

SEQ ID NO: 364040 - DNA, 207 bp, Pseudomonas aeruginosa
atgtcgaaagctattgacgcaatactggagagctaccaacggagcatcagcgatggcgagaagcgtgccattgccgttgccgcagcactgcaaattattgaggccaaggtcagcaatgcacccaccaacaatgcagtggttgagaatgagttcaacaacttgaacaaatatgccgatcagatcctggccgccctcaagggcgaatga

SEQ ID NO: 364041 - DNA, 162 bp, Pseudomonas aeruginosa
atgtgtgtacaggccgggctggcggtcgaccggcaggacgatcaggccggcatcgatgcggtcttcgcgcagcgcctccagttgccctgcggtggtgtcttcctggagctggaagtccagcgcgccatgctgttggcggaacgcctggagtatgcgcggtag

SEQ ID NO: 364042 - DNA, 297 bp, Pseudomonas aeruginosa
atggtgctgtcgacgaaacgccaggcgcaacgttctgcgtccgctggcggcgctgcgcgcggccgccagggtgcgttcggcctgggccagggtgcgccgggcttcgtcgaggaacgcgcggcctgccggcgtcaggcggtggatacggttgtcacgctccagcaggctggcgccgacttcttcttccagccgccggatcgcagtggtcagcggtggctgggccatgtgcaggcgctcagcggcgcggcggaagctcagctcctcggcaaccgcgacgaactggcggaactggcgtaa

SEQ ID NO: 364043 - DNA, 1182 bp, Pseudomonas aeruginosa
gtggcaaaggacaagccttattacccgaacgcaccaatagcctcggttgaggtgcttgcaaaatgcctaggtgtttctcctagagtaatgcttgatctcgctggtaaagtggggagttcatataccgaatttcttgtttcctcaaagagcaaggatcgtacagtatatgagccaaagttcgagctgaaaaagcttcaaaaacgcattaattctcgtatcttctccgcagtacaatttcctacctaccttcagggtgggataaaggatgcagaatctcctagagactacgttcgcaacggtgagtttcatgcgggctcatgtatgttggtaagtctcgatatcaggaacttttacgataatattaaaagagagcgtgttgaggacgttttcaagaacttctttagatttccccctgatgtttgtcgggttcttactgacttggttactttgaaaggcaaagttcctcagggggcttgtacctccagttatattgcaaatttggtttttcataattcggaatattcgatcgttagttatcttaggtcaaaagggataacttatactcgtcttttggatgatgtgaccctttcctctaaaaagcctctctcggatgaaaatttaagtgatgtgataggacgaatctccggaatgtttaagaagcatggtcttcgcattcatcctgggaaaaagaaaattgagcttgctagcgatagccggtcagattacaaggtgacgggggtttgggttggtcatggtgttccaaagcttcgcaggaaagagcgtgattatataaggcatttggtttatatctgcgagtgtgagtataagaaggacccaacccaggactcttaccatgagctttggagtaggacatcggctcatgttgcaacaatgacgcgcttggagcaccctcagtccgttgaattacgtaagagaatgtcaaaaattttgcctctttttagtgaagcccgcaagaagcaagttattgtggaggctgggaaattgttgaggcgtgatttttcaaaggcaatgcgtttgggtgtgattaaaacttacaataagactatgcactcgcttggtatactttctcgtacggatagagcgaaatctaagaggcttagaaaagaactgcgattaaagttttccggtattcaatcaatgcagcaatattgggagggatag

SEQ ID NO: 364044 - DNA, 216 bp, Pseudomonas aeruginosa
atgtccgagaaggagtatggcaaggggtttgtgacttcatacgacccattcaaggggtttggttttatacgtagagaaaaaggcaaggatgtcttctttttttatgacgatgtcttggaagggcactctgatattttagaaggcgatattgtggagttcgaggttagaaaagaaaagaaagggccgagagcgtattcccttaagcgagtttcatga

SEQ ID NO: 364045 - DNA, 705 bp, Pseudomonas aeruginosa
atgacatgtatttttattgcaaacttaggtagagaattaattctcgccgtcgacaaacgagttagctatatctctgaggacggaaaaaaacacccagtaggagacaatgaagaaaagataaccaggaccgcagcggggattgtcacgggttgcggggcggtcgcattgcttcagccggtaaaagatcatttaaagcaaaaatcattcaagaacaccgacgaagttttagagcttattaaaaccactcgtaccaatcactcaagggaaaacgcaaacagttcaagactaaaatctgaactagcggaaacctgctggatactcacatacccaacatattgcgatgggaagcccacaactcgagcgatttactttcacccaagtagtagtttagataatttcgtcgttctacccgaaggacgagtgttatgcattcctagcggtctcactccagagcaggcacaacatctccagaaagagctacaagagcagaccgataacggcctgtctcagctaccctacgaaatcgccaagcaagagataataaagctgatgctaaacctaatgagcgatgtggcgggacagagcaataccgtatcaaaaacatgcgacattgccttaatagatggtgacgaagtttttatttctctagaacagagcaaagacaacactaaccccgaattctctcccttaccttacccagcctaa

SEQ ID NO: 364046 - DNA, 720 bp, Pseudomonas aeruginosa
atgtatagcaaggcgcaagcgcagaactcccaggagcaactgatccagcgttacgcaccactggtcaagcgcatcgcctatcacctgctcggccgcctgccggccagcgtgcaggtggaggacctgatgcaggccggcatgatcggcctgctcgaggccgcgaagaaatacgacgccggcaagggcgccagcttcgagacctatgccggcatccgcatccgcggggccatgctcgacgaggtccgcaagggcgactgggcgccgcgttcggtgcaccgcaacacgcgcatggtgaccgacgcgatccgcgcgatcgaggcgagaaccgggcgcgacgctaaagatcacgaagttgctgccgaactccaattgagcctcgaagattactacggcatcctcagcgacacgcagggcagccgcctgtacagcttcgacgacctgttgcaggacggcgaacatggattgccggaagacaccagcctcagtcacaacgaaccgatccacggcctgctcgacgaacgtttccaggcggccctggcggatgccatcgccaagttgccggagcgcgagcgcctggtgctggcgttgtattacgacgaggaactcaacctcaaggagatcggcgaggtactgggcgtcagcgaatcgcgggtcagccagttgcacagccagtgcgccgcgcgtttgcgcgcgcgcctggccgattggcggtcggcctga

SEQ ID NO: 364047 - DNA, 300 bp, Pseudomonas aeruginosa; identical to SEQ ID NO: 328192

SEQ ID NO: 364048 - DNA, 387 bp, Pseudomonas aeruginosa
atgcgccgcgtctcgatcgcctggttgccgcccttcgacagctcgcagatcccgcgcgagcgtgccacctcggtgccggtcatccagttctccatgacgtcgggcgccgactcctcgccggcggtagtggttcatgcgcggcctggcgcaaggtgggaattatccgacccttacattctcgacctggtcgctgtgctgcccgaggtgatcacgcggctgacggtcgattcgtcggcgtcgagcgtggctggtggcctagaaatcctgggccaggttatggagtggcaactgcgcaaccgcaggctgtcggacaagcgtaaggcctcagccaagtcgatgatccggcccagtcgaggcattgcctgtcacactgtgacaggtccgtga

SEQ ID NO: 364049 - DNA, 531 bp, Pseudomonas aeruginosa
atgtccatccgccgctattccccgtcacagatcgccctgcactggctcagcgccgtcgcggtcctgctgatcatcgccctgccctacggcgccgacttcttcgccggcctgctcggcggcaagggcaacgtcttcaccctgcacaagtcgctgggcgtggcggtactcctgctgaccctgacacgcctggcgctgcgccgcgtccaaggtgtcccggataccctggaggggaacccggactggcagcgcgcggccgccaaggccgggcatttcctgctgtacgcggtgctgatcgtcatgccgctctccggcatgctcgccggcaagcgtccgctggacctgttctggctggtgcagatcggcccgttcgacctgccggaagccttcaaggcgttcgccggcggcacccacgtcaccgtccagtacctgcttttcgcgctgatcctcggccacgccgccgctgccatctggcatcaccgcgtgcagaaggacgacgtactgcgcgccatgctgccgcaacgcggcgcctga

SEQ ID NO: 364050 - DNA, 588 bp, Pseudomonas aeruginosa
gtggaatgggtgaccgacggcgtggccgcggagaacgcgctggtcaccgacgagttcgacctgctggtgctcgacatcggactgccgcgccgcagcggcctggacatcctgcgtaacctgcgccaccagggccggctcaccccggtgctgctgctcaccgcgcgggacaaggtggccgaccgggtcgccgggctcgacagcggtgccgacgactacctgaccaagcccttcgatctcgacgaactgcaggcacgggtgcgcgccctgacccgccgcaccaccggtcgcgccctgccgcaactggtgcacggcgagctgcgcctggacccggcgacccaccaagtgaccctgtccgggcaggcggtggaactggcgccgcgcgaatacgcactgctgcgcctgctgctggagaacagcggcaaggtgctctcgcgcaaccaactggagcagagcctctacggctggagcggcgacgtcgagagcaacgccatcgaggtccatgtccatcacctgcggcgcaagctcggcaaccagttgatccgcaccgtccgcggcatcggctacggcatcgaccagccggcgccctga

SEQ ID NO: 364051 - DNA, 468 bp, Pseudomonas aeruginosa
atggagcgctatcactcaacggccggcgatccgccgcggcgcgatgctgacgtaaagcggcaggaggcccaggaactggacgaactggttcagcagttcctggccggcggcgggcagatcgagaaagtcgggtacaagatgcgcgagttgccagacactttcgtcatcaaccccatgaagacgccggtatacaacggcgccctggccgagaattcgtcgctcaaagcgaagcctgccgcgccacgtacgcaatccaagaccgagccccaacgctcaccatcgcccgtgccggctttacagccggctcctggcgtgagcccgaaggtctggttgagccggatgatcgccgcccaggcgctgctggccgcgcagacggccaggctcgctcgcgaactgggcgtcagcgatgctgagctgcgccggctgggtcgtcggcatggcatggaggtgttccatggcactcgctag

SEQ ID NO: 364052 - DNA, 825 bp, Pseudomonas aeruginosa
atgttccgggtcgatatctacaacggcgtggccaagggcgacagcccgccgaagtcgaagctgcttcgcagcacggccgggcgtttcaagcctgacgtttaccgttactacaagtcagctacgcagtccgaaacgggcggtgtgggcgatgagtcgaaggccgatacccgtggctcgttctggcgatcctggggcttctgggggcttgttgggctgattgtggtctgtctgtcagtggggattcccggggtcgtccggttcttcacgccaccgcagcccaagcaagcgtcagcgccgactcccgcggctaaggttgttgaacaggcgcagccggtggcggctcctgcggggcgtgcgatgcaagcggtctatggcgcgtcgtcgaatgggccggtgccgtctgcgatctggcggattgccggctatgtgcatgccggcctgggccgggctgaggcgtggccgtcgaaggatggttacaacgcggagccggatcgaccgatcagcaagacgtcacgcgtggtgctggtgtccgaaggtggccgcacgcggttctggccgattgagaaatgccggttcttcgaacagacgcccgatttgtattgcgacatcgacggcgagcgtgtgacgttctggacgggccgaggggccgtatcgactgtgatggatgcgacaagcaccgcgagcggcggcagccagcgtagcgcagcgtccgccgcgaccggtgcgcaggtgcagaccccgcattcgtttcagccgcagcctcagcagcagggaacccgcgtgaccgttgttgctgatggcagccgttcgccccgcacgttgtga

SEQ ID NO: 364053 - DNA, 447 bp, Pseudomonas aeruginosa
atgtctcgctatcgtcgcgtgaacatcgacggcaagtcgctgttcaagaccgaaacccgcaagaccgccgccgcgctttaccccggaaccttcgctgtgatcgacggtgacgacgagttcgctcaggctgatgaagttgttggccgtctgtacgtcctcgacagcgcctatcacgagggtctgggtatcaccgaccagattccggccggccactcggctgttggtaactacctggaagaagggcgtgaattcgctgtgcgcatggctgctggtgcttacaccaaggatcagccggtgaccgtcagtgctgcaggtcttgccattcctgtccctaccgctgctggctcctacaaggtgatcggctacatccaggacaccgtcaccacctctgcggtggacttcatccgcattcgcgtccgcgctgactctgtcaccgtggcgccgtaa

SEQ ID NO: 364054 - DNA, 276 bp, Pseudomonas aeruginosa; identical to SEQ ID NO: 329679

SEQ ID NO: 364055 - DNA, 630 bp, Pseudomonas aeruginosa
gtggcttcgcaacgctcgacctcggcgcgcagttcgtcgagggtcgcccgctgctcggcgccgggcgcttcgccgaaggccttttccgagcgcttgagctgggcgcgggccatggcggcctgggccttggccttcttcagttcggcttcgtcgtcgagcgcggcaggcggtgcgctgggtaggtcgcgcggcaggctggcttcggcatcggccagggccttgtcggcggcctcggcggcggcgcgcagttccgcgaccaggccatgctgttccggggtgtcgtggctgagcaactgtttctcggccttcttcagggccacccgcgccatgctcgcttcgatcttcagccgtttcagccgttcgctgccgctaccggcctgcttgcgcgccctggcccgctcgatcgccgcctgcaccgggtcgaccgccgtggcgggggcggcttcctcgcgctcggcctgggcggcgcgcgccagcgcggccttctccgcgcgttgggcgcgttctgcggcccggcgctcctcgtcgcggcgcaggcgagcctggcgttgctcgaaacgctcacgggattgttcggccttcagcagcttctgccgctgctcgcggatctccgccttggacgcgcggtag

SEQ ID NO: 364056 - DNA, 825 bp, Pseudomonas aeruginosa
atgttccgggtcgatatctacaacggcgtggccaagggcgatagcccgccgaagtcgaagctcctgcgcagcacggccgggcgtttcaagcctgacgtttaccggtactacaagtccgccacgcagtccgaaacgggcgctgtcggcgatgagtcgaaggctgacacccgtggctcgttctggcgatcctggggcttttgggggctggttgggctgatcgtggtctgtttgtcggtcggcattcccggcgtcgtccggttcttcacgccgccgcagcccaagcaagcgtcagcgccgactcccgcggctaaggtcgttgaacaggcgcagccggtggcggctcctgcggggcgtgcgttgcaagcggtctacggcacgtcgtcgaatggaccggtgccgtcagcgatctggcggatcgccggttatgtgcatgcgggcctgggcaaggctgatgcgtggccgtccaaggatggctacaacgctgagccggatcgaccgatcagcaagacgtcgcgtgtcgtgctggtgtccgaaggtggccgtacaaggttctggccgattgagaaatgccggttcttcgaacagacgcccgatttgtattgcgacatcgacggcgagcgtgtgacgttctggacgggccgaggggccgtatcgactgtgatggatgcgacaagcaccgcgagcggcggcagccagcgtagcgcagcgtccgccgcgaccggtgcgcaggtgcagaccccgcattcgtttcagccgcagcctcagcagcagggaacccgcgtgaccgttgttgctgatggcagccgttcgccccgcacgttgtga

SEQ ID NO: 364057 - DNA, 171 bp, Pseudomonas aeruginosa
atgcaatacggaaagctggcactcgcccatcttcgtctcgaactgccgctgcaggttcttatgtccaatgccggcttttatatcggcacccttgatgaagaatactacccatcccgcgaacttgctcaacaggcattagacaacggcacttggtcgcaacgggaatattaa

SEQ ID NO: 364058 - DNA, 231 bp, Pseudomonas aeruginosa
atgtgggtgcaaatcgcgattctggtcgcatcgtatctgatcagcagcgctacttctgcgaaagcgccgaagccgaaaccggaggcgctgacttccgaagatcttccgcagaccgaggacggcactggccactacgtgatcttcggcgatgtgtggatcgaggactggatcgtcctcgggaccggtcacgagcggatgcaggcagtcaaatcgaaggggtcgaagaagtga

SEQ ID NO: 364059 - DNA, 2466 bp, Pseudomonas aeruginosa
gtgatctataagctaagggatcttctcgacacggacttcgggcgtcggcagagtgacttcaacacactcaaacaggcacccaagaaaccctcgcgcaagcatctggaggtactgatcgaccacctagcctggctagagagtttcgggaaactggatgccatttttgatgggatcgtcgatacgaaaattcgccactttgctgcccaagctgcggcgtcggatgtatctgaactgaaggactgctcgctgccgaagcgttacacgctgatgcttgctttgatctaccgtatgcgggtgcgaacccgagatcacctggccgagatgttcatccgaagaatctccacgatccacaaacgcgccaaggaggagctggagcaaatccaggcacgtcaacgtcagaagttggaacaactggcggccaccctggacggcgtggtgcagattctggttcaagagccggatgaccaggaggctggtagcctgattcgagaatacctctcccccgatggcaacatggatcggttgcgagaggtttgtgctgaagttcaggccacaggaggtaataactacttgccgctgatctggaggcacttcaagtcccatcgttcactgctgtttcgcctcagccaccttctccagttggagcccaccacccaggatcgctcacttatccaggcgcttcagctcattcaggacagtgagaatctgcaccgtgaatggatcgatgagcatgtcgacttgtcgtttgcatcagatcgctgggtgaagatcgtgcgtcgccctaccagtgaagggccgcctaccaaccgacgttatctggaggtctgcgtgttctcctacctggccagtgaactgcgctcgggtgatctgtgcgtgcagggatcggaatccttcgccgactaccgtaaacagttgctgccttgggaagagtgtctccagcggctaccggcatactgcgagaaggtgggccttcctaccacagcgaaggagtttgtcgcctcgctcaagagccagttggaggaaaccgcgcaacagttagatgacaagttcccttcctgtcgaggggatgtgtcgatcaacgatgcaggcgagccggtactgcggcgggtgatggcgcgggacatcccgccttcagccatctcgctacagacggcgcttatgcagcgtatgccagccaggcacgtgctggacattatggccaacattgagcactggattcagttcacgcggcatttcggaccgatgtccggcaacgagccaaagctcaaagagccggccgagcgctacctgatgacgatcttcgccatgggctgcaatctcggtcccagccaggccgcgcggcatctggccggtaatgtcacaccgcatatgctgtcctataccaatcgccgccacctctcgctggagaaactggacaaggctaatcgcgagttggtggagctctatctgcaacttgacctgcccaagctttggggcgatggcaaagcagtggccgcagacggtacccagttcgacttctatgacgacaacctactggccggctaccacttccgctatcgcaagatgggggccgtggcgtaccgacacgtggccaacaactacattgcagtgttccagcacttcatcccgccaggcatctgggaggcgatctatgtgatagagggactgctcaaagtcagccttagcgtcgagcccgatacggtctactccgacacccagggccagtcggccacagtattcgccttcactcatctcctgggtatcaatctgatgccgcgtatccgcaactggcgcgacctagtgatgtgccgaccggatcgaggcgtatcgtacaagcacataaaccgactgttcaccgacactgccgactggcacctgatcgaaactcactggcaggatctgatgcagattgcgctgtcgatccaggccggcaagatttcctcgcccatgctgctacgtaaacttggctcttacagccggcgcaacaagctctacctcgcagcacagacgctgggcagtgttatccgcacgattttcctgctcaattggattggcagccgagagctgcgccaggaggtcactgcgaacaccaacaagatcgagtcctacaacggcttctccaagtggctctctttcggcggcgatgtaattgccgaaaacgatccggacgagcagcagaaacgtctgcgttacaacgacatggtggcttcgtcggtgattctgcagaacaccgtggacatgatgcgcatcttgcagaaactagcccgcgaagggtggcagtttaccgatgaggacgtgtcctttcttagcccctacctgaccagtaacgtcaagcgtttcggcgagttcaaccttaagctcaaccgaccgccggagccctggatcaaggattcggtattccaacaggctgccggctcgttgcgagtcaactcgaccagtaaggccgcggccgaggaggcaatatga

SEQ ID NO: 364060 - DNA, 126 bp, Pseudomonas aeruginosa; identical to SEQ ID NO: 329847

SEQ ID NO: 364061 - DNA, 273 bp, Pseudomonas aeruginosa
gtggggctgatcgacgcgagcgccaacgagctgaacagctcgaccaacgtggtgccgtgcgccatctatgcgttcggcgctcagcagcgttcgaggtacatcggcgaagcgcccgatttcggtctgtgccggatggacttcctcgcgcctggggactcgatcaccatcggaaccgacacatggcgcgtcttccctttgctgcagcgcggaacagccaacgatttcggcaacaccagcgcgctggtcggctatgcattccgggtggtcgagtag

SEQ ID NO: 364062 - DNA, 693 bp, Pseudomonas aeruginosa
  misc_feature (309)..(340): n is a, c, g, or t
atgagaaagtctcggtcgggcgtcgtgttttttggtgttgcggcccgaatcactccaccaggtcctggcctcggcgccgagggcaagctgggtgttcccactggcaacactctgccaaggatcgacctcggcgccggcggtgagctgggtgttgccactggcaacactccaccagggaccgaccccagcgccgccggcgagctgggtgttgccactggcaacactccaccagggaccgaccccagcgctggcggcgagttgggtgttgccactggcaacactccaccagggaccgaccccagcgccggnnnnnnnnnnnnnnnnnnnnnnnnnnnnnnnnccagggaccgaccccagcgctggcggcgagttgggtgttgccactggcaacactccgccaggacctggcctcggcgccgccggcgagctgggtgttgccactggcaacactccaccagggaccgaccccagcgccggcggcgagttgggtgttgccactggcaacactccaccagggaccgaccccagcgctggcggcgagctgggtggttccactggaaccacttcaccaggaaccaacctcggcaccgccggtgcgtttggtgtttcggcccgaaacactctgccaaggatcgacctcggcgccgagggctagcaacttctcccactcaagaggaaccgaaagatgtgtga

SEQ ID NO: 364063 - DNA, 414 bp, Pseudomonas aeruginosa
atgcgccgcgctcacctaatcccactctccaagcaggcggtggcagccctgcgtgagctggaaagcatcactggtggctacacgctcgcgtttcctggccgtatcgatccggcaaagccaatgagcgaggccgccatcaaccaactactgaagcgctctggctacgacgggcgcgccacaggtcatgggttccgccacacgatgtccaccaccctgcacgagcagggatatcccagcgaatgggtcgaaacccagttggcgcacgtggacaagaacagcattcgcggcacctacaaccatgcccagtatctggaggggcggcgagagatgcttcagtggtatgccgatcacttggatgttctgtcatgcagcagtaccgaagcgcccatcgcagcgggggagaaagtcgcatga

SEQ ID NO: 364064 - DNA, 798 bp, Pseudomonas aeruginosa
atgcagcagtaccgaagcgcccatcgcagcgggggagaaagtcgcatgaatgatgatgtgattcgcctatctgatttggtgccggaatacgctcgctactacaaggttagttctaaagaagctgcgcatgatctgcatgaagtcattcgagagctacatatggagtacagtgagatccagaagaacaaactgtcaccgaacgatatattttgggtcgggaaaacgggatcaccacagaagtcaaccagaatttacagccttagctttgaaggacttggcaaatattttgatttaattctaaatcctctacccggcctcgacaacagtctcgcagagtgtttctgtgcgagcgatgctgacttcaaaaaaattccagcaagcacgatatatgcatcaaaacaatcccttagcgagcggatgattggtgtaggttttgaaagatctgattttctattagatagcagctcaacttcacaacctgaaactggccacggcgaagagtcatttaaaaccattgaacttaactatataagcttaattattaatggcctgattgagctaatcaaagaggtcgacaaagctcatacagagaagcccctcaaaccagaggccagggagcgagcggaaaaaattaaacttcgcgcctcacaacttcactcacatcgcaagaactctgacccaagtccatcaattcaaaatctagcagaggctgccggcgtgaaaataccgagaagcgtgcagaccattagaaagtacatgggaagatcatctcccaatgactcaggtagatctgcatag

SEQ ID NO: 364065 - DNA, 942 bp, Pseudomonas aeruginosa
atggcctgccgagcaagtgcatgcctgggttgcagaaaaaatcagcgcatccgttcgttaacgatgtctacaaatatgccactccctagtcgcatctttgacagactagaagaaaaccgaaagcgctctcgcactaaatcgcaagaggttgaggtcgagaattttcatagcctactgccaaactggccaaactcagttcggcgcaccccgaacgttgctcttcgctcagcgttgtttggcgcagtcagcaagggatatcgcccatactttgagcgagtaaagattaacgctcttggcggaatcagcataatttacacaggagccctacttgatcagggcgacttggatgtctgggaaactgtactgcacttggctcgaacgcaagatctaggatcagagtgtcgggtaactgcctaccgactgttaaaagaacttggcaaaaccgatacaggaaagaaccgagcgatcttagatcggcacctcagcaggatgagtgcgaccgctttacaagttcgggtaggcgagcattcgtatgagggcagcctgattcacgaggtctaccgtgatcatgagacgcggacttatgtcattcgattgaaccccaatctccgcgtcctgtttcttgctgaccagttcactgatgtggattgggctgtgcggcaagagctgcatggacgaccgcttgcgcaatggctgcatggcttctatgcgtcgcacgcaagaccatacgatatgaggatcgaaactttacatcggctatgtggaagccgagctacctccttatctgacttcaaaaaagacttgcgccgggcattggactctgtggaagaagcacgcgacgcagcagggcagccttttaggtattcaatagaggggagcctggtacgagtcaaaaccactcctagcccatctcagcggcggcacctgaccagtaagcgctga

SEQ ID NO: 364066 - DNA, 924 bp, Pseudomonas aeruginosa
atggccggctggaaatcctcactggcatctgtgctcaaggagcacaacggtatcaaggcatcagacgggacagttgccagtcacgagacgcagcacaagcgctcgacagtcctctaccaggcgttcactgacctgagagaaatgggttacaagctggacaatgtcaggcagttaaaaggtcgccatgtagaagcgctgaccaaacactggctgagcaaggggctttcctcctcgactctgcagaatcgcctttccaccctgaggacatttgcctcctggattggcaaggagggcatggttgagagcgctgagcgctatttcccgaatcatgaggccgccagaacgtcgattaacacccaggacaaggggtgggaggcaaacggcgtgagcgttacgaaaaagctcgatgacctacgcgccctggatgaacgtgtcgcactccaggtggagctgcagcttcggtttggtctccgggtcaaagagtcgatcatgctgcgccctcatttggcggacaagggcggctatctggccgttagcatcggcacaaaaggcggcagggatcgtacggtgcctattgatacaccagaacgacgagagctgattgaccgagctaaaacctttgctgatcgccgtacggccagcaccgccgatccaggcaagtcgttgaaacaggcgcttggacactacagccgaattgttgccaaggcagggctgaccaaagctcagcttggcgtgacttcacatggtctgcgtcatgcgttcgccaacgagcgctatgcccactattcgggtagtcgctcccctgttgagggagggaatctcagagcccagaactgggagctggatcgctttgcacgcctagcggttgtcgaagagctggggcattcccgtgaggacgtgtccacgcactacctcgggcgatga

SEQ ID NO: 364067 - DNA, 324 bp, Pseudomonas aeruginosa
atgaagatcgaccaaatcaccatcggattggactggctgcatgcgaggctgcctgcattcacgcggcgcatgttcctcgttgccgccacgctgctttccctcgggcttgcacacgttgttgcctcaaccctgatcgacggttacagggacgtggtgttggctgggtatgcgagagcagaggccgagcgctcaattctcgcactacctctaggccacctcttaggtagcctgggcgtgctggtgttttggctctgggtcgcgacgattctgctgcgggccttcctcagcttgcgcgcacgcctgtggcgcagggcggggcagtga

SEQ ID NO: 364068 - DNA, 1716 bp, Pseudomonas aeruginosa
atgttcgtggtgtttctgccttatggcatgaagcccacggcagttcagctgcctagtggcgcgaccgtgaacatgatggaggctcaggccattccgctgagtttcgtaatgtcagtacaccgccttttccgttcgatttttgacccggcaatgagtaggtacacagtggcaggaacaatcgtgccagcccagtccgcaattgacgatatcgtggggcggtcagcagatgtgtttgccggcagtgatctggctcaactcatacgagattacaacgcgagctgtgtaccccacaccaacaatctggcgggaccagagcgagctaccagagtcgaggcattgcacgccatcgggttgttgggcggcggtggactcggcatcccggatgaggaagtcagcctgatagcccaagcccggaccgcattcgatggggctcggacatttgtgttcggttcggctgaggagaatggggggtggggggcgtacctcctcggaggcggcgcggcccggacaggactggagcgagtgcttgatcaacgcgccatgcagtccagacgtgaggaaggcctgcgcatgattgagcacgtcggcccctttatgggcggacgttacaagctcccggtgagcgacttttgggccgctaaattctcgggtaaatcggatgcacaaccaacgtacttgtcgatcagcctgatacctagccagcagcgcaccgtagtagcccctgcggagcatgacgagttccattttcagcccaccagctgcgtcgaggcctatcagatcgcacagctcggggctgaacaggcctaccaggccttgcggcagtcaggtgaggtcctcgcagggggacagcgcgttagtgctgaggtcggtgccgtgagcacggcggttgcctggcagcgttttatggcacgctcgcttcagcacacaacaaatatgtcggcagagggcagtgaggtggctggaggcattttggccactgcgcagatgtttaaaaacttcaagggatggctcgatctgcaaacgctcttaccggggtttgtaaccctagccgcgtgggcattctggattgttttgttgctcgcaccactgttcctgctgctggctccattgcgtggagggcagatagtcgcccaatggatggcgctgctactggtgcctgtcattggggttatggtggctcagttcgtaaatttcggagcttccttggtcatggcggctgtcgcgattggacaggcaggagctgccagcgggtgggcaggggctggtgctgattacgatgccctgcgcggaatgatggccggactggcagctggagttcttggcttcgcgacttggatcaccggcagcatgctgggagtttcgttgagcgggctgactggcagtttatcgggggcagttgcgacagctagtgaggccggcgctttcgtgtcgaaagccgctgggatggccatgctggtagggcggttgggccgtatgggaagcgctgccgatattagccggcgcagatcaggtggcggggcaggtggaaaaaccgcttctcaaaatgctgctggtgtctcacgtactagcggggcttcatcgccagtacgtatagttatgacgcagttcactccggcaagcgctcaaaccagaaggctaggtggagcgaacgcaaagggggcgccgtcgcttaatccgcccaagaagccaaccccgcctaccacacctaatatctag

SEQ ID NO: 364069 - DNA, 171 bp, Pseudomonas aeruginosa
atggcgcggcttctggtgtcgattgtgtgttttggtggagggttctggttgggctcttatcgactggtgccgctgtgggctatcggcgtgctgatctttttgtcggctgtcctgttgggagtggcggaatggctggagcagcgggaggggcatgacgatgatgcaggctga

SEQ ID NO: 364070 - DNA, 936 bp, Pseudomonas aeruginosa
atgctgcctagcaccactgcgctcacgccgcccgctaagactggcgggccagatcgttcctggcctcaccgcaagctctacgagaatgtcatcaagacgctctatgccttgccggaagagttcagaacctcgctgcggatttccgactttcgagcgacggacatcttcactctaaattcggctcttggggcgtccatcgaggacgccgtcgtcaatggcctgaatagcctgcgcgaggtgtgggacccggacggccaatatgcactgtatcgctttgagcgtcaggcgcaggctttccctgatgtgcgactagtgacggaagctcctgatgaacaatccatcatcatggggatcgagttgaaaggctggtttgcgttatcgaaggaaggcgaaccaaccttccgctacacagtgaccccaagcgcctgcgcagatgccgacctgcttgtggtctatccttgggtgctcagtgatgtggttgctggcagtccgaagctactccgccccttcgtgggtgaggcccgccatgcagccgagctgcgcaactactattggcagaccatgcgggccgagcggggtggtaacggaactatcatcccagctgcccaccaagccccctacccagcggtcaaaaccgaccagtgttctgaccgcgcggaagatgacggcggcggtaacttcggccgcgtagcgcgctatggcttgttggacgagtttgtgaaatccacagagaagcaggaggtttccggcatcccggttcgcgcgtggttgacattcttcaaaatattcagcgacaacgcccgcaacctagatacggtcgtcaccactatcgagagcgccttgcgccgctacaacgacattggcgaaggcgaaaaggttgcactggtggagtcgttcgagcggattgttgcgatcctcaagggtgagcaaggctaa

SEQ ID NO: 364071 - DNA, 1107 bp, Pseudomonas aeruginosa
atgtcgtccgttaattctcgcaagtccagcgcatcggacagatttgaagtcatcacgcgcgggcgggatggctcgcccaagtcaaccggtggccgtgtaaaggccgcccaggctggaagcgtgttcatcgagcgtgacgactcgatgagctgctacccgcgatgggtagcgcctacttgcatcatcgtggatggtccctatgggctcgggaagttccctggcgaaccaaagacgccggccaacttggcagaatggtatgccccccatgttgcggcgtggtcggcccacgcaaggactgacactaccctttggttttggtgcaccgaggtaggttgggcgttagtgcaccctgttctggagatgcacggttggcaatatgaggagtgcaatatctgggacaaaggcatcgctcacgtcgccggaaattgcaatagcaagaccattcgaggaaccccggtcgttaccgaagtggcagtgcgctataccaagcggaaccagctaccgggaagtaacgggcagatgctcactatcaaagactgggttcggcatgaatggcagcgcagcgggcttcccatgtcgaagtccaacgaggcgtgtggcgttgcaaacgctgcaaccagaaaatatctaacccagtgccacctttggtattttccgccacccgaagccattgtccgtatggctgcttactgcaacacacacggtcgccccactgatcgcccctatttttcgctcgatggtcgtacaccagtgactgaggatgcttgggcgcagatgcgagcaaagtggaaccatacgcacggtgttaccaatgtgtggcaagagccggccgtgcatggtcaagagcgtatccgtgccggcgttggttatttgcacgccaatcagaagcctctggccttgatgaagcgccagatcatcgcatgcactgaccccggcgatgttgtttgggagcctttcggcggactgtgctccgcttccattgctgccttgcataccggtcggcgatctttcgccgcagagattaaccccgattacttccaggtggccgcgtcgcgacttgaagaggaattcacccgcatggaggaacgacgagaaaatgctgcctag

SEQ ID NO: 364072 - DNA, 1158 bp, Pseudomonas aeruginosa
atgggatcgcatcaggagcggccgctgatcggcctgctgttctccgaaaccggcgtcaccgccgatatcgagcgctcgcagcgctatggcgcattgctcgcggtcgagcaactgaaccgcgagggcggcgtcggcggtcgcccgatcgaaacgctgtcccaggaccccggcggcgatccggaccgctatcggctgtgcgccgaggacttcattcgcaaccggggggtacggttcctcgtgggctgctacatgtcgcatacgcgcaaggcggtgatgccggtggtcgagcgcgccgacgcgctgctctgctacccgaccccctacgagggcttcgagtattcgccgaacatcgtctacggcggtccggcgccgaaccagaacagtgcgccgctggcggcgtacctgatccgtcactacggcgagcgggtggtgttcatcggctcggactacatctatccgcgggaaagcaaccatgtgatgcgccacctgtaccgccagcacggcggcacggtgctcgaggaaatctacattccgctgtatccctccgacgacgacttgcagcgcgccgtcgagcgcatctaccaggcgcgcgccgacgtggtcttctccaccgtggtgggcaccggcaccgccgagctgtatcgcgccatcgcccgtcgctacggcgatggcaggcggccgccgatcgccagcctgaccaccagcgaggcggaggtggcgaagatggagagcgacgtggcggaggggcaggtggtggtcgcgccgtacttctccagcatcgatacggccgccagccgcgccttcgtccaggcctgccatggcttcttcccggaaaacgcgaccatcaccgcctgggccgaggcggcctactggcagaccttgctgcttggccgcgccgcgcaggccgcaggcagttggcgagtggaagacgtgcagcggcacctgtacgacatttgcatcgacgcgccgcaggggccggtccgggtggagcgccagaacaaccacagccgcctgtcttcgcgcatcgcggaaatcgatgcgcgcggcgtgttccaggtccgctggcagtcgcccgaaccgattcgccccgatccttatgtcgtcgtgcataacctcgacgactggtccgccagcatgggcgggggagcgctcccatga

SEQ ID NO: 364073 - DNA, 348 bp, Pseudomonas aeruginosa
atggcaacacaaggagtgttcacccttcccgccaacacccagttcggcgtcaccgccttcgccaactcggccggaacccagacggtgaacgtgcaggtcaacaacgaaaccgtcgcgaccttcaccgggcaaagcaccaacaacgccatcatcggcagcaaggtgctcaactcgggcggcggcggcaaggtgcagatcctggtcagcgtcaatggccgctcttcggatctggtttcggcgcaggtgatcctggccaacgagctgaacttcgccctggtcggctctgaagatggcaccgacaacgactacaacgactccgtcgtggtgatcaactggccgctcggctag

SEQ ID NO: 364074 - DNA, 1029 bp, Pseudomonas aeruginosa
atgccggccaagctcgcgatgtccgccaacgacctgcgtcagtgcctgcgcatcgccggcggcggcaccctggggttcttcgtctgcaagctgatgaactgggactacggctcgttcttcggcgtctacccgatgctgctgctcggcctgacgccggtgatcaacctgcacatcgtccgccagttcctcgccaactcggtggtgatcagcgtcgaggtactggtgctgtacgggttgttcggcgaccggccgctgctgatgacgcctatcgtcttcggcctcttcgtctaccgcttcgccctgatggcgcgcggcccgctgttcttcttcggcgcactgagttcggtgttcctctcgatgctgctgcactttgccagctatccggacgtcgatctgttcgacatgctcgccagcaacatggtcgccacctggctgacggtggccatcgccgtgctgatgttctacctgttccccgacgtcgaaccgcggccgccgcgccaggcgccggccaaggatgcccccagccggcgccacgagacgctgctcggcgccacggtggcgaccttgtccttcgtggtcttccagaccttcgacctgaaggactcgctgtcggcgcagatcgcctcgatcctggtgttgttccccatgcactggaagggcgtgcacttcgccgggcgcatccgcgccctcggtacgctgctcggctgtgcgctggcggtgggcttgcaggtgctgctctacgatcactacgacatcctgcccttcgtcgccctgttgctgtggatctcggcgatgttctgcgcgcgcatccacatgctggagaacggcgtaccggggatcggtttcggcgcgctgaccaccctggcgatcgtcctcggccagtacctgacgccgacccacgacatgatgtacagcgtgctctaccgatttacctcggtgtgcttcgcggtgctgatcacgctgatgacggtgctggtgatccacctgttcctcaaccgcttcgccgccacccggcactacagccactga

SEQ ID NO: 364075 - DNA, 879 bp, Pseudomonas aeruginosa
atgcgcacacccgcctggctcggcagcggcatgccgctgctcttcgtgctgctctggagcactggattcctcggcgccaagttcggcctgccgtacgccgagcccttcaccttcctggccatccgcctgctcctcgcggccgccctgctggccgccttcgccctgctcagcggtgcgccctggccgggctcggcacggctggccgggcatgtcgcggtcgccggcctgctggtccatggcctgtacctgggcggggtgttcctcgccatcgagcacggcatgtcggccggcctgacctccctgttggtcggcctgcaaccgctggctaccgcggccctggccggcgtctggctcggcgagcgggtcagccgccggcaatggctgggactggcgctcggcctggctggcgtagccctggtggtgctcggccgcatccacggtggcgccgacggcctggcctgggccgcggtgctggtggcgctggcggcgatcacctgcggcacgctgtaccagaagcgcttctgcggcggcatggacctgcgcaccggcggcgtcgtccagtacctggccagcggcgccctgctcggcctcgccgcgctgcttttcgaaagccgcgaggtgcagtggagcacgccgttcgtgctgaccctcggctggctggtgctgggactctcgttcggcgccgtcggcctgctctacacgctgatccggcatggcgccgcatcgaaggtggcgagcctgttctacctggtgccgccagtgaccgcgctggcctcctggctactgttcgacgagcgcctggcgccggcggcgatcggcggcatgctgctggtgatgctcggcgtcgcgctggtcaactggccgggccggcgcgcctga

SEQ ID NO: 364076 - DNA, 1347 bp, Pseudomonas aeruginosa
ttgattctcggaacatccaaggccgactggctcgccgaattcccgcgcctggccgacctcatcgccctgcgcccgagcgagtggttcaacccggccatcgcgccgagcgccgaagccctggccgacgtcggcctcggcgccgccgacgtggccgacgccagcgcccgcctgcagcgcttcgccccgctgatcgcccggctgtttccggaaaccgccgccagcggcggcatcatcgagtccgacctggtcgaggtcgccaccttccacgatgccctgcgccagcattacgccgccgaactgcccggccggctctggctgaaacgcgatagccacctgccgatctccggctcgatcaaggcccgcggcggcatctatgaagtgctcgcccatgccgagcgcctggccctggagcacggcctggtcggcctcgacgacgactactcgcggctggccgaggcggattgccgggcattcttcgcccgccaccggatagcggtgggctccaccggcaacctgggcctttccatcggcatcatcggcgccgcgctgggcttccaggccagcgtgcacatgtccgccgacgcccgccagtggaagaaggacaagctgcgcgcccacggcgtgacggtggtggagtacgcctccgactacagtgtcgcggtggaacagggccgccgcgaagcggccggcgatccctacacccatttcgtcgacgacgaaaactcccgcgacctgttcctcggctacgccgtcgccgccgagcgactgcgcggccagttggacgccgccggcatccgcgtcgacagcgagcacccgctgttcgtccatctgccctgcggggtcggcggcggtcccggcggggtggccttcggcctcaagctggcgttcggcgacgcggtgcactgcctgttcgccgagccgacccattcgccctgcatgttcctcggcgtctataccggccgccacgagcaggtttcggtgcaggacttcggcatcgacaaccgcaccgccgccgatggcctggcggtggggcgtccgtcgggcttcgtcggccgcgccatgcagcgcctgctcgacggctactacacggtggacgacgacgagttgttccgcctgctcgccttgctcgagcgcagccagggcatccgcctggaaccctcggccctggccggcgcgccgggcatcgcccgggtcacccgtgagccgcagggctatcgcgaacgcatggggctgacctcggcgcgcctggccaatgccacccacctggtctgggccaccggcggcggcatggtgcccgaggcggaaatgcgcgcctacctggagcgaggcctctcgctgctggactga

SEQ ID NO: 364077 - DNA, 1344 bp, Pseudomonas aeruginosa
atgactatcgaaggccaaggctcactcgccgaacggctggctggagttgaagaaatcgaatgcgtcacccccgacctcaacggggtgccgcgcggcaaggtgatgaccggcgagggcttcctcagcggccggcgcctgcagctcgcccgtggcgtgctgctgcaatgcatcatgggcggctacccgccggcgcgcttctatggcagcgacgatggcgacctggcgctggtcgccgagccgacccaggtccatcgcctgccctggagcaacactccgcgcgccttcgccatctgcgatgcgcaggaactggatggcacgccgtccgggctgtccacccgcggcctgctcaagcaggtggtggcgcgctacgccgcccacggctggcaaccggtggtggccaccgaactggagttcttcgtcttcgccccgaacaccgatcccaacgagccgttccaggccccgctggggccggatggccggcgcgagctgggctattcggccttcagcgtgtcttccaacaacggcctgcggccgttcttcgaggacgtctaccgctgcatggatgcgctgggcctggtgcgcgacaccttcatgcacgagatgggcaccagccagttcgagatcaacttcctgcatggcgacccggtcctgctggccgaccagaccttcctgttcaagcacctgctcaaggaggtcgcgctcaagcacggcctgatcgtggtgtgcatggccaagccgctggcgaagacgccgggcagctcgatgcacatccaccagagcatcgtcgaactggacggcgggcgaaacatcttcagcgaagccgatggcgagccttccgccgcgttccgccacttcatcggcggccagcaggcctgcctggcggacttcacgcccttcttcgcgccgcatgtgaactccttccagcgcctctgccatccctacgcttcgccgaacaacgcctgctggtcccacgacaaccgcgccgccggcctgcgcatcccggccagcggagcctccgcgcggcgcgtcgagaatcgcctgccgggcgccgacgccaacccttacctggccatcgccgccagcctggccgccggtctctacggtctggagcatgaactggagccgagcccggcgatccagggtgagttcgaggtaccggaggagttgaccctgccttgcaccatgtacgacgccctgcggcgcctgaaaggcagcgcgctggcgcgcgaactgttcggcagcgagttcgtcgaaggctacgtggcgaccaagagcatggagctgaccagcttcttcgacgagatcagcccctgggagcgtcgcgtcctggcagcccaggcctga

SEQ ID NO: 364078 - DNA, 1305 bp, Pseudomonas aeruginosa
atgcggcggattttcttctcttttcgcgctctctatttcgctaccctgctgatgctcaccggctccggcctgctcagcacctacctggcgctgcgcctggcggcggacaaggtcgacggcctgtgggtcggcgcgctgatggcagccaactacttcggcctggtgctgggcggcaaggtcggtcaccggctgatcgcccgggtcggccacatccgcgcctacgtcgcctgcgccggggtggtcaccgccgcggtcctcggccatggcctgctgccctggctgccggcctggatcgccttgcgcatggtgatgggcctgggcctgatgtgccagtacatggtgatcgagagctggctcaacgagcaggccgatgccagccagcgcggcgcggtgttcggcggctacatggcggcttcctacctgggcctggtgctcggccagatgatcctggtggcgcatccgcaactggggccggagttgctgatgctggtggccttctgtttcgccctgtgcctggtgccgctggccctgacccacaagatccaccccgcagcgctgcgcccggcgccgctcgaaccacgcttcttcatccgccgggtgccgcagtcgctgaccacggtattggtctcggggctggtggtcggctccttctatggcctggcgccgctgtatgccaaccagttggggttgcccaacgagcaggtcggcctgtacatgggcgcctgcatcttcgccgggctgctggtgcagtggccgctcggctggctgtccgaccgtcgcgaccgcgcctggctgatccgcgcctgcgccatcctgctgtgcctgttcgccttgccgctggcattgttgcaacagatgccgctggcgttgctgctggccctgggaatcgccgcgagcatgttgcagttcaccctctatccgctggctgtggccttttccaacgaccatgtggagaccgagcgacgggtttcgctgaccgccatgctgctggtgaccttcggcgtcggcgcctgcatcgggccgctggcggccggcgcgctgatgcggctgtttggcgctaacatgctatatgcgttcgtcagcgcctgcgcgctgatcctggtctggcgggtccatccggagaaggtcagcggcctgcaccgggtcgacgacgcgccgctgcaccacgtgccgaccccggacaacatgaccagctccccgctggtcgcggcgctcgatccgcgggtagacgaacaggcggtgcaggagcagatggtcgatggcgagcccgacgcgccgcaggccgacggtgcgacgcagaactga

SEQ ID NO: 364079 - DNA, 750 bp, Pseudomonas aeruginosa
gtgcccaacccgttcgtcgaagaagcggggccgcaacccccgaaggtgctcaaggcccccgtggaaatccaggccaacctgcgcctgctgcaggatagccgcgactccctgctgatcacctttgccgatcgcaaccagcgcttccagagcttcctggtggacatcgaccgcgaccgcgggatggtcgcgctggacgaactcatccccaacaccggcgaacgtttcctgcagaatggcgaggcgtttcgcgtcgaagccttccacgaaggcgtgcgtatcgcctgggaatgcgagcgcccggtgcagttcggcgaacacgacggcgttccctgctactgggccgcccttcccgccgaagtgctctaccaccagcgccgcaacgcctaccgcgccagcatcaagcagagccagccgatcgccgcggaaatcgccggggaaaaactccgcgcgccgctgagcggacaactgctggatatctccgccaccggcgccaagctacgcttcgccggcaatgtcgccgaacgcctgcatcccggcgagatctacgaagacttcagcgcccagttgccacagggcgcgatcagcagcgcgatcgaactgcgtcacgtgcgtttcgacgaaaagctcgacgcgaccttcgccggcgtccgcttcagcgagatgagcggcctcgcccagcgccaggtggatcgcttcgtctaccagttgcaacgcgaagcccggcgcttcgagaaagacgaactgttctga

SEQ ID NO: 364080 - DNA, 471 bp, Pseudomonas aeruginosa
atgcctgactcccctaccctgctcgatctgttcgccgaggatatcggccacgccagccaactcctgcagttggtcgacgaagaattccaggccctggaacggcgcgagctaccggtcctgcaacagcttctcggggccaagcagccactgatgcagcaactggagcgaaatggccgggcccgcgcggaaatcctccgcgaagccggcgtttccctcgaccgcgaaggccttgcccgctatgcccgcgagcgcgcggatggcgccgagctgctggcgcgcggcgacgaactgggcgaactgctggagcgttgccagcaggccaatctgcgcaacgggcggatcatccgcgccaaccaggcttccaccggcagcctgctgaacatcctccgcggccaggacgccccgagcctgtacgacagccgcggcggcaccgcctcgagcagccggcaacgcccgctcagccaggcctga

SEQ ID NO: 364081 - DNA, 324 bp, Pseudomonas aeruginosa
atggtcatcgacttcaaccggctgaatcccggcagcacgccagccaccaccggccgtaccggcagcaccgccgcggggcgtcccgacgccactggcgccgacaaggcaggccaggccgcgacttccgctccgaagagcggcgagtcggtgcagatcagcgaaaccgcccagaacatgcagaaagtcacggaccagctgcagaccctgccggtggtcgacaacgataaggttgcccggatcaagcaagcgatcgccgatggcacttatcaagtcgacagcgagcgtgttgccagcaagctgctcgacttcgaatcccagcgctga

SEQ ID NO: 364082 - DNA, 738 bp, Pseudomonas aeruginosa
atggcccgtagccatacttctctacggtttttacccgttttgctcgggctcggctacctgtgcgcggctaacaacagccaggcccagggttttaccgctcccgaggtacttatcggctccacccaggggtttcttgaattcaaggtagaagaatatctgcagaatagcggactcgacgggcgctaccagattcaggtcaaccgcgtcgacccgcgcttgcgcctggccgaatgcgacagggacttgacgctcagccaggaaagtccggcacaaccgatcggcagggtcaccgtgcgcatcggttgcgaaggcagtgcgccctggaccatcttcatgccggcgcaggtgaaactgttccgccaggtggtggtcgcggtgcagccactcaagcgcgcgcacgtgttggaggatgccgacatcgccctggtcgagcgcgacgtcggcctgctgacccagggctacctgaccgatccggcccgcgtcgtcgggcagaagctgcgccgaccggtggtcaacgaccaggtgctggcgccggtcttcctcgagcaggccgaagccgtgcgcaagggcgatcaggtggtgattctcgcgcgcaccgccaccatcaacgtcaagatgcccggcgaggcgctgtccgatggcgccccgggccagcagatccgcgtgcgcaacctgcgctcgcagcgggtgatcaaggcccgcgtgatagagcccggcacggtcgaggtgaatatgtag

SEQ ID NO: 364083 - DNA, 933 bp, Pseudomonas aeruginosa
atggccggtgttttggattcagtcaaccagcgcacgcagttggtcggacagaaccgtctggagctgcttctgttccgtctggacggtaaccagctctacggcatcaacgtgttcaaggtgaaagaggtgttgcaatgcccgcgcctgacggtgatgccgaagtccagcccggtggtgcgcggggtggcgaacatccgcggaggcaccattccgatcctcgacctggcgctggccaccggccgccgcgggttgcaggacctgaccaacagcttcgcgatcatcaccgagtacaacaccaaggtgcagggcttcctggtgcgctcggtggagcgcatcgtcaacatgaactgggaagagatccatccgccacccaagggcgccggccgcgagcattacctgaccgcggtgacccgggtggacaagcagttggtggaaatcatcgacgtggaaaaagtgctcgcggaggtcgcaccgacgtccgaggaagtgtcccacggcgtggtggacgccgagacccagagccgcgcggtgaccaagcgggtgctggtggtggacgattcgtcggtggcgcgcaagcaggtgatccgttgcctggaggcggtcggcgtggaaatgaccgcgctcaacgacgggcgccaggccctggagtacctgcagaacatgctcgccgagggacggcgtccggaagacgagctgctgatgctgatctccgacatcgaaatgccggaaatggacggttataccctgacggcggaaatccgtagcgatccccgcctgcagaaactgcacattctcttgcatacttcgttgtccggggtcttcaaccaggcgatggtgaagaaggtcggtgcggacgacttcctcgccaagttccgtccggacgatctggcggcgcgtgtggtggagcggatcaaggcggtggacgcgggctga

SEQ ID NO: 364084 - DNA, 825 bp, Pseudomonas aeruginosa
gtgtcggcagctaatgcggatttcgagttgttcagggtcttcctcgagaagacctgcggcattgtgctgggcagcaacaagcagtacctggtctcgagccggctgaacaagctgatggagcagcagggcatcaagagcctgggagaactggtgcagcgcatccagacccagcgcggcggcctgcgcgagatggtggtggacgcgatgaccaccaacgagaccctgtggtttcgcgatacctacccgttcgaggtgctcaagcagcgggttcttcccgaactgatcaaggccaacggcgggcagcgcctgcggatctggtcggcggcctgttcgtccggccaggagccgtactcgctgtcgatggccatcgacgagttcgagaagaccaacctggggcagttgaaggcgggcgtgcagatcgtcgccaccgacctgtcggggtcgatgctcaccgccgccaaggccggtgaatacgacaccctggcgatgggccgcggcctgtccccggagcgtctgcaacgctatttcgacgccaaggggccggggcgctgggcggtcaagccggcgatccgcagccgcgtcgagttccgcgccctgaacctgctggacagctacgccagcctcggcaagttcgacatggtgttctgccgcaacgtgctgatctatttctccgccgaggtgaagcgcgacatcctgctgcgcatccatggcacgctcaagcctggcggctacctgttcctcggcgcctccgaggcgttgaacaacctgcccgaccactaccagatggtgcagtgcagcccgggcatcatctaccgggccaagtag

SEQ ID NO: 364085 - DNA, 306 bp, Pseudomonas aeruginosa; identical to SEQ ID NO: 361223

SEQ ID NO: 364086 - DNA, 1716 bp, Pseudomonas aeruginosa
atgaatcccccggcggcgcggatcgagagcctgacgattctcatcgccgaggacaacgcggccgaccgcctgctgctgtcgaccatcgtcagccgccaggggcaccgcgtgctgaccgccggcaacggcctggaggcggtggcgctgttcgagaccgagcggccgcaactggtcctgatggacgtgatgatgccggtgatggacggcttcgaggcggcccggcggatcaagcagcaggctggcgaagagctggtgccgatcatcttcctcacctccctcagcgaaaccgaggcgctggtgcagagcctggaggcgggcggcgacgatttcctctccaagccgtacaaccgggtgatcctcgaagccaagatcaacgccatgggacgcctgcacctgctgcaacgaacggtgctggagcagcgcgacctgatcgtccggcacaacgagcacctgctcaacgaacagcgggtggccaaggcggtgttcgacaaggtggcccattccggctgcctgaacgccagcaacgtgcgctacctgcaatcgcccctcgcgctgttcaacggcgacctgctgctggccgcctacaagccgtccggcggcatgcacgtgctgctcggcgacttcaccggccacggcctgccggcggcgatcggcgcgatgccgctggccgaggtgttctacgggatgaccgccaagggctatccgatgtccgacatcctccgcgagatgaacgccaagctgaagcgcatcctgccggtcggcgtgttctgctgcgccaccttgctcaacctgagcttccagcgcgaactggtggaggtctggaacggcggcttgccggacggctacctgctgcgcgccgccagcggcgagcgggtcgccctggtgtcccgccacctgccgctgggaatcctcgagccggcggcgttcagcgaccgttgcgaaacctatccgctggatatcgaagatcggatattcctgttttccgacggtgtcctcgaggccagcaacaaggctggcgagatgttcggcgaggcgcggctgctccagctgttcgagcacaatcgccagccgtccgcgctgttcgacgagatccagcgcagcctggcgcagttccgcggcgcggtgcaggacgacgtgagcatgctcgaggtgcgcctgcagccggatagcggcctgcaatgcccgccgctggcgttttccgatagcggcgtgagcagtccgctggactggtcggtgagcttcgaattccgcgccgaaaccctcaagcacttcaacccgttgccccatgtactgcaactgctgctcgaggtccacgacctgcgcgcgcgcggcggcgcgctgtatacggtactcgccgaactctactcgaacgccctggaacatggcgtcatcggcctcgattcgacgatgaagagcgacgcggcgggattcgcccgctattaccaggagcgggtcagccgcctgcaggccttgcgcgacgggtacgtgcggctgcacctggacctggcgccgcatggcgcgggggggcgtctgctggtgcgggtcgaggacagcggcgaaggtttcgacgtggagcgcgcgctgaatgccgtggagcgtcaggaacgcctctgcggcaggggtttgcgcctgatccgcgaattgtccgatcgttgccagtggtcggccgacggaaaggtggtgtccgtggagtttttctggtcgcctcaggcataa

SEQ ID NO: 364087 - DNA, 351 bp, Pseudomonas aeruginosa
atgtccgcgccgcatctcgatgatcgtgttctggcttcgttgcaggaggtcatggaggacgaatatccggtcctgctggataccttcgtgctcgactccgaggagcgcctgcgcagcctgcatgccgccctccaggccggcgatgcccaggctttgcggcataccgcgcacagcttcaagggaggcagcagcaacatgggcgcggtactcctcgccggctactgcaaggagctggaagaaagcgccaggcgcggcgagctgcaacgggcgccggcgctgatcgaacagatggagcgcgaattcgccatcgtccgcatccttttcaaacaggaacgtcagcgctatcgctga

SEQ ID NO: 364088 - DNA, 2139 bp, Pseudomonas aeruginosa
atgcgcgagcaagccctacgcatcctcaaagacgttttcggttacgacgccttccgtggcaaccaggcacggatcatcgagcgggtggccgagggtggcgatgcgctggtactgatgcccaccggcggtggcaagtccctgtgtttccaggtcccggcgctgctgcgcgaaggcctgacggtggtggtgtcgccgctgatcgcgctgatggaggaccaggtcgccaccctggacgaactcggcgtgccggcggtggcgctgaactccaccctcaaccccgagcagcagcgggacatcgccgagcgcctgcagcgtggcgagatcaagctgctctacctggcaccggaacggttggtccagccgcgcatgctggccttcctgcaacgactgccggtcggcctgttcgccatcgacgaagcgcactgcgtgtcgcaatggggccatgacttccgtcccgaatacctgcagctcggccagcttgccgagctgttcccgcaggtgccgcggatcgccctgaccgccaccgcggacatgcgtacccgcgaggagatgatccagcgcctgcacctgcagaacgccgagcagttcctctccagcttcgaccggccgaacatcttctaccgcatcgtgcccaaggagcagccgcgcaagcagttgctcggcttcctctctgagcggcgcggcgatgccggtatcgtctactgcctgtcgcggaagaaggtcgaggaggtcgcggaattcctcggcaaccagggcttccccgcgctgccgtatcacgccggactgtccaacgaactgcgtgcccaccaccagaagcgcttcctcaacgaggaaggcttgatcatggtggcgaccatcgccttcggcatgggcatcgacaagcccaacgtgcgattcgtcgcccacctcgacctgcccaagagcctcgaggcctattaccaggaaaccggtcgcgccggccgcgacggcctgccggccgacgcctggatggcctacggcctgcaggacgtcctgctgctgcggcagatgatgcagagttccgagggcgacgagcggcacaagcgcgtcgagcggcacaagctggaagccatgctggcgctctgcgaggaaacccgctgccggcgccaggcgctgctggcctatttcgacgaagagatgccgcagccctgcgggcattgcgacaactgcgtggacggcgtggaaacctgggatgccaccgaatccgcgcgccaggcgctgtcggcgatctaccgcagcggccagcgctacggcgtcggccatctggtggatatcctgctcggccgcgagaccgagaagatccgcagtctcggccaccagcacctggcggtgttcgggatcggcaaggggcgcggcgaagacgagtggcggaccctgtttcgccagttggtcgcgcgcggcctggccgacgtcgacctggacggcttcggcggcctgcgcctgaccgaggcctgtcgtccgctgttgcgtggcgaggtgcggctggagctgcgccgcgacctcaagccacagcgcgccaagggctcctccagcggcggcgccagcgccgccagccaattggtgcgcagcgaagagcgggaaatgtgggaggccctgcgcgcgctgcggcgcaagctggccgaagagcattcggtgccgccctatgtgatcttccccgacgcgaccctgctggaaatgctccgcagccagccgcgctcgctatccgacatggcccaggtcagcggggtcggcgcgcgcaagctggagcgctacggccaggccttcctcgatgtcctcaccgactcgccggcggcgcccgccgcgccgccgcaggacctgcgccacgaattggccagcctggcctgtgcggggatgaccccggcgcagatagcccgccagctcaattgcagcgagaagaacgtctacgcgatgctcgcagaggccatcgccggccagcaggtgagcctggagcaggcgctggatctgcccgaggaactcctcggcgaaatccaggacgccttcctcgaggaagacggcgaactgccgccggtggcggcgctggaggagcgtttcggcaagcgggtgccgagtggcgtgctgcactgcgtgcgcgccgccctgcaggtggaactggagtcgtga

SEQ ID NO: 364089 - DNA, 1164 bp, Pseudomonas aeruginosa
gtgacacagaaggaccggttggacgactcccgttccaacctctatgcggaccaattgaaccgcggtttccgcggcctgcgtttccttcccgaactggagcgtgactaccggcgctacatgctggaggacagcttcgcgctgaaacgcatcgccctcagcgtcggcatgctcgtctggctggcgttcatcggcatcgacctgctgatcctcgctggtcccccgctgtggggcgtactggcggtgcgccttggcgtgctggtcctgctactggtctgcggctgcctgatcatgctgcgccggcacatccagctgatggtgccgctgagcatcgcctgcgtcctcgcccttggcgtcggtgcggcggcggtggtcggcttggcgcaccgggccgatcccggctatccctacgaaggcctgctgctggtcagtttcgccgcctatttcctcgccggcctgcggttgtcgcaggcattgagctgtgcgttggtcgtgctgctcgcctacctgggtttcgagtggtgggcgggggcccaggaaccgctgggcaacaacctgctgttcctgctgttcggcaacctgatcggcgcggtcggctgctacctgctggagttcaagtcgcgcgagcatttcctcatcagccgtctgctgcgggtgatggccgaccacgacagcctgaccggcctgcacaaccggcgcagcttcaaccagcacctggaccgcctctggcgccaggcccagcgcgaacagaagaccctggcgctgctgctttgcgacgtcgaccatttcaaggcctataacgaccgctacggccaccaggccggcgatgcggtcctgcagcgtatcggcgcggtgttcgaggcgaatgccaggcgtccgctggacatggcggtgcgcctgggcggcgaggagttcgccctgttgctgtacggcgccaacgagcatgaggcgaggctgcgcgcggaagcgctgcgcgcgcaggtgcaggcgctgcgcatggagcacgaggcgtcggacacggcgcgcgaagtgaccctgtcggtcggcgtgtcctgcctgtggccgaccccgggcaacgacctgaagcgcctctacgatctctacgagcatgccgatcgcgcgctttacgaagccaaggcgttcggccgcaatcaggtggtggcctga

SEQ ID NO: 364090 - DNA, 1017 bp, Pseudomonas aeruginosa
atgcagcgcttgatccaggccaacggccaaccgcactacggcatcttcccgagtgccccgcagcacatcaattaccgcgatttcgacttccgttcgccgatgggccggcgcgtgggggccctgggcaaatggcgacgcttccatcagttccagtacttcggcctgatcagcccggagctgatcggcggctgcgccctggcccagctgagcttgcttggcgtcggcttcgtctacctctaccagccttccagcggacgcatgctggagcggcgcttcaagctgccgctggggttcggaacccggttttcccagaccccggacgacggcgtctgcgaactgcgccaggggcgcaacctgctacgcctggagaaccgtacggctccccgggagaaacgcctgctggtggaactcgacgatggcacccgcatcgacgcctgcttcagcgaggaggcgccgagcttccagcctatgtgcctgtgtacgccgaccgcggtgaacggctgggtctatgcgcagaaggtggccggcgtgcgctgtcgcggcgacgtgcgcagcgccctcggcgaccacgacctgcaggcgctggacgccttcgcccatcacgactggtcggcgggctacatgcgcccggaaaccttctggaactgggcttgcctgtccggcgaggcggacggcttgcgggtcggcctgaacctgtcgtgcggggtcaacgagaccagcttcaccgagaactgctactggctggacggcgaactgctgaaggtcgacagcgtgcgcttcgacttcgaccgcgaccagccgctgcggccctggaccatccgttcatacgatggccaggtagagctgcgcttcgaggcccacggcatgcaccaggagcggctgaacctcggtctgctggcgagcaacttcaagcagatcttcggttgtttcagcggtgtgctgcgcccgcgaggtcgtgccgaggtgaggatcgagcggctctggggcttcgtcgaggaccagtacgccaagtggtag

SEQ ID NO: 364091 - DNA, 435 bp, Pseudomonas aeruginosa
atggctcagacagacaagcactatttcggcaccttgctagcccagacttcccgtgcttggcgcgctgaactcgaccgccgcctcagtcacctcggcctgtcccaggcgcgctggttggtgttgttgcatctggcgcgccatcgcgattcgcccacccagcgcgagttggcccaatcggtcggggtcgaaggcccgaccctggcgcgactgctcgacggcctcgagtcccagggcctggtacgacgcctggcggtggcggaggaccggcgggccaagcacatcgtgctgacgcccaaggccgatgtgctgatcgccgatatcgaggccatcgccgccagcgttcgcaacgacgtactgaccggcatcgacgagtccgagcaggcgctatgccagcaggtgctcttgcgaatcctggcgaacctggaaaagcgctga

SEQ ID NO: 364092 - DNA, 2049 bp, Pseudomonas aeruginosa
atgcccggtaaagccttgcgtgtcatgctgtgtgcctggtcgtgcctgttggccggccaggcgagcgccctgggagtgggggacatcaccctgcattcggcgctcaaccagccgctggatgcggatatcgaactgctcgacgttggcgatctcggcgcggacgagatcgaggtccgcctggcgggcgccgacgtcttcgccgcggccggggtggaacgcttgcagttcctcaacgagctgcgtttcagtccggtgctccaggggcgcggtggcaatcgcatccatgtgtcctcgagccgaccggtgcaggagccctacctgaatttcctggtggaggtggcccgccccaacggccgcatcgtccgcgaattcaccgtactgctcgatccgctcggttatacgccgcgtatgcttccggccgcgcgcagcgggatcgagccgcagcggcaatcctcgacgccggcgcctgcgccgcgtagtgccgcggtcgtcgtagacccggcactgctggagccgggcgacgactacctggctcgccccagcgacaacctctgggccatcagcggacgcctgcgtggtgccggcaacgccgatcgcgcgcaactcatggaggccctgtaccagctcaatccgcaggccttcgtcaatgccgaccggcaccggctcaaggccggcgcgcgcctgcgcctgccggccggctaccaggcggagcgaggcgcgcccggcgccgtgaaggaggcggccgtggaagtcctgccgccagccgatgccgccgtggtggaaaacgctccggcggctctcgtcgaggcgcagcgccaggcggatgccgaggccgaggcgctggcccggcaacgggaggaactgagccagcggatggacgatctgcaacgccagttgcaggccttgcaggaacaactgcagcagcgcgatcaccaggtcgccgaactgcaacagcaactggcccggcgccaggcggtgcggcccgcggcgccgccgcccgccgcggccgcgccttcggttgcgcaaccggttgaaacgccgacggactcgcagcactggcgctggatgatcgtcctgctgctggtcctcgccctgctcggcgtgttgctgttgcgtcgccgccgcgaagagactcctgtcccggcggtcgaaccgaagcgccgggttgccctgaacctgccgctgcggcgtgcgccgcgccccccggcggccgcaccggcgccggcaaaggtcgaggaacaggccaggccgccggtcgccgttccctccagcccgccgccgtctcctccgcctgctccggccgccgctccgcgcgccgccatggctgcggcggacaagctggacggcgccgacatctatatcgcctacggtcgctacggacaggcccgcgacctgctgcgtcaggtactcgccgagcagccgcagcgcctgagcgcgcggatgaagctgttgctggtgctggctgagctgggcgatgcggccggcttcgacgcgctggccgaggaaaccctggccagtggcggcaacccggaggccatcgacgagttgcgcggacgctacccggcgctgctacagatgccggcgaccgagacgccggcggcaaccaaggacgacgactggagcgacctgccgctggccgagccgcccgccgcgcagcagccggatgcgacctcgggcgccgacggcttcggcgacctcaacctcgatctcgatctcgactggggcgccctggagaatcccctggacaaccccgacctgccgcgccgcgccgctgccggcaaggcggaaccggcggaggaggagcccctggcgttcgagagcaatctccatgaactgccggatgtcgccgagtacgaacacctcgaactcgaccagccggagccggccacggtgccgccggaggaggcctcggccagcctggaccgggcccgcgcctgcatcgacagcggcgatctcgaccaggccagccgcatcctgcgcctggtggtggcgcacggcgacccgtggcagaaggccgaggcgcgcgagttgctggcgctgatcgcctga

SEQ ID NO: 364093 - DNA, 2187 bp, Pseudomonas aeruginosa
atgcgccgcctgctgctcgtactgctgctcctgcttcccctgtccgccctcgccacggaggcccggccgaagatcggcctggtcctctccggaggtgccgcccgtggcctggcccatatcggcgtgctcaaggccctcgacgaacagggcatccagatcgacgccatcgccggcaccagcatgggcgcggtggtcggcggcctgtacgcctccggctacacccccgccgaactggagcgcatcgccctggagatggactggcagcaggcactgtccgacgcaccgccgcgcaaggacgtgccgttccgccgcaagcaggacgaccgcgacttcctggtcaagcagaagatcagcttccgcgacgacggcaccctcggcctgccgctgggggtgatccagggccagaacctggcgatggtgctggaaagcctgctggtgcacaccagcgacaaccgcgacttcgacaagctggcgatccccttccgcgccgtctccaccgatatcgcaaccggcgagaaagtggtgttccgcaagggccacctgccccaggcgatccgcgccagcatgtcgatccccgccgtgttcgccccggtggagatcgacggcaggctgctggtggatggcggcatggtcgacaacatcccggtggacgtggcgcgcgacatgggcgtggacgtggtgatcgtggtcgacatcggcaacccgctgcgcgaccgcaaggacctgagcaccgtgctcgacgtgatgaaccagtcgatcaccctgatgacccggaagaactccgaagcccagctggccacgctcaagcccggcgacgtgctgatccagccgccgctgtccggctacggcaccaccgacttcggccgcgtgccgcaactgatcgacgccggctaccgcgccaccacggtgctcgccgcgcgcctcgccgagttgcgcaagccgaaggacctcaacagcgaagcgctcgacgtggcgcgcacgccgaaccagcgcaagccggtgatcgacgcgatccgcgtggagaacaactcgaaggtcagcgacgaggtgatccgccactacatccgccagccgctcggcacgcgcctcgacctcggccgcctgcaggacgacatgagcaccctctacggcctcgactacttcgaccaggtgcagtaccgggtggtcaaggagaagaagctcaacaccctggtgatccacgccaccggcaagaaaggcggcaccgacttccttcgcctgggcctcaacctgtccgacgacatgcgcggcgaaagcaccttcaacctcggcggcagctaccgcatgaacggcctcaaccggctcggcgccgagtggctgacccgggtccagctcggcgaccgccaggaactctacagcgagttctaccagccgctcgacgtcggctcacgctacttcgtcgcgcccttcctgttccacgaggcacagaacgtcgacgtcaccgagaacaacgacccgctgctgcgctatcgcctggagcgctacggctacggcctcaacgtcggccggcagatcgccaacaacggcgaaatccgcctgggcgcggtgcaggcctacggcaaggccgacgtacgcatcggcgacccgagcctgccggacatcgacttcaccgagggctactacgaactgaagtactcgttcgacaccgtcgacgacgtcaatttcccccacgagggcgaggagatcggcctgaccatgcgccgctacgacaagtccctcggctcggacgacagctaccggcagtgggacctgcggctgaacaaggcgctcagcttcggcgccgacacctgggtgttcggcggcggctacgggcgcaccctggacgacgccgaggtggtcacctccagcttcaccctcggcggcgcccgcgagctgtcgggcttccgccgcgatgcgctgtccgggcagaactacagcctggggcggatcgtctattaccggcgcctcaccgaacgttccttcctgccgctggacttcccgctgtacctgggcggcagcatcgagcgcggacgcatctggaacaacgacaacgaatacgacagcggctacatcaacgccgccagcctgatgatcggcttcgatacgccgctggggccgctgaccttcagctacgggatcaacgacgagaacttcaaggcgttctacctgaacctcgggcagaacttctga

SEQ ID NO: 364094 - DNA, 291 bp, Pseudomonas aeruginosa; identical to SEQ ID NO: 361232

SEQ ID NO: 364095 - DNA, 993 bp, Pseudomonas aeruginosa
atgagcatcatcgtcaccggcgccgccggcttcatcggcagcaatctgctgcaggcgctgaaccggcgcggcgagaccgacatcatcgcggtggacgatctcaccgacggcgagcagttccgcaacctggcggacgccgatatcgccgactacctggaccagaacgacttcctcgagcgctacgcccgcggcgacttcggcacggtccgcgcgctgttccaccagggcgcctgcgccagcaccctggaaagcaatggccgctacatgatggagaacaactaccgctacagttgccgcctgctggaaagcagcctggaactcggcgtgccgttcctctacgcctcgtcggcggcggtctacggcgccggccggaccttccgcgaggcgcgccagtacgagcggccgctgaacgtctacggctattccaagttcctcttcgaccagcgtgtgcggcgggcgctgccgcaggcgcgcagccaggtggtcggcctgcgttacttcaacgtctacgggccgcgcgaggaacacaaggggcggatggcctcggtggcctaccactgctaccagcaattgcgccgcgacgggcgggtcgaactgttcggcgaacacggcggcttcccgcccggcggccacctgcgcgacttcgtcgcggtggaggacgtggcgcgggtcaacctgcatttcttcgaccatccgcagcgttcgggaatcttcaacctcggcagcggccaggcacggaccttcaacgaggtcgccctggcggtgatcaatagcgtccgcgccaacgccgaccagccgcccctgtcgctgcagcaggcggtggaaagcggcctgctcggctaccgcgagttccccgagtcgctgcgggcgcgctaccagagccatacctgcgccgacctggagctgctgcgcgaggcgggctaccgcgacgatttccagagcctggaagagggcgtcgccggctactgccgctggctggcgcgcagcgcctga

SEQ ID NO: 364096 - DNA, 1167 bp, Pseudomonas aeruginosa
atgcctttgattgtctacgtgctcggtgccgcgatcttcgccctgaccaccagcgaatacatggtcgccgggctgatgccggcgctggccgccgaattcggcgtgtccttcgccgcgatcggctacctggtcaccttctacgccggcgcgatggcgctcggcggcccgctgctgaccaccgccctgctccgcgtgccgcgcaagaacgccctgctcggcctgatcgcgctgttcgtggtcggccaggtcatcggcgccctggcgccgggctatgcggtgatggtggcggcgcgactggtcaccgcggtcgccgccgcggccttcttcggcgtggcgctgaccgcctgcgccgaactggtcgaaggcaaccagttcggccgcgcgtcgtcgctggtgctcggtggcctgatggtcggcaccgtgctcggcctgcccgtcgccacctggctgggcgaatggtacggctggcgcgcgagcttcttcgcagtggcgctggtggcggtgctggtcggcctgctggtgttgcagctgatgccggcgatcccggggtcggcgggcagcagttcgctgcgcgaggaactgaaggtgttcaggaacgcccatctatggtgggtctacgccaccagcctgctgctgatcggcgccaccttcgccggcttcacctatttcgtgccgatcctcaccgaggtcagcggcttctccgcctcgaccgtaccgctgctgctggtggtctacggcctggcgacgctggtgggcaacaacatcgtcggccgcctggccgaccgccataccatcgcggtcctggccttcggcctgctggcggccatcgccgcgatggtggccttcgccctgttcggacaggttccggcggtggcggtggcggcgctggtggtgatcggcctgaccggggtgtcgatgaacccggcgctggtgacccgcggcgcacgagtcggccataacaacatgctggtcaactcggtgcacaccgcctgcatcatgctcggcgtgatggccggttcctggatcggcggcctgggcatcgccggcggattcggcctgcagggcgctctctgggtcggcgcggccctcggggtgctggcgctgctgaccctgctgccggagctgcgcttcgcccgcgccccggtgggcggggcgctgggccgctga

SEQ ID NO: 364097 - DNA, 741 bp, Pseudomonas aeruginosa
atggatctcacgatcgggacgcatcgggagtcggctttctacgagctggagttcggaccgaggacgataatgaccctggccaactttccggacgacgtgctgccgttgttgcaaatggaaagcctgatgaccttcgaggcgatggcctacctgcgctgcgacgcactggtcgagctaggctgctacgacggccgggcgctggaaatcgcgcgcctgctcaatgcccgctatctcggcgtcgacctcgaccagcgggcgatcgagacgctgcgcacgcggatcgagcgcgagggcatgagcgatcgcgcggacacggtggtcgacgacatcctcaaccacaccaggcgcggtgcctcggtcggctcgcgcgcactctacctgctgccgttcaacctgctgggcaacttccgcgagccgaaacggctgctcgactccctcgccgagcgcagcgtggcggcggtggtctcggtgttcggcgacagcgccgaggccacccgcgtccgccagagctactaccgccgttgcggggtgcagggcctggagctgcacgcgcgggacgacggcaccgtgttcaccggcagcgacggcttctactcgcgctcgtattcgcgcgcctgcctccacgccctgctcgccgagtgcgggctgaccgtggtgcgcagcgcttcgaacctgttcgcccactgcgtgacggtgctgcccgaaggcgccgaccagggcttcggttcgtcggcggcatga

SEQ ID NO: 364098 - DNA, 240 bp, Pseudomonas aeruginosa
atgcccaacgacatggaagaccatctcctcaccgtgctcagcgtcgccagcggcgtgccgaaggaggaaatcagccgggacagcaggatggaagacctggctttcgattcgctggtggtcagcgagctgtcgctgaagttgcgcaaggagttcggcgtcaccgggatcgacgacgaactcgacctgctggaaacggtggacgaactgttccagctggtcgagaagcaccgcgccgcctga

SEQ ID NO: 364099 - DNA, 993 bp, Pseudomonas aeruginosa
atgccgcgcgccgccgtggtctgcggcctgggcagctacctgcccgaggccgtgctcagcaacgacatgctcgccgccgagctggacacttccgacgcctggatcagcagccgcaccggcgtgcgccagcggcatatcgccggcgacctcggcagcggcgacctggccctgcgggcggcctccgccgcgctcgcctcggcggggctggagcgagtcgatgcggtggtgctggcaaccagcaccggcgacttctgctgcccggccaccgcgcccagggtcgcagcgcgcctggggttggtcggcgcgctcgcgttcgacctgtccgccgcctgcaccggcttcgtctacggcctggccagcgtcggctcgctgatcagcgccgggctggcggacagcgcgctgctggtcggggtggacactttcagccataccctcgaccccgccgatcgctcgacccgcgcactgttcggcgacggcgccggagcggtggtgctgcgtgccggcgatgccgaggaagaaggcgcgctgctggccttcgacctcggcagcgacggccaccagttcgacctgctgatgacccccgccgtcagtcgcgccgaacgcagttccggacaggcctccaactacttccggatggacggcaaggcagtgttcggccaggcggtgacgcagatgagcgactcggtgcggcgggtgctcgaccgggtcggctggcaagcttcggacctccatcacctggtcccgcaccaggccaacacacgcatcctcgcggcggtcgccgaccagctcgaccttcccgtcgagcgagtggtgagcaacatcgccgaggtgggcaacaccgtcgccgcctcgattcccctggccctggcccacggcctgcgccaaggcatcctgcgcgacggcggcaacatggtcctcaccggtttcggtgccggactgacctggggttcggtcgccctgcgctggccgaagatcgttccgacaatggactga

SEQ ID NO: 364100 - DNA, 426 bp, Pseudomonas aeruginosa; identical to SEQ ID NO: 361238

SEQ ID NO: 364101 - DNA, 1257 bp, Pseudomonas aeruginosa
gtgcctgatcgcaaactgagactgggcgaggaactgatctcgccactgcacgcgctctacgacggcctgcaggtggacggcgcgccgcgtcccgcgcatcgcgccgccgagcatccggtgtgggtggtgacgcgctaccgcgacgcgcgcaaggtcctcaaccatccgggcgtccgccgcgacgcccggcaggccgccgaactctacgcgaagcgtaccggcagcccgcgcgcggggatcggcgagggactcagccaccacatgctcaacctcgacccgccggaccatacccgcctgcgctcgctggtcggccgcgcgttcaccccgcgccaggtggagcgcctgcaaccgcatatagaacggatcaccgaggaattgctggacgccatggccggccgcgaacaggccgacctgatggccgacttcgcgatcccgctgaccatcgcggtgatcttcgagctgctgggcattcccgaggccgagcgcgaacacgcccgccagtcctgggagcgccaggcggaactgctgtcgccggaggaggcccaggccctggccgatgcgcaggtcgactacctgcgcgtgctgctcgaggccaagcgccggcagccagccgacgacgtctacagcgggctggtgcaggccgccgacgagagcggccagctgagcgaggcggaactcgtctccatggaccacctgctgatgatgagcggcttcgagaccaccatgaacatgatcggcaacgcgctggtcaccctgctggtcaacccggagcaactggcgttgctgcgggcgcagccggaactcctgcccaacgccatggaagaactggtccgccacgacagcccggtgcgcgcctcgatgttgcgcttcaccgtggaagacgtagaactggacggggtcaccattcccgccggcgaatacatcctggtctccaacctgaccgccaaccacgacgccgagcgcttcgacgatcccgaccgcctcgacctcacccgcaacaccgatggccatctcggctacggcttcggcgtgcactactgcgtcggcgcctcgctggcccggctggaggggcggatcgccatccagcgcctgctcgcgcgcttccccgacctccagttggcggtgccccacgcggaactgcaatggctgccgatcaccttcctccgcgccctgatcagcgtgccggtgcgcaccggatgcagcgccccggcgaacaccgcctcccacgccaacccgatcgagaggatcgcccaatga

SEQ ID NO: 364102 - DNA, 915 bp, Pseudomonas aeruginosa
atgtttttcaccagcaaacctctctcgccccagggccgccacgtgctgatcaccggcgcctccagcggcctcggccgggaaaccgcgctgcacctggccgaacagggtttccaggtgatcgccggggtgcgccgccaggaggatggcgagcgcctggcgaacgcctgcccgtccggccggatcagcacgctgctgatcgatgtcaccgacgaggaatccattggccgggccgccgcgcaggtggcggagaaagtcggcgataccgggctctggggcctggtgaacaacgccgggatctgcatttccgcgccgctggaatgcgtctccagcgacctgctgcggcgccagctggaagtcaacctgatcggccagctcgcggtgacccgggcgatcctgccgctgctgcgccgtggcggcgcggcgcgcctggtgaacgtcacctcgggcctcggctcggtcgccattccctacctgggcgcctactccgccgcgcagttcgccaaggagggagtgagcgacgccctgcgccgcgagctggcgcccatgggcatccaggtctcggtggtcagccccggggcgatctggacgccgatctggggcaagatcgccagcgagggcgagcgcgccctggccgacgcccccgacgccgtcgccgacctctatcgcgatacctacctgcgcttcctccaggccaacgaggacggcgcgcgcaacagcgcgaccaagcccgccgacgtcgccgccgcggtgcatgccgcgctcaccgcggccaagccgcggacccgctaccgggtgggcgccgacgtgcgccgcggcaccctgctggcgcggctgctgcccgatagcgtgatcgacgggatgttccgccccatcgtcaccgccgccccggcggcgaaggaggagcaacgtgcctga

SEQ ID NO: 364103 - DNA, 1326 bp, Pseudomonas aeruginosa
atggccgagatacgacgcccgctgtccgcggtggaacgctggtactggctcagcgaccagttctccgcgctgaacgtgatttcccgggtgcgggtccatggccagttgtccatcgacgacctgcgccgcggcctcgacgcgctgcaggcgcggcatccgctgctgcgcgcgcggatcgagcacgatgccgggctcgacccgcgctgggtgccctgcgagcggcccatcccgctgcgcgaggtgcgcggtggtggcgaggagcaatggctgcgggaaatcaacgagcgcgaattgccggaacgcatcgatccggacagcgggccactgatccgtaccgtggcgatcgccaccgacgccggcgcccacgacctgctggtcgtggtaccgcacatcatcgccgacggcactaccgtgctgaccctcgccgaacaatggctgaccctggccgccgaccccgccgcgcaaccctggaccgccagcgccctgccgccggcggaggatctgcgtccgcgccgcttcaccggcgacgaaggcgcggcgcgcctggccgagcagaccgcccgggacgaagcgctggtcggccgccaccgcccgggccggatcgagccgagcaacccggtgccgctggaagcgcggcgtacccgcctgctgcaccgggagctggacggcgcgcagctggaacagctgcaacgacgcgcccgcgaacacggcaccacggtacacggcgcgctgaccgcggcgctggccatcgccgccggccacgaccaccagcgccgcccgagccacatcgccatcggctcgccgatcgacttccgcgacgaactggagccgccggtgcgccccgacgaagtaggcacctacgtcgccacggtaccggtggtgctggacatcgcccgaccgttctgggaggtcgcccgcgcgctcaccgacgacctcggcgaacgccgtcgccagggccatcatttcaacctggtcaccctggtcgccagcgctgcgccgcgctgcatggccgacgcgcggccattcatggccttcatggaagccgaagggccgatcaacctgtgctcctccaacatcggtcgctatccgttccccgagcggatcggcgccttgcgcctctccgacgcgcagttcctcaccggcatctcggtgaacggctacttcgtggccgccatcaactccagccatggccggctgttctggaacttcacctacatcgacgaagcggtccccggcgaacgcgccgaacgcctggccgaagattgcctgggcaccctgctgtcggcgatccacgccccccaacgatccgccctcgaggagcaatga

SEQ ID NO: 364104 - DNA, 1167 bp, Pseudomonas aeruginosa
atgagcagacaccccctgaagatcgtcatcgccggcgccggcatcggcgggctcgccgcggccgcctgcctgaaggccgccggcttcgaggtcgaactctacgagcgggccagggagctgcgcgcggtcggctcggcgctgtcgctgatgcccaacgcgctgaccgccctggagagggtcggcgtgcgccctgaccttacccgcgcccaggccttcgactcgctacggttcctcacccggcgcgggcgaccgatccgcgccatcgacttcggcggcctggcccgtcagctcggccagccgagcctggcgatccaccgcgcgagcctgcagcaggcgctgctggaacaggcccgcgactgccgcatcgaactgggcgtgagcgccaccggctacctgcgccacgccgacggcgaaggcgtcaccgtgctctgcagcgacggccgcgaagtgcacgccgacgtgctgatcggcgcggacggcttcaactcggcgatccgcgccaccatgaccggcccggagcgtcccaccgactggcactacgtgatctggcgcgccacgccggcgttccgccatccgaaggtgacgccgggctacgtcgcccattactggggtcgtgggcagcgcttcggtctcgccgacatcggcgaaggcaacgtctattggtggggcacccgcaacatgccggccgaacaggcgaaggactggcgcggcggcaaggcgggcatccagcgcctctacgccggctgggccgacgaagtgcaggcggtcatcgaggcgaccccggaggccgacatcagcagcctgccggcccaggaccgaccgttcctggagcgctggggcgacggcccggtgaccctgctcggcgatgccgcgcatccgatgctgaccagcctcggccagggcgccgccatcgccatcgaagacgccgcggtgctggcccactgcctggccaccatcgacgacccgcaagccgccctgcgcgcctacgagaaccgccgtcgcgaccgcgccagggcgatggtcgagacctcgcgggcgctgagccgcatcgagcagttggagcatccgctgcgcaccgtcgcccgcgatctctacttccgcttcgctccggagcgaaccttcgcccggcagaacgaactggcactgaccttcccaggagtcgaatga

SEQ ID NO: 364105 - DNA, 7059 bp, Pseudomonas aeruginosa
atggttcgtttcgctcgcttgccgctatcgccctaccaacgggacatctgggtcgccgccgcgcagtttccggaactcgaccagtacaccatcttcagctacgaccgcttcaccggcgaggtcgatacccaggccctggaacgggcgctgctgcaggcggcgcgagacaccgaggcgttccgcctgcgcctcggcgagacggacggtacgccgtaccagtggctggacgcggatgccgagttcgaggcgcgccacgtcgacctgcgcgccgaccgcgaccccgaggccgccgtgcgatcctggctgcgcgacgccttccgtcacgcctacccgctggacggccgcagcctggtggacctggccctgctgcatagcgaccaggcgctctacgtctacgtgcgcacccaccatatcgtcagcgacgcctggggcctgcagctattcctcagccgggtgcgcgccggctacctgggcgagctaggcgagccgcaggcgcagatgccgacggcttccctcctggcgcagctcgagaccgacgactactccggttcggaacagtaccgcggcgaccgcgcctatttcgccgaggccctggagggcctggagccggccctcttcacccgcaggcgcccggccgggctgcgccgcaccgcgcgccacaggctgacgctggaacgcgcgctgctcgacgcgatccgcgatcgcggcgaatcgccctttctgttcctctccgccgccgtggcgctgtacctggcgcggatccaccagaacgacgacgtggtcctcggcgtaccggtgctgaaccgcgccgaccgcgcggccaagcaagtggtcgggcacttcgccaataccctgccgctacgcatccgcaccgcgccggaacagaccgtcgacgaattcctggcgcagttgcgcgaggcgacccggacgctgctgcgccaccagaagatgcccctcggcgacctgttgcgcggcgcctcgccactgttcgacaccaccctttcctacatgcgctggcccgccgcccaggcgatcccgaacgccagcgtcgagaccgtggcgcagacccacgcccatgacccggacgcgttggccatctgggtctccgagttcgacgggcacagcgacgcacaggtggatttcgaatacgcctgcgatgtgttcgacgccgacttccccatggacgccgcggcgcggcatatcgaaaccttcctgcgcgccctggtggagggcggcgagcgccgcctcggcgaactcgatccgctgtcggccgccgagcgcgaggaactgatccacacccgcaacgccaccgaccaggcattccccgagcaggctaccctgcccacgttgttcgccgagcaggtggcgcgcaccccgcaacgcaccgcgctgctggaagccgacggcggcacgctcagctatgccgagctggacgccaaggtccaggccgtggccgacgccttgcgcgcagcgggtgttagcgccgacgagcgggtagcactactggtcgcccgcggtccccacctgctgccggcgatcctcggcgtgcagcgcgccggcggcgcctatgtgccgatcaatcccgaccatcccctggagcgcgtccgcctgctgctggaagactgcggcgcccgcgtggtgctggtggacgaacgcgcggcgacactcggcgagagcctcggcgagacgcgcgtgctgcacctcgaacgcctgccgcagagcaccggcgacctgccggcggccaacgtggcgcccagcgacctggcctatgtcatctatacctccggttcgaccggcgtgcccaagggcgtgatggtcgaacaccgctcggtgatcaaccgcctgaactggatgcagcgtcgttatccgatcggcgaacgcgacgtgcttctgcaaaagactccggtgacgttcgacgtatccgtctgggaactgttctggtggagcttcaccggcgcccgcctgtcgctgttgccgcccggcgccgagaaggacccgcgggaaatgctgcggagcatccagcgcgacgcggtcacggtcatccacttcgtgccgtcgatgctgacgccgttcctcgacctgctcgacggcgacccgaccgcccgcgcggcggcaagctcgctgcgcctggtgttctgcagcggcgaagccctcgcgccgttgcaggtcgcgcgcttccgccggctgttcggcgacgccgtgcgactggtcaacctgtacggaccgaccgaggccaccgtcgacgtgtccgaccatgaatgcgccagcgacaaccccacgcgggtcccgatcggccggccgatcgacaacctgcgcctgtacgtcctcgaccgcgcgctcaggccgcagcccctcggcgccgtcggcgagctatatataggaggcgtcggcgtcgcccgcggctacctgaaccggccggagctgaacgccgaccgcttcctcgccgaccccttcgtcgccggcggccgtctctaccgtaccggcgacctggcccgctggctggccgacggcaacctcgaatacctcggccgcgccgacgaccaggtgaagatccgcggcaaccgggtcgaacccgacgaagtacgcgaccgcctcgccgcgcttcccggcgtacgcgacgccgcggtcgtggcacgcgattcggcggtacgcggcacgcacctggtcggctactacgtggctgcggcggaactcgacgccggtcaattgcgcgccggactttcggcgacgctgccggacttcatgctgccagccttcttcgtgcgcatcgacagcctcccgctcagcgccaacggcaagctcgaccgccggcaactgccggcaccgccggaacaggtggcggcggttgcgccgcgcacggcgaccgaggccgaactggcggcggtgtgggccgatgtcctcggcgtggcggaggtcggcgtgcacgacgacttctacgccctcggcggcgactcgatcctgatgctgcgcatccgcgccgccgcacagcggcgcggcctgggcttcgaactcgccgacctgatgcgcaacccgacggtggcgggcctcgccgagcgcctggtgcgtccgctcgcggagcgaagctaccagccgttcgaactggtttccgaagtcgacaagccgcgcctggaagggctggaggacgccttcccgaccagccggctgagtctcggcctgctcttccatagccgccagcgccccgactcgtcggtctaccacgacgtgttccactaccgcttcgacctggcctgggacgaagccgcgttccgccacgcgctggaccgggtggtcgccgcctatcccgcgctgcgttcgtcgttcgacctcagcggtgcatccgaaccgctgcaactggtgcatgcccaggcgcgcagcgaaccgctgatcctggacctgcgcggcaacccggaggccgggacggtgctcgacgagcacatccgccaacgccgcttccatcgctattcgctgcaacagcccgggctgttcctgttcgccgcgttcgtccgcgaggacggcctggacctggtgttcagcttccaccatgcgatcctcgacggctggagcgtggccaacctgatcgtcgcgctggtcgccgcctaccgtggcgagccgctgccgagccccgcgccggcgctggcctgccatgtccgcgaggagctggccgcgctggcttcgccggccgccgtggggtactggaccgggctgctggagggcgcgaggatgacccgcctcgacggcttcggcgcccacgagccgcaagccgcgcaaggtccggccagccatcgcgaagcgctgccggacgggctgctcgaacgactcaaggccactgcggcgcaacgcggactgccgttgaagtcgctgctgctcgccgcccattgcctgaccctgcatctgttctcccgcagcgacagcgtggtcaccggcgcgatcagcaacggccgccccgaactgcccgacgccgaccgcatggtcggcctgttcctgaataccgtgccggtccgctcggagattgccgggtgtagctggatcgaggtagccgatgcgctgttccgccaggagcgcgacggacacgcccaccgccgctatccgctcagcgccatccagcagatcgtcggcgacgaactgagcagcgccttcaactacgtcaacctgcatgtcctcgaaccgctgtggcaattgcgcgacttccgcgtctgggaagaaaccaacttcgccctgctggtcaacgtgatcgccacgcccagcgacggcatgtacctgcgcatcgacagcgacggccgcggcatcagccgcagccaggccgcgctgatcggcgcgaccttcgtcgaactcctgtggcgcctcgccgagcatcccgacgaagccgccgacttcgccttcctcgcccctcgccgcgacgccgcttcccagcccgagccgctggtcgacgtcgtcagcctgttcgaacgccaggtcgaggcgctgccgggcagcgccgcgctggccttcgaggagcaacgctggacctatcgcgacctcgaccatgtggcgcgctgcgtggccacccgcctggtccgcgccggcgcgcgccgcggcgatgcgatcggagtggcgctgaaccgttcgccggagatgatcgcgacgatctggggcatcctgcgcgccggcctggtctgcgtgccgctggacgtcagctatcccgcgcagcgcctggcgctgatcctggagaccgcacagccgttccgggtggtcgcgcatcccgagcacgcccatgtcgccgcggcggaacgggtgctgccggtagaggaactggtcgccgacatcgagcccgagaccttcgccgcgccgcagctcgacgagctggccatgctgctgttcacctccggttccaccgggcggccgaagggcgtcgagcttagccaccggatgtgggccaactacacccagtggcaattgcgcgtcgccagcggcgtaccggggctgcgcaccctgcagttcgcgccgctgagcttcgacatggccttccaggagatcttctccacgctgtgcggcggcggcgagctgcaactcatctccaaccgcgagcggatggacccctccgcgctgctgcatgtcctcgaacgccgccaggtccagcgcgtgctgttgcccttcgtcgccctgcaacgcctcgccgaggcctccaacaccctgggcgtacgccccggcgccctgcgcgtggtggtgtcctccggcgagcagttgcgcatcaccgaagacgtccgcacgttctgcgcggcgatgcccgggctgctgctagagaaccagtacggtcccaccgagacgcaccaggtcacctaccactcgctgagcggcgatccggcgcactacccggacctgccgccgatcggccggccgctggacggggtcgaggtgcaggtgctcgacgccgcgctgcgcccggtaccggtcggcgttaccggcgagctgtacttcggcggcgactgcctcgcgcgcggctaccaccgcgcccccgaactcaccgccgagcgcttcgtcgaacatccctggcgccccggcgccaggctctaccgcaccggcgacctcgggcgcatcctcggcaacggcgagatcgtctggctcggccgcgccgatacccaggtcaaggtccgcggcttccgcatcgagccggccgaggtcgagctggcgatcatgcgccaggccgagcgccagccgggcctgcgcggcgcggcggtggtggctcgcgagcgccagggcaacgatgcattcctcgctgccttcctgctcggcgagcccgaggcggtggatctcgccgaactgaagcaggcgctgcgcagcgaactgccggaacacatggtgccggcgcacttcgcctgggtcgacggcttcgccctcactcccagcggcaagcgcgacgacgccgccctgcgcgcgctgccgctggagcacgggtcgaacatcgagtacctggccccgcgcgacgactacgagcgcaccctggccggactcctcggcgagttgctggatcgtccccgggtaggcatccgcgacagcttcttcgacctcggcggcacctcgctcagcgcgatgcgcttcatgctgctgatcgagaagcgctatggcgtcgacctgccgatggccgcgctgatcgagacgccgaccgtggagggcctggccgaacgcctgcgggaacgctcggcggtgcgcgccttcgacccgctggtaccgatccgtgccggcggcagccgcccgccgctgttcctcgtccacccgctcggcggccacgtactctgctacctgccgctggtccgcgcactgccgccggaccagccggtatatgccctgcaggcggccggcaccggccagggcagtacgccgctggcggtcctcgaggacatcgccgccagttacctcgcggcgatccgccgggtgcagccggaaggcccctattacctcggcggctggtcgttcggcggcttcgtcgcctacgagatggcccggcaactgcgcgcgctcgacccgcaggcggtcgcccaactgatcgtgctcgactccatcaccgtcgaccgcaaccacgccggcagcgccagcgacgaagccctgctgctgttcttctactgggaactggtctggttcgagcgcagcgacgaggaggtcgagccgctgcctgaaggcgcgagcctggagcagaaactcgaccacatcgtcgaacgcgccatcgaggccggcgtacttcccgccggcaccccgcgcgccaccgtgcagcggctctacgagctgttccgggcgagctggcaggcactcatcggctatcgcccggaagtcagcgaccaggacatgaccctgctgcgcgcggacggcccgctgccgctggcgctgaagccgatgcacgacgccgccggcacccactacggcgacccgaagaacggctggcagcactggaccagcggccgcctcgatgtgatcgacgtccccggcgaccacctggtgctgatgaaagaaccctatgtcgagacggtcgcggcagagatcgccgcgttgctcgaaccctccacctccagcgaacggacccgcccatga

SEQ ID NO: 364106 - DNA, 606 bp, Pseudomonas aeruginosa
atgaaaaccgatgacaaggaccgcgaaggcggcgactcccacggcgccatcggcgccaagctgatggagtacgcgctcaaggtcaggaaggtgttcgtcaccggcggggtcgacgagaagatggccaaggacgtcgtccagcagctgcacatcctcgcctcgatcagcgacgatccgatctacatgttcgtcaattccccgggtggccacgtcgagtccggcgacatgatcttcgacgcgatccgcttcatcacaccgaaggtcatcatgatcggttccggcagcgtagccagcgccggcgcgctgatctacgccgcggcggacaaggaaaaccgctattcgctgcccaatacccgcttccttctgcaccagccgtcgggcggcatccaggggccggcgagcaacatcgagatctaccgccgcgagatcgtgcggatgaaggaacgcctcgaccggatcttcgccgaagccaccgggcagacgccggagaagatcagcgccgacaccgagcgcgacttctggctgaacgcggaagaagccgtgcagtacggcctggtcaacaagatcatcgtttcggaacgggagatcacgctgcctggccagtga

SEQ ID NO: 364107 - DNA, 888 bp, Pseudomonas aeruginosa
atgagcgaattccaccacaagctggtccagcgcaaggtccgcttcgacttcagcgatacccccctgcactgggttcccggcgaagcggaagcgtcccaggtgatgaacgtcctgcacatgctcctgccttcgggcgaactgtggttctgccgcctctacaacaaagccctgccgttggttagcgacgcccgcctgcgcgacgacgtgcagggtttcatccgccaggaagcgatgcattcgcgggcccacgacggcgcgatccagcgctacctgagcaggttcgacatcgactccaagccgttcaccgacaagatggatttccttttcgaacgcctgctctgcgactacccgctggggcagaaccgcctgacccgcgccctcgacggctggtggctgcgccagcgctgcgcgatcatcgccgcggtggagcatttcacctgcgtgctcggcaagtgggtgctggaggcccgggagctggatcgccgcggcagcgacccggtgatgctcgacctgctgcgctggcacggcgccgaggaagtcgagcaccgcagcgtcgcccacgacctgcacgtgcacctgggcggcagcttcgtcacccggcaactgaccatgctgttggtcatcgcgatactggtctacctgctcgccgacggcacccgcaccctcctcgaccaggacccgagcctgcgcggcgccaagcgccagggattcctacgaacctggtggcggctcggcaagcagggcctgctgccgaacctcgcgcacaccttccgcgacgtcgcccgttacttcaatccctggtaccaccccgagcacgaggcgaatacccaggaagccctggaatacctggccaactcgccggcggcccggcgcgcggcgaacgcctga

SEQ ID NO: 364108 - DNA, 876 bp, Pseudomonas aeruginosa
atgtcccaaggcgcctgggtacccactcccgacgatctcgatcacttccgccaggtccagcgactggcctatacctgctgcgaaaccatccacggcgaactgcgcgccggcatcagcgagagggaagctgcggcgctgatgaagacctggctgcaggatcacggcgtcgacgactggttccaccagcccttcgcctggttcggcagccgcacctcgttcaagggcttcgacggcctgcgtcatctcggtggcttcaacctggccttctaccccggcaagcagcgcctggaggaaggcatgccgttcatcctcgactgcgcgccgaccctcggcgcctataccgccgatgtcggctactccggcgcgctcggccacaacctgttgcaggagcggctgatggacgacctgctgatacaccgacgcatcatcctcgacctggtccgcgaacggcgccccctggccgaagtcagccaggcggtcgaccggctctgcgtgatccagggcaccctgccacggcacaaggcctatcccttcgaagtgctcgcccatcgcgtggaaaagctcggcaaccgccgcggtccctcggtggcgcgcttcggcgtgcgcaacctgtacaccctgacgcgcaacgcgctggtcaccggcaagcgcgaaggctggtcgccgctgtggtccagcggcaagcgctccgagcacccgccgacgcccggtctctgggcggtggaaccgcacctggggctacgcggggtgggcgccaagttcgaagaactgctggtggtcaccgaagacgacgcctactggctcgacgacgacctgccgcacgtccgccgctggcaggcgcgcggactgctgccgcaagcacgggaggccgcatga

SEQ ID NO: 364109 - DNA, 813 bp, Pseudomonas aeruginosa
atgagcacacccctgaccctcctgcagcgcctgctgcaacgtggcgagcagccgtccgccgaggatgcccgcgaatacagtgtcgacgaactggcgcgcgcggccggcagcagcgtgcgcaacgtacgtgcctaccaggaccgcggcctgctgccgccgccggagcggcgcggtcgggtcggcgtgtatttcgacagccatctcaagcgcctgcggctgatcaaccagttgctcgaacgcggctattccagcgccaacatcaaggaattgctggaggcctgggaacagggccgcgacctcgaccacgtgctcggcctggaccaggcgatcatcggcgagtggaacctggagacgcccggcagcatcggcttcgacgaactccaggcgatcttcggcgacgaactgaacgaccgggtgatcgacaaggcccaggcgctgggcctgctgctgttcgacggcgagtgcatgaagatccccagtccgcggctgttccaggccgggctggagctgtaccgcagcggcatcccgctggaggcgctgctcgatcacctcggcgagttgcgtagcgacaccgagcacctggcggcggggatcgtccgcctgatcgtcacccacctggtggacggccgcggcaccgacctgctgcccggggcgccggacctgcaggagttggccaaggtgttcctgcgcctgcgcccgctggcggaacacgtggtccaggtggaactggcgcgcggcctcaagctgtcggccaacgaaatgctcggcgagcgtgtcggcgagatgctgcgcaagctggaaacgccttcctga

SEQ ID NO: 364110 - DNA, 915 bp, Pseudomonas aeruginosa
atgcagcagattcatgacctacgccgtatcgacctcaacctgctggtggtgctcgacgcgctcctcagcgagcgccacgtgtcccgcgcggcgcagcgcctggccatgtcgcagccggcggtcagccacgccctcgggcgtctccgcgaactgttcggcgatccgctgctggtgcgggtgaaaagccgcatgcagttgaccagcctggcgctggagctggcgccgaagctccaggccagcctcgaccaggtgcgcggggtgatcggcgggccggccttcgagccggtgcgcagccggcgccacttccgcctgggcatgtccgactacggcgcctgggtggtgctgccggcgctgctgcgccagcaacaggcgctggcgcccggggtgagcttcgggatagtccaggaaccgcgcctggaaaccgcccggcaggtcgccgaaggacaactggactgcgcgctgggggtattccccctgcttccggagggcgtgcgcgccaggcgcctgttcgaggagcgtttcgtctgcgtctgtcggcacagcctgttcgaccgccccgacggcctgtccctcgaccgctacctggcggcccgccacgtgcgcgtctcgctacaggacaacccggccgaggaagtcgacagcgccctggaaaaacgcggcctgcgccggcaggtagcgctgaccctgccgcacttcaccgtggccccggcgctgctggccggcaccgacctggtactgaccatcgccgagcgcatcctcgaacgcctgcggctacccgaggaactggcggtctgcgagccgccgctggcgatcccgcgcttcgactacgtgcagatctggcgcggcgacgccgagcgcgaagcggccggcgcctggctgcgggaacagatccaggcggcggcgcggaagatctga

SEQ ID NO: 364111 - DNA, 456 bp, Pseudomonas aeruginosa
atgcccaattatctgatggtactgatggcagtttcggtgggcggcatggtggtgctgcaggccggcagcaacgccttgctcgggcgcctgctcggccatccgctgagcgccagcctgacttcgctgggcgtcagcctcggggcggtctgcctgggcctgctgctggtgcgggtgccgctgccggctaccgccagcctcggcggcgcgccttggtggagctggctcggcgggctgttcggcgcggcctacctgacggtggcgatcctggtcgcgccgcgcctgggcgccgccactttcatcgcgtgcgtggtggctgggcagatgctggtctcggcgctctgcgaccagttcggctgggccggtttcccggtgcgccgtttgtcctgggagggctatctcggcctggcgctggtggtggcgggggtattgctcctgcaatggcggggaagagcgtga

SEQ ID NO: 364112 - DNA, 2079 bp, Pseudomonas aeruginosa
atgatttcgaaaagcagaagaagcttcatccgcctggccgccggtacggtcggcgccaccgtcgccaccagcatgctgccgtcgagcatccaggcggccctggcgattcccgcgcaccgccggcatggcaacctcaaggacgtcgagcacgtggtgatcctgatgcaggagaaccgctccttcgaccactatttcggcaccctcaagggcgtccgcggcttcggcgaccgcatggcgatcccgctgcccgacggccagcgggtctggcaccagaagggcagcaagggcgagatcctgccctaccacttcgacaccagcaccaccagcgcccagcgcgtcgacggtaccccgcacacctggccggacgcccagcaggcctggaacgaagggcgcatggacaagtggttgccggccaagaccgagcgttccctgggctactacaaggagcaggacatcgccttccagttcgcgatggccaacgccttcaccatctgcgacgcctatcactgctcgtttcagggcggcaccaaccccaaccggctgttcctctggaccggcaccaacgacccgctcggccagcatggcggcccggtaaccaccaacgaccacgacagcaacggcccggtggagcagggctacacctggaccacctatcccgagcgcctgcaggccgccggcatcacctggcgggtctaccaggacatggccgacaacttctccgacaacccgctgatcggcttccgccagtaccgcgccgcggcgcctgactcgccgctgatcgtcaacggcctgagcacctggaagctcgatgcgctgaagcgcgacgtgctggccaacagcctgccgcaggtgtcctggatcgtcgccccggccaagtactccgaacaccccggcccgtccagcccgatctggggggccgagtacacttcctgggtactcgacgcgctgaccgccaacccggaggtctggagcaagaccgcgctgctggtgatgttcgacgagaacgacggcttcttcgaccacatcgccccgccggccgcgccgagcctgaacaaggacggcacgctgcgcggcaagaccaccgccgacgccaccctcgaatggcacaccaagggcgatatccgttatcgcaaccagccctacggcctcggcccgcgggtgccgatgtacgtgatctcgccgtggagcaagggcggctgggtcaactcccaggtgttcgaccacacctcggtgatccgcttcctggagcagcgcttcggggtcatggagccgaatatcagtccctggcgtcgtgccgtctgcggcgacctgacctcggcgttcaacttcgccaacccgaacaacgagccgttccccgaactgcccgacaccagccaggccgacgccatcgtcgccagccagatcaagctgccgaagccgaagccgccgacggtggccgccatgcccaagcaggaaatgggcatccgtccggcccgcgccttgccctacgagttgggcgtgcatgcgcgctaccgcagcggcggagacgcgctgagcctgaccttcgccaacaccggcaaggccggcgcggtgttccaggtgttcgacctgctcgacagcgagaacccgccgaaacgctacaccgttggcgcgcgcaagcgcctgcacgacagcttccagggcgacgccagcggcgactaccacctggaagtgcacggtccgaacggtttcctccgggtcttccgcggcaacctgcggcgcgatctggcggagcgcaaggcgccgctgccggaagtgcggatcgactacgagccgctgttcggcaacctgcgcgtgcaactgatcaaccgtggccgccatccggtcaagctgacggtcaaggacaacgtctatcgccagggcgagcggcgtaccgtcaacgtgccgccgggacagcgtcgggaagtccgctattcgctgcgcagcagcggcaactggtacgacttcagcgtcagcgcgcaggggtcggacagcttcctgcggcgtttcagcggtcgcatggaagatggtcgctccggcttcagcgacccgggcatgggcctgggcacgctgaccttctga

SEQ ID NO: 364113 - DNA, 501 bp, Pseudomonas aeruginosa; identical to SEQ ID NO: 361252

SEQ ID NO: 364114 - DNA, 729 bp, Pseudomonas aeruginosa
atgcgtacaccactgctatccgcgctactgctgggcctgctggccctcggcggctgcagcctgccccaacagcaggccggcgcgccgaccgagcagcggctcggcacccaatggggcgaaggcgtcgcctcgccggtcacctcggtggccctgcgacgtctatcggagcaaccggtcgatcgccgccaggtgttctacagcgcgagccgcttcgatggacgtgccatcaaggaactgcccctggccaagggccgggtgggcttcgccgtactcgacgaggatggcggcaagttcgacctggtgcagcaccgcagcaccctgcaactccagggtcgtgaaggccagcgctaccgactgtggctgaacaacctcggcagcgcgacctacgaggtggtcgccacggtagacggcctggacgtgctcaacggccagccgggcagcctgaagaaccgcggctatgtgctggaaccgggcgagaacctggtgatcgagggcttccgcaagagcgaacgggaagtcgcggcattccgcttcgccagtcccgacgatgcctacgccagcaacagcgcggccggcgacagccgcaacctcggcgtgatcggcgtggccctgttcgagctggacgctccggccagcggtcgcgaggcgccggccgacggaccgcaggcatttcccgccgacgcccggaacggcggcggctacgcgccgccgccgcgctatcgcgactga

SEQ ID NO: 364115 - DNA, 771 bp, Pseudomonas aeruginosa
atgagccggacctggcgcctgctgctctggccgctgctggtggtggccgcggtgggcgcctcgttcgcctacctggacatggacaccgcaggtcttttcagcggcaagggactgggccagatggccgcctacgccagcgagttcttcccgcccgacctgtccgccccgcacctgcgggcgattggccgggggctgctggaaaccctggccatgtcggccatcggcaccctgctggcggcactgctcggcctgctcttcgcgctgccagcggcgggtcgcttcggcgtgccggcgcagagcctggcgcgactcctgctcaatgcgctgcgcgccgtgccggagctggtctggggtgcgctgatggtgctggcggccgggctcgggccgaacgccgggaccctcgccctggccctgcacaccggcggcgtgctcggccggctgttcgccgaagccctggagaacaccccggcgcagcccgccgaggccttgcgcctggccggcagcggacgcctcgcggcattcgcctatggcaccctgccgggggtctggccgcaactggtggcctataccctgtaccgctgggagaacaatatccgcatggccagcgtgctgggcttcgtcggtgccggcgggctcgggcagatgctctatttcagcctcagcctgttccagcaggcccaggccgccacggtgatcctggccatgctggtcctggtgctcggggtcgacagcctgagcgcctgggcgcggcagcgctgggtcagtcaataa

SEQ ID NO: 364116 - DNA, 834 bp, Pseudomonas aeruginosa
atgctgaacgccgcttctccaccgcgcgatcccgccgccctgccgcgcctgctgctgaccctggccgcgttgctgctgctctggccggggctgcgcctcagcgaactggatatccccggcctgttcagcggcgacaacgcacgcaccatgggcggttttctcgccggcttctggccgccggcgcacgatcccgagtttctcgccctgctctgccgcgcgaccctggaaaccctcgccatcgccaccgccggcatggccctggcctggctcctggcgtttcccgccgcactgctggcgacccgcgccctgtcgctctcggcgctgccgcgcggcggcctgccggcctggtgggcacgggcgctgcgctggccggtgcgcggcctgctgatcctcctgcgtagcgtgccggaaatcgtctgggcgctgctgttcgtccgcgccgtgggcctggggcccaccgccggggtgctggccatcgccatcacctatgccggcatgctcggcaaggtctacgcggaaatcttcgagtcggtggatccgcgccccacccgcgccctgctgctgggcggcggatcgcggctggcggcgttcgcctacggggtgctgccgaacgccgccggggaaatgatttcctacaccgtctatcgctgggagtgcgcgatccgcgcttcggtggtgatgggcttcgtcggcgccggcggcctcggccagcagatcgacctgtcgctgcggatgttcgccggcggcgaggttgccagcatcctgctgaccttcctcctgctggtcctcctcgccgacctgctgagccgcttcctgcgcgggaggctggcatga

SEQ ID NO: 364117 - DNA, 804 bp, Pseudomonas aeruginosa
gtgagcctgagcctcgacggcgtggacctggtccacgccgacggccaacgcgccctcgccgacatccgcctgcgcctggccgccggcgaacgggtggccctgatcggaccttccggcgccggcaagaccagcctgctgcgggtgctcgccagccaatggcggcccagcgccggccgtgtcgaactgctcggcgaggagccctgggcgctatccgccgccgcccgccaacgcctgcgcgcgcgcatcggcctggtccaccaggcgccgccgctgccgccacggcagcgggtggtcagcgcggtactggccggacgcctcggccagtggccgctgtggaagagcctggccagcctggtctatccgctggaccgcgccggcgcccacgacgcgctgcaacgcctggatctcggcgacaagctgttccagcgctgcgaccagctttccggcggccagttgcagcgggtcggcatcgcccgggtgctctaccagcgcgccgagctgatcctcgccgacgaaccggtctcggccatggacccggtgctcgccggccataccctggccctgctcaaccgcgaggccgccgcgcgcggcagcaccctgctggccagcctgcacgcggtggacctggcgttgcaacacttcccccgggtgatcggcctgcgcgccggacgcatcgccttcgacctgcccgccggcgaagtcgaccgcgccgcgctggacgccctctacgccaacgaacaactgcaagccgagcgcgccagcccggccagcgaacccgccgtggtgcacatcccacgatgctga

SEQ ID NO: 364118 - DNA, 858 bp, Pseudomonas aeruginosa
atgttgaaacgctccctggcgctcgccgccggcatcgccctgtccctgtccgccgcgctcgcccacgccgaagccctgaaagaactcaaggtctcggcgatccccgacgaagcgcccaccgaactgctgcgcaagttcaagccgctcggcgcctatctggagaagcaactcggcatgccggtgaagttcgtcccggtggccgactacgccggggtggtcgaggcgctggccgccgaccgcctggacatggcctggctgggtggcttcaccttcgtccaggcgcggctgaagaccggcaacgccatccccctggtgcagcgcgagcaggaccagcagttcaccagcaaattcatcacggccgatccccaggtgaaatccctgcaggacctgaagggcaagaccttcgccttcggctcggtctcctccacctcgggcagcctgatgccgcgctacttcatgcagaaggacggcatcgtccccgagcagttcttctcccgcgtcgcctactccggcgcccacgacgccaccgcggcctgggtccaggccggcaaggtcgacgccggcgtgctgaacgcctcggtctggcagaagctggtggacagcggcaaggtcgataccgccaaggtcaaggtcttcgccaccacgccgacctactacgactacaactggaccgtgcgcggcaacctcgacccgaccctggccgagaagatcaagcaggccttcctcgccctcgacccggcgaaaccggccgacaaggagatcctcgacctgcaggccgccagccgcttcatcgagaccaatccggacaactacaagggcatcgaggagtccgcacgcgccgccggcctgctgaagtga

SEQ ID NO: 364119 - DNA, 891 bp, Pseudomonas aeruginosa
atgtccgcttccctgccttcccttgccttcgccggtctcggcctgatgggcgtgcccatgtgccgccggctgctggccgccggctatccgctggcggtgtggaaccgttcgccgggcaaacgcgagttgctcgcggccgaaggcgcgaaagccgtcgaggtcccggccgaactggccgccgacgcggaaatcctgatgctttgcctggccgataccgcggcggtgcgcgaagtggtgttcggcgccggcggcatcgtcgagaacgccaggcccgggcagttgctggtggacttctccagcgccgagccggccgccacccgcgagatggccgccgagctggaggcgcgctgcggcgcgcgctgggtcgacgcgccagtctccggcggcacgccgggcgcggaaagcggcagcctggcgatcatggccggcggacgcgcagcggatatcgagcgcctgcggccggtcctctcccggctcggccagcgcctgacgcgcatgggcgaggtgggcgccgggcaggtgaccaaggtctgcaaccagatgatcgttgcctgcaacgccctggtgatcgccgaagtggtggcgctggcggagcgggccggagtcgacgccagcctggtcgctccggcgctggcgggcggcttcgccgactcgaagccgttgcagatcctcgccccgcaaatggccgagagccgttacgagccggtcaagtggcacgtacggaccctgctcaaggacctcgataccgcggtgaagctgtcccgcgagcaaggcgcggccaccccgatgagcgggttggccgcacagctgatgcgtctgcacggcagccagggcaatctcgaacgcgatccggcgaccctggtggagcaataccggaccgccgtcgagtga

SEQ ID NO: 364120 - DNA, 2181 bp, Pseudomonas aeruginosa
atggattggcaaggcctgcgcttcctcggagagtctcccatcgacggctacgtgctgcagaactgcacctattctccgtcgctggtggcgctcgccttcctcgtcgcctgcctcgccgggtacacggcgctggacatggtcgagcgggtcggcaacagcctgagccacccgcgccgctggcaatgggtcggggcgttctgcctgggcagcggcatctgggccacgcatttcgtcgccatgctcgcgttccacgcgccgatcgccctgcgctacgacctgccgatcaccggcctgtcgctgctgatcgccgtcgccgcctcgtacctggcgatgtacatgaccgcccgcccgcgcttcggcctgctgccctgcctgctcgccgcctgctgcatcggcctgggcatcgccgccatgcactacaccgggatggcggcgatgcgctcggtggccacccagtactaccagccatcgctgttcgccctttcggtactgatcgccatcggcgccgccttcaccgccctcgccgcggtcccctacctgcgcggccggcgcagcgcgcgctaccgctacatgaaactgatcgccagcctgctgctggccggcgccatcgccgccatgcatttcaccgggatggccgcgctggtgctcagcgtacccgccggcacgccgctggaactgcaagccagcgccgactcgctgcgcctgggctggctcaccggagtgctcgccagcgccatcgccgcctgcggcatctgggccgcatggtcggagaaacagcgggagcgccggctcagcgaaaacagccgggtcaacgccctgctcaaccagctcgaccacgcccacgcctcgctgcgccagatggctcgctacgacagcctgaccggcctgcagaaccgcacggcattcaacgaagtgttcgtccagcacctggagaactgtcgcctgagaggcaagggcctggcggtgatgttcctcgacctcgatcacttcaagcggatcaacgattccctcggccacgactccggcgacgaactgctgaagatcgtctccgaacgcatccgcagcgtgttgcgcgatagcgacgtggtggcgcgcttcgccggcgacgagttctgcgtgctcgccgacctcacccaggaccacgaggcgcacatcctctcgcaacgcctgatgcagaagatgaaggaacccatcgccctggacgggcgcaccctggtgatgaccgccagcgtcggcgtcagcctctacccgaacgacggcgagcagtgcgaggagctgctgaagaacgccggcctggccctgcaccagtccaaggcctgcgggcgcaacaacgcgcagttcttcagccggcaactgctggtgcgggcgacccaggaactgcagatggaggaggaactgcgccaggccctgcgcgacgaccagctggagctgcactaccagccgatcctcgccctcgccgacggcgaggtacaccagttggaggcattggtgcgctggcgccatccgacccagggcctgctcggtccggaccgcttcatcggcctggccgaagccaacggcatgatcgaccagctcgacgactgggtgctgcgacgcgcctgccgcgacctgcgcagcctgcacctggccggccacgaacggctgcgggtggcggtcaactgctgcgccagcaatctcggccgggccagcctggtcgacgaagtccgtcatgcgctggagcaggccgggctggcggcgtgcttcctcgaactggaggtgaccgaggacgcgctgatgtacaacatcgaccagaccatcccgctgctcgaacgcctccgcgagctgggcgtcagcctgtcgatcgacgacttcggcaccggctattcgtcgctcgcctacctgcggcgcctgccgctggacgcgctgaaggtggatcgctcgttcatcatggacatccccgcctcgcagcgggacatggaaatcgcccaggcgatcatcgcgatggcccagaagctccatctgaaagtcgtcgccgagggcgtggagaccccgcagcaactggcgttcctgcgggagaaccattgcgagctggtgcagggctacctgttcagccggccgctgccgctggcggccctggaagagttcctccgcgcctaccgcttcgacgccgcgccgccgctgcgcagcctgaaccaggcctga

SEQ ID NO: 364121 - DNA, 1656 bp, Pseudomonas aeruginosa
atgggtgggggtatcaagcgtttcttgccggcgatcggttcgacccggctggtgatgctgttcgcgctggttctggtggtgttctacaacgcggcgacctggaaggccctgcatggcctggtgccgctgcaaggcttgaagggcttcgcgttcttcgcctcgttcgcggcgttcctgtgggccgccttcacgctcctgctgaccctggtttccttccgcccgctgctcaagccggccttgaccctggtcgccctgtgctcggccggcgcgacctacttcatgggcagctacggcatcagcatcgacacggtgatggtgcagaacgtcttcgagaccaacgccaccgaggccggcgacctggtcaacccgaccctgctcggctacctgctgctgctcggtgtcctgccttcgctgctgatctggctctggccggtacgctaccggccgttcttccgcggcctgctgaacaagatcctgacgctgctcggctgcctgctgatcgtcgcggtaatggtaggcagcttctattccacctacgcgccgatcttccgcgaggaagacaagctgacccacttcatcaacccgaccaactacatctacgcggtgggcaagtacgccaagcagcgcctggtgatcaaggagcacctggtggtcgagccgatcggcctggacgcccgccaggcgccggctgcgctgcagcgacagaagaaatcgctgctggtgttcgtggtcggcgagaccgcccgtgccgaccatttctcgctgaacggctacgcccgcgagaccaacccggagctgagcaagcaggacatcgtcaacttcacccaggtccgttcctgcggcacttccaccgcggtctcggtgccctgcatgttctcccagtacccgcgcgaggactacagcgacaagaaggccaagacccacgaaggcctgctggacattctccagcgtgccggcgtgcaggtgttgtggctggagaacaacagcgactgcaagggcacctgcctgcgggtgcccaaccgggacatcccgaagacccagccgagtccgttctgcgacggcaagaactgcctggacgagtcgctgctggtaggcctgcaggagtacatcgacgggttgcaggacgacgccatcatcgtcctgcactccgatggcagccacggtcccgagtactacgagcgctaccctaaggagatggaacgcttccagccggtatgccggaccaaccagctcggaagttgcagcaaggaagagctggtgaacgtctacgacaacaccatcctctataccgaccacttcctgacgaaggtgatcgaattgctcaagcggaatgccgacaagcgcgatacggcgatgatctacgtgtccgaccacggcgagtcgctgggcgagaatggcgtctacctgcacgcggcgccttattcgatcgcgccccaggcgcagatccacgtgccgatggtcatgtggttcgccccgcaggcgctgggcaactggggcatccagcgcagttgcctggacggcaagcgcgacgacaaggacctgagccacgacaacctgttccactcggtgctcggcctgctggacgtacagacttcgctgtaccagccggcgctggacatcttcgccagttgccgcgcgcccagggcagcccagtga

SEQ ID NO: 364122 - DNA, 456 bp, Pseudomonas aeruginosa
atgtacgatcgcattctggtagccgtggacggcagcccggtctccgaccgcgccctggaagaggccatcaagctggccggcctcagcggcggcaagctgcgcgtcatcaccatcgtcgacagcccgctgcgccaccttcccgactacgcggtgtactacaaccccgagccgctgcgcgaagccgcgctgaaagccgccgatgacgtcctggccaaggcccgcgagaaggtcgaggcgagcaacgtcgaaggcgccaccttcgatcgcgtctgccaggagcgcgccagcgaggaaatcgccgagcgcatcgaactcgaggcccaggccagcgatgccgacgtggtggtcatgggcacccatggtcgtcgcggcatgcgccgcctgatgctcggcagcgtggcggaaggcctgatccgcgtggcttcgcgtccggtcctgctggtccgcgacaaataa

SEQ ID NO: 364123 - DNA, 2847 bp, Pseudomonas aeruginosa
atggcgcagtatcaaccggggcaacgctggatcagcgacagtgaagcggaattgggcctggggaccatcctggcccaggatggccgcctgctcaccgtgctctatccggcgaccggcgatacccgccagtacgccttgcgcaatgcgccgctgacccgcgtgcgcttcgcccccggcgatgaagtgacgcacttcgaaggctggaagatgaccgtccgcgaggtcgaggaaagcgagggcctattggtctaccacggcctcaccgcgcagaacgagcagcgcaccctgccggaaacccagctctccaacttcatccagttccgcctcgccagcgaccgtctgttcgccggacagatcgatcccctgccctggttctccctgcgctaccacactctcgaacgccgcagccaactgctccagtcctcgctctggggcctcggcggcgcccgcgcccagccgatcgcccaccagttgcacatcgcccgcgaagtcgccgaccgcatggcgccgcgcgtcctgctggccgacgaagtgggcctgggcaagaccatcgaggccggcctgatcatccatcgccagttgctctccggccgcgccgggcgggtgctgatcctggttccggaaaacctccagcaccagtggctggtggagatgcgccggcgcttcaacctgcaggtggccctgttcgacaaggagcgcttcgccgaaagcgatgccagcaatcccttcgaggacacccagttggccctggtcgccctggagtggctgaaggaagacgaacgcgcccaggacgccctgttcgccgccggctgggacctgctggtagtcgacgaagcccaccatctggtctggcaccaggaccaggtcagcgccgaatacgcgctggtcgagcaactggcggagatcattccaggcgtcctgttgctcaccgcgaccccggagcaactcggccaggacagccacttcgcgcgcctgcgcctgctcgatccgaaccgcttccacgacctcgaagcgttccgccgggagagcgagcaataccgcccggtcgccgaagcggtgcaggaactgctcgaccacggcaatctttccgccggcgcgcgcacggccatccacggcttcctcggcagcgagggcgacgagctgctggccagcgtcgagggcggcgatgaagacgcccgctcgcgcctggtccgcgaactgctcgaccgccacggcaccggccgcgtgctgttccgcaacacccgcgccgccgtgcagggcttcccccagcgcgagctgcacgcctatccgttgccgatgccgagccagtaccaggaactgccggccggcgaacacccggacctgtatccggaagtgaatttccagcaacagtgggaagacggcgacgacaacaatcgctggtggcgcttcgacccgcgcgtcgagtggctgatcgataccctgaagatgctcaagcagttcaaggtcctggtcatctgtgcccacgccgagaccgccctcgacctggaagacgccctgcgcctgcgttcgggcatctccgccacggtgttccacgaaggcatgagcattctcgagcgcgaccgcgccgccgcctacttcgccgacgaagagttcggcgcccaggtgctgatctgctcggaaatcggcagcgaaggccgcaacttccagttcgcccaccacctggtgctgttcgacctgccggcccacccggacctgctcgagcagcgcatcggccgcctcgaccggatcggccagcgacacaccatccagttgcacgtaccgcacctggagaacagcgcccagcagcgtctgttccagtggtaccaccaggcgctgaacgccttcctcaatacctgtcccaccggcaacgccctgcaacacgagttcggcccgcgcctgctgccgctgctcgacggcggcgaggacaaggcctgggacgcgctgctcgccgaaggccgcgcccgtcgcgaagccctcgaagcggaactgcacagcggtcgcgaccgcctgctggagctgaactccggcggcgccggcgaaggcgaggcgctggtggaggccatcgaggagcaggacgacgacttcgccctgccgatctacatggagcgcctgttcgacgcctacggcatccacagcgaagaccattcggaaaatgccctgatcctcaagccgagcgagaagatgctcgacgccggcttccccctcggcgacgacgaaggcgtgacgatcacctacgaccgtgcccaggcgctggcccgcgaggacatgcagttcctcacctgggaacatccgatggttcagggcggcatggacctggtgctgtccggctcgatgggcaacacctcggtggcgctgatcaagaacaaggcgctgaagcccggcaccgtgctgctcgaactcctgttcgtcagcgaggccgtggctccgcgcgccctccagctcggccgctggctaccgccgcaggccctgcgctgcctgctcgacgccaacggcaacgacctggccggccgggtgtccctggaaaccctcaacgaccagttggaaagcgtgccacgggtcagcgccaacaagttcgtccaggcccagcgcgatgtgctggccaagcagttcgacgtggccgagggcaagatcgtcccgcgccacgaggaacgcgtggccagggccaagcagcagttcgccgccgccatggacgaggaactggcgcgcctgaccgcgctcaaggcggtcaacccgagcgtccgcgacagcgagctggacagcctgcgcacccagcgcgaggaaggcctggccctgctcgacaaggcctccctgcgcctcgaggcgattcgcatcctggtcgccggctga

SEQ ID NO: 364124 - DNA, 309 bp, Pseudomonas aeruginosa; identical to SEQ ID NO: 319438

SEQ ID NO: 364125 - DNA, 603 bp, Pseudomonas aeruginosa
atggacctgttcgccgacgcacccctgaccctgccggacgccgacctgcgctatctcccgcattggctggatgcgccgctggcgagcgcctggctgttgcgcctggaacaggaaacgccctgggaacagccgatcctgcgcatccatggcgaggagcgcccgaccccgcgcctggtggcctggtacggcgacccggaagccgcctaccgttattccggccaggtccaccggccgctgccatggaccgcgttgctcggcgagatccgtgagcgcgtggagcgcgaggtcggccagcgggtcaacggcgtgctgctgaactactaccgcgacggccaggactccatgggctggcacagcgacgacgagccagagctgcgccgcgatccgctggtcgcctcgctcagtctcggcggcagccgccgcttcgacctgcggcgcaagggccagacccgcatcgcccattccctggaactgacccatggcagcctgctggtcatgcgcggcgcaacccagcatcattggcaacatcaggtggcgaagacccgccgctcctgcatgccccgtttgaacctgaccttccgcctggtgtacccccagccatga

SEQ ID NO: 364126 - DNA, 162 bp, Pseudomonas aeruginosa; identical to SEQ ID NO: 319440

SEQ ID NO: 364127 - DNA, 1995 bp, Pseudomonas aeruginosa
gtgcccattcactggaagccgttcctggcaccctcgacgctggcgctcaagttcgccatcaagacgctcctggccggcggcctggcgttgtggtgcgcctttcgcttcgacctggagcagccgcaatgggcgctgatgaccgtgctgatcgtgtcccagccgttgtccggcatggtggtggcgaagggcttgttccgcctgctcggcaccctggtcggcaccgcgatgtcggtgctgatgatcgcgctgttcgcccaggcgccctggttgttcctgctggccatctcgctctggctggggctctgcacggcggcctcgacctccctgcgcaaccacgtttcctatgccttcgtactttccggctatacggtggcgatcattggcctgccggcggtggaccagccgctgctggtcttcgagcaggcggtggcgcgttgtaccgagatctgcctggggatcatctgcgcctcggcggtcagtgcgatcctctggccgcagcgggtcgagcagaacctcgacaagcaggcccacgccacctggctgctgggcatgcaggccgcgcgcggcgagatcgacccgcgccagcggcagccgcaggggctgctcaacgcgctgagcaagatcgtcgaggtcgatgcgcagcgcgaccatgcctggttcgagggcgagcgcgggcggcgccgggccggcgccctggcgttgctctcgcgcgacctgctcagcctgttgcgcaccgcgcgcggcgtggcccggcaacgggcgcggctgaacgacgaggaagagcgccaggtggagcgctggctggctgcgctggccagcgccctggaaggggccgatccggcgtcgatgcaggcgctgcgcgaggagttggcgcaggtcgcggtcgagccgcagtggagcaacgaccagcgttacctgctgacccgttgctcggtgctgctgctcaaggcggtgaatgccgagaagggcatgcgcgcggtggccagcggcgaggtcgaggggcgggtgggcagcgccggcaccctgtcctggcaccgcgacctgcagatggcgctgttctacggcgcgcgtagcgccctggcgttgctcgggctgtcggtctactggatctataccgcgtggccggcggcgtccggcgcgatgctgctggcggcggtggtgtgcagcctgttcgccaaccgcgacaacgcggtggccatcggcctgagcttcctgcgcggcatcgtctacgcgatcccggcggcgatgctggtcagccagtggctgctgccgcagtggaatggcttcccgctgctctgcctggcgatgggcgtgccgctgttcttcgccaccctgggcatggccgtaccggtcaccgccggcaccgccacctcgttcgcgatccacttcatcgtcctggtcgcgccgcgcaaccagatggactacgacctcgcgaccctgctgaattccgcccagggcgtgctgatcggagtcggcttcgcggtggtgatcttccgcttgctgaccttgcgtccgggctggctgacccgacgcctgctggacgccacctgcgtcgatctcggccgcctcacccggcgcccgctggcgcaggcggagaactggttcggcgggcgcatggccgaccgcctgttgcgcctggcgcggcacgccaacctgttgccggagcaggagcggcggcgttgggacgatggcctcctggcgctcgacctgggtaacgaactgatccacctgcgggcctgcctggaaggcgcccgtggcgtcctgcgcaaggcgcgcgaccgcttcctcggggaactgggcgagctgcttgaggccggtcccgcggggccgcgcagcggccgcctggaacggatcagcctgccgttgcgcgaagccctggagcgcgacgctcgccacgacgacgaagccagccgcctggcgcgcgcggccctggcgcaactgctgttcacctggcagcagtggtgccatcaggaggaaagccatgagtctgcatga

SEQ ID NO: 364128 - DNA, 204 bp, Pseudomonas aeruginosa
atgagtctgcatgagtcggcctggggcggcgtctacctcagcccgctgttcgtctatgccctgctggcgctggcggccaccgccgcgctgcgggtgctgatccagaaaacgccgttgcgtcgctgggtctggcacgaggcgctgttcgactgcgccctgttcattttgatgttgagtggcattacctgggcggccacgacctga

SEQ ID NO: 364129 - DNA, 858 bp, Pseudomonas aeruginosa
atgcgtgcatcgcttcgcgtcgtcgtcaccctgctggtggtcgctgccgctgtcctcgccggcacctggctctggcgctactacatgctctcgccctggacccgcgatgcccgggtacgggccgacgtggtggtggtggcgccggacgtgtccggctgggtgaccgacctggaggtcaaggacaaccaggtggtcaaggtcggcgacgtgctgatgcgcatcgaccaggaacgctaccaggccaacctggagcaggcccgcgccgtcgccgagacccgtcaccagcaatacctgttgcgccagaacgaggcggcccggcgcagccgcctgggcatcggcgcgatcagcgccgaggacaaggaaaacgcccagatcaatgccgccatcgctcgcagcgagtaccaggaagcgctggcccaggtgaagatcgccgaactcaacctcaagcgcagcgaactgcgcgccgcgcgcaacggccaggtgaccaacctgcgcctggcccagggcaactacgccacggcgggccaggcggtgatggcgctggtcgaccagcagtccttctatgtggtcgcctacttcgaggaaaccaagctgcccggcatccgcgtcggcatgcgcgcccaggtccgcctgatgagcggcgatcagccgatcgacggcacggtggagagcatcagcagcggtatcaccgaccgcaactcgacgccggacggccagttgctggccaatgtcgagccaaccttcaactgggtgcgcctggcgcagcgcattccggtgcgcatccgcctcgaccaggtgccggcggatgtccacctgagcgccgggatgaccgccagcgttaccgtgcagggggactga

SEQ ID NO: 364130 - DNA, 1176 bp, Pseudomonas aeruginosa
atggaccttcgcttgctgttgctatccctgaccaccttcgccgccggcctggcggaaagcatcctgatcggcatcctgccgcccctggccgaagacctgcgggtctccatcagcctggccggccagctcaccaccctgttctccctcggcttcgccctcgccgcaccgctgctcggctggctgacccggcgcatcgaacgccgccgcctgctgctggcgaccctgctgctgttcgccctcagcaacgcgctcgccgccctcgctccgggctatctcggcctgctcctggctcgcctgggaatgtcggcctgttgcgggctgctgatcgtcctcgccagcctgctcgccgccgagctggccgccccggcccaacgcggccgggcgatcggcctgatcttcatgggcatcagcggttcgctggtgttcggcgtgccactgggcgtacagatcagcgactggttcggctggcgctggatcttcgccggcatcgcggtctattcgctgcccttgtgcctgctgctctggcgctacctgccgcaacgccaggccggcgacctgcccggccgcgaaggctacctgcggcagttgcgccagcccgcgctgtggctcgcgcaactggtatcgatcctgttgctcggcgggcacttcaccctgttcgcctatttcaccccgtacctggcgagcatggccggtattcgctcgcccggcgagatcagcctgatcctcctgctgatcggcctggcagcgctgagcggcggctatatcggcggctggctggccgaccgcctcggccaccggcgcgccctgcgtctggtgccggcggccttcgccctggcgctggcggcggtgccgctgagcctgggcagcatcgggttcctgccggtactgatggtctggagcgcgatcagctggatgatctcgccggtggtgcagagcttcctgctgcgcagcgatccggccagcggttccgccggcgtcgccctgaacacctcggccatgcacctgggcgtgggcctcggcgcggcgctgggcggcctggtggtggcggcactgggagtcgccgcgacgccctgggtcggcctcgccctggtgctggcggcgctggcctgcgcgcttggcgccagcacgctggatggcgccacgcaagcgctgccgctcagtccccctgcacggtaa

SEQ ID NO: 364131 - DNA, 471 bp, Pseudomonas aeruginosa
atgagccaggtccagaacattccctacgccgagctagaggtcgggcaaaaggccgagtacaccagcagcatcgccgagcgcgacctgcagttgttcgccgcagtctccggcgaccgcaacccggtgcatctggacgccgcctacgcggccaccacccagttcaaggaacgcatcgcccacggcatgctcagcggcgccctgatcagcgcggcgatcgccaccgtgctgcccggcccaggcaccatctatctcggccagaccctgcgcttcacccgtccggtcaagctcggcgacgacctgaaggtcgaactggaagtcctcgagaagctgccgaagaaccgcgtgcgcatggccacgcgggtgttcaaccaggcaggcaagcaggtggtcgacggcgaagcggagatcatggcgccggaagagaagctcagcgtcgagctggccgaactgccgccgatcagcatcggctga

SEQ ID NO: 364132 - DNA, 2463 bp, Pseudomonas aeruginosa
atgaccgccaccgccgtcgtcctccgcaatgccccgtcgtccctcgatttcccccgcgcctcgcgcctgagccgttcggtgcgcgcggccctgctgtcgctggccatggcggccggcgcggcgccgctctgcgcctcggccgccgaagcggcggcggaacaggcgcggccctatgcgatccccgccggacagttgggtgacgtgctcaaccgcttcgcccgcgaagccggcatcaccctctcggccactccggcgcagaccggtggctacagctcccaggggttgcgcggcagtttcaccgtgcagcagggcctggcccggctgctcgccgacaccccgctggaagcggaagaccagggcgacggcagcttcgtcttgcgcgaggcgccggcaaaggacggcgacgtgctgaacatgcaggcggtggaagtcttcgccctcggcaacaacctgggcagcaccgatggctacctggccacccatagccagatcgccaccaagaccagcaagccgctgctggaaaccagccagaccgtctcggtgatcacccgcgagcagatcgacgacaccgcctccaagaccgtgcagcaggcgatgcgctatacccccggcatcttcaccggccaggtcggcgcctccaaccgctacgactacgtggtgatgcgcggcttcgccgacaacagcgtggacaacatctacctcgacggcctcaaggccatgggcgacagcggtaccttcagctcgatgcaggtcgacccgtacttcctcgaacgcatcgatgtgctcaagggcccgtcctcggtgctctacggccgtagcctgccgggcggcctggtggcgctgaccagcaagaagccgttgtacgaggactaccgccagatcaccggcagcatcggcaacatgggccagaaggagatgggcttcgatttcagcgggccgctcgacgaggagaagcgcatcgcctaccgcctggtcggtctcggcaagggctcggacacccagttcgatcacgtcaaggaggagcgctacgccatcgccccgaccctggccatcgacttcagcgatgacaccaccctgaccctgcaaggctacctgcaacacgatcccaacgggggctaccacggcggcgtaccggccgacggcaccctgtcgcaccacaacggccggcacatctcccgcgagttcttcgatggcgagccgagcaaggacgacttcgaccgcacccagcggatgttcggctaccagctggagcaccgcatcgacgacgtctggtcggcgcggcagaacttccgctacctggactccgacgtcgacctgtcgcaggtctacgcctacggctggagcgccagcgagccgaacaagctgaaccgctacttcagcggcgcccgcgagcacctgcaggcgtatatcgtcgacaacatgctgcaggccgaattcgccaccggcgcggcgcgccacaccctgctcaccggcctcgactatcagcgccggcgcactgtggtcgactggcgttccggctcggcctcggcgctggacgcgttcaacccgatctacggcgacgacgccatcagctatttcccggacgacaaccacacccgccgcctggagcagaccggcgtctacctccaggacctgatcgacatcgaccagtggcgcttctcgctcggcctgcgccaggactgggtcagcgtcaccgacaagaaccgcagcaccggcagcaaggccgacgacgactgggagaaattcaccgggcggatcggcgcgctgtacctgttcgacaacggcctggcgccctacgtcagctactccgagtcgttcaacccgaacgcctattcagacgcctccggcacgcccctggcgcccaccgagggcaagcagtgggaactcggcctgaagttccaggcgccgggcagcaacagcttctacaccgcctcgctgttccatatcacccaggaaaacgtcgcctccaaggagccccaggacaacttctacacctcggtcggcgaagtgcgctcccaggggctcgaactggaggcccatacccagctcagcgacaacctgaagctgctcggcagctacacctacaccgacatcacctacaccaagtcgctggacggcaaccagggccatacgccgaaccaggcgcccaagcacatggcttcgctgtgggccgactatgccttcgacgccggcccgctcagcggtctgagcatcggcggcggcgcgcgctacgtcggcgagacctgggcggacaaggaaaacaccttgcgggtgccggactacaccctggtcgacgcgcggatcggctacgacctcggcaagctcggcctgaaaggcctggacgtcagcctcaatgccaacaacctgctggacaaggactacgtggcgtcctgctacagcctggacttctgctacttcggcgagaagcgcaacgtgaccgcgacggtgaactaccagttctga

SEQ ID NO: 364133 - DNA, 999 bp, Pseudomonas aeruginosa
atgagcggagccgtggacgggacgcgcggtagggtcgacgaagcggtggtcaggcaggccatccactggctggtccgcctgcgctcgcagccggccgacgatcgcctgcagcgcgcctgcgcggcctggcgcgcggagcacggcgagcacgagcgggcctggcagcaggtcagcgcgctcaacgaagaactgcacggacgcttcaaggcgctgcccggcggggtcgcctacggcaccctggacagcagcgcgcagcgcctgcagcggcgccaggcgctgaaactgctgtcgctgctggtggctggcggcgctgtggcctgggtcggtcgcgacagcctgccctggcagcgcctgagcgccgactacagcaccgccaccggcgagcgacgcagtatcgagctggtcgacggcacccgcctgcaactgaacaccgacagcgcggtcgacgtgcgctacgacgccggccagcgcctgatcctcctcgcccgcggcgagatcttcctcgccagcggcgccgatacgcaatcgcccacgcacaggccgctgcgggtacgtaccgcgcaagggctgttcgaggccctcggcacccgtttcaacgtacgcctgcaagatgccgccacctgtctcagcgtcagcgagggttcggtgcgcatcgatgccttcggcgcgcgtccgctgcaggctccggtggccgaggcggggcagagctatcggatcgccgccgacggcgtgcggcgcctcgaacggccgcagatggacgccgtggcctgggccgatggcctgatcgtcacccgcgacatgcgcctggccgacttcctcgccgaggtcagccgctaccgcaacggctacctcggctgcgccgcggaggtcgccgacctgcgcctgtccggggtctaccgcctggacgacaccgacaagctgttgcaggtgctcgcgcggaccctgccggtgcgcctgcagcggcatacccgctggtgggtgagggtggtcgccgcctga

SEQ ID NO: 364134 - DNA, 519 bp, Pseudomonas aeruginosa; identical to SEQ ID NO: 323099

SEQ ID NO: 364135 - DNA, 915 bp, Pseudomonas aeruginosa
atggactggacccgccgcctgcgcctgcaacacctgcaactgctggtcagcctgatggagaccggcaacctcagcggcaccgcccgggccgcacacaccacccaaccgggcctgtcgaagtggctcaaggaactggaggaggacgtcggcgcgccgctgttcgagcgtcacgcccgtggcctgcgcccgacgccctacggcatgaccctgttcaaccacgcccagcgcgtgctcaccgagatggagcgggcgcggcagaacctcgaggcgatgcgcagcggcagcggcagccgggtactcctcggcacgtcgccggcctccgcgccgagcctggtgccgcgcgcattgcgggcgttcctcggacgctaccccggggcccaggtggaactgctcgaaggcaccatgaacggccttctcgagcggctggagaaacgccagctcgatgtggtggtggggcgcctggacaactatgcgccgcgcgccagcctgcgctgcgaggtgctctacagcgaggcgatcgtggtgatggcgcgccccggtcaccccctggcccaggccgccgcgctggactgggaagacgtgcggcgctacgactggatcgtctggccgcccggctcgccgatccgcagcaagctcgacatggccctgacccagggcggccggcagccgccggcctaccgcctggagtcatcgtcgatgctggccaacatcgaattgttgcgtggcagcgacatgctatccatcggctcggcgcgggtggtcgagcacctcgccgggctcggcctggtggccaggctggcgctggagattcccggcgagggcgcggtgggcatgtgctggcgcgacgaaccgcatcgcgaccgcgccagcgaagacctgctggcctgcctgcgcgaaggcgcggcggccgagtag

SEQ ID NO: 364136 - DNA, 1062 bp, Pseudomonas aeruginosa
atgcataacgacaattccaccgagaagcgcgccgacttctatcgacgcatccgccagcagcacctcaccccgctctgggaagccctgcacagcctggtcccggcgcaacccgccggcggctgccaggcggcgctgtggcgctatcgcgaactgcgcccgttcctgctcgaggcaggcgacctgatcagcgccgaggaagcggtgcgccgcgtgctggtgctggagaacccggaccttcccggccagtcggcgatcaccccgagcctctacgccggcctgcaactgatcctgccgggcgagatcgctcccagccaccggcacacccagtcggccctgcgcttcgtcgtcgagggctacggcgcctacacctcggtggacggcgaacgcacccgcatggagccgggcgacttcatcatcactccgtcctggacctggcacgaccacggcaaccgccccgccgcggaaggcggcgagccggtggtctggctggacggcctggacatcccgatgctgcgtttcttcggcgccaccttcgccgagagctacggcgaaccggtgcagccgttgcgacgtggcgaaggcgacagcctcgcccgctacggcagcaacatgctgccgctgcgccaccagccgacgacgccgacctcgccgctgttcagctacccctacgcgcgcagccgcgaggccctcgagcgcctggcgcgcctcgaacggcccgatccctgggaaggccacaagctgcgctacgtcaacccggccaccggcggctgggccatgccgaccatcgccacctgcctgcaactgctgccggccggcttcctcgggcagcccgcgcgcagcaccgacgccagcgtctattcggtggtggaaggcagcggcgtggcgcagatcggcggccggcgcttcgccttcgaggccaaggatctgttcgtcgtgccctcctgggccgagctgcgcctggaagccggcgccaccgactgcgtgctgttcagtttctccgaccgccctgtgcagcaggcgctcggcatcctccgcgaatcccgcgaacccctcgcccactga

SEQ ID NO: 364137 - DNA, 699 bp, Pseudomonas aeruginosa
atgagccatctcttcgcgcccgaagcgcccgtcagcctcaccatccatggcagcgaccagaccttcccggtgcggcgggtctactgcgtcggccgcaactacgccgcccacgcccgggaaatgggcttcgatcccgagcgcgagccgccgttcttcttctgcaagccggccgacgcggtggtcccggtcgccgccggcagcaccctggagctggcctacccgagccagaccggcaactaccactacgagatcgaactggtggcggcgatcggcaagggcggctgcgacatccccctggagcaggccgaggaacacgtctggggctacgcggtgggcctggacatgacccgccgcgacctgcagatacgcatgcgcgagatgggccggccctgggagatcggcaaggccttcgaccgctcggcgccgatcggcccgctctaccctgccagccaggtcggccatccgcgccacgccgccatcagcctccaggtcgacggcgaggatcgccagcgcagcgacatcgaccagttgatctggtcggtggcggaaaccgtcagctacctgtcgcgcttcttcgagctgcgccccggcgacctggtcttcaccggcaccccggaaggcgtcggcgcggtcgagcgcggcgagcggatgctcggcgccatcgacggcctcggcgaactcagcgtccgcgtggtctga

SEQ ID NO: 364138 - DNA, 1347 bp, Pseudomonas aeruginosa
atgcctacgcccgacaagaacaacaagatcgacgtccaggccttcatcgatgcgcaggcggtttccgccttccagttgcgagtcctgtcgctgtgcttcctgatcgtcgccatggacggattcgacaccgccgccatcggcttcatcgccccggccctggcccacgactggcaactgagcccggcgcaactcagcccgatcctcggcgccgcactggccggcctggccctcggcgccttcgccgccggcccgctggccgaccgtttcggacgcaagagcgtgctcctgctctcggtgctgttcttcggcggctggagcctcgcctcggcctacgccggttcggtggaaaccctggccctgctgcgctttttcaccggcctcggcctgggcggggcgatgcccaacgcgatcaccctgacctccgaatactgcccgcgccggcaccgcgcgctgatggtcaccgcgatgttctgcggcttcaccctcggctcggcgctgggcggcctgctcgccgcgcggatggtcccggcgctgggctgggagagcgtgctgctgctcggcggcggcctgcccctggcgagcctgccgctgctctgggcatgcctgccggagtcggtgcgcttcctcgcccgccgcgcaccggacgcggcgcgcctgcggcgcatcctcgaacgcctggggcgcctgcccgacggctgggccggacgcctcgaactgcccgccgacgagtccgacggcacctcgcccctgcggcagatcctcggcgccgagctgcgcggcggcaccctgctgctctgggccacctttttcatgggcctgctgatcatctacctgctgaccaactggctgccgacgctgatcggcggcaccggcttcagtctcggcgaggcggcgacgatcagcgccatgttccagctcggcggcaccctcggcgcactcctcctgggcagcgccatggatcgcttcgacgcgcaccgggtgctgagcctggcctacgtcggcggcgccctgttcatcctcggcatcgccagcctctaccacagcttcgccctgctggcgctgtgcgtcgccggcgtcggtttctgcatcagcggctcgcaggtcggcgccaacgccctggccgccgatttctatccgacccgcagccgcgccaccggggtcagctgggccctcggcctgggccgcatcggctcgatcgtcggctccctcagcggcggcgccctgctcggcctgggcctgggcttcagcggcatcctcgccctgctggtgatcccggcgctgctcgccgccgtggccgtgcatcgcctgggccggcgccgggccaggccttcttccgtcactctctga

SEQ ID NO: 364139 - DNA, 645 bp, Pseudomonas aeruginosa
atgcagctctacagcttcttcaacagctccacgtcctatcgggtgcgtatcgcattggccctgaaaggtctggattaccaggtagtgccggtcaacctgcggcagggcgagcaactgcgcccggccgaccgccagcgcaacccgatgggcgcgctgccgaccctggtcgacgccgacggccgtcggttcagccagtcgctggcgatcatcgactacctcgacgccgtgcagcccgaaccgcgcctgatccctctcgacccgctgcatcgcgcccaggcgctggaactggccctgctggtggcctgcgacatccatccgctgaacaacgtgcgggtgctcaagtacctgacccaggtcctcggcatagacgccgaggaccgccagcgctggtacgcgcactgggtcgccgagggcctggcggcggcggagaccctgctgaaccgacaccgtcgcggcgccttcttcgccggcgccgcagcgggcatcgtcgagtgctgcctggtgccgcaactggccaacgcccggcgcatgggctgtgacctggcgccctacccggcgttgctcgaactggaggggcgctgcctggcgctcgaagccttccagcgcgccagccccgagcgccagcccgactacctcccggactga

SEQ ID NO: 364140 - DNA, 912 bp, Pseudomonas aeruginosa
atgatcacccgcacccgggccagcctgctggccctgcccctgctgctgccctcgttccaggctatcgccgcgctgccggggatgaacctcggccagacctccttcctcgacggcaaggccctgcccggcacgctgttccagcagttcgtgaatatctacgaggccgacgacttcatggacgccaacggtcaccggcgcccgctcgacaatcgcctgcgcaccctgctcgccaccagccacttcgcccacatcagccagcaccagctgttcggcgcctactacggcgcggaaatcctcgtcccggtgctgctcgccgatcccgacttcgaaccccacgctggcagcgccaacggcctcggcaacctgatcgtcagtccgttcatcctgcaatggccgcagaccgagctgttcggccggccctactggcagcgcctgaacctcgccttccagttacccaccgggcgctacgacaggcatcgggcgatcaatcccggcagcaaccactggagcttcaacccgcactacgcgctgacttgggaattcgccgaaggctgggaagccagcgctcgcctgcagtacctgttgccgggcaagaatcgcgacccggcgccgccgttggccgacgactacctgcagccgggccaggcgttccacgccaactactcggtatcgctggcgctggatgcgcattggcgagtcgggttgtccggctacagcctgcgacagatcaccgacgagcgggtcgacgggcacgaccgcccggactcccgcgagcgggtcgatgccatcggcccggcgctgatgttcggctggggcaagtcgcggctgttcctcaacgcctatcacgaatacggcgcacgcaaccgcagcgagggcagccggctgatcctgcgctactcgcaggtcttctga

SEQ ID NO: 364141 - DNA, 1335 bp, Pseudomonas aeruginosa
atggacgacgcattcagcgaggaaggcagcgcgcagccgcgccatgacgctcagcgtccggcgctcgctccgcggagcgacggtttcgacatccacacctaccatcccgacttcgtcgccgatccctatccgctgttgcggctgatccgctcccgtgcgccggtctgccgcgaccaggcctcgatctggtggatcagtcgctatgccgatgtctcggcgtgcctgcgcgaccgccgtttctccgccgaccccgctcgccttggcgccgccggcgtccgccagggcggcgccagctggttcggccaccagcaattgcaaccgctggcgcgcttctacgacaacttcatgctgttcaacgacgcgccgcggcacacccgcctgcgcaggctgttcgctccggccttcggccccgacgccgtgcgccgctgggaggcgtgcatcgaggcgctggtggaagagctcctcgacagcttgctggagcgccgcgagcccgatctgctcagggacttcgccgaaccgctgacgatccgggtggccgccgagctgttcggctttccccgcgaagacaccgggcaactgctgccctggggccgcgacctggccgccgggctcgatctcgccgccagccacggcgatgccgggcagatcaaccgcagcgcggccgccttcagcgactacctgcaacgccaggcgcgcggctggagcgatggctcttcgcgcccgccgcccggcgcagcgccgagcatcctcgacggcgccgcgatgctggaggccggactgggcctcgaggacctggtggcggcctatgccatggtgttcatggccgcgttcgaaaccaccatcagcatggtcggcaacgctacgctggcgctgctcacccatcccgaccagctcgatctgctgcggcggtgcccggagctggcggcgaacgcggtggaggaactgctgcgcttcgacggcgcggtgcgcggcggcgtgcgttgcaccctggaggaggtggagatcggcggccagcggattccgcctggagagaaggtctggctgagcttcctcgcggcgaaccgcgacccggagatgttcgccgcccccgaccgtctgcaattgcagcgagcgaacgccaagcagcacgtggcgttcgcccatggtccgcactactgcctgggcgcgtacctggcccggctcgaattgcaatgcgcattgcgcggcctggtgcgtcgccgtttcgccctggcctcggaaccgacggacctgcgctggcggcgcagctcggtgttccgcaccctggagcgcttgccgatcgtcccggaaggcgacgctcagaagacctgcgagtag

SEQ ID NO: 364142 - DNA, 771 bp, Pseudomonas aeruginosa
atgagactgccgcgcaacctgatcacccttggcctgggcctgaccctcctcaacgccggcctggccacggcggcggaggagctgccggcgccgatccgcatggtccaggagaagggcgcccgcatcctcggcagcttcgacgccccggatggcctgcgcggctacgccgccgaataccagaaccagggcatggcgctgtacctgacgcccgacggcaagcacgtactcaccggccacctgttcgacgcccagggcaaggacctcagccgcgaaccgctggagcgcctggtgtatgcgccgctggccaaggaaatgtggcagaagatggagcagagcgcctggatcgccgatggccgtgccgacgcgccgcgcgtggtctacctgttcagcgacccgaactgcccgtactgcaccatgttctgggagcaggcgcgaccctgggtggatgccggcaaggtgcagttgcggcatatcatggtcggcatcattcgcgaggacagcgaagccaagtccgctgcgctgctggccagcaaggacccgcagaaggccctgcacgaccatgagcaggcgggcaaggccagcaccctgaagccgctggcgaagatcccggcggcggtgcgcaagcagctcgccggcaacatggaactgatggagtcgatgggcgccgcggcgaccccggcgatcttctatctcaatgccgaggggcgcatgcagcagcaacagggcgcgccgcagccggaccagttggcggagatcctcggtccgcgctga

SEQ ID NO: 364143 - DNA, 837 bp, Pseudomonas aeruginosa
atgctgagtttttccctgggaccgctggtggtctcgctgcaacacctgctgctgttcctcgccctcggcgccgcgctgctcggtggttggctggcggcgcgcggcggcgggcgcaacgccgagccggtgctgttcaacctgttgttgctcggcctgctggtggcgcgcctggccttcgtggtgcgctactggccgcagtaccgtggcgacttcgcacagatgctggatatccgcgatggcggtttcctcgcctggccaggcctgctcgccgctgtgctcggcgcgctgttctgggcctggcggcgaccggcgctacgtcgctcgctgggtgtcggcgccagcctcggactggcgttctggctgcttggcagtctgggcctgggcatctacgagcgcggtacgcgcctgcccgaactgagcctgcgcaacgccgccggcgagtcggtgcaactggccgatttccggggccgcccgctggtgatcaacctctgggccagctggtgcccgccgtgtcggcgcgagatgccggtgctgcaacaggcgcaggcggagaatcccgacgtagtgttcctcttcgccaaccagggcgagagcgccgagaccgtgcgccatttcctccagggcgagaacctgcgcctggacaacctgctgttcgacaacggcgggcagcttggccagcaggtcggctcggtcgccttgcccaccaccgttttctacaccgccgagggccgcctgctgggcagccatctcggcgaactgtcccgcggcagcctggcgcgctacctcgaagccttcgagccggccgctgccgcccccgcaaccaggagttccgaatga

SEQ ID NO: 364144 - DNA, 1770 bp, Pseudomonas aeruginosa
atgcgtgtgttgatcctgctcctgatgctcctgctgccgggcctgtcccaggcgcaaccgggcgacgacctgttcgcgccgcgcggcgcgacgcagacggatttcctgccggtggagaaagccttccgcttcacctgggagcgcctcgacgacggccaggtgcaactgcgctggcagatcgcgccgggctactacctgtaccagaagcgcctgcgcttcgacggactcgacccggccttgcagccgcagctgccgccgggcgaaagccacagcgacgagttcttcggcgagtcgcagatctatcgccagagcctggaactgaccctgccggcggccgccgccggacaactgcgcctgggctggcagggctgcgccgacgccggcctgtgctatccgccgcaaagccaggcgctcgacctgggcggtaccggccctgtcgccgccgtcgccgggacgagcggcgaagtcgccgaggaccagggcctggctggcagcctgcaggccggcaacctggcctggagcctgttgctattcttcggcctcggcctgctgctggcgttcgctccctgttcgctgccaatgctgccgatcctcgccgggctggtggtcggcagcggcgccggccctcgtcgcggcctgctgctggccggtagctacgtgctgagcatggcgctggtctacgccggactcggggtggtcgcggcgctgcttggcggcaacctgcaggcctggctgcaacagccgtggctgctgggcagcttcgccgcgctgttcgtgttcctcgcgctgccgatgttcggcttcttcgaactgcaactgccggcggccctgcgcgaccgcctcgacggtctcagtcgtggccgcaaggacggcagcctggccggcgcggctgcgctcggcgcgttgtccgggctgctggtggggccgtgcatgaccgcgccgctggccggcgccttgctctatatcgcgcagaccggcaatgccctgcatggcggcctggtgctgttcagcctgggcctcggcatcggcatgccgctgttgctgctggtgacggtcggcagccgcttcctgcccaagcccggtccctggatgaacctggtcaagggcgtgttcggcttccttttcctcggcaccgcctggatactcctgcgtccgctgctcggcgaggcgctgtggatcggccttggcggcgcgctgctgctggtcctggcctacgccgcgctgcacacggcgcgaggcctggcacggcacgcggtgctgttcggcgcggcgggctgcatcttcggtctctggggcgcggcgatgctgctgggcgccgcggccggggccgacgacccctggcgtccgctacaggtgtatgcggcggcgaaccggggcgctacgccgacggccagtgcccacgaggcgttcctcacggtgagccagccggccgagctggaccgtcagttggctgcggccaaggccgagggacaatgggtgctgctcgactactacgctgactggtgcgtgtcctgccggatcatggagaaacaggtgttcgccaagcccgatgtgctcgccgccctgcagggcgtgcgcctgctgcggctcgacgtgaccgcggacaacgccgccagccgcgagctgctgcgccgctaccaggtacccggcccgccgagcctgatctggatcggcccggaaggcgaggagcgccgcgcgcgccggttgaccggcgaagtcgacgccggcggcttcctcgcccattggcaggcgacccgggagcgcggctga

SEQ ID NO: 364145 - DNA, 681 bp, Pseudomonas aeruginosa
atgcatgtactgctcaccgaagacgacgacctgatcgccagcggcatcgtcgccggcctcaacgcccagggcctgaccgtggaccgggtggccagcgccgccgatacccaggcgctgctccaggtggcgcgcttcgacgtgctggtcctcgatctcggcctgcccgacgaggacggcctgcgcctgctgcaacgcctgcgccagcagggcgtcgacctgccggtgctggtgctgaccgcgcgcgacgcggtgaccgaccgggtcgccgggttgcaggccggcgccgacgactacctgctcaagcccttcgacctgcgcgaactcggcgcccgcctgcataccttgcaacggcgctccgccgggcgctgcgtcaacgtcatcgaacacggtcgcctcagctacgatccgagcacccgcgaaacctggctcgacggtcgccccgtggagctgtcgcgacgcgaacaggcgctgttgcaggcattgctcaacaaccgcgggcggatcctcagcggcgagcagctcaaggacagcgtctatggcttcggcgacgaggtcgagagcaacgccctcaacgtccacatccatcacctgcggcgcaagctcggcaacgccatcgtgcagaccgtgcgcggcctcggctaccgcctcgggccggcgcgcggcgacggagacgacgcatga

SEQ ID NO: 364146 - DNA, 1323 bp, Pseudomonas aeruginosa
atgagcctgcgcctgcgcctgaccctgatcctcggctcggccttcatcctgctctggtcgctggccgcggcctggatgctctgcgacctgcgcgggcagatgatgcgctccttcgaccaacgcctggcggcctcggcgcggatggtcgccggcctgctccagcagttgccgcagccgcagccggcggacggccagaccacgcgcctgagcgcggagcaactggggattcccaacggcatggcctgccaggtcagctcattgcgcggcgaagtcctggcgcagagccatgccaccccggagcgggcgctggacagcaccgccagcggcttccgcgaccaggaaatcaacggcgtgctgtggcgcagcttcaccgtgcaggccggcgacctgcgggtcagcaccgccgaccgcctggaagagcgcgacgtgctgcaacgctcggtggtggtggccgccgcggtgccggtgacggtcgccctgctcggcagcctggccctgctctggctcggcgccggccagggcctggcgccgctcaagcggattcgcgacgccctcacccggcgcggcgccgactcgctggagccactggagctggcggccctgccgagcgaactgaagccgctggtggaaacccagaaccagttgttccagcgcatcgcccaggccatcgaacgcgagcgacgcctgaccggcgatgccgcccacgaactgcgcagcccgctgaccgcgatcaagacccacctgcaggtcgcgcgcatgaccgagggcgccgccgccgagcaggccctggcccacgccgaggaaggcgccgaccgtctgcaccgtacgctggaccagttgttgctgctggcgcgggtggaaggcagcctgtcgttcgacgacggcgtgcagtgcagcgccgaggacgccgcccgggtggccatgcacgacgccggtcacggcgatgagcggatgttcgagctgaggctggccgacggcttgtccgaggcgccgctggaagtcccctcggtgctggccatcgccgcgctgcgcaacctgctggacaacgccctgcgccacaccgccgccggcacccgggtggagctggcggtggaaaccgagcaaggctgcgcgcgcttccacgtccgcgaccacggcccgggcatcgccgaagccgacctgccgcacctcacccggcgcttctggcgccacggcaagagcggcggcagcgggctcggcctggccatcgtccaggccatcgtgcaacgctgccaatgccggctggacttcgacagccgcgcggacggcctgcgggtgacgctggaaatgccgctgcgcgagtga

SEQ ID NO: 364147 - DNA, 876 bp, Pseudomonas aeruginosa
atgaacatgccgtcgatcctttccctggccgtcgttggcctgctgatcgctcccgtccaagcggcaacggcgcccttggatccgttccagccgccggcggaaagcagcctcccggacaacgccttcggcgaaatggtccgccagggccaggcgctgttcgtggaaacccggaagaacgcgccgcatctggtcggcaaccagctcaactgcgtcaactgccatctcgaacagggccgccgggccaactccgcgccgcagtgggcggcctacccggtctatccggcgttccgcgccaagaacaacaaggtcaatacgttcgccgagcgcctgcagggctgtttccagttcagcatgaacggcaaggtgccggcggccgacagcccggagatcaaggccctgaccgtctacgcctattggctggcgagccaggcgccgaccggggtcagcctgcccggacgcggctatccggacgtggccccgccggaaggcggctacagcatcgagcgcggcgccaaggtctatgccgcgcagtgcgcgatctgtcacggcgccgacggccagggccagatggctctggggcaggcggtgttcccgccgctgtggggcgcgcagtcgttcaactggggcgcgggcatgcaccgcatcaacaccgcggcttccttcatcaagtacaacatgccgttgggcaagcccggtaccctcagcgaccgcgacgcctgggacgtcgccgccttcatgaacagccacgagcgcccgcaggacccgcgcctggtggacggttcggtggagaagacgcggcagaagttccatgccaacgacggcgtcaacctgtatgggcagaaggtcaacggcgtgctgctgggacagggaatctga

SEQ ID NO: 364148 - DNA, 654 bp, Pseudomonas aeruginosa
atgccggttgcacaccgactgctgttttcattgaccgccttgctggcggcgacggcccaggccgccgtcgatggccagaaactctacacccagggcggcgccaacccggccgccgcggcctgcgtcacctgccacggcgccgatggcatgggcctggccgccgccggctttccgcgcctggcgggccttcccgccgcctacctgagcaagcaactgcacgacctcaagcagggcggcagtcgcgagcacccggtgatgaagggcatagccgatgcacttggcgacgacgagatccaggcgctcgccactaccctcgcggcaatgccggcgcccaagccggtggcgctgtcgcgcgtggccaccccgcgcagccccggcgagaccctggcggtgcgtggcgcctgggagcgcaacattcccgagtgcgtgacctgtcacggtccggccggcagcggcgtgggggaggccttcccgccgttgcaggggcagggcgagatgtacctgagcaaccagttgcgcgcctggcagcttggcactcgccgcaacgacccgaacgatctgatgggacatatcgccaaatccctcagcgaagaggagatccgcagcgtcagccagttcttcgccaccctcggtcaggcaggaggccagccatga

SEQ ID NO: 364149 - DNA, 1002 bp, Pseudomonas aeruginosa
atgacaacgcttgctgatattcccctgtccatgctcgacctggtgccggtgcgcaccggcggcagcgtggccgaagccctgcacaattccctggacctggcgcgccatgtggagcgcctgggcttcaaccgtttctggctggccgagcaccacaacatggatggcatcgccagctccgccaccgcgctgctgatcggccatatcgccggcggtacctcgcggatccgcgtcggctcgggtggggtgatgctgccgaaccatgcgccgttggtggtggcggaaaacttcggcaccctggagacgctctacccgggccgcatcgacctcggccttggccgcgcccccggcgccgaccaggcgaccatgcgcgccttgcgtcgcgaccgcctgggcaacggcgacgacttccccgagcaggtcgccgagctggaaatgctgctcggcccgcgccgttcccagcagagcctgctggcggtgccgggcgagggtacccaggtgccgatctggctactcggttcgagcctgttcagcgctcacctggcggcgcagaaaggcttgccctatgccttcgcttcgcatttcgcaccgcgttacctgcacgaggcgctgcgcatctaccgcagcaacttccagccctcggcggtactcgacaaaccctacgcgatgatcggcgtgccgctgatcgccgcacctaccgacgaagaggccgagttcctcgccactaccgccttccagcgcgtgctggcgctgatccgcggcgagagcctgaaacagaagcccccggtggaaagcatggcgccgttgtggctgccccacgagcaggacgcggtcggcagcttcttcggcctggcggtgatcggcggtccggagaaggttcgcgcgcgcctggagatcctcctggagcagaccggcgccgacgagcttatcttcaccagcgacttctacgagcacgcccatcggctacgctcttgcgaaatcgtcgcggggctgaaaggggcgtga

SEQ ID NO: 364150 - DNA, 615 bp, Pseudomonas aeruginosa
atggccaagcgtggacgcccctgcggcttcgatcgtgaacaggcattgcgccgggcgctcgacgtgttctgggaggccggttacgaaggcgcgaccatggccgcgctgaaggaggccatgggtggcatctgcgcgccgagcatgtatgccgcctatggttccaaggaggcgctgttccgttcggcggtggaactctacctgagccaggaatgccagctttccaagggcgccttcgccctgccgacggcgcgcgagtcgatcgccgcgctgctggaaagcgccgctgtcagctacaccacggaaggcaagccgcgcggttgcctggtcgacctcagcacgaccaatttctcgccggccaacaaaggcgtcgaagactatctgcgcgatcaccggcggcgcgccgcgcgcctgctgcgcgagcgtttcgcacgaggcgtggccgacggcgacgtgccggccggagccgatctcgacgcgctcaccagtttctacagcagcgtgctccagggcctgtcgatccaggcccgcgacggcgccagccgccagcagttgctggccatcggccgctgcgcgatggcggcctgggattccctgctggcggtcgaggccgcctga

SEQ ID NO: 364151 - DNA, 195 bp, Pseudomonas aeruginosa; identical to SEQ ID NO: 323597

SEQ ID NO: 364152 - DNA, 273 bp, Pseudomonas aeruginosa
atgaaagccgaagacatccttcccgaccgacaggaccgcatccgcctgggcggcgtggagatacgcaagggcagcgtcggcgcgttcatcgccaacgcccggttgctgcttgaggaggaactgcccgcggcgcaacggcggcaggctgaagaagacctgcgcgccctgctgccggcgatccgggcactggggctgctggaactcttcgaactgcgcgacgcgcgactgcggacgctggtggcggattgggaaaacgccgctggccgctcctga

SEQ ID NO: 364153 - DNA, 765 bp, Pseudomonas aeruginosa
atgcttccggaccccctgcccgtcccgctcttcgccctgcgcatcgaccgcgcagccagccgcacggcctcccaccgccatgcctgcggccagctctactgcctggagcgcggccttctggtggtcgaggacgagcatggccgccaggccctgcctccgcgccagatcgcctggatcccaccgggtcacccacactcggcgcactcccacggcagcctggcgggctggagcgcctacctcgccgccgaacactgccgcgacctgccccggcaccccggcgtgctcgcctgctcggctttcgtggcgctgatcgtcgaacgcgccacccgctggccgaccggctccgcctggaacaccgaacgcgagaacctgctgcgcgtgctgctggacgaactgcgccacgccgtgccccagcggacccgcctgccctatccgggggattcgcgcctgcgcaggatcgccgaggcattgctggccacccccggcgatccgcggccggcggccgaatgggcgcgctgggcgggcctcagcagccgtagcctgagccggctgttcggcgccgagaccggcatgagcttcgcgcaatggcggcaactggcgcgactgcacgcggccgtcgaacggctggcagcgggccaggcggtcggcgaggtcgcctggtcgctcggctacgaaagcccgagcagcttcgccagtgccttccgcgcagtattcggcgagacgccgtccggctattccagtcgcgccaacgaagcgctagcctga

SEQ ID NO: 364154 - DNA, 816 bp, Pseudomonas aeruginosa
atgagccacgccaatacgccccgcgactgggttcgacgcgccccgcaacacggtgcggtggaacgcatcgaggcttacttcgccggccacggctacgatccgcatcgccacgacacctatgccatcggccagaccctggccggggtgcagagcttccgctatcgccgcagccagcgccacagcctgccgggcggctgcctggtgctgcatcccgacgagctgcacgacggcgaggccggcagccaggaagggttccgctaccggatgctctacgtcgagccggcgctgatccagcaggccctcggcggccggccgctgccgttcgtgcgcgggggcttgtccgacgacccgcgcctgatcgccgccagccgggccctgctacaggccatggataccccgctggagccgctggaagaacaggacgccctgttcgaactggcccacgccctcgacgccgtggccggcaaccgggcgcgcggcaggcgccacttcgacttcgtcgccgccgagcgcgcccgacagtacatccacgcgcacctggagcgcccgctgagcctcgacgaactggcgcaggtcgcccagcgcgaacgctggagcctgtcgcgcgatttccgcgcgctgttcggcaccagcccctaccgctacctgatccagcgccggctggacatcgcccgccggctgatgctcggcggccagacgctggccgaagccgcgcttgccgccggtttcgccgaccagagccacatgacccgccatttcggccagagctacggcctgccgccggcacgctggctgcgtatgctcggccgcgcctag

SEQ ID NO: 364155 - DNA, 375 bp, Pseudomonas aeruginosa
atgtccaccagcacaacccaagcgatcaacttcgccgccaagctcgccctgttcgacgaccgctggcaacccagggtgatcgcccagatgaacgactaccagttcaagctggtgaagatcgaaggcgacttcgtctggcacagccacgccgacaccgacgagaccttcatcgtcctctccggtcgcctgcgcatcgatttccgcgacggcgcggtgcacctgggccccggcgagatgtatgtggtgccgcgcggcgtggagcacaagccgttcgccgagggcgaggtgcgcatgctcctggtggagccctgcggcgtgcgcaacaccggcgaccagggcggcgagcggacggccgtcaacgatctgtggatctga

SEQ ID NO: 364156 - DNA, 375 bp, Pseudomonas aeruginosa
atggcctcctgggagccgatcacgctgcgctcctccagcacgtggccgaagatcatgatgatcggcagcagcgcggcggtcagcaggtcgccgctggcccaggcgccgagcatggccagcgcgatcaactggtcggtgacgccgtgcaggctcggatgccgcaggctgtcccaggccgagcgggccaccggcagcgccaccagcagcgacgcgacgccgagcaggatctggctgaccccggcctggtccgccgccagccagcgccaggccaggcctagcagcaacaggccaagggcgagcatcgccaggctcagctggcgggcggcgcggcgctgctcgtcgcggctgagcaggccgccgccgaacggcaggtga

SEQ ID NO: 364157 - DNA, 717 bp, Pseudomonas aeruginosa
atgggtggaggccgtgccgcatctggcctacgaggaacggcaggcgttccagaacgccccgcgccatcgccgcgagccgaccacccgcgaagcccgccgcatcgcctcgctggaaacccgcctcgaaaagatcgacgccgaactggaagaagcctgcgacgccgaggacaaggccaaggccgagaagctggaacagcggcgcgatcaggtggtcggggaactgcaagacgcggaggatgccttgcagggctatgcccccgaggtgcgcgaggtggccggtgccatcgtcaccatcgaccgcaacggcgaggccgtcattcatcgcggcctgctgcgcgaagccgaggccaaggcgctgcgcacgctggaaaagctgcggcgcggtttcggcagtgccgaaggcgaagccgccaacgacgagcacgaggacgccgacgacgcgcccaaggccgcgagcctgtccgaccggctggcgcagcggttgagcgcccaccgcacggcggcgctgcaaatcgaagttgcacggcatccgcatgtcgcgctggccgcgctggtgcatggcatggtgcagaaggttttgcaggacagctaccacggccacgacctgccgctgggcgtgcgcctcacggcgcaagaccgactggaaggcatggccccggactggccggaatcgcccgctgccgtggcgctgcgcgaactgcaacaggtggccggtga

SEQ ID NO: 364158 - DNA, 399 bp, Pseudomonas aeruginosa
atgaacaaaggtgtaatgcgccccggccatgtgcagctgcgtgtactggacatgagcaaggccttggaacactacgtcgagttgctgggcctaatcgagatggaccgtgacgatcagggccgtgtctatctcaaggcttggaccgaagtggacaagttttccctggtgctgcgtgaagcggatgagccgggcatggatttcatgggtttcaaggtgatcgatgatgagtgcctggtccgtctgacccaggacctgatcgactacggctgcctgatcgagaccattcccgccggagaactcaggggctgtggccgtcgcgtgcgcttccaggcatcctccgggcatcacttcgagttgtatgcggggttgggggagcaacggaacagaaagtgcacttaa

SEQ ID NO: 364159 - DNA, 357 bp, Pseudomonas aeruginosa
atgtttagtgtatctgggatgaatatgaacagcgccggctacgaggtgtgcgaagtgctaagcggccagtcattccgctgtgcggagggccagtcggtgctgcgcgccatggaagcccagggcaagcgctgcataccggtgggctgtcgcggcggcggttgcggcctttgtagagtgcgggtgctcagcggagcctaccggagcggacgcatgagccgcggtcacgtgccggccaaggctgccgccgaaggcctggccctggcctgtcaagtgtttccgcaaaccgacttgaccatcgagtactttcgccacgttggcggaaacaaacctgacaacagagaaaaggtgacgtcatga

SEQ ID NO: 364160 - DNA, 1344 bp, Pseudomonas aeruginosa
atggacgatcttacgctaccctttcccgggctgtcacctgtttctggcaagcggttggatgtcagatttgacggcggcatgctgtcatctgatggcgggattttgctgttgcgcgaggtcgagcagcgccttggcgtggccgatcgtctggcggcctgtatcaaggatccgcgctcgcccgagcacatcacgcatagccttgccgacatcatcgggttccggttgatgatgatcgctgcaggctatgaggatggcaatgatgcatccagcctgcgcgtcgatccgatgttcaagatggcgctcgatctgacaccctctgggacccgcgcgctgtgttcgcagccgaccatctcccgtctggagaacctgcccgatacccgggcgttgttgcgcatggggcgtgcgatggtcgatctgtattgcgaaagcttccccacagtgcccaagcgcattgtgctcgacattgatgacaccttcgacgctgtccacggcggccagcagttgcgcctgttcaatgcccatcatgacgaatacggcttccagcccattgtcgtgttcgatgaccaaggccgcttcatcaccgccgtactgcgcccggccaagcggcccaagggcacagaaatcagggctttcctgcgccgcttgatgcgcgcaatccacagccattggccaaagacacagatcctgttgcgcggcgacagccactattgctgccccgaagtcatcgactggtgccgtgcaggcgggcacgacttcatcctgggtgttgcgccgacttcgacactacgccgccatatcaccgatcttgaagccagcaccaaagcgcgctttgcggcatcacccaccgagggcaaggtacgccgcttcaagaccttcaacgattgcgccaaaagttggagccgggtcgagcggatcatcgcccgcatcgaagtcggcgatcagggcgctgacacgcgctttgtcgtcaccaatctcaagaaaggctcgccccgctggctctatgaacacgtctattgtcggcggggccaggccgaaaaccacatcaagtcgtggaaaacccatctcgccgcagatcgaacatcgtgctccagagccacagccaaccagttgcggctgttccttcatgctggcgcctattggctgatgtggggcttgcgcactgccatgccgaaacgctcgatctggcgcaccgtccagttcgataccttgcgcttgcgcctgatcaagatcgccgcccgtgttaccgagctgaagaccctgatccgcatccaatggccaacagcctgtcccaaccagcaggtcttacggatcgcccttgcccgcatccccagacttgtcacctga

SEQ ID NO: 364161 - DNA, 204 bp, Pseudomonas aeruginosa
atggcgtttatcgccgataaagaggaactcaaacccggcttgatcatcttccggcgcggtgatgtcgcgcacagccatttctactgccgcatcaagctcccgaaggcggaccgctataagaccattgcgctagcccgcataattcatccggttgagtttggcgcgctcagtttcaagcatttggcgtcgtccgagcatacctga

SEQ ID NO: 364162 - DNA, 894 bp, Pseudomonas aeruginosa
atgattgaaaccatttgtgattatacagaacttcctccggagtttgtttccgaggctattgatgccatatcttttaagcccggagatgttgggttgttgaagaggcataatgggttttttatgcccctcctctttgatatggggaatggtatgttgttgcgaccagtctctagtctgctcagaaatcctattgtctcaactttggagcttcagttcttgcgagagccgaagtatataaattcggtttcggcccctagggagagttggttcaggtctcatttgtatggagcttttatggggaacaggtatgttaggatcgatggaaatattaagcttcgaaagaatggtcggattctgacggatctggatggggttatatttgatacggtttctggggaggtggccttgtttcagctgaaatggcaagactactttactcgtgatgttagaaagttacggagtaaggcgaaaaacttggcggaggagttggactcgtggggggacgcagttcaagagtggcttcgagaaaatacaggggaggatttggtgaaaactcttcgcttaaagcttcctgcgcatatgcgtataaccaaagtattttgtttcggaatttcatgggccgcggctcgtgtagagggatatggctatacacgtagtaataataatgtggctgtatgtaattggccaatgtttcagcgtatcaggtttgggcttggaaaggttgctaatgtatttgaggccttgcactgctctatattgaaggaatgtgagtttattgactcgagaatggtgcctttcgcttgggagactccggtgggggatagtgttgtctgttttgaagacctattttttgattattctgagtgtgatgccgattcaaaagctagcgagtga

SEQ ID NO: 364163 - DNA, 399 bp, Pseudomonas aeruginosa
  misc_feature (382)..(391): n is a, c, g, or t
atggtggcggccaatccgcaagcggagacgagcatgtccctgagtgtcttcgatctgttcaagatcggcatcgggccgtccagctcccacaccgtggggccgatgcgtgccgccgcgcgcttcgccgaggggctgaggcgcgaggggttgctggaggccactgccagcgtcaaggtcgagctgtacggctcgctcggcgccaccggcaagggccacggcagcgacaaggcggtactgctcggcctggagggcgagcagccggacacggtggataccgccgcgattcccgctcggctcgatgccatccgttccagcggcgagctgcgcctgctcggcgagcggccgatccgcttcgtcgagaaggaacacctggcgctgatcnnnnnnnnnnggcgctga

SEQ ID NO: 364164 - DNA, 135 bp, Pseudomonas aeruginosa
atggcaacccccgcctatatgtccatcaccggcaccaagcagggcctgatcaccgccggcgccttcaccgaggattcggtcggcaacaccgtaagcgtccgccctgcacccactgcctgccctagccttgaatag

SEQ ID NO: 364165 - DNA, 1359 bp, Pseudomonas aeruginosa
atgccaggggaaaaactgatctgctcagcgtgcgtttcggacgatttcctaaagggaataatcgatctagaccaagtaagggatcaagcatgcgactactgcagtagcgtgcgcccaactatctccatgacatccttggccgagatgtgcgacgaagtgattgagaccttctacgaggtctcaagtctcaccgatgctgtgatccgctttggacggcctgccgaaggagatgacctgcctgatctcctagattcactgctcggcctacctagtgacgccctagacgaccttgtcgagactcttagtggcctatggttcgactacagcagccacgaacacaaatacggcgaagacccctcgttcattgagagatccagccttgagcggagcttaagccatgcatggcaactaatggaggaaagccttcgttatgaggcccggtatctcaacccaacagcagccaatcttctagaggatgttttcggggcaattctggatgacaggacgaatcaaggccacagcgtagtcgtggagctgggcacaggaagcgattacgacacactgtaccgcgctcgtgtcttccagaccctcgactccatggaaaaggcatttgagcacccccaacgtaacttcggtcctccgccccccgggttaggttcagcgggacgaatgaacgccaagggagtgccagtgttctatggagcaacgaagcctgacatcgctatttcagaggtccggccaccagctggcagccacgtggttgttgctcagtttaaggtcatccgacctctcaaggtactggaccttcggcagcttgggacgcttcgccttaaacccgagtcaagcatgttcgacccggaaaccgtggggcaggccactagaagagattttcttcgagttctaacccgcaacatcgttaagccggtagtacccgaactagaagatcatcgatatgtggtgacccaggcaattgcagatttcttggccacgcatccaaagctaaacctcgatgggatcatttttccttccgctcagcatcctgatgaaactgatcgccccggaagcaacttgatccttttcaacaaagcatcaggggttctctattcgggcgagcgctatggcaaaagaactagcatctatttgttcgagtacgatgaggacacccctgaaggtaggcttgagccttccatgttaacgaaagagccacctcctgaaagtggtcaggacatttggcattggagtgctcctgagcgatatcaaccggccctggagcttgatttagatgcaatctcgatctttgagattaaaggtgtgaaatacgattccagcgcgtatctagtcaaccactctgtcggctaa

SEQ ID NO: 364166 - DNA, 180 bp, Pseudomonas aeruginosa
atgaataagcgaaccgcgtctcaaatcacctgcatgctaggcctggctgtcgtggcgcaggtttggctgatgcctcacgtgccttaccaggtagcccaggaggtactgctgcaaggcgttatggcctgtaccgtcgccggcggtttcctgatctggcgttgcgcgccttcgttggactga

SEQ ID NO: 364167 - DNA, 999 bp, Pseudomonas aeruginosa
atggaagataccgtgcaggtgatggcctctggccgaaaaatagaccgcatcacgcggcctttgcattcgtccgggagcacgccgaccatcatctacagaagaagaatctggcccgttatggacagctgcattcatatagacgggacgagcgagccccctgtgacatcggaggcctctcaccccgatgcctggatgcaactggtagcgcgattgctccctcatcctctgccgacagatcaaggagaatgtgccgagcaactgcgtgccgatttcagagatcaccttcccgatagcactatccgcgcgatctctctcctcgtttcactaggacatgaagctgaagcccgtgaactgctcgtggactttctagagcagattcgtcccccagaacgcgtaaaacggctggtggagcttctcttgctgttccgaaggagcgccccacccgcccctaccacaggctctgacctgccggcaatgaacaataccgaaaggccaaccgcctccccagaaccagagctcgatgggagtgagctgcttacgctaacttggttgccagaaccggaaagtcagatcccgtcgattgacgacactcccctgagaagcgaagcaaggaccacccaagaaggaattggagctcatgtcatacaggagagcggtctggtcatcgagggtcttaacgaaatgccggacgagcaggactggaagattaccgctccaatcgacgagccatcgaaacgaccagccggcgaagaagaccatatactgctacagagaaccttggacctcggcagtacggccttggatgtcctcagatatttcgcaaacaatcctggggacagggccctccacgccgagcaggtgctgggatattccctgcctgtcgtcaacagcctactcagtgggaagttgagccattacgtgcagagaagcacctcgggaggctgggcctgccagagctgggtaccgaatattctcgctgttctggacagcgaatcttga

SEQ ID NO: 364168 - DNA, 2835 bp, Pseudomonas aeruginosa
atgtccgaggaaaacaagtggagtgtgatcaagttcgtccaggaattgttgctggccgagcaggacaagtcggtcatcacccctgcactaatctcccagaagatcgacatggtcttgaccatgatgcccgcctgggccaaggatcttgatcggaacgcaatcatcgaggagctcatccggcgattcagcatatgggtaggagatgaggcatcactagtcaacatggaaggacacatcccgtggctgaccagcgaacgcaagcaggattggcgatactggcggcgttatcgcgagctgcaggaaaaaaaacttccatggaaagccgttgaggctctcgacaggactactgacagcaccctatcgatgcttgaagatcctcttcgagaaggtacctgggacaggcgtggcatggttgtcggacacgtacagtcaggcaagacggccaactatacaggcctgatctgcaaggctgccgatgccggctacaaaatcattattgtactggcagggctccacaacaaccttcgatcacagacccagatgcgattggacgaaggctttctcggctatgagaccagcgctgtgacgggaaaaggtcagcgcccgataggtgtaggactgatcgatggttcacacgacctgcgcccccaatacgtgacaaacaggacggaaaccggcgacttcaacattcgatttgtcagaaacctgggaatctccccggaaagtaagccctggctgttcgtcgtcaagaagaacaaggcagttttggccaggctgctgagctggattcacaggcacgtagccaataccgctgatccggataccggtcgcaagctggttacccacctccctctactggtcattgacgatgaggcggaccacgcgtcggtagatacaggcgaagaggtggtcaatgtcgaaggaaaacccgacctcgaacacgagcccaccgccatcaatggcctgattcgccggatcctgcactcgttctcgagaaaggcctacgtgggctataccgccacaccatttgccaacatctatatccacgagagaggtgaaaccactcgggaaggcccagatctgttcccggcggccttcatcaccaacctggccgccccatccaactacattgggccgtcaagggtcttcgggctggagggggaaaatgggcgagtcggcgatctggacctcgtcagagtagtgtctgaccattgctcggaggatggcaaaaaaggctggatgcccgctggccacaagagcacctatgcccctacggaggaaatgccagactccctgctcgaggctatccgtgcctttgtactggcctgcaccattcgacaattacggggacatggcgcagagcacagctcgatgcttgttcacgttacacggttcaacctagtgcaacagcatgtccaccgacaggtcgaggattacgtccttcatctcaagcactcccttacgttccgtatcaaccatgagagcactctcgacgagttgcggcgcctttgggataacgatttcctggctaccagccaacgagtggcagagcaaacagctgatgacaattatcgggcctcatttaactggggagatatcgaggctctgctacctgaggtgcttgatcagatcgatgtaaggatgatcaacggcactgccaaggacgctctggactatgcggacagcgcaaccggactgaaggtgattgctatcggtggtgacaagctcgcacgggggctgacccttgagggactatgcgtcagctacttcctgcgcgcctccaagatgtatgacactctgatgcagatggggcgttggttcggctaccgcccgggatatctggatctgtgccgcctgtacactacggaggatcttgtcgagtggttcgagcacataaccgatgctgccgaagagctgagagccgagttcgactacatgattgatagcggccttacaccccgcgactatggtctcaaggtcagatcccatccggtgctcatggtcacgtcaccactgaagatgagggcagccagaactctatatctttcctttagtggcgaagtcgtcgagacggtcagcttctatagggatgaggacaacgtcgagtccaacctcaaggtcttcagagagcttgttcaggccattggaactccatcttcaattccaccacagcagcgcagtggccggaaggacagttggaatggagcttactggaacggagtttctgcccaacctgtcatcgagttccttaggggttaccagacccatccggattccaggaaggttcgcggcagcatgctggcggactttatcgagaccatgaatcggtccggggagctcaactcatggaccgtagcagtcgtcggcggtggagtcgcgacccgaacggaagatgtttccggtacctcggttcaacgcatgaagcggaagaacaagtcgtcggatagcgatgacaagtacgcaatcggtcgtctgctgtctcccccggatgaggcactggacctggatgaagccgcatggagtgcggcactcgagctgactcggcgggcctggaaacccgatccggcacgcgctcgtaaccaggagcttcccgacgttcccagcggtcatttcattcgacgtgttcggggactgggagccgatggcatagcaccccatcccgaacgaggcctgctgctgatttaccttctggatccggaagcttctgaactcaaggaagtccggggtccggtcgtcgcctttgcgatcagcttccccgccagtaacacaaccaaatcggtgccctacatggctaccaatattctctgggagcagcagtatggcggcagtgagtaa

SEQ ID NO: 364169 - DNA, 1014 bp, Pseudomonas aeruginosa
atggcggcagtgagtaacaccgagatactcagtgcctggagggctcttgccggcaatctgggcacacccggctggcgatccatagacctgcttcaggccggcacctgcagggtaaagctggccaggcactcgcctggtaacgaggaagccattctggtcgggttttccagtgcccgactcgcccctgcgtcacagctgccacagggacaggggtttcgcatggagcgggcctcgcttggcgaagcgggagcgcctcaacagtggctggcacttgttagacagcccgctggcagccttgagctgttcgccgccgtagtcgcggatgtggcagcaatgctgaacactccgggagaaccgccggaagagctgctgtatcagcgactgctgggcagggtccgcggttggcaggagttcatgcgcaggggacgggatggcctcgggaaggaggccgagcaggggttggcaggagagctgtgttttcttcgggaactgatgaatgctggggtactgcagtattcagctgtcaatggatggaaaggccctctcgacggacttcacgatttcctgctcggatcgggtgccgtagaagtgaaatctacactggctacggaaggctttcccgtccgtatagcctcactggaccaacttgacgactcccaggccgcgcccctgtatctggcggcgttgcggctggaaacagacaacgcgggcctgactctgcccgaacatgttgtcgatattcgaaagcacctttccgttgatcctgcagccctggcactttttgaaagtgtcctgcatgaggcgggatatctggacatgcatgcggagtcctataaccggcgcttttccgtcagagagcttgcgcttctattggtggactctgagttccccaggttgatcccctgcaatgtgccagcagaagtccggtgggcacaatacgaactagacctttcattgctgacggccaacagtcctcagctgacagaggttcttcagaaacttggagccgtttga

SEQ ID NO: 364170 - DNA, 1809 bp, Pseudomonas aeruginosa
atggagctggtcgactttctgcgagaaacgcaggatgcaatacgggaagagctcggcaaggacattgcaccgggcaagatccctgtttctgcggaggaacttttcactgaacaggtgatgaaccacatggcagaacagggaatcacctttgataccaacgtctgccactacgaggccagggttagtacctttaaggtaaagatcagtggttactcggtttccgacactacggacgaaaatggattcccggatcgactggatctattcgtcagcctgtacagggggctggatgaaatcgagtcgctcccagatcaggaaataggtcgcgctgccactcaaggcttgcagttcctgaagctctgcgccagaaatcagctttccaagaagctcgatgaaaccaacaacgtattcgcccttgccacagaggtcgagcgtattttcggcaatctggacagtatcagggtcttcgtgattaccgacgccaaggtcaagactagggattacgcccctcaggacgtagaagggaaacaggttcgggtcgaggtcatggacatccagagactgttcaaccactggcagcagggacgtccacgcgacgaggtggtggtcaacttccaggacctctgtggctcggctctgccaagcgtttgggttccaggatcagatgatgaggaatatgactatgccctgacagctgtgcccggaaatgtcctgcgcgtactgtacgaaaaatacggtccccgcatactggaggccaacgtccggtcgttccttggggtaagcagcaaaggtgtgaacaaggggattcgcgataccctacgcgacgcacccgagcgcttcatggcctacaacaacggcatcgtggtcgtagccgatgcagcaaggcttgaccgtaccaaagatggatccctcggcatcctgtggctgcagggcatgcagatcgtcaatgggggccagacaacagcatccctgtactttgccaagaaaaagcaaccggacatcaatctggagaatgtccgggttccagcaaagatcatcgtgctgaaaagcgataacgccgatgccgaggagctgatctcgaatatttcccgctatgcaaacagccagaatgtcgtcaagcagtccgacctatctgcaaacaagccattccaccgcgaactcgaaaagctgtcgatgcgaaccttctgcccggacggggtcggccgatggttctacgagcgctctgccggcagctacaaggtaatgctggaaaaggatgcagctacaacgtcccagaagaaaaaactgcaatcggatattccgagttcacgcaagctgaccaaacccgacctagcaaaattcctgtttgcttggggccagaaaccttatctggtgagtctcgggagccagaaaaatttccaggccttcatggacgagctggcagcgcgggaagaggcgggagagaatgtggctccgaatgccgatcagtacagggaaatggtcgccaaggccataatcttcaaatccgcacatcggatcatccgtcctcttttcgctgccttccaggcaaacatcactgcctatactgtctctgtcttggctcttcagctgggtgacagattcagtttcgagaaggtttggcaggagcagacaatatcaccgcagttacaaaaacagatagctgtgtgggcacatgaggtgaatgctgtactagacgaaggggccaacgggagaatgatctccgaatgggcaaagaaacccgaatgctggcagaaggtgagaaatcatcgctactccgccaacctgccggacatcccggaaatcgcctga

SEQ ID NO: 364171 - DNA, 1047 bp, Pseudomonas aeruginosa
atgtttcgagtcagagcagttcaagttgaacatggtgattctttactgatcacatacggcatcaataataggatgtatcatctgcttgttgatggcggcccgtcaggatcattgcctatcttgctgtccgtgctgaagcaagagtgtgtaggtggtcgccttcggcttgagacattggtggtgactcactatgacctcgatcatatccaaggtgtgattgatctgctaaatgacctccccccgtggctggatattggtgatatatggtttaacggctatcatcatcttccgtctttggatattttgggggccagtgagggcgatactttatctaggctgattcgccgacacgggattccatggaatgcgagttttcggaagcaaggaaatgacaaggacggcggtgccattgttcaagatgctaatgctgtttctttgcccggggggcttgaggtaaggatattgtcaccagacatggatggattgatagctttggcgagaaactggagtaatgctgggtcgcctccacttgactcggaactcgcccccggtgacttacttgggcgcagcgacatatggccgccgaaagagttttcttcaagccggacctatagcttccagtccgatacatcaatatcgaacaaaagcagtattgcgttacttctcacgttcgataacaagcgtgcgctgctcgcggcagatgcattctctgatgtgatcacgagggggcttgcaatacacctgccgcgtaaagatccgattgacctactgaaggtctcacaccatggtagcaaaggcaatacagacaagttattgctggaaacaatcggatgtaaacggtttcttatcagcacaagtggaaagatccacaaacatccggatcatgctttgatagaacggctggtcgcaggctatgattgccctgaaatatttttcaattatgaagatggttggcccggaaactggaagaataggcctgaaaaatggccgccctacaatgctcggtaccccgggagtggtgataaattcgtagatgtttttatctag

SEQ ID NO: 364172 - DNA, 2643 bp, Pseudomonas aeruginosa
atggataagagtcaaagagacattcagtggctgggcgatgaggatgctcacctcgctccggcagcgcgcggagcgttaggcattctactagaaagcaatgactggtcatggtgggatgatccatctaaagcacagacctctttggcgaaagccgtgccgcctcatacacctgcaaggtggggtggggattcaagtgcgatggatgcggatcagtgggttgatccgctgcgagcgatcatgctcggtcgagcttttaacgcgttgaatagacaagatcctctgagagtcaaagtatctagatcggtctgggggtggccggggggagccgatacggttggtgcggccgtccttgagttgtctcaactggtaggcccgggacatgtgtttcctgaatgggaaagaaatacaaaaccacgctttcctgtagtccctagattgcaggaggggcagtgtgtggtgacgagtccaaaccggtcactcagagaactaattggtgatacccaagagtatattgaatggagtccccactctcgaattgccgacatcgtagtcgcctcctctgtggaggcactctatacaaccacggctgcgagagtggtgatcctctataatcagcgtgttgggactgcacttgcccacgtcagtcgccttcggggggcgctgtctgctcaatgcgtagtatatgtggcggctgacgaaagtaatattgtgaattggctaaaaatggtgctccgttcatgggctggagaaaggacatcattcgccgatgctgtcgaaactgcagcgagctcattgggcttgcatacgcagattctttcgtctacgcaatctttcctgctaggaagaaattcgttctttagcttgcatactacgatagagcgccaagtcacagatccaatctatgagcgcgtgagaaagaaccatcagcctgacagaaccacccagcgagtcattgacttatcattgccagactctgcatccctcagccagattgacgccagcatctataagtcaggtctcgagccaccctaccaggattttagcttggcatcgagagttgagcgccctatcgtggtgcgcccatctccacccgttgagagggtattgaacgcacgggttcggcaagggcagcaggaacttcaaaagtggccaagggaaggtgtcgtatacattgatgtcgatattcgggtgaggacgccgttgcgagatagccgccccgcgtttccggatagtcgaatcgagtggcagggggaaagtaaggtccttcaggtacacctgttcgagtttgggcgtgaacctgctagccaagcgttcaagctgccaagaacaggtgggtcggagattgttacattctctcgtgacgtcggccgtaggcgagttgatcttcgctttctcgtgagcgacggcgcccagattcttcaaactgctcggctccagtctgcgcctgatgagcctatccggttcttcattgaaaatctcattacaccggtgcatcgtacaaaggaaccctttgacgtcgcactattggtaaatgatagtctcggaaacaagccgagcgtgaccattattaccgagggtggtgaagcagtcttttcaccactgtctgatcatgagacagcaatagcgcgcaatagtttacttaatactctccaagaagctgtcgtcaatccaaatgctccgctagagcctttgatgcttaagctggctaaccgtggagcactgctcctcaatagcttgagatccatcgaaccgacttggccaagcagtctaaatcgtgtccaactggtgacgcaaagcgatgcgttcttcccgatcgagtacctctacgagggaacggtgcctgagtcaactgatgcagtgctatgcacacagcgcgcagaatgcttgaaaaaaggacaagcgattcctggctgcggtattcgggcagccggcgaacagctttgtccgatggggttcctgggcatctctggtgtagttgagcggcacgcatggaaaacggggcagaatgctcgtgtgtgggccgcgccgagagggggcaagccaaaacgacatcgagttgaagatttgtcgacgattgcgtttgccgccagcgacaaagccgataacttcgcggacgccgatgttgcacctcacgaaattgtgcgaatcacaaacattgaaacttccttgggcgtgagaaaaatctctgattggccaagctggaaagctaggcttgcggaggaatctccatcgctattactgttgctggttcatttggaagacgatgctgtgtttgttggtactggttcaggtcttaacctagcagctatcaacgaaaagcatgttggaaatgcgcctgtggtcattgccattgggtgttcctccgggtacggagaaattcctggaggtagtttgcctgccgtccttcagagaagtggtgctcgtgtggtcgtggctgcaatgaccagtgtacttggccgccatgccaatcgcgtagctcgtgatatggcaatgcgtctgaatgaggctgcaaaggcacgcggctcggtctctatcggagagatcattagcaggttacggcgtcgactactggctgacggcctcgcgctaggactggcagtggtcgcgtttggtgacgctgatatagtgctcggtaaagaatga

SEQ ID NO: 364173 - DNA, 447 bp, Pseudomonas aeruginosa
atggacaagcccttctccctgtgtgtccccctgcatctcgtggaacggattacttactactccttggagctccgccctgaacgatgcccgtcctgggatctccactatgcgtttgagcaccatgaagtgacattgagcccggccctgcgtgcttgcgactggcgaaacggtaaggcagtgatgctgctggataagcatctggtcgaagagttagccagctacgccgagcccatcatgcagcgtcggtacgggccagccactgaagtgcacgttgtgagagtcgagtgccccaagaacgccgtaaagcaaacggtgttcgatactcaccacgacaaggtggtcgctctgcttcagaaactcgaagcgggaaaggctgtacggtcagttaccagcaaggtactcgatctaccgaaagcagagctcatccagtttccgtctctctcctga

SEQ ID NO: 364174 - DNA, 495 bp, Pseudomonas aeruginosa
atgacgcagcccgtgatgccagacgacgaagccatggactacctgcctacacaggcaatcgcagattttctcgccaccggaagcgaacttgagctggatgggatactgtttccttcggttcaagcagaaagccgcggcaagaacgtggtgctcttccacaaagcggccctggtgcgggaccgagaattgccagcgggcacgaagattgaggtgaagaccttccaatttacagaagagggccgggagccggacttcacggtctgggagacgatccctcaatccgagccagaaatcgatctgcaacatcagttcagcagcgaaatgatgatcgacctcgacctcgacctcgacctcgacctgcagactcggcagccaaccctgaaactggacatcgattcactccgagtccacgcgatcaaacgcgtccagttccgaacagaatcgctaccagtccatcgctaccggattgagccagagtctgatcgcaagttctga

SEQ ID NO: 364175 - DNA, 228 bp, Pseudomonas aeruginosa
atggaggagcacttcgaacgcacccctgaagacggcggatggagcacctacggcccagactgcgagcgcgaaggcgaaccggtcgtctacgtcatttcagagctggctggtatcgatgaagaccccgcggaggacatccaggattatctggaaggcaagcattccgtctatgacaaggaccacttcggagaagagtgcgaatttcactcggatagccactaccggtag

SEQ ID NO: 364176 - DNA, 1734 bp, Pseudomonas aeruginosa
atggttcggattcgtaaaatcgagattcagaatttcaggtccatacggtcgctcacctggcttccgtcgctaggtctgaactgcctgattggtcctggcgacagcggaaagagcaccatcttggatgccatcgatctctgccttggggcccgccggaacatcacgctcggggacaccgatttttttggcctcgacgtgagccagcctatccagatcacgctgacgcttgggcagctaccagacgcgctgaaaaacctagatgtctacggtcagtacttgcaggcgttcgatagcgcgaccggacaactgcaggatgaaccactgcatgggctcgaaaccgtactgtcgctacgcctgacagtggatagcgagctcgagccagcctggacgttggtgtcccagcgcgcccaggccttgggccaagagcgcaacatcgcctggaaagatcgactcttgttggcgccggcacgattgggcacctacgccaactccaatctgtcgtggacccgtggatctgtactcaaccggcttacggaagaacgacccaacctaggtgccgagcttgctaacgcctctcgtgaggctcgtgccacgttcggaaaccaggccggcgttcagcttgctgaaacactacgaatcgtgacccagcaggcaactagcttgggcgttcctgttggagcgcaggcacaggccttattggatgcacacgctgtctccatcagcgacggcgccatcgccttgcacgatgagcggggagtgccactgcgttcgctaggcactggttcttcccgactattggtagccgggctacagcgagcagctgcacagcgcgcctcaatcgctctggtggatgaagtcgaatatgggctcgagccgcacagactagtccgactggtcgactcgctgggtgccaaggagactccgccaccgctgcaagcgttcctgacaacccactcaccggttgcagtcagagagcttcgaggcgaccaaattttcgtggtacgaaaagcgcaagacggtactcaccatgtccttgaggtgggcgtcgaagacgatgtgcagagcactatcagactggatccggaagcgtttctcgcgcgcagcgtcatcgtttgcgaaggggccagtgaggttggactcatccggggcttggaccagtattggacggcacagaattgccgctcactcctcgctgcagggaccgcctacgtaaacgtcgggggaggcgaaccggaccgatgctttgttcgaggccttgctctgcttaagctggggtatcgcgtcatggtacttatcgatgcagacaagccgccgacacctgaagtcgttgaagcctatcgtgcagccggaggagagttcattacgtggagggcagggcgagctctggaggatgaattgttcctcagcctgccagatgcagcagtggacgccatgatccagtgcgccgtggagtttctcgatctagaactggtggccgctcatatcaacacgcaatctcagggacgcattaccctcgacggcatactgcagttacgtcaacagcagcagccgcactctccggaagtgcgtttgctgttggccctgacgtcccggtaccgaaagaacggatggtacaagtcgctcaccaagttcgagatacttgcacgggagattgtcggccccaattaccaggcaacggaagctggttttactgccttaatccaccaactgttcgggtgggcccatgccgcctga

SEQ ID NO: 364177 - DNA, 1419 bp, Pseudomonas aeruginosa
atgccgcctgagtacgatttgctcgacgtccgccgcggaaccgtgactgcgccagccggctgcggcaagacgcaactcatcgcagatacactgacccagcatacaggcgctaagcctgttctcatcctgacccacacgaatgcgggtgtggccgcgctacgtctgcgcatgcaacgggccaacgtcccagcgcctgcgtatcgcgtggcgacactcgacggatttgccatgcgcctggttggcacgttcccagaacgcagcggcatacccgccgccactctagagttgagaaacccgggcattgactaccctgcgatccgcttggcagccttcaccttggtacaagcggggcatgtgagcgaaaccctggcggcgacttatgcgcacctacttgtcgacgagtaccaggactgcaacttggtgcagcacgccctggtcaccgcgctcgctgcagtgttacctacctgcgtgctgggtgaccccatgcaggcaatcttcggctttgccggcaaccaactggtggactggaacgcccatgtgctccagcagttcccgctcatcggtgagctgaatcaaccatggcgttggataaacgcaggtacccgcgggtttggggagtggcttctagactgccgacgagtactgcaagcaggcggcagcatagatctgcgccaggcgcctgctgaggtcaactgggttcagctgctacccgccacagccgaccgtcagcgcatggaggcagcactcacaaggtccgtaacaccgggggggcaagtcctagtgataggcgacagccgcaacgttcgagggcgtagacagatggccagccagactcctggtgctactgccgtcgaacccgtggatctagcggacctcacgaattttggtctgacttttagtttgcaggcagcggacgcagctacgcgcctcgtcaattttgccgcggaaacgatgacacaagtcggcgctgctgcaatattgccacgcatggacactctgcgacgaggtactgctcgcacgccgcctactcccgcagaagctgctttggtggcattcgcggcgactccaacctatccgctggccgcggaagcgcttcgagcattgacgcgccaagcgcatgcacgcgtgtaccggcccgaggtgctgtatggctgtctccgggccatggagaatgcagccggaggtggttgtacctttgtggaagccacggtccgagagcgcgaacgcaatcgccatgagagtcgacagttggctcgacgcgcaattggcagcacgctgctcttgaaaggactggaggcagaggttgcggttatctccaaccctgaaaacatggacgctcgccatctctacgtggctatgacgcgaggctccgcgcgattggtcgtgtgctctgctacgccgcagctcgccccgcgatag

SEQ ID NO: 364178 - DNA, 216 bp, Pseudomonas aeruginosa
atgtcctcgtttcctgctacccgtccgcgccgcctgcgccgaaacgaatccctgcgcacactcttccaggaaaccgagttccgtctcgctgacctcatcctgccaatctttgttgaagagggaatcgacgacctcgtgcccatcaccagcatgccgggcgtcaatcgtattcccgaaaaactgcttgcaagtgagatcgagcgttatgccgagtag

SEQ ID NO: 364179 - DNA, 312 bp, Pseudomonas aeruginosa
ttgccgctggaagacctggccacgctggcgggccttgcgcgcaccatcaaggccaggtcgctgggcatccacgtcaccctggtggagccgggcgccttccgcaccgagttcgccggcgacgtgaacatgcgcccggtgcggcgcatcgatgcctaccggccgatggtcgagccgttcgagacctacctcgaaacctccgccagcaagcagatgggcgacccggccaagaccgctcggcgcatgctggaagtggtggccagcgacgcgccgccagtgcgcctgatgctaggccgggacgcctactcggcataa

SEQ ID NO: 364180 - DNA, 126 bp, Pseudomonas aeruginosa
atgccagttccgagcgcttgcgaactcttcaagcgcttcggcaagaggggacacatcgacgaggggttccaagggatgcaaagcctccagatggggtttggctatcagctcgtctgtctgaaatga

SEQ ID NO: 364181 - DNA, 840 bp, Pseudomonas aeruginosa
gtgaaagcggtcagtgaaagtctcggtgtggcgcgctcgcaattgacggctcgattcaagcaacccacgaccgaaaggagcgcccgccggcgtcgaacgcgcaacgatgcagcgctggtcgaacggatccagcaggcggtcggcgaactgcccagctatggctatcgccgggtctggggtctgttgcggcggcagcatgagcagttggccctgccaccggtcaacgtgaaacgggtttaccgcgtcatgcgtgaccacgatctgttgctggaacgccggcgcaaacagccgggtgtcgcgcggcgtcatgaaggtcgtgtcgcggtggacacgagcaacacccgctggtgttcggatggcttcgagttccgctgcgaggatggcgaaaagctgcgcgtgaccttcgccctggactgctgcgaccgcgaagccatcagttgggtggccagcccacacggctacagtggcgacgatgtccgcgacgtgatgctggaggccatcgaacaacgcttcggtggcgagctgccgacgtcaccggtgcaatggctgagcgacaatggctcggcctataccgccgagcagacccgcgcttttgcccggcagatcggcctgctgcccctcaccaccccggtatgcagcccgcagagcaacggcatggcggagagcttcgtgaagaccatgaagcgcgactacatccgccacatgcccaagcccgatcgagcgacggccctgcgcaacctgaccatcgccttcgagcattacaacgaggaacatccgcacagcgccctgaactaccgctcacctcgggaattcagacgcttggctgaggcatcaacttaa

SEQ ID NO: 364182 - DNA, 387 bp, Pseudomonas aeruginosa
atgactaccagcaaagacaaaaccatcgaagtgctcggccaggagcggcgtcgccgctggagcgtcgaggagaaactggccatggtgcgcgagagtctcgagcccgggcaaagcgtctcggtggtggcccggcgcaacggcatcaaccccaaccaactgttccactggcgcaagctctaccaggacggcagcctgtcggcggtcagtgccggtgaagcggtggtgcccgcgtccgagttggccgatgccctcaagcagatccgcgaactgcaacggatgctgggcaagaagaccatggaggccgagatcctcaaggaagcggtggagattgcccgctcgcgaaaatggcttgcgcactcacccttgttgccgggggacgaccagtga

SEQ ID NO: 364183 - DNA, 249 bp, Pseudomonas aeruginosa
atgagcgcttccgacaagactctcgccagcgcctctccggcgtctggcaacctcgcgctgctcgcggcaatcgtggtgttcgccgcgatcaccccgaccatcctgatgaccgcccccgccgtcgccgcgcaactggcgacccagtggcaactgagcccggcgcgggtcggcgacctgttttcggtggagctgggcgccatgagcctggcgacgctgccggccttccattggctgaaacgcgtcgattga

SEQ ID NO: 364184 - DNA, 1152 bp, Pseudomonas aeruginosa
gtgttagtaactaagttaactctaaagaactggcgtaattttaagaaattatcgattcccctcgggacgcgaacttatattatcggtgctaatgcgacggggaagtctaacctgttggatgtatttcgctttctaagggatatatgtaagcctgctggtggtgggttgcaaaaagcaattgaggatcgaggggggattaaaaagcttcgctgtctacaagcaagaactgatattgaagttcttattgatatagagatatcagaggatccggctgatgaagaatctctatggcgttacgtacttggttttaagcccgaggggactggggctcagagaatattcgtgaccagagaggttgtttatcataatgggcgcaggatactgaatcgtcctaaagaaagtgataatcaggataaagttaggcttacgcaaacgtatatagagcagattaacgcaaaccaagattttcgtgagatagcagatttctttaaagagactacgtatcttcatctggttcctcaactgttgaagcatgtggaaatagcttcacgtgtaatggaagacgatcctttcgggcaaggtcttcttcagcggatcgctaagacacagcagcgagccagagatgcgaaattgagaaggattcagggtgcactggaaaatgcagttcctcagttcagtgaactaaaattcgagcaagataaggttactgggctcccgcatctaatggcttcctataagcactggcgaaatcacggtgcttggcaaagggaggatcagttttccgacgggacactgcgtttaattggcttactatggatgttgcaagaaagtaacgatctgcttctgttggaggagccagagctttcgctgaatgatgcaattgtatcgcatatcccactgatgattgatcgagtcttgcggaagcaaaaggcctcaaatcgtcaggtaataataactacgcatagtgaggcgctgcttcgtaacccactggatagtaatttcattattctgctcgagccgggccaggatggcactacggcaagaactgctgatgaaatggaatctagtctcatggctgccgggttaacacctgctgatgtaatgctgccgaaggctcgtcctgggctggtggatcagctagggctcatgtaa

SEQ ID NO: 364185 - DNA, 1071 bp, Pseudomonas aeruginosa
gtgacgatcaggaagctggacgacggccagtggctggtggattgccggcccgaggggcgctatggccccaggatccgaaagaaactacggaccaagaacgaagcgctgaactttcagaacaggatcatgggcgacggggcccggggcgagttcgagaagcgcccagcccgcgacgaacgccggttgtctgagctggtgcggctgtggttctcattgcatggccagaatctgaagacgggggccgagcggcggcgcctgctggaagcgatgtccgagcgcatgggcgatccgaaggcataccggttcgatgcggcgatgttcgcgcagtatcgcgccgagcgcgccgagggtaagcatacaagggtcaagtctggtcgcggtcgtagtaaggccgacgagaggccaaagccaatcagcgccaatatgttgaaccatgagttggcttacttgcgtgcggttttcaatgagttggagcgtttgggggaatggaagggcagcaatccattatccaaggtacgcgctctgaagtttgacgaagccgagatggcctatctatcgaccgaacagattacagaactgctcgaggctctggccgccgaggattctgacgccacgttaatcgctgaaatatgtttggccacgggcgcccgctggggggaagctgaagggttgcagccacgtcaggtgcgtaactgtctaattcactacagcaagacgaagtccagtaagaaccgctcagtaccgataagtgctgacttgcaaatgcgcctagatacggcactgccgctccggcctggctacaatatctttcggaaggtagtgaagcggatagggctgggtcttccagacggccaattaacccacgttttacgccacacgttcgccagtcattacatgatgaacggcggcgatattctgaccctacaacgcgtcttaggtcataccacattggccatgacgcaaaagtatgcccatttcagccccggacacttggctgatgtggttcacttgaatcctatgtgtcgcttgttagaccgctcaggcgatggaggtcgcagtgttagtaactaa

SEQ ID NO: 364186 - DNA, 882 bp, Pseudomonas aeruginosa
atggtggtgattatggcagaggataagagtattgatattcttggggccaagcctttagctaaggcggtggagaaagttacagataaatcagttgatggtttgtcagctttcttgtctgcaatctgtatgccggcagcagaagagtttgggcttctactcagagacaaagttgcagggtatcgtcgtgctaacctggagaagatagctaggaaagcgtcggaggcgataagaaaaaaggcagtagaggttagtggggaaactaatcccagagtggttcaccaaatcgtcgaggaggcatcgtgggctgaggatgagacactacaaagtatgtgggtagggcttctattggatgctgcatcgcgaggagctgaggaggatgactccattatctatattgaccttattaagcgcttaacagtttttcaggctcgtataatcaacatggtatatggagatcctcgtgcttatagtgtcaactcgccggtcagaactagcgtgcaaggggtttatcctctaaagaatccgctggtatatagttcgttatctatcctggaagtatatcctggggatcttgctcggcttaaagttatatctggaaagtctcatgaagaaatcctgaaagataaacaaagtgcggggttggttgcgtcagctttgcggcctcaaatagaggctttgaaagacttgggggtgttctataatgttgaatacgcagggactgctaccttgctgtttacaccctgtgtaagagggttggacctatatatgcgttgtgaggggcagcggctttacccgattgaaacttatttgctcgttaagaaaagttggatggagcagaaggggctggatccatttacttatagacctacccgcttgaaataa

SEQ ID NO: 364187 - DNA, 1233 bp, Pseudomonas aeruginosa
atgctcgacaagttgcacctcttcgttcctttccgtctcgagcacatcgaactgctcggggtggaagggcgtgcggacccggtgcatgtcgttgatctggagagcctgggcgtgccgctccaggggcagatcagccgaggggagggcggagagttacaggccgactacctgcggcatgtttgggagtcgctgagcacgggcttcacgccgcttgcgttcaaggtttttcaccagtcgctgggcaagcgtctgatgcccggcgtagagctgaaagccagcccggcgaagttgctccaggggcacaacgtgttcggtccgacctgtatccagaagggggccgaggtgatgttcaagtggctacacgccacgtatcccgacctgttcgccaagctcgatgttccggcgactcaggtctacgccctggactgcacgtattccagccggttgccggatgagcgcaccgcgctccaggtcatccaggcgctgaccaacgtcagcaacggccacaccaagagtcgcggcgacaactaccagacatccgcttactggggcgcgaaagaatcccgcctgaagcgcctgaaggcgtatctcaagcacaccgagtatcaggcccaactggacgaattgaagcgggcagggcgggccgatctgtcggccgctcggtctgttcgggtcatgtctgacccacggttgcaggagtgggtgcgctacctgctccgcatggaggccacggtgatgcaccggtggctggaacgccggggcatcccgtctcggcttgttgatctgatcgcctaccagcagcggctccaggaagaggggcgctgcctgattcaggagtgctggcaagcggttacagcggatcttttcgcggcctttgagggtatccagatgcgtgtgattgatgatgaaaaagtgctggccgcactgactgagcgacacctgaagtacgaccggaagggcaagcccaacgatagccacgctcggaacctgttccggacgtggcgcagcctcaaggactacgggtggcaggaaacgatggagtcaatggcgcgccggactttctacaagcacgtgaacgacatctgcgaggccggcctgtcgaaagccgccctgcagaagctccacgaagcggaccgggcgaacaacgtcgtaccgctgctgcggttcgtccaggtcgatttcagcgcccagcgccccgactggtacgtcgagccgaccgtggaggccgcctga

SEQ ID NO: 364188 - DNA, 798 bp, Pseudomonas aeruginosa
atgagttcgcagttgatcggtgtgctggcggcttcgacgcagggcgatgcggacgccaagagcttgcagacgggagcctgggtggcggggaatgctactcagaacaactatattgaacactcggatgttctggcttttgccgaagacatgaggtcttgcggcaaagacgaaggttgccaaaaggacaagtgggagaaagaaaggtacagcgacgaaagtaaactcaatgtacaggaggcccaaaatacctatggtccgctgagagcaaaggagaaaaggctccaaatcgtcgagagcatggacacattggtgtccatccagtgcgtgacgtcgcgatgcgagtcgtacaagacggaattgttggagcaatcagtcgatagctatatacacctgagcaaggtcctcgatgaatgggcgccgacgctggaccgattggcgcttatcggaggtgctgctgcaggtaagcagatagactcgaaagtcaaacgtccgggtatgccggagcctgtagagcttgcgcaggttcagagggctgtggattatcttgcagccctaaaagcgactggggcatcaggaaaaccgctggtttcaaagggctcagaggtgacccctgaagttattcaaaaagcattgcagggtgatcgtgttattactgcgcaaggcgctgtgtcattacctgcggtgcaaagatatgttgatcggcttcttaagggcgatgttgccccggcaataaaaatggatggcaatgtgattgttgatgggaatcatcgttatatcgcagaaaaaatattagggtga

SEQ ID NO: 364189 - DNA, 708 bp, Pseudomonas aeruginosa
  misc_feature (639)..(648): n is a, c, g, or t
atgtccaatgacaacgaagtacctggttccatggttattgtcgcacaaggtccagacgatcaatacgcatacgaggttccccctatcgatagcgcggccgttgccgggaatatgtttggcgacttaattcaaagagacatatatctacagaaaaacatttattatccagtccgatctatttttgaacaaggaacaaaagaaaagaaggagatcaacaagaaagtatctgttcaagtcgatggcttgctaaagcagatcactcaaggaaaaagggaggccacaaggcaagagcgagtcgatgtcatgtcggcagtcctgcacaagatggaatctgatcttgaaggatacaaaaagacctttaccaaaggcccattcattgactacgaaaagcagtcaagcctctccatctatgaggcctgggtcaagatctgggagaagaactcttgggaagaaagaaagaagtacccttttcagcagcttgttagagatgaactggagcgggcggttgcctactacaaacaagattcactctctgaagcggtaaaagtgctaagacaggagctcaacaagcaaaaagcgctaaaggaaaaagaggacctctctcaactggagcgggactacagaacccgaaaggcgaannnnnnnnnnggagcgggactacagaacgcgaaaggcgaatctcgagatgaaagtacaatccgagcttga

SEQ ID NO: 364190 - DNA, 1740 bp, Pseudomonas aeruginosa
atgactgaggaagtcgccaatgccgaggttgtcgccgtttaccccaacaaggttcgtgtggccgtcgatgatcttttgaactttcaagcagcgggggagtctcttcgtgttgggtcttttctcaaagtctcggacaatgacaacgtttctcttatctgcatcatcgaaagcttttcaatcgagatgaaagaggtgaaaggcgacggtatcagtgaccacaaacgcgtttatatgattgattcctatcccctcgggacccttaaagatggaaagttcaatcgcggtggtgacgaactcgccattccgccaaagaaggtcgtcccggcaacgaaagcggaaatcgcagctatctatgcagactgctatgccgctgaagaccgcttttgcttttcgtcactgactaggcaacgtgatatcgtcgtacctgttcatggcgacaggttcttcaataaacatattgccgtcgtcggtgcttcgggatcgggaaaatcgtcgagtgtgacgtcagttctgcagaaagcggtatctgctaaaagcggcgaataccaaggtctcaacaactctcatatcctaatattcgatcttcattccgaatatgctacggcttttccaaaggcgaatatcatcactgtcgatgacctcgtcctgccatattggcttctcaacgaagacgagatggaggacatgttcctagagtccggcgacaataacaactacaatcaggagtcgctgctacgatctgtggtgaccattgccaagaagatcagcaatcctgctgtcgaaaaggtcaacttcgacagtccgcttcgatatgacattcagcacgtagcgaacgctttccgcaacctgacgcgggaaacaaaagacgctgaaaactcgctgcatatcaagtttaaggatggtacgaccgaaacgttcgatgatgttgagggtcagctggagcactattgcaaggctttgcgcgagttcgctgctccggaacggagtaaaatcaacaagggcccctatgccgacggcagcatcgacaaatttgagcggcggattagatcaaaaatctcgaactctcggcttgacttcatattcggtgcgaaggccaaagctgcgaccctagagcaggtacttgaacagtttaccggctacaaggcgggaggcgagtcgaatgtcacaatcatcgacctcagcggcattccctttgaactgctcagcattaccgtttcgctgatctcccgccttatgttcgatttttgctactacgctcgtcgcgtggagagtaaaacagagcagccgttcctgatggtgtatgaggaagcgcacaaatacgcgccaaagagcggtcttgcccgctacaaggcctccttggctgcaatcgaacgcattgccaaagaaggacgaaagtacgggatcagccttctgatttcgagtcagcgaccatctgaaatatcagagactatcttttcgcaatgctccaacttcttggcaatgcgtcttaccaaccccgatgatcaaagctatgtccgccgactactgccggatacgcttggcaatttgaccgaaggcatgcccgcgctggaacaaggggaggcgcttctgatcggggacgccgtcatcatgccgtgcgtcgtgtatgtggaaaaatgccaccccgaaccctcttctagtgacgtgaaatatctcacgctctggaaagcggagtggaaggagatcgacttcaaaaagcgtgcagataactggcgaggatga

SEQ ID NO: 364191 - DNA, 1251 bp, Pseudomonas aeruginosa
atgctggaggtagacaagaaacgcgaagcgacagcttcgatcagagggtatttttaccaacttgacgctgccttgctcgaaatcctaaacgcggacctgagcgatgaaatcgttatcgagggaattgaagacttcgaccgctacaccgatgaaagcgtcatttacggccaggtgaagtactacgcggagcagaacctgacagactcggtactgcgtgcccccctgcataagctctttgttcatttccacgggctcgaagaagcacagcgggcaggccgaaaatacctgctgtacgggcacttttcagaagtaaagatcgatattggtgagctttccgtcgagcgcttcaagtcggtgatggaataccgaaaggaagtgaaggccgctgacggtacaaaatcctacgaaaagaagtctttgctcgacggcatggccgcgccagataggctaattgaggcgttctgcaagagcttcagcatacaaatctcgaaggaattttctgaacatcgcaggctcgtcattgaggcaatacggaaaaaccaaagcgtctcaggggttgaggccgaaggttttcactatccaatggccttcgactacatcgcaacacttgccaccaaaaaagatcacaacgaccgtaaggtcacccgtcgtgatctgcaggaactgctcaaaggtgctcaagctatccataatcgttggcttctccgggagaaggatgcaagcgagtacgcgaagcatattaaacgcctgtacttctcgctcacgaacggcgcaggaatcgcccgtgttttcatcatcgaatgtgatggggcgactgacggctcggtcatctgcgaccaactcagagcaattggtaataattggagttctgctaaaaagcgccgcatccagaattccgagcgctacgcgccattcatcctgctacgcggcgcggatgaaacactcatcttgcaagtaaaaaatgagcttttcgatactggaaccgttttcgtagacggttacccatatcgcggatcgccctttcgcaacgatcacgttcagagcccgcagaccgaagtacaccagatcgaaattcgttttgtcgaagacgttgaccaactgctggaagctctcaacggagtgggacggaagttgtgccacatctatgatttcttcctggaacgcccagcagccatggctatgccgggtccaaagagtcggatgtattcgatccccgttagcagcatctccacaatcaataaaattatctga

SEQ ID NO: 364192 - DNA, 291 bp, Pseudomonas aeruginosa
atgcagaagcgaaccgtccagcgcggccgaccggccggctccaccaccttcgacgccgagctggcccaggccttcggcgcggcggtgcgcgcactgcgggtcgagcaaggcgtggcgcaggagaccttggcacatcaagccggtatcgaacgttctcacatgggcaagattgagcgcggcgaacacatgcccacgctggcgattattttcaagatcgcgcgtgcgctggggctcagcgtcgcccacttgatgggggccgctgaagaagtcctgggcgaaatggctaattga

SEQ ID NO: 364193 - DNA, 1512 bp, Pseudomonas aeruginosa
atggcgaagacatgcatcgtgtgcggacaggccgcaggctctggggagcacgtttttccggcgtctcttggaggccggcgggtcaactccggcatctattgccccaagcacgacaacagctattcgggtctcgtcaatgagattgccgagcagctcgacttcctcaatgcatacttgggcgttcggccggatcactccaagcaccccaaaactgcctatggcgagcacacgctgacgggagagaccgtttcgatctctgccaaggagatcaaattcacgaagccccgcgtcatatcccgcaccgcagttggcgaaggtgaagagttgcatctggcatttcccaaccagcagtccgtcaaacagttcgcaaaaaagatggaggacgatggacacgagtggacacccttgtcgaagccctccgctcggccgtatatcaccggttccattcaccataagcgcaaatttggcggtgcctgtggtctgggcgccatcgcgtacatgacgcagacattcttcgcgcaggaattcccagagctcgcgcgatcagggacgctttccaacttcctcaactacacgcaagccatcgccaaggtcgcagcgctgggcggctacgaacagcagccggaagagcgcgaggaattgatcgaggcacgcgcggcggtgacggttgcgctggagccctttggaggcacggcaccgatctggtgggatttcagcccgcccgccggagcgcgcgccaacaagtttgaatttgggcatcgagtgacggttggtattgatggctttgacggccaaatctacggccgtgtcgcgctgttctccactttaacctttgccgtacacctgggcacggcaccgcagggttccgccacgcgagaagtgaccgtggacattgatcctctcgcggagcatccaccacacgatatcgacaaacatcaggtgctctcagcgccaggccgcgttcaagtgccggaacacgctaccgaagggcttgcgaatgcgctcgccgacggcacgcaacagcgtgcgttcgcaaacctgctggaacgcttggaagaacatcaactcctcaagctggcgcgcaccatgagtacggcgctcgcgccatgttccacgttgtcgctatttgaagcgcgaacactgatcgaaaaggaacttgaccaacaaccacagcaaatttggcgtttggtcactgctgtcgttgaaggcttacgggcggaaatggtcaaaggcggcatggaaaacattgccccagtgctcgataacctgattgcgtatgacgctcaatcagcaagcggtctatcgcagcaggccgaggccacgttagccctggccaaagccgcattagttgcacagatggagcaagactgcgcagcaggcgtactccacgaggaacgcattgcggaactcatgggcagaggcccaggcctttatgccgtggggcagttggtgctggcccctgtcttgcaggtgtttagtgaatccgctcaccccaatgaagtgagcaggtaa

SEQ ID NO: 364194 - DNA, 1251 bp, Pseudomonas aeruginosa
atgaaaaatatatttgaagaaatagacggcattcatctcgaagaagatgagcggtcgagctttgggagattctgcgatgcatttcttggggaaaatccgactgttgtcaaaagactatttcccctcattgatgcctcatccacagacgaaaaatttcagtccgacgtgatgcaggcttacaccaatgaatgcatcaatgaaaagcaagcaataatggaaaaactagatgcaacgagaggtcatccggatgcattgaggttttacactccgcaacttgatcttgttgatagcaagctttctataaagacatttcagcagcttattgattctctaggcagccacctagacaagtacgcaggatcgttagaggtgttcaataacgcttacaaaataatccacaatgcagacggcactaaatatataagaaataactatgtcaattactcgattggctccattttgtatcgaaaacaccagtccgaaaaaggcgggggcgacatgctgagcatgaaatattctgatgtcgtcaggtctgaatatgaaaagttgggaattgacatagagaaggaggatctccagttttcaaaatacaaactcattagcctcagtgacaatattcaaatattcaatgacaaggacagtcaaacgatacaggacagccggctagataagtatttctggatcaaagtaccaagaggcttgctagcgagcattgaatccctgattgaacaaagaatgattgctgaaattgcattcagggtggattatgtttccgatcatgttccttcgatggaggagaaggagtttggatctccaatgaaattgagtatttcatccctgcccgaactatccaaattctactctacagataattacaacaataatctgtggattcagcatgaccaaataaagcagagtttgacatttgaagaactcctggaggattttgaggtggctgatgacaatgtcgtcacgcaggttattcaccttgaatacacatcaagaggtgatgagttctttataacccacctggatcatgagttcattatttacaccattgaacagtatggggaaagaatgggcaatgcaggagtaaaggggcatagaaaggtaaagacattcaaagtcgatggatcaatgatcccattcaattccagggtcaacggaaatatattcttgattcaggttctcgacgcttattttaataatagagacttgattcaagagtattttgcagaggcgtcggcctag

SEQ ID NO: 364195 - DNA, 510 bp, Pseudomonas aeruginosa
atgtcgcaactttctctttcttccttcgattccgttctgatggttcgtagcgcgcgtgggcgctaccagccagcttctgccgatcagatcctcgaagccgcacgcctggtcatcgaccagaaaatgccgcgcggcgaatcctttacatcaccgatggcggtaaaggagtatctgagcaccaagctggcgtgcctggagcatgaagtcttcgcagtgttgttcctcgatacgcaacataggctgatcgagtacagcgagcttttccggggcaccatcgacagtgcatcggtgtacccgcgtgaagttctcaaggaggcactgcggctcaatgcagcggcagtcatcatttctcataaccacccgagcgggaatcccgagcctagcgcagccgataagttgctgacgaagcgacttcgggaggcgctggcgatggtggacgtgtgcgtgctggatcacatcgttgtgggtggcacgaaaacgacgtcgtttgcggaatacggccttatttga

SEQ ID NO: 364196 - DNA, 171 bp, Pseudomonas aeruginosa
atgtcaggggtcaaagccgaatggccacgattcggcacgaggcgcggggcgcacgaattgctgcttgggctactcgtgctgctcagcctgcaagcggccccgcccgagacggtcggaagcgtcggcgacgtgagccactatgagcgtgacgctttgaagtgcctcagctaa

SEQ ID NO: 364197 - DNA, 1089 bp, Pseudomonas aeruginosa
atgcacccattccaagaaaacatacaagcttggatttctaggcgtcttgcagaccgcacgtccagtcaatcccttgagattccttttgtgctttccagtgatataggactggttcgaaaggagaatcaggatcgagtggccgctctctatactggaaagaagtcgataaatcccctgtttgcgatagcagttgctgatggcatgggaggcatgcgcgatggagggaaatgctcttcattggcaatatcgagcttcttctactctttgatacagcaccgtaatttaggtatcaaggaacgggcctatgaagctgtaaaagcgtcaaacaaacaggtgttcgacacatatcaaggcgatggcggctctacgctgactgccgttttgcttgactctcaaggcaccaagataattgttcatcttggcgatacgcgtgtctacactttcggggctgggaaaaaggttgagcggcacacaacggacgactctctcgtcgaagctgttggtggaagcggtcgagaactactccaatttgttggaatgggcgattcgatgcagcccaagataactgattttttttgtcaggaaggtttttgcgccattaccactgatggcatacacggcatagaagaaaagaccctcagcaggattctagaaaattcatcaagccttaatgatgcctccgagcgtctgaattctgtcgcgatgtggtgcggggggaatgacaactcaacatcggccatatttgacattgccggaatgcctccatcgcttgcacgatatgaaggaagcggaatccgtttatgggatgcagctggagatctaaccacgctttggctgcgagaggaagaccaggcctttaatgcaaaaaacgctcaagttccaaacgagacgaatgaagcaaaaaataatttttcatcccaactgatacccagtacgccgccgacgaatgagggggcgccgaagaagtcaaagccacccgttcgcaaatctcgaaaaaagaaaaacgagaattacccagaagaagttcaactggatatagaaattggcagttctgccgaacagggagacgtcggtgttgatagcaaatag

SEQ ID NO: 364198 - DNA, 996 bp, Pseudomonas aeruginosa
atgggggaggtaattttttgcgaagatctacatctacaacgtcaagttgtgctaaagcatctgcaggctggcgtcgaagctcgtagattgctcgatgagcaaaaggcattgtcaaaagttaggtcgaaacacgtcgttcaactttatgacatcgtaaatattcaaggagcagtcacgcaacagcccgctattgtccttgagtttattgatggagagacactccaagttggatctctttctgccaatgcggattatctaaacctgatatggcagatttcatgcggacttgctgacattcattcgcacagaatcatccatcgagatattaaacccggaaacataaaaatagatggcgagggtgtcgttaagattcttgatttcggtttgtctagaaatactgccgatgcagagactaggagcataataggaactcctatatttatggcgccggaactatggggtgaccaaacaatcgcgtttgactcttccattgatgtctatgcgtttggtgtgacatgtctggccttgctgaccaacgagcctccccttagtttgcgtcataggcctccaagccagccaacactagcagatttttctactccgttcgctgggatgcccgctgaaattacaaatgccctgttccaatgtcttgcgacaagcaggcaggatagaccatccatgcaagccatcaagaatttgttggagaaacatcttctgagggacaggcatcgtgccacggttgttttaaacggcgtagcaaacacactagaccacaagaatagaagaatatctctgaatgcaaccgtgggaagtctcacgattgaatatgacggcttagccttcactgtcactcaggtcgctggtgccgtttatataaataacacatccgtcactgtaggggcgatagtgccaggctgttgcgttctaaccttcggcaacggcagtggcagaaagttcgtgacttttgatgtttcaaacccggaggtaatgccatga

SEQ ID NO: 364199 - DNA, 1071 bp, Pseudomonas aeruginosa
atgaatgcgcaagatattgtctccgggcgctatcgcatagagcgccatatcggtcgaggcggtatgcaagacgtctatttggcgcaggacatattgttggaatctaacgttgcactaaaaacacctcaacccggacagcccgataagagattcaaaagcagtgcgaagatttccgctagagttaatcatcataacgtcgctaaaactctagactacattgaggagaatggtcggctttttcttattgaagaattcgttgatggcgacaatcttgaaaataagctcaagacctttggagctatcgacccgcacctcgctgctcgtatatttctgcacgtttccaaaggcgttgccgcttcacatcatgctggagttgttcatcgtgacttgaagccaagcaatatcattgttgaacatggcattaatttgcatgaactgaaaataactgatttcggcatcgctacactaacagaagaagtttttgacgaagctgcgcgggaaggcgatataaccagatcgacatctggaacaattcgcggagctcttccttatatggcaccagagatgatgttcaggcagccgggtgaacacccaggcgcctcagtcgacatttggtcgctcggcgctatgatgttccagatattgaccggaaaagttcctttcggcgtctatctccaggcggctgtcaatgttcaaaatagaaatagagaaccgtggccggacttcatgacgtcaaacccgcaatataagattcttgcgcagcagttacaatccctcgtggaagactgccttcagtacaatgttgcagatcgccctaccgctgatgatgttgttgcgaagatttctaatctttgctttatcggtgttgacagaaaagttggaagtgtgaccaacctgattcaaaatggatatagcggattcatagacggggatgacggtgtaacgaccttttttagtcgagaaagcgtttatgggtcaaagtcatcagccatgcctggaaagagagtgtgctattcgaatttcccgggatcgccgcgtgaccgaggtcatccgatcattgtgatcgaataa

SEQ ID NO: 364200 - DNA, 696 bp, Pseudomonas aeruginosa
  misc_feature (626)..(635): n is a, c, g, or t
atgcgcaggcacccgctgttatggaaactggcgctgctgcaggtcggcttctgcctgctgctgacctggctgatctacacctggggcctgtcggtggagcgcagcacctacttcctcgccccggccgaccgcagctacctggcggactacgcgcggcaggcggaggatgcctggcgcagcgagggcgccgcgggcgccgaacgcttccgcaaggaactgtcggcgaaggaagatacctgggtggcgctggtcggaccgcacctggaaagcctcggcagcatgccgctgagcgccgaagagtcgagccacctgaccttcatgcgcaagctcgactggccgatgagccggcgcctgcaggacgaactgccgtacgtcagcatcgagttccccggacatcccgagcagggccggctggtaatccagttaccggagcgcctgctgcccggcggactgaccccctggacccacctggtcacccacggcatagtcccgaccctgctggccgccctgctcggcctgctgctctaccgccacctggtggtgccgctgaaccgcttgcgcgatcgcgccgacgccctgcgcgccgacgaactggaaagcactcccctcgccgcaccgctggcggnnnnnnnnnngcccgccgcgacgaactcggcgagctggcccaggccctggagcacatggccgagcgcctga

SEQ ID NO: 364201 - DNA, 954 bp, Pseudomonas aeruginosa; identical to SEQ ID NO: 325133

SEQ ID NO: 364202 - DNA, 342 bp, Pseudomonas aeruginosa
atgtcgcacgccaccctgaaccgaatcacccagctcatcgcctcccgtgcgaaggaagcaggcctgccgttggagccgttcaccgtccacgacctgcgcaggactggttccacgctgctcaacgaggtgggcttcaacggcgattggatcgagaaatacctggctcacgaggatggtcgctcctcgcgctcggtctacaacaaggccgagtacgcggagcagcgccggcacatgctgcaggagtgggcggacatgatcgacgcttggatcgacggccgcactcatgttcccaagctgctgccggaccgcgttgtagtgccggtattgagtgccacggtttaa

SEQ ID NO: 364203 - DNA, 5250 bp, Pseudomonas aeruginosa
gtggatgcatttagctttcgcaatcaggttattcgagattacgagcagtttgcgcgcagcttcaccaatccgagagcggaggatatccgggcgtatttggaggctgagtacagcactgggcgttactggccatcgcctttggttcaggtaaacccctttttcgtcgccggacagaatgtggagcagttggttgccaaccggacactgcaccctgaatgcgcccatactttccgtttcggtaaggagggcggcaaaactggcatatcggcaagtttgcataagcatcagcaggaggccattgctcgctgtcaggccggcgagagctatgttctaaccactggtactggctcgggcaagtcgcttagttattttatcccgatcttcgatgcgatcctaaagggcaaggagcagggcgccaggccgggtatcaaggctatcatcatctatccgatgaacgccttggcaaatagtcagtgcgaagagctggagaagtttctgtctagctacgccgatgatcagcgcccggtgacctacggtcgctataccggtcaagaaaaaaccgatgagcgcgatcggatgcgcatcaatccaccagacatcattctcacaaacttcatgatgcttgagctgctgatgacccggcagagcgagcaggaccgtgcctttatccaagctgcggaggggctgcagttcctggtcctcgacgagctccacacctaccgtggtcgtcagggagcggacgttgcgatgctggtgcgccgcgtgcgcgagcgactcaacagcgagctgttgtgcattggcacctcagccaccatgtccactcagggctctctcgccgagcgcaacaaggtggtggctgaagtcgcaagtaagatttttggcgcaccggtcaagccggagaacatcattacagaaaccttgcagcgcgtaacgccggcggtggcagtacctgactcagatgttctggccagggccatcgaagcaggagtgccgcacagccctgactttaagagcttgcgcgaacaccccgtttcagcctgggtcgagctaactctggggctatcgtataccgaaggccgctgggtgcgtgccaggccgcttagcattgaggaagccgcccgccagttagctgaggccagtggtctcacggtcgagcaatgtgccacttacttgtcccagttcctgctgactgcctatcagtgcaaagacgtcaacggcaaacccctgttcgccttccgcttgcaccagtttgtctctggtgccgccgatctttatgccaccctggaggctcctagcactcgtaaactggatctgtccggccagctcaccgtggctggtgagcgcgagcgtcgtttttacagtgtgcatttctgccgcaactgcggccaggagtactacccggtttgggatgaagttgagaacggtaatcgcgcatttgcgccgcgcggcatcaaggaaaccagtcacgacgatgaggacgtgaaccacggcttcctaatgatcgaccctgagcgcagctgggatggtgaaagcctcgagagctatccggagaactgggtggaactgaccggtaaggaacctcgcttcaagtcgtcctaccgcaagtaccagccacaggaggtttttgttggtagtgatggccagacgaccttgcagggggtacgcagctggtttatcccaggcagttttcgtttttgtctgtgttgtggtgctaaccaatcacgcggtcgagactggacgcggttgtccggcctgtccggtgagggccgcagctcggccaccactattctgagcatttccgccctgcgctatatgctgggggcggacagcgaactgggcgccgatgcccgcaagctgctcggcttcaccgacaaccgccaggatgcttccctgcaggccgggcactttaacgacttcatgcagatcctgctgatgcgcagtgccttgttcagctgcgtgcgccagcttagcgaggatcctctcagcgacagccagatcacgcagcaggttttccaagccctggggttcgtggtcgatgatccgttgattcgcagcgaatacctgcagaatcccggcaatgtcgccccgcgcctgcgccgcgatgctgaggaaaccatgcgaaatatcctcggttaccggctgtatttcgacctgcgacgcggctggcgttttaacaatcccaaccttgaacagctcgacctcctgcgtatcgagtacgaggacttgccgactctttgcggcgatgacgtccgctggcagaaaacctccaggccagggtcctcaggtgagcgccaggtacacccgatgctggcgctggccagcccggctgtgcggcagaagctggtgcagatgctgctggatgtgatgcgtcgcaatctctgcatcaagactcgctaccttgatcgctacaacctcgaggagtggaagaacaagagccgccagcatctcaaggagccatgggcctttaccgaggacgagatcctcgccgaagccggctacgccacactcagcaaaccgcgcaaagacctgaacacagtgaccctgggcctgcgcacccgcttcggccaggtggtcaaggccgcttcattttgggagggcgggcattacgaaccgctgaaggaagctaactatgcacagttcatccaggatctgctggatatcgttgaaagctacgggttgatcgagggtgtcgagctggaaaagggcattcgcggttatcaggtgctcggcgaggctctgctctggcgcatgggcgaaggcgatccgcagcccgacttgctcaaccagacggtcacccggaacccctatttccagcggctctacaacggcgtggccgacatgctggagagccaacagcgcgacctgttcaccttagaagcccgcgagcacactgcccaggtaccggctgagctgcgtgaggagcgtgaagatcgtttccgcgcaggcgacctgcgtgccatgttctgctcgccaaccatggagcttggcgtagacatcgcctctctcaataccgtttacctgcgtaatgtgccgccgaccccagcgaactacgcccagcgcagtggacgagcaggtcgctccgggcagccggcgctcatcattacctactgcgcggcactcagcccccatgaccagtacttctttcaggagccaaggcgcatggtctacggcgaggtcagcccgccgaccctcgaccttgccaacgaggatttggtggaaagccacctgttcgccacttggttggcagaaaccggctgcaagctgccctcgacgatcaatacgatgctggacatggaaaatcccagcgagatgccgctgctcgacgactacgtggtggcccttggcaacaaggaagcgctggcacgtgcaggtcggcgcggcacgcgcctgctgggcatgctgcgcaacgagctcgtcagtgcccagggcatctggttggagcgcagcaagccagtggaggaggccgcatcccagtggctggatgtcaagctgggatctgctcacctgcgtttcgacaaagctctgcagcgctggcgcgatctgtatgcttctacgcgtaggcagattgacgaagctagcgccatcatgaccaacccagccgcgcccgagaaggaacgcaagatcgccgagcgccgtcatcgcgaggcgatgattcagcataacctgctgctggaaactagcagtggcagccactcagacttcgagacatatcgctacctagccagccaaggcttcctgcccggttacaacttcccgcgcctgccgctgtccgcgttcatcccgggacgcatgggcggcgtggggcgtgacagtgtgctctcccgccctcgcttcctggctatctccgagttcgggccgctcagcttgatctaccacgaaggcagccagtaccgggtcaagcgggtgattctcggtgtgcgcaatcagggcgccaatgaggcgcggatcgtcaccgaagaggccctgctctgtcccgcatgcggctatggacatttccgcaaccagcgccactacgagcactgtctttcctgtcaggcaccgctgaccggtggcaaggtcatcaacaacctgttccgtattgagaacgtcagcacccagcgcgccactcgcatcacctgtgatgaagaagagcgcatgcgacagggctacgaggtgcgtaccaccttgcagttccaagaagaaaacggcgtacccaaggtggtgcgcagtctgatgctgcagggcgatacacctttgctcgacctgcaatatgctccggccgccactgtatggcgcatgaaccttggctggcggcgccgcaaggacgcagaaatctacggtttcaagatcgacccagttagcggctactggagcaacgacgaacaggcacccaaggaggagaacgagaacgccgagctcgacaagattcaggcccaacgcatttcgcccttcgtcgaggatcgccgaaacatcttgctaatcaagtcatcgcagccgcttgaaggggaggcaatagccaccctgcagtacgccctcaaacgcggcatcgaagccgagttccaactagaggaaagcgagctgatggtcgagccgctgcctgctcgagacgagcgcaacggtatgctgttctacgagtcggctgaaggcggggcgggtgtgctcacgcgcctggctaccgatccgtctggcctgccgcgtgtggcgcgccgagcgctagagatcatgcattaccgtagcccggacaacagttggtcgaccgtcacactggagaacgccagcgaggagtgcgacgccgcctgctaccgctgcctgctcagctattacaatcagcctgaccacaagctacttgaccgcaagctcactgaggttaccgagctgctctgcgcgctggccagcgccaccctggaagtcggccacctcgacggcgaagggcaagaccacatggctagcctgcgtcagcagtccgcgagcagtctggagcaggcctggctggattttatcgagcagcaccaactgcgcaagccggacctggcccagcattacctggaggcccagcaaactcgcccagatttcatctaccgaaatgctctggcactgatctatatcgacggacctcaccatgagcagcctggtcagcgtgcttttgacgcgcagctgacccgtgaactggccgaccagggctttaccgtcatccgctttacccgtgatacccgcagctggcccgaggtcgtgcgccgctatccggacatttttggagatttctgcgaatga

SEQ ID NO: 364204 - DNA, 2844 bp, Pseudomonas aeruginosa
atgagcgcgtttcaggagtttcaacccggcagcatcgtcagcgcgcgcggacgcgaatggatcgttctgcccgagtccgatgggccgcgcctgcatctgcggtcgctaggcggtgcggacgacgatgtgatcgtcatccacgcgttgctggagcgtgaaccgccgaagcctgcgacctttccgctgccggaggccgcagaggcccaacgcggcacccagggagcggcactgctaatgcgtgatgccttgctgctcaagctgcgtgcgggggctggcccgttccgtgcccttgggcgcataaacgtcgagccgcgtgcttaccagttggtgccgctgctgatggcgctcaagcacgaggtgattcgtctgttgatcgccgacgacgtgggtatcggtaagactatcgaagccggattgattgcccgggaaatgctcgaccgtggagagatccagcgcttcaccgtgctttgcccgccgcacctctgcgagcagtggcaggaggagctgcaacgcaagttcaatatccgggccgaggtggtcaccactggcactgtcgaacgcctggaacgaggtttgcagacccacacatcgatctttagcgaatatcctttcacggtggtcagcctggactatattaagtccgaccgccgccgcgacgagttccagaatgcctgccctgagctggtaatcgtcgacgaggcgcacacctgtgccgaaggtattagccgcggcaaacatcagcgctaccgcctgcttcgtgccctggccgacaacgctgagcgccacctggtgttgctcactgccactccgcacagcggcaacgaggacgcctactacaacctactcggcttgttgaacagggtgtttgtagggctcaaggacgtttcccgcgccgatcacccgctgtataagcggcttggcgatcacttggttcagcgccgccgcatcgatatcagtgaatggcaggacaatacacgcttccccctgcgcgagacggcggagaagacttaccagctcagtggtgcctggggcgcgctgttcaacgatgtgctcgactacgcccgtgaactggtccgtgaggcggagggccttaacacgctgcaccagcggcttaattggtgggctgcgttggctctgctgcgctgcatctcatcatcgccggcagctgccgtgcgggccctgcagactcgcctcaaacgggcagaaggcgagggctgtgtcagtgatgcggaccagcttgcggaaatcgaagctcagggcatcaacaccgtactggatggctccagtgaacaggggctgtccagcgacgatattgagcccggcgctgtcgttgaggaggatgccgagcgactgcgcagcctgatcgacaaggccgccagcctggccggtgcaaacgatcccaagctccaacaactgatcgttgaggtccgagcgttggttgagcagggcttcaaaccggtggttttttgccgctacatcgccaccgcccactacgtggcagctgccctgcagcctctgttcaaggatcacgaagtgatcagcgtcaccggcgagctcagccccggcgaacgagaagagaaaatcctcgccctgcgtgacatcgacaagacggcgatcatggtcgccaccgactgcctgtctgagggcatcaacctgcaggatgtgttcgatgccgtggtgcattacgacctgtcctggaacccgactcgccacgaacagcgtgaaggccgtgttgaccgcttcggccagcgctccaacaaggtgcgtgccctgatgctctatggcgcagacaaccccgtggatggtgcagtgctgcaggtgatcctgcgtaaggcggaaagtatccgcaaggcgctgggtatttccgtaccgatgcccgaggacgaaacccgtatcagccaggcgatcatgcagacagtcctgctcacccgcgacgagatgaaacacaacctatcgctggacttcggtttcgacagccagcaggccatcgaggatgatctggacagcaagtggcagaatgcccaagacaaggcgcgccgcaaccagaccattttcgcccagcgcgccctcaagccggaggatgtcatccccgagttcgcccgaatgtccgaggtactgggccacgaggccgacgtacgccgcttcgtcacagctgcctgccaggcactcaatgccccgcttggccagtacaagcagatcatgcgcctgccctatgccgaactcccagagccgctgcgtgatcgcctggcccagtccggtatcgatagtctacgcaacatcgacttcagttaccctccggctgggttggctgagcatatccatcgcacccacccgctggtggcagggttggccgaccagctcgccgaggaggcactcaaaggtgacggcaacgctgctgcaagccgggctggtgcctggtttacccgtgccgtaacgctgcgtaccgctgtgctgctggttcgtctacgcacccagctgacgatgacccgcgccagccagcgccgcgaactgctcgccgaagaggccatcgccatcgccgtaagcggccagaatccgccgcagatcctcacactggccaaactgctggcactgatgcagcagccggtaagccgcaacatggctccggaaatgcgtcagcgtcaggtcgagcaagcgttggagcaggtgcaggtctggcagccggcactcgacgacatcgcccgccagcgtgccaacgaactgctcaaggaccaccgccgtgtacgcgatgccgccaaggccaagggcacctatgacgtctatccgcaactgccggtcgatgtggtcggcctctatgtgctaatgccggattctcaactgatctga

SEQ ID NO: 364205 - DNA, 4101 bp, Pseudomonas aeruginosa
atgacccgcaccatccaccgcgaattcgacagcctgcgtatcgaaggcggtatcttccccggcgagttcctcaatgccgtgcgcgacctcaagctcaaggggcagggcagcactgactatggtctgcatcgcactctcaagctgcgtgatgaggtcagtcgttactggcgtatcgccagggctgagtgggaggccttcaacgaggcgcgccagcgtcaggacatcgaccgtaatgcattgtccgttgagcgcttcctggtgccactgctgcagcaggtatttggctttagcgacctgcaggcctgccgtcagccgcgctacctgggagagcggcactttccccttagccacgaggcgggatttgctgagctggccgcaatcagcagctttagcctgggggctggagctgacgaagcgccccggtgcatcgctcacattccgctggtgttaaccggtccggactttatcctcgacaagagctatccggcctttggcgatgagggccgtcgccgctcgccgcaggggctgctgcaggagtacctcaacgccagcagcgaggcgctgtggggcatcgttagcaatggattggtgctgcgcatcctgcgtgacaatccgtcgatgacccgtccagcttttgttgaggtagatctcgcccgtctgttcgaggacgacctctacccggacttcgtcgccttatggctgaccctacacgccagtcgtttccttgcccagaatggcaaggtgggtcagtgctggctggaacagtggcgtgaacaggcggttgaagaaggtgagcgcgcccgtagcgacctgcgtgctggggtggagcaagcgcttcgcgcgttagggaccggctttgtcgcgcatccagccaatcgatcactacgagaccggctcagcagcggagaactcagcccgcaggcttacttccagcagctgctgcggctggtttaccggctgctgtttttgctcaccgctgaggatcgtaacatccttcatgatccggcgaccgccacgccggaggcccgccgcctgtacggccagggctacagtatgagcctgctgcgcgatcgggcgcgcaagcggcgtttctacgatgactacgccgacctctggcaggcgctgaccaccaccttcgctagcctcgccagcggtcagccgctgctcggcctgccggcccttggtgggctattcgccaaagatcagtgtgttgatctagacagcgggcagcttgacaacaaagcactgctggccgcagtccgtgcggtgtcttgggttcagcgcaagaatggtgccgctcgcatcaactaccgcgatatggataccgaagagctgggttcggtatatgagtcgctgctcgagctcattccgcgtatcaatccggccgcctcgccgtggcagttcggctttattggcgatgccgaaggtgagagcgatcagggtaatgcacgcaagaccagtggctcctactacaccccagacaaccttgtgcaagagttgatccagtccgcgctattgccggtgatcgagcagcgcctcaaggccaaccccgagcagccacgggcagcgctgttgtcgatcaaggtttgtgacccagcctgtggtagtggtcacttcctgcttgccgcggcccgtcgcctggcggctaaagtggcagaactggatgctcagggtgatcagtacggcgaagagcagtatcgtcacgctctacgcgaagtagtgctgcactgcattcatggcgtggatctaaaccccatggccatcgagctgtgcaaaaccgcactttggctggaggcgctggagccgggtaagccgctgggcttcctcgatgcgcatatccagtgcggcaatgcgctgcttggcatcaatgacctcaaggcgctggaaaatggtattccgaaggatgctttcaaggctctttccggagacgacaaggatgtctgcaagcaactgaccaaggaaaacaaggaaggcctcaaggcgctagaaaaggcctttgaccgccagcagaccatcagtctgtcgctggagtcggcggtcggttacaacgagctgcaagctctggatgccttaccggacgacaccctttccgatattgctgcaaaggatgcggcttaccgcgcgtaccagcagcaagcccagggcagccgtctgctgcatgcggccaatttgctggttggtgctttcctgctggagaagacggagtcatcgcaggtcagtattcctactagcaagacgctttatctggagctttttagcgagtcccgtagtgtgcagcacgagcagcagctcaatgcggcaatgactgcctgtgaggaagcgcgggtactgcactggccgctggtgtttccgcaggtattcagggctggtggcttcgactgcgtgctgggcaatccaccatgggagcgcatcaagctgcaggaggaggagttctttgcttcacgcagtcaaatggtcgccagtgcgggaaataaggctgagcgtagccagcggattgactggttgtcgcaggggctgttggcgcaaaacctctatccgggccaagtatcgagctttgaaactcgtgaggccgagcagcggctatatcgtgagtttattgttgcccgccgtactgccgaggctgccagtgtatttgcccatgtgaatggcgaggacggcgggcgcttcccgctgaccggtgtcggcgatgtgaatacttacgcgctgttctccgagacgatccgccaggtgataagtccgatgggacgtgccgggttcatcgttccgtccgggctggctaccgataacaccaccaaggcattttttggcgacctgatcgagcaacggtcgctcgagagcttttttgagttcgagaacgaaggttatttcaagggagcaggtcaggggcatatgctgcgctttgccttgaccacagtactgggttcccaacagcaggctagcgccacgcgctttctgttccagggcaagcagcttgatgaactgcaggatcctgaacgtgtattcacgttaacggctgaagaaatcttccaggtaaaccctaatactcgtacctgtcccatctttcgttcgcggatggatgcggatattactcgccgtgtatatgcgagagttccggtgctagtcagggaggctgccgctggaaaggaggagcagaatccttggggcgttcgctttatggcgatgttccatatggcgaacgactcctatctttttaagacgaagagtgacctcttggggcaaggtttttcgcggtgtggaaacatttttgtggggggcggggggcgttatttgcctctgtatgaggcgaaaatggtgacaatatataatcaccgtcatggagactttgatgatgcgctagatggtaagcgtgcgcatattcttcctaccgttcctgagtcgaggctgaggagtacggagtatcttgcatgtccgtactattgggtttctgaaaaggaagtcgagtctaatttgaatgataagggttggtcttcagattggttaattgggtggcgcgaaattacagatgctcgggcaagtgcgagaacagtagtggctgcggtggttcctcgtagggcttctaataatacatttgttcatattcttccaggtatttgtggggagaagttggctgctttgctggcaaatatgtgttcaattgtttttgattatattgcaaggcagaaagtaggtggtcttcatctgaacttttatatgatgaggcaactgccggtcttgccgccagctacatattcaaggaatgacttggatttcattcttcctagggttctggaacttacctatactgcatgcgatttagatgggtgggctagggagcttggttatattgggagtccttttgtgtttgatgcggaacggcgagctgtgattcgtgctgagctcgatgcgtactatgcgcgcctctatgggctttctgagaaggatctaaaatttattcttgatcctgagtcggtggcgcctggctatccatctgaaactttttctgttcttcagcgcaatgagattcgtgaattcggcgagtatcgcactaagaagctggtgcttgaggcgtgggacaagttagagcagggcgagctgagttaa

SEQ ID NO: 364206 - DNA, 1386 bp, Pseudomonas aeruginosa
atgctaacccatctgaaactggataacttcaaaatctggcgttccaccggggccatgcgtctggcgccgatcactttgctccttggtaccaactcgtcgggcaagtccagcctgatccagagtctgttgctgatccgccagacagtgaaaggtgacgaccccaacctggatttgaatctcggcaattctgatgaaggtgattccgtcacgctgggacaattcaaggatctgctgtgccgtcatggtggtgagtctgaagcgatcaaggtcaatcaggtggggatcgagttcaagtggaatgagcctggcaagttggaagatgttgctattttttccgctcgctaccggcaaggggcgggtggcagtgccgagcttgactatctgcgcctgggcagggatggtcagggcttttttgtagaaaggcgcaggccaggcgtctatcgcttgcagctgattacggagcgccgtccggtaggccagagtccaaattttcggcctcagcggtcgttcgctttcgcaccagcggcgattgcttcgctaggggcgcaaggcgagctgatcaaggacgtcggccccgcattgctggatgagttgagcaagattatctatctgggcccggttcgtcgcttggcgcagcgcgattacatttgggcaggtcgcatgcccgccagtatcggcgatgatggtgctaaggcggttgacgcactgattgcgagtggtgtggcgctgcaagcgacgcgtagacgcagaaataggaatgtacggcacgactctgaggcgcaacccgttgagcaggtaggccgcgaggaagatctgccagaggaagcacgacttttcttacagaccatctactggctaaaagtaatgggcctggcagatggcctttctgtacgtgcactgggtggttcggcgcgttatgagctgctgatcgagagtcagggcagtgtgtcgaacctcaaggatgtcggtgttggtgtttcgcaggtccttccggtcatcgtttcggctctgtttgccgagcccggacatatcgtgatcattgaggaaccggagagccatctacatccgttggcgcaatcactgttggctgagttatttgcccagatcagccgcgagcgcaaagtgcagttcatagtagagacacactccgagcacttgtttcgacgtatgcagacgcttgtggcaaagcaggagatcagtactgcagccgaggcagcgatgtacttcgtcgagcgtgacaaccagcatgcaaagctgcgtgagctggagattgatgagtttgggcgggtaaggaattggcctgaaggtttcttcggtgatgcgctgggcgagacgcgcgagcaggcgaaactgatgttcgagcgtcagcaaggtgctagaccatga

SEQ ID NO: 364207 - DNA, 525 bp, Pseudomonas aeruginosa
atgaaggcgcgctatgtggttgataccaatgtgctgatcgcggcgagtgctgctgatccagtacatcctagtgacattgacgcaaccccctctgatccggcgctgcgcatggtggtctggacatggctggacggctttcagcagagtaactcccggttggtccttgatggggagggtcgaatttatggggagtacaatcacaagctcgggttcaacgactttggcattcaggtggtgatgcacaagtggagcacagccgccgtggatgatgtggtggtggagtacgacgaaagcggtggggtcataccgcaatccttacaagctgtcgtgcatgatttagcagacaggaaaatggtggcggctgccctggcctcacatgaggtgtttggagaggggtgtgttgctttcgctggcgacacggactggcatgactgggaaaccgcgctccaggcacatcgggtactgcttgagccgatcattgaagactggtcacggcagaagcatgcggaaaagcagatgcgatga

SEQ ID NO: 364208 - DNA, 615 bp, Pseudomonas aeruginosa
gtgcttgaccctgccgaggcgaacgccctgctaacgggcagcgtggtggtagaggaaaagctcgatggagccaacttgggcttttcgttgggggaaggtggcgagctcctcgcgcaaaaccgtggtcagtacttgcaggagccgcacgccggacagttttcgcgcctacctgcctggctggtgcaacatggcgaggcgatccgcgcggtattgcgtcctgagcggttgctgttcggtgagtggtgcgccgcccgtcactcgcttgactacggtgcgctgccggactggttcctgctcttcgatgtgtatgaccgccgcgcgggcaagttctggagttcaaggcggcgcaataccctggccgaggaggccgggctgagagtagtgccgcaggtgttctgcgggcacgccagcgtgaaggcgttgatcgaccgggtacagagtacgccaagccattaccgcaacggcccgctggaggggttggttatccgccgcgaatccgctgactggtgcgaggcgcgcgccaaacttgtccgcgccgactttacccaggccattgagcagcattggcgccgacggaccattgagtggaatcaggtggattacgatgcgaagtga

SEQ ID NO: 364209 - DNA, 2190 bp, Pseudomonas aeruginosa
atgtcgcttttcaacccacaccacaatgcaaacccagtttttgcggcaattaatcagtggacgcagagctgcctgctcgatggtcaggcactctttgctgtggggccgcgctggacaagcgatctgcttggcgagctgcaacagcgctttgttgagagtcccgacgaatcttcggcggtttttctggagaagctcaagggtcagttggccgaggcctcgcctgaagctatccagctcatggctgaggtgctctgggtagtgatgttattccagagcaacgtgaaacctgccaagaaacgcgaaaacatcaagcaagtatggaactggtcgggtagtgattttccggtaagcaatcagctaattgccgacgatgtcctcgagggggtaggttcggcggggcagggcttcaatcgttaccgggccgacgagctggcctggttgattcggatggtcgaggcttttcgccagttgccgcgccctcagcaagaggagtatctgcttgaaccttggcgctgcgccgagtggctggatgcacagccatggggaggcggccggcagatgcgacatgttttgctccatttgttgtttcccgagactttcgagcgaattgccagccccaatgacaaagcgtccatcatatccgccttcaagagccttgctctgcctgaggtgaaggcatggccagcgataaaactcgacaggacgctgctggaggttcgtcaggcagaggaggctgtagcaggtcaagcagtggatttttatacgagcccttgggtagatcgctggcgtctggcaaagcctgaggtcgagcaacaatcgcctgcgggaacgccattgttggttgcggaaccgcgaaacctgatcttttacggcccgcctggcaccggtaagacccacagccttaagaaacacttacccaagtatgaagacagttcgagcacgctgaccgagactgaatgggtcgtctccagcttggcggatgtggcctggtggcaagtggtgttcatggccttgtatgcgctgggtggcaaggcgacggtcaatcagttgatgggacatcgctattttgtagccaaggcgaagtcccgcagcagtaacaacagcctgcgcgcgacctgttgggaagcgttgcagagccatgcgctgcccgattcggcgaccgttcaacgtgatacggcagcccggaggccaccccatgtgttcgataaggatatggaggggaaatggttcctcgcgggggactgggaggggagttgcgctgaatgggtcgagcgtgctgagttgatcaagcaaggcccaaaaacgactgatgagcagttgatcagacgctacgagttcgtcactttccatcagtcctacagctacgaggacttcatcgagggcatccgtcccgaaccgtcagccgacggtcagggcgtgacttattctgtgaggccgggtgtgttcaagcggctgtgtgagcgtgccaggctggacccgcagcatcgctacgcgatcttcatcgacgagatcaatcgcggcaatgtggcgaagatcctcggtgaattgatcactctgatcgaaatagataagcgcgcccactatgatgccgatggtcgcctgctggatggcatggagctgaccctgccgtattccggggagcgcttcggggtgccacgtaacctggatatctacggcagcatgaatacggcggaccgatcgattgcactgctggatgctgccttgcgccggcgcttccagttccgtgagctgatgccggattcgctggtgatttccggcgctcagggggatggctatatcccggatggcgagggaggcgtgctaaacctgcgcgcgttgctagatacgttgaaccgccgtatcgcttacctgctgcaccgggatcagaccattggtcatgctttcttaacgcgcgtgcacgatatggaagggcttcgcagcgtattgtgccgcgagatcattccgttattgcaggaggtcttctacaacgactggcagcgcatccggctgattttcggggatgtaaaggcgcccctggagatgcaggtcatccgcgaattcagtgtctcggcgagcgctatttttggcgaaatggaggatgaccttccagaggcccagcgctacgaggtttgttcccctggtgagatcagcccggaggccatccgcaagatctatgagccgttggcatga

SEQ ID NO: 364210 - DNA, 1251 bp, Pseudomonas aeruginosa
atgacgttgttgcaggttctcgagcacgagtggctgcctattcgtgccggaggtgggcagtcgctcagcttacagcaggcgacacggctcgaacggcttgctgattctttgccggctcgggcgcttgaatggcgccgggcggctgtgaaatttacccagttctgcggggtgatccagcttggggagctgaccatcgaggtgctgccgaagatcgcccgctatgagcgtgacgttcagctatgccggcaggttctggtacggctgctgcaaatgaccggctcgttgccgccgcgcagtatcggagaggcctcgctaggtcagcaaaggcacgccctgctggatgtgttcatcgaacactttcgaagcatgatcgcccagcagatgcagctcgggctgattcggcgctatatgcctatgcaggatcagctaagtaccgtgcgggggcggatagatctggtcaggcaagtgcggctgaatgccttcactccgcagcgggtacagtgccgttttgatgagttcgatatcgataacgcttacaaccaggtgctgcgccatgtgctgggcctactgttgcggcgcactcatcatccggacatcaagcgtggtctcaatgagctgctgatacacctggcggcggtcacggatcgcaccgtcacgcctgagcaggtcgaggagctggttttcgatcggctgaatcagcgttggcgatcagttttccagcgttgtgcggacttcctgcgtgccctgcatcccaatgttactgcgggcggtatgcctgcactggccctgctgttcgatatgaaccgcttgttcgaaggctacgttacctggcggatgcgccgcgccttcaaggatcaccagatccaggctcaagggccacgccgctatctggcggtcaatcaggctgagcaggaggtgttccagctgcgcccagatatctcggtgctacaggggaagcaggtgattgctatcgcagacgctaagtggaagatcctcgagcctgaggagcgaaagcaaggcatctctgctgcagatttgtatcaactgacaacctacgcccagcgttatcagtgccagcggctggcgctaatctatccggcaatggagggcatcaagcctgggctacgagaaaggctcacgattaagggggcagatgttcagttagcgatctatagtattgatttggctggagtattattcagaaaagatgccgttttcgaaagtttgagctcctgggtggtggagctctag

SEQ ID NO: 364211 - DNA, 456 bp, Pseudomonas aeruginosa
ttggcggcgggcgagggcggcctgttgttggaggtgggcggtgaggatggcgttgcatcgctcggtgagttcggcgagttgctgcggatcgctgtcgggctggcaggcggcggcgcgctggagcagttcggcgtgttcggcggcgcccagggcggcgacttcgctggcgaggtcttgcaggtgttccagtcgctggcgttgctgctggtgttcgcgggcggcctgggcgaggtcgagaaccaggctgtcgagcagcaggttgcggcgctccggccgctgttcggcttcggcgcgggccagtcgctcgaggaacgcttgggcgctggcctcgccttgcagcagttgcagttcggcgatgtgccggtcgatgcgcgtcaggcgctgttcgcgcggggcgtcctgttgctggcgggcgcgccactgttccagggtgatgggcgtttcgtcggtctttag

SEQ ID NO: 364212 - DNA, 474 bp, Pseudomonas aeruginosa
atggttgacagcctccaggctctggaagactgggcggggccgattctccgcgccctcgagccaggccctcgtgctgccctcgcgcgttcgctggcccgcgatctacggcgcagccaacagaagcgcgtgatggcacagcgcaaccccgacggcagcgcctacgagcctcgcaaaaaacgcgaactgcgcggcaagcagggccgtattcggcgcaagatcaagatgttccagaagctgcgcacggtgcgctatctgcgcgccaagggcgacgcccaggcgatcacggtttccttcgccggccgagtcgcacacatcgcgcgggttcaccagtacgggctgagggaccgtgctgagcctgccgctcctgaagtccaatatgcacggcgctcccttctagggttctcagatcacgacattgcaagcatccatgaccgactgatggcccatatgtcgaaatcaaatagttctggttag

SEQ ID NO: 364213 - DNA, 720 bp, Pseudomonas aeruginosa
gtgagccaaaactcggtaacagcctatggcagcgcaaccgcctacatgatggatgatgcagctgaacatatgctaaaggcatattctagatacttaaaagcaaaaccttcacagaactctttacaagacgaccccacttcaccaactgagtcagctctaaaagccggctctacaattctaggaagccttggagccgtaggtagtatcctcggagttctacctacagacaacgatgatcagaaaagtttttcactcaccctcatcaactcgaccgaccatgcgtttgttccccgctcagtaaatctagcaggacaatactacgcacaaaaaaactttggcccgattggccccaacgaatcaacagaactcacattcaccatcaaccattcttacaacccacaagatagcgacgaggggtacatttacatctatggcgttatggctcacgcctcaagcggaaagactgtgtcgattggagttaatattactgaaccgaacaataacaataacaaaacctggcatcttcaggcattcaacagcgatgagtttggggacgtgcattacgatgaaagcacgaatgaagtagaccataacacacgtctgcgctacatagaatgcagagcaagctctcccaacgactacccctcttttggcctcagcatgtactgccagacagccaatctccccagctatgttctcgtcatcactccagtagcttaa

SEQ ID NO: 364214 - DNA, 690 bp, Pseudomonas aeruginosa
atgaccacgaccacaaaaggcaatgtttccgacaccttgcagaccaaccgctccgtagctactagctatgccagatatcttcagactagcaatcccgacacctatcaaagcgtaggtggttctttgattctgcctggcgtctcattcgtaaacgcattaatcggagccagcataaacctttataaaggagctactaacctaaaaaatcggcgacaggaacagagcaacgaagtatctattaacataaagaattgcacaaataatttaatctgttttttcaagattgactgcgcaacaaatgcctacttccaagacaccatcctccccccagggaaaagtatcgatttatctttaggcaatgcagtcggaaacaagcatgacaccaacacccccagactttacttttactatggaaacgacgaagtcacaaagtttgggataattcactttgcagacaataccgacgacaaatcccgccaaataaacctgtacaaatcggagatcgaccacattagcgtaagcgacccagacagtaccagagagtaccaccatctcagttctcaattctacctattcgacttcaaaggctcactaccaaacctatacattttcatgcctcccctcagcaactcagacagctgtcacggaagcgtagtgtttcttgaaacaaacgacactgtaaatgggtga

SEQ ID NO: 364215 - DNA, 261 bp, Pseudomonas aeruginosa
atgaacgactacatcgcccggctgcgcgagaaatacgacgaccatttcggctgtgcgccgagcatcgtcctggactgccgtgacttctggaggcactgcgtgacggcaccggaaatggcggtgttcggctaccgcctggaaagcagccggcgcccgcaccacgtggtgatcaccgcggggatgagccaggcacggatgcacttcgcgccctatctatatgggcagcgcgcgctggtccagcgagctgatctgctaccttga

SEQ ID NO: 364216 - DNA, 297 bp, Pseudomonas aeruginosa
gtgctgttcatggacacgcagcatcggctgatcgaatacgccgagatgttccgcggcaccatcgacggtgcatctgtgtatcctcgcgagctggtcaaggaggcgctgcggctcaacgcggcggcggtcatcgtttcgcacaaccacccaagcggcaatcccgagccgagcggggccgaccgagcactgacccagcgcctcaaggaggcgctggggctggtagacgtgcgcgtgctggatcacatcatcgtcgcgggcaccgacaccacctcgtttaccgaacgcggcctgatctga

SEQ ID NO: 364217 - DNA, 369 bp, Pseudomonas aeruginosa
atgcgtgaccatattgccgagagcatcgagaagttcggagtgaccacggatctcttggggggcaatcagaactacctactgatctccgagaagcacttctcctggatatcggatagcgaacgtcagctgtcttggattaagcgcagactgccccgtgaaatggcgaacgagcgaatctattcgccgcttctgtccgaaagagacctattgatagccatgatcgactgcgctgaatcgcccccaaggggaaagacgtctttcctggcaaacctgaagtgcatatggggcgagcagcagcaactggaccagcagttggactggatcaaggaacggaacgaacgagaagtctgcttgcacgtctgggagtag

SEQ ID NO: 364218 - DNA, 153 bp, Pseudomonas aeruginosa
atgctattccgttcgccgttacactattttctttcctttatgttcgcgcgcgagcgggctcagcgggtttctttcatgatcgactttggcgcctactcggcggtaagcgagactatcaatgcccagtcctgcaagccgaaagtgacaagttaa

SEQ ID NO: 364219 - DNA, 540 bp, Pseudomonas aeruginosa
atggaaacacagaaaatcggtattgaggaggtggtcagggccaaagcctttttcgacccacgggatctatctttccgcaaaccaaagctcaaccgttatcgctatcttcacaacttgagcatctggttaattgtcgcgtttaccatcacatttgtgctcttctccgttccctatgcgttgctcagcatcaaacaaaccggaaccatcatctgggcgtctacttcgactgtgaagagctggaacggttatagctgggaggccactgccgccgactgcaaagatgaagcaataccaacgctgatactcgacacccacgatcaaaaggttatctgcgagattctcagcaaaccggaactctcggcctacctagaatccgccatgcagacgcagaaactaaccggcctgtttatctggctgcttagcggtgtttttgcattcttcgtgacccgactctacgtgatcgccaaactggccgacgaccttcacgagaggacgcaaagccagcttccgagccagatgactttactattcccaaaatga

SEQ ID NO: 364220 - DNA, 654 bp, Pseudomonas aeruginosa
atgttcaaaaagcaattcgatacttaccgaaatcctgtggttttaaccattggggctgtgataatttgttatgcgcagtggtttacacttaatgtcactttttcctctgttgtcttttttgatagcaatgcttgggcatatggtccgcgtgaatttgtgcattttattggttttattggttttgttatgagtgtttgggcatttctcatgagtttcggagaggattctcctgcataccagcgtgtcctaccagttgcggtaagtgtctctggtattctggctttgtgggtcggcaatgagcaggcggtagagtattttggatatggggaaacaaaggcagccctctacctgctatttattctgcttgggctctgcgtccttttattcattgtacgcggctattcaccaggaattttaaaagctaagcgagcgctggttatcactgtaacaattaattgcggtttgtcgctcttctgggaactcatcgcccagccgttgtttgatgtatacggtcgtgatccaagaggttacgtgcaattcgctcaggtgagttttgacatcgccggaattctcattggtgcatttatcgttctagctgtcattcgttttgacaacaacttcctgtctcttccttataaatgctccccaatctaa

SEQ ID NO: 364221 - DNA, 291 bp, Pseudomonas aeruginosa
atgcccacgctcgacacgctcgaatctgaatctagttctcttatcgtctacttggggcatcgtggcagcagtaatctcgaaatgctcccctcttcgcagaccaatcagaatcccgccagactccgggtcacccgctttcagctgcttatagcgagcaacaagttcaatcaccagagcgctcactactacaagccgccccgaacccggatcaatcagtgcgagcggctgcatacttcgcagtttgctctctgtctaggcgaaatcggcttcacctgttttccatttgcatag

SEQ ID NO: 364222 - DNA, 1665 bp, Pseudomonas aeruginosa
gtggaactgagtaggatccatgcggcattaatcgggtacggctacgagcttcagcaaagtatgccatacccaatatacaagggacttcttcgcccgaagggcgaagaagtccccatccgtattcatttttcggatgtatcacttgtttctcttccctccattgagcttgttgagcgtccggtagggctgccaaaggtttgcgctcacattaatccgtatggttttttatgttacttgggacgtgatcaagcctatcttccgagaagtaatattggtggagcggttgtaggttgtcttgagttagcccagcggcttctcgaacggcttctcgatggcgattctctgatagatactcgtgatgagtttttggtctattggggtggtggcgatctacttcttgatattccccaatcaagatctgagggcctgtatgagcattgttcaataattactctccccaagaatgatgctcgcgacgaaatatggattttggggagcgacgaggaggctctagttgctcgctacgaaaactggggcggccaagagacctattcaaacttgatattacgggtcgtggattcagtttcctcgcttggtatttctgaagagtggccgcccactaatctccaacaattatctacgtggttacaggctgcagattacaaagcccatggtgggctaatgtctgtgctgaaagatgcatacagacttcgccaaaatcttgtgcttcttttggttcgggcgcctaattgctcttgcgcagttcttcttaatctttctgttgtgaataaaatcgttaaggctaggactccagatcagtttatgcgttctgttctgcggagttaccctagaaatgtaaagattagtcggctaagtccgattccgattgatgcggagtcgtggttgtcgcgcaatcttatggagggatataagagtcttgcaggaaaaaatgttgctttagttggttgtggtgcgatcggtggatatttggcagatttgcttgtgaaatctggcgctggttttttaggtggttcgttaatacttattgatgatgataattggtctatgggtaatttggggcgtcactttcttggctttgagtatattggtcagagcaaggcttccgctcttagtttggagttgcgtaacaaataccccgaggtgaagttgcacacatgcatcgatagagtgaaaaggctgagtgttttttcagggatggacttggtcgtcgatgcaactggtaatgaagcattttctcagtatttaggcgagaattttatagccggaaatcttcctccaataatattctcatgggttgtcggggcgggctgtggtgctcaagcctacttattgcatgagcgcgaacaagcctgcgtaagttgtttggagcatactaaaccaggcggccagctttcggttatgcggcgagagtatgagatgaaagtgaagaatgcaggtgcatgcggagattggctggttccattctccgcccctgctgcactgcatgcggcagctctagctgctgaaatcgcccttgattggtcaagtggattattcaagcctactttgcgaagtattactttggactatgcaaatggaaaacaggtgaagccgatttcgcctagacagagagcaaactgcgaagtatgcagccgctcgcactga

SEQ ID NO: 364223 - DNA, 1173 bp, Pseudomonas aeruginosa
atgccagctttcaacctgcacagcctgttggacagtacggtttacgcgaccacctacctagaccgactgacgctttccagcgatgagcgagacgagatgcagagcgctcgcaccgaaatacgtgatcggctccgttctaggctacccggcatgcttcagaaagcactcggtagtgagcaacaggtgcgcaagccgcgtttcttcacccaaggctcgtgggcttacaagaccttgaattccccttgccgggatccccagcaagcggatctcgacgatggaacctatctcccatttagctatcttgaagcggcccgtccgtctgttatgagcaatgtcttgtttgcctgcgttgaagaagtgctgcaaggcttggcggatgaaaagggttggacgctcattgacgacaatccaaattgcacgcgccttgagatcgccgacgacaagcacattgatgtgccggcctacagcattccggatgctgagttcgaaaagcttagggaaatccggtcgatggctgtctgcaaagcgctcgacagcatctcggcgagtgcccagctagacgaagacgataactgggatttgatgcctactcatggtgtgctcatggccaccaaagatcgcggctggcgcgataatgatcctcggccaattaaggattgggttgaatccgaagttgctttaaagaccgagcagttacgtcggctcatgcgttacatcaaggggtggcgtgacaatcaggtatggagtggggaggatcctaagtccattctcttgatggtcgcagttgcgaaagcgttcgatgtgtcaatacctcggcgcgatgatttagccttgctgaaagttgcaaaggagctgtccaaaattctccaaggcaaggtcatgaaccccacgacaattaacaaacccatcgaggagcaagaagatctcgctgcgcgtttggataaggatggcattcgtgccgacgtggtggcccgcctcactcgtttagcacagcaactggacgaggcaatttatcgctctagtactccggagcaagcatgcaagcttctgcaagaagcattcggtcatcgtatgcccttcgatccagggcgagtggtgattgatacagttcaaagcactcctctagataggaccaaagcagtgtcccctgtcggtattatgacggcaggttaa

SEQ ID NO: 364224 - DNA, 699 bp, Pseudomonas aeruginosa
atgtatgccgttttcggcctgaaaagccttgtgataggcgtactggcactgatcctacttgtttttcttggtgtcacctggcaggaaaggcccgatgacgtgacggggctcgtttcgctcctttggagagtcgccactcttaccattggggccatattcctcctaggcaacatccgtccagtgtttcgctggatatggaaagcagcagaagcatgctctgatagcttgttccctgacctgaccggcatttggaaaggacagcttcgatccaacatttctgtccatgaagcgcttcaaaatgctgctaactcacgtgagcggacattcaatgcttttgatcccgatgacgttaacagcgtcgagctcgagcagtttgaagcggtaatgagtattaaagcgaccctcaaccggatcactgtgaatatgaccgtccaggggcgaaatggggagtcacgctcctacagtttgatgtgcaagcccagggtttcggctcatgacgaaccccatcgtcttacctatgtttacgtgtcgcaattgtctgaaccctcaggagatgacgagtcgaaccatataggcgcggccgaactggaagtgctacgcaaggacgatcagctcattctttctggtttctactggacagcacgaaactggcgtaatggccgcaacaccgcaggaacactgcgcttcgtgcgcacatag

SEQ ID NO: 364225 - DNA, 1464 bp, Pseudomonas aeruginosa
atgatgaataacgaagtgctagttcaacgaaatgaagtcacaacacccacagaaaccacattggttttactggatggcagggtagttactgtcaagattggagaatcattccagctatacaacagtgatggcgagtcgatgcgactgcacttcgacattttcaatgaaagtagaacctttcaccaagcgttattcaaagtaatatgcggaacactttcaacgcatagcctaaagtacaacgtaaccattacagttgctctgcgacattggtttgctgtggagaactgcaagcaagaagacatcattcagatcgagcatgtcggcctaattgcgaagataccacctcattacatcccatttattattccagcgctacgacgaatcaaagatcagcgccttgatggaatgtcagtcgaagtaattgacttcctaagcgataattacaaatgggaagaaaggggtaatggagcatattacacgctaattaccaatgacccgataagcggcgcattgaccgaccaagagctaagtagcattcatagcgaactcaattacgcctactcaaatggctcaataagccaagaagcatttacccttgcatggttcttcattggcaccggagttcgtcccgtacaagccgcccgcatgttgaactcagacgttcaaataactaatggagccgaaggaaaagaggtaactctaagaattcccctcgctaagggtgagggcggcggaacgcctgagtattggctaagacgagcgccaactgtgcttgctgagtgcttaatcgagtacctagataaacgagaagagaagtccagcgacgcgaagctgtttaggggggcgccgcacgtaattggagatcgcctgacagagaccttgcgccctcttaacacgtattcgaatcgccttgagcaacgcatacctgttacgccttaccgcttccgctacaccctagcgacaagagcgctggcccatggcgcctctgacttcgaagtggcaaggcttctgacgcaccggagcactagctgcatccagttctaccgtgcctccatgccgcagctccagaaccccatccgccaagccatcggaaaggagatggagttctttgccagagccttccaggggcgcctaatcacgtccctagacgagtccacacgggccggtgacgattcctcggtcattgccgacttcctgcgtctgacgggccagacagtgggggcttgcggcacccgcgctgagtgccaccagaatgcgcccattgcgtgcctgtactgccatcactttgagccccttatcgacgccccttgggagacgctgatggcctcgctgaaggcagaccaagacatggagacggatgatcggattcgccagatcaaccacaacgccatgtcagcaattaacgagatcattatcgcccgcgattcaaagcgcaccactacggatgtcgacactaatgggtga

SEQ ID NO: 364226 - DNA, 222 bp, Pseudomonas aeruginosa
atggctgacagctactggctcgttgcatacgtgttcagtggcgctccaggaaaaggagccggcacaggacgcgccttctcaaccatgtatcgagagggagtccccagcagcaaagacctgatctcttgggagaaacagatcatggaaaacgacccatcgctgggaaaggttggcatcacgaactttcagcagattgaggccccacaggaggaacagccatga

SEQ ID NO: 364227 - DNA, 1506 bp, Pseudomonas aeruginosa
gtggcggcgcgtcctctcctgctctcgctgcacggtggcgccggcgcgctgttcggcgtgctgctgttcgtggtgctgttcagtggcgcctggagtcttggccacgacgacctgcgcgagtggctgcgggccccggcgcaggcgggaggagaaacccttgcgctggagcgcctgctcgaacgggcgggcgaggaaggcgtcgacatccgcgatgcgaccctgctgctgcctgctcccggccatgccgccttcagcgtctgcgatgcgcgcctggactgccggctggacctcgacccggccagcggccgggtgctgccaccgacgccggcgctggacctcctgctgaacctgcacaagagcctgttcgtcggcttccccgggcgggtgctggtcagcctgttcggcgtatcgctgttgctgctgtgcctggccggcgtgctgctgcacagccgccgctggcgcgacctgcggcgttggcggcgggaccgcgggctgcgcctggcgctgttcgacctgcacggcctgatcggcatctggggactgccctggctgctgttgttcggtttcaccggcgcgctcagcgggctgggcgcgctcgggaccctgctgctggcgccggtggcctacccgcaggaaccgaaccgggtgttcgtcgagttgatgggaccgccgccgcccgccgccgaggggcggccattggcgtcccgcatcgatctcgaccgcctgcttgccggcgatgccgtgcgggcgcccggcttcgtcgcccagcgcttgagcctcagccatgccggggatgtcgccggcagcgtggagatcgccggtatccagcgtggcctgccgagtaccgcgaacttcgagcggcaccgctatcggctggccgacggcgccctgctcggcgagcgcagctcggcgcagcgcgggttctggctgcgcgccttcatcgccgtgcagccgttgcatttcgcccagtaccagtggctcgggccgggctggtccgccgcgttgcgcggcctgcacctggcgatgggcctcggcgcctgcctgctctgcgccagcggcctgtacctgtggctgcaacgacgcgcctcggcgccggacgcccgcgtacggctcttgcagcgcctgagccagggtttctgtgccggcctggtggcggcggccgcgttgctcctgctggggctgcaactcgtgccctcggagctactcgccggaccctggccggggcggctgttccttgtcctgtgggccgccgctggcctggcggcgttgctgctgccgggcgactggccgctggcgcgcgggttgctcggcgtcgccgggctggcctgcctggcggccgccgtcgcgcacctggcgccctggctcatgcgcggccggctgccggccctgggccccgacctcaccctgatcctctgcggcgcgctgctcatccggcacgcctggatgcaggcgcgcgccgccgcgccacccgcccacccccgtgtcaccggagaccaccatgcttga

SEQ ID NO: 364228 - DNA, 309 bp, Pseudomonas aeruginosa
atggagattaagtcgcaggcactggtcgatgtggttgaggatgtgatctgcgacgtgtgccgctctggaacgagtatccccggctatggcccccaatacggcaagcttgaagcccaatggggatatggctcccagcatgatggggagcactaccgggtgcatctctgtgagccctgctttttcagggtgctgagcgggttgcgtcgggagcgcacggtcaatggtatgttcgataatgatcagccatttgcttttgaagattttggtctggtcagcaaagacaactactggggaaagaactggttgtag

SEQ ID NO: 364229 - DNA, 627 bp, Pseudomonas aeruginosa
atgggatgggcagataggttttttgaagctgtaaaaaagttaacacactcacatgaaggggttgaaatggatacacgattatttgcattcgtcggcggagacagcggtctttggcggatcgttggaaccgaaaccatagttggcaagtcactgcctgaagccaaaaggctcaacgtaatatctgcctcagagttgcagcccgaaaccaatgcaccctgggtacttcgcggaataacaagcaatgaacggtatgtcatgcgcgaagagaagaacgaaattgtggcgaagcagcaagggctagcgcgcccagaagcaacttgcgctgcgttgataccgatccgaaaaaacgcagcttggtgggaattcacgcaagacgagcgccggagcgttttcgaaaagtcaaagcacattcaaatcgggctcaactacttgcctgcagtagcgcgcaagctccatcactgccgcgacctctctgaaaatgaaccgttcgattttctcaattggttcgagttcgcgccaacccatgaggctgagttcaacgcattgctttccgaactgcgtgcaacagaggaatggaagtacgttgacagagaagtcgatatccgtctcgtgcgagaggcggcgtag

SEQ ID NO: 364230 - DNA, 285 bp, Pseudomonas aeruginosa
atggctgtttacgtcgacaacatgaaggcaacctatggccgcatgaagatgtgccacatgttcgcggatagcgatgccgaactgctggccatggccgacaagatcggcgtacagcgccgctggcaccagttccctgggaccatcaaaagccacttcgacatctgcctcagcaagaaggcgaaagcgattgaatgcggggcaaccgagatcgactaccccaacgacgtttccgagctgattcgcaagcgcaaagaagctgcgcgcatggaggtatcccttggctga

SEQ ID NO: 364231 - DNA, 735 bp, Pseudomonas aeruginosa
atgatccactaccacggcacgccttgcagcaagacaagtaatggcgatgactctgggtttcgattccttcgaggtcgacatgcactggtgccgttcccacgtcaggatgatatcgggattgtcgccgaggtctgtcagtctttcgtgttcgataacggcgccttcagcgtatggaatggaggcgggacattagatgtcgatgggtacacccgctgggtagaagactggtatcgacatcccggtttcgactgggcattgattccggacgttatcgatggagacgaggaagccaatgatcgaatgctggagcaatggccaaagcatttgcctggagttcctgtctaccacctgcatgagtcacttgagcggctacaaaggctggcaaagaactggagaaccgtggcgcttggaagttctgggcaatggaaaagcccaggaactactccatggtggaggcgcatgggggctgtcatgaatgctgtatgcgatcaggacggaagaccagcatgccgtcttcacggccttcgcatgcttgatccggcagtgtttagccgtctaccgcttgcaagtgcagatagcactaacgcgggggcaaatggcggcagcatcagccggttcggtatgtataccccgcctaccgcagggcaacgcgccgcagtcatcgccgaccgcatcgaagcccacaccagcgctccagtctggcagcgcgaaacacagatcgaactagcaatctaa

SEQ ID NO: 364232 - DNA, 354 bp, Pseudomonas aeruginosa
atgaacatgcagaagcacggtgacggatgcccactccagggagatccggccttctactcaattgaggaccgatgtatttgccgtgagaacacgggtaaccgcatcggcttcaacatctataagcactggttcgttgcccaatgcccgaacgatggcgagcagatctactacaagctccagatccgaaccaccaagaccatcttcgtcgagcacatcaaggctgcaacagcgctgatcaaggccggaattcaggaacagatcgcagatcagcttcacgaccagttcggtggtgaactgcatctctttggcacccatcagggcgttgagttggagagcgtgaggctggacgaatga

SEQ ID NO: 364233 - DNA, 273 bp, Pseudomonas aeruginosa
atggccgccgccgcgcccagcagtgcggcgctgtcgagcggcagccccagccacagcaaagccaacgccaccggtgcggcgaccatcgccagctgcagtgtcccggccaccagcacggtcttgcgggtgagccagaaatggccgagcgagaactccagcccgaccatgaacagcagcagcgccacccccagctcggacaggaaattcagcgccggtcccggcatgatccaggccgtgaccggagggcccagcaagacaccgaccagcagataa

SEQ ID NO: 364234 - DNA, 327 bp, Pseudomonas aeruginosa
atgctggatttccaggcgctcggccagagcctggcgcagcatgtccgtttctttgtcgtacagcgactgaccgatgtcaccggagttcagctgcttctggagatcggcaagctgtttgttatagtcctgctggatctccaggtctgcccgcagtcgctctctcagcttgtcgccgcttccagatcccgccagttcaatcgcaaatcctgcccgagcagttgcgttcgattcattgagcgttgcacggaaagcctgagccttcgccgcatcctcgttcgcctgcttaagcttcttgagcctatccagttcagcagccaagccatttag

SEQ ID NO: 364235 - DNA, 222 bp, Pseudomonas aeruginosa
atggataagttggcgaaagccttaggggaacgcatccgcacgcagaggaaggcctgccggatttcccaagatgcactggcgctggcctgcaatatcgaccgcagctacgtagggcgaatcgaacgaggcgaggtcaacatcaccgtcgagaagctctaccgcatcgcaggcgaactcgcctgcgacccttcaaatcttctgccgttaccttctgaaatctaa

SEQ ID NO: 364236 - DNA, 405 bp, Pseudomonas aeruginosa
atggataaagtctggtgggagagatacgccgccgaggctaaagcaacgttctgcggtgagcttctgacactcagcgccaatcccttcggaatcaagacggcgcgcatcgagcactacaggaactcaggcggcggcgcagtttccttggccatcgccaggggtgctaaacgcatcatcctgctgggctatgacatgcagaaaaccaatggtcaatcgcactggcacggcgaccacccgaaggggcttgggagcgccggcaagatcgcggagtggccgtccgagttcgagcgcctgaagcgcaacaacacgacaatcgaaatcatcaattgcactcgcgaaacagcgctgacctgcttcgcgcgtagaccgctggaggacgcgctgaatgagcctgatcccgcttga

SEQ ID NO: 364237 - DNA, 321 bp, Pseudomonas aeruginosa
atgagcctgatcccgcttgatacggcaaagtcctttcttgatgtgatccatgattgggatgacgccaagctccagttgctgctggatggagcggaggacgaggcctgccagttcatgtggcgcctgtcccttgatggcctttgcaactgcgatgagagcagtgaggctgtcagtagcgaaccgggacttccgcctagcgtggtcatcggagtgcttcttttgcttcaggccagctatcaggctgctcccgatgaaatcgcgacgctgcgcaaggcggccgaggtgaagctgatgccgtaccgatgcggcatgggggtttga

SEQ ID NO: 364238 - DNA, 282 bp, Pseudomonas aeruginosa
atgaaagcgcacctacaggtgattttcacgctcgatgaattggctgcgtacttgaaagtcggcaagcggacgctttatcggctcgccgcgcacggggagattccagccttcaaggtcggcgggacgtggcggtttcgtcaaagtgaaatcgatcagtggatcaatgatcagacccgagccggagcaaagaaggaggtgatgcgcaagcgtgaacagcagaagtcatccgagcagcccgtgtcgcctgggcgcactgcccgtcgcagcaggcaaagggcttga

SEQ ID NO: 364239 - DNA, 489 bp, Pseudomonas aeruginosa
atgaaggaaaagcaagcagacccgatcaaaacatttcgcgcccaatgggcagtgatgacgttctacgagcgcttcgaacaggtgatcgcgctcgcgctgtccgcaatcattgccgtgatcatcgtggtgtcgctgctccagctcatgtccattgtcttcacgctgctgatcctcgacgcgttcaatccgcttgatcacaaggtcttccagaccgtgttcgccatgatcatgacgctgctcatcgccatggaattcaagcattccatcgtgcgcgtggcgctgcgtcgggacagcatcatccaggtcaagacggtgatcctcatcggcctgatcgcgctggcgcgcaagttcgtgatcctcgaccccgaggcgagccccggcaagatcgccgcgctcgcaggtgctacgctggcgctcggggcgacttactggctgctgcgcgagcgcgatgaccggaccgccggggaacgctcagatgatcagtcgtga

SEQ ID NO: 364240 - DNA, 294 bp, Pseudomonas aeruginosa
gtgcaggcctatgcctccgagatgatcgccaagggcaaggtcggcaccgagtacgtcaagcaggccgtgacgttcttcggcccgaacgagcactggcgggaagccatgcagccggcgaacgtccatccgatccgcaaggggcttggccctgacggcaagttgctcccgggttacttctggcacgaagccgatatcgatctgccgatcgagaagcgccgcatcctgagcgacgaaacccacgaccgcgcctctgggtatcgctgggactacctgcgctccagggggctggcatga

SEQ ID NO: 364241 - DNA, 267 bp, Pseudomonas aeruginosa; identical to SEQ ID NO: 356842

SEQ ID NO: 364242 - DNA, 1194 bp, Pseudomonas aeruginosa
gtggggcagttccagcctactaaaaaccccaaagggtctatcgcaacgatagatgccctatgtgcagctctttcgatatccatagatgagctcaatcaagcgctggctatgccgattgatgagcgttatacgcttcccaaaaaagagctattcaagagtgatggaagccctagggttgcatataagccacatcacttaattagaaagattcagcgcaggatcaataaaagaattctcggtcaagaaggttatattgactggcctaatcacatttttggaagcgttccgaacaaaaaagtaccagatggcgaagatatagttaaggactatataaattgtgctcgccagcattgtttggctaaaagcatgctgaaaatggatgtaaaggacttctttgataatatccatgtggacttggttttttctatatttaatagctttttgagtttttcggatgttgtgtcaaatacactggcaaacatttgttgtcgtggggaatttgtcgtccaaggaggattgacgtcaagctatctggcttgtttgtgcctttttgatgttgaggcggatgtcgttgttaggctaaaaaataagggattgatatatacgcgacttatagatgacattaccgtgtcttcaaagagatcaggttacgatttttcgtttgctagacaaataattgaggacatgcttttttctcggaatttgccagtgaactcaaagaagacggctatccattatcattcttctgctccccttatggttcatggactcagggtttcatttaacgagccgcgtttgcctgcgtctgaagtaaaaaaaattcgagctgcagttaaagatattgaagttttagcgaaggatcacctgtatcgaattacccatgcctaccggcatgactttaatcgggtgatgggacgggttaataagctaagccggatagggcatacacaacatgagaatcttaaaaatcgattgttgaagtgttatccgttgccctctttcaaggatattactcgcgctcggcttgcagttgaaagggttgagcgagactacgaagagaaatgtgcgacctattggtataagaaacgattctatagggcgcatgaacgattgaatctattaaaaagaagctttcctgataccgcctctgagcttagagatcggcttcgagacttaaggccggaatatgattaa

SEQ ID NO: 364243 - DNA, 735 bp, Pseudomonas aeruginosa
atgattaatcggatatcgcatagatacaattttccaccatctctagcggctttgattgtctgggggagtgggatatttttgggtgggatagctgcggcaatttttattctggtgcccacatacttatcaggggggtattactctaagcccatctgtttgactaattcttgtgtaaagcacacgcttgaggcgtttgatcaggtggttgtggtgttttggggggcagtccaagttttggtggcttttgctactataggtgggatatttgtagcgctaaccaattatcttgaggtgaataaaacaaacgcactggcaacacatctttctcagttttcaaattttcaatcttatgtaacgctgcagatagagcgtcgtgatcaacttgcgatttcatcgtttgatattttggcttggtataattctatatttccattctctcgaaacggaaatcttgttgtatcaagtgagtaccttcagcagatgcaatatttaactgatgtcattgctaaatctaactccgctattctgggaggaataactgaacgctttagctatgtggagcatcagaagtcagtcatagctatcttgagtgagattgggataacagtagagcggtatcaccggaagcagtggtgcgaagttgaagatgagatttttgccttaattgatatgataaataagaccttttgtttagagtccaaaatttccgtgcttccggttcgtcgatatctatga

SEQ ID NO: 364244 - DNA, 1686 bp, Pseudomonas aeruginosa
atggcacggctttttcgcccgcccggcagaggggatgcccgaacgctcgccagaaaagacaaagcccccggaacgccaggcattccaggggctttgctcatatgtaatggcggagagatagggactcaccacaaaaaaccgccaaccctacaaaacgctacagcctctggaccatccaagcattttacgtacaatggatacgtacaatcagatgcgcagcagctagtttccatggcaaataatctcgaactgcaaggcggtacttaccacgtgaggcttgcggtcccgaccgacgtgcaaaaagcctttggtggtcgccgaatactttcgcaatcgctcaaaacgggagttcatagggaggctttggagctcagactaccaatccttgccgcctggaaagctcagatcaaactcgcgcgtgaaagccgctcacttcctgaaggttggcaggaaaaacttcgaaacgagctgatagctttggatgaagcaaagaaaactgccaagcttagaaccattggcgagcgcacgcctccattaaacatatccgctgaagatatagaaaaattccaagaagaaaaccaagacctattggaagccgcatatcctcacttcgacaacaaccctgacagcgaaatccaatcaaaactgcaattccaagaaagaatataccaagctgctcggctatgcatagaagccgacctacaccactcatacagcttaaccaaagaccaaatagatgaactggaagaaatttcagcagacccgcaatcctacaagccaaaatcaccaatcacaaaagcacgcctagagaaattccacaccttccgagccagcagaaacatcttagacaaaactcttgaccaacaaagctcaaaactaagaaagctttctgcataccttactgaaacagggagccctctagacttcgatacagtttcaaactggctggatacgctgaaattatccagcaaaactttagcccaataccttttaaccggcagtgttttctggaaatgggcgatgaagtatgacgaacgatggagagtcgattacaaaggaaaggcaaacccctttgaagaccacgatctcccagtattacggggagccgaacgtgccagcgcccagcgtaaagacttcaccttgaatgatattaagaagattcattccgaagctctccagtctggccacagcaccttagccgacattattatactagggctctacactggagctcgaatagaagaaatctgccgactgaagaagacaaacataattacagtcgacaaagtaaagtgccttgacataacagacagcaaaacagctgcaggcatcagaactgttccaattcatcctttcatcaaggataccatcgatcgactagccaaagactcaactgacgacttccttataaagagcaaaagtcgcaacaaatacgggatacgctcagacccgtttgtaaagtccttcggcagacttaaaacatcccttggatttggtgaggagcatgtatttcactccatacgaaagacagtcgtaactcaactccacagagccggaataccaagtatattgatctccgagttggtgggccacgagaccggaacagttacatttgacgtctacagccaaggagcctccacaacccaaaagatggaagcgatctcaaaaataccaaaactgccgtag

SEQ ID NO: 364245 - DNA, 1956 bp, Pseudomonas aeruginosa
atgagcgttatggatttattgcgtggatttacttctaaagcggtcatagtggatgatggatatgcagaaattgacatgtccatgattgatggtggcgattttcaagagttttatgaatatgtattggctgatgggcgctgggagcgcttaaagcaagatgtttttactgggttccctgatttggaaccggaagacttaattgggcatgaagaagcaattcgtgctgcttggaatttctaccatagtgcttcaagccataatcatccttgccttgatatagtctttcgccaactgctcgctacagtgggagttaaaatttctccattgaagccattggttagttttttggagaatgatcttgggcttcaagtgaagcgctatagtagtgttgaggctgcttcagatgaaattaaaacctgccgtttagtatttcttgatttttatctatcaaaaattcctgcagaggaagtgctgcagaatattgagaagcataaggatttgttatctagtcgtgtggagggtgataacagtctgcgtttcgtatatttaatgtcgacacaacttcctcagaactcgattttggagcgtttcagacgtatcacaaacttaagggctgctctcttcagtcctgtggaaaaggagttattgcagcctgaatggattcaggctgagttggctgctagagtttatagatatagagatatcgtgagggttgaggagttcttacaggcttttgcagaggccattacaagctctgcagagagtctgttgaatgatatttcagctcttgaattacatgatctatccattcttaatagcatgcgactttataaagagcaggaaagttatgccgagtacttgggctggcttttctctgaggcactatccgctaaaattagaaattccaactctctggctggtgctgctaggggggtaaacgatatccagcttacccctttctcgggaatgcttgagccacgctctttgttgtttaagctatattctgagattgcattttcatatctggaggaggacggtgcacgccaagtgcattttggtgatatttactatcctaagtctctggcgcgcagtctaaaaaaatcagatcttgcccagcggttaaagacgaaagagtcggatgttcgtagttggggtgatatacgacggcgtgagcggatggacaaccttgcactcgctaagtcgcgggctagtagtgagcaagtgttcttggtgatatctcccgcatgcgaccttattcgttgtccgtcggttgattatcaagttacctgtgttagaggctttattgagcactctacgcctaggttggcagatttgtttgatcagggttatttgtttggggaaaataaacacttgatgcgccttcaggaaaaaggtcgcgaagagtatgccctgataaactggacgcccaaagatattgttactatccctattgataggattcgcgacaagagcctctttggaaaaagagcgagaatgaatgagttattctgccatgagttgaaagaagaggctcttagagttctaggtcgtgtaggggttcctgttgatccctcattttctattcccttaggcgcagcatttagatttaaagatggaaaaggttataagctcctagtcgctccttctaatgcattcatttctgctattcgtgtagcaggtaacaagttgaatgatcgaaagatagtgttcactgcagagttcaagcagtggttcggaagagaggtgcgtgctatctgcggtgatagtgttccaaagagtgtggcctcagtagtgagttacttcgagcaatcatctagtgtcgagtatactgtcagaaaacaagatcctactcttgtaagtgggcagggtaaattgatctatctagagcgatattctgaggaaagttgtacgcatgagcttgcgctctatgtttatccttggagtgagtatgtctag

SEQ ID NO: 364246 - DNA, 903 bp, Pseudomonas aeruginosa
gtgcgctggcggatagcgccggggcgctattcgccctacggggtaatggggcgctcgggtagggcgaatagccgctcgcggctatccgccggacggggtaccggtgcgctggcggatagcgctggggcgctattcgccctacgggtcaatggggatgctcgggtagggcgaatagccgcttgcggctatccgccggacggggtaccggtgcgctggcggatagcgccagggcgctattcgccctacgggttacgaggaactcgggtagggcgaatagccgctcgcggctatccgccgggcggggtaccggtgcgcgggcggatagcgccagggcgctattcgccctacgggttacgaggaactcgggtagggcgaatagccgctcgcggctatccgccgggcggggtaccggtgcgctggcggatagcgccagggcgctattcgccctacgggttacgaggaactcgggtagggcgaatagccgctcgcggctatccgccgggcggggtaccggtgcgctggcggatagcgccagggcgctattcgccctacgggttacgaggaactcgggtagggcgaatagccgctcgcggctatccgccgggcggggtaccggtgcgctggcggatagcgccagggcgctattcgccctacgggttacgaggaactcgggtagggcgaatagccgctcgcggctatccgccgggcggggtaccggtgcgctggcggatagcgccagggcgctattcgccctacgggttacgaggaactcgggtagggcgaatagccgctcgcggctatccgccgggcgggataccggtgcgctggcggatagcgccggggcgctattcgccctacggggtacggggttcggggctcgggtgggacgggcgaatgtgttga

SEQ ID NO: 364247 - DNA, 2328 bp, Pseudomonas aeruginosa
atgtctgaaattagcataatgcattatcaggaacgtactgctaaagaacttattgagtcgctttataagaaatctcaactatatcctttcttcggttctggattcaccctaggatgcaaaagctacagaggtactgtaccagatgcaaccggattgattaatggaataaagaagattgccctaagcaacccagcgcttgatgagcgcagacgaccacaagtcgaaagcattaaaggtataaaatcatcctttgcacttatgaagaaagaggaaataatcccttcagaaaacgccaaaaggtacttagaagctatcttctcgaaagtaagccttccagcagataaatcaagagtgttagatctggactggccaggaatatttacattcaatattgacgacgcaatcgaaaaatacaaaggaagctatactaaaatacttcctaacagaccggtatcagcagaatacatcagatcaaggaagtgcatatttaaaatccatggcgacattgatgaatatctagcctatggcgactctaatctaatatttacatggcgtgaatatgcggaaagcattaatagcaatgcatccttgctttcccatttgacgaacgtatcaaggaatggagcactcctttttataggatgcagcctcgatgcggagatagacctacagaccctaagcagtgggaaaactttcgcacgatcaatattcttaaaaaaaggtgagcctgatcttgaagatgagctggcactagagagctatggaattaagagagtaatttatttcgacacatacgagcagatatatgaatggctaaatgggactcttggcgcttgcgaaatagagccgagaattcaagacattgaactagttcaagagcccaccgatagagcaagcataatcgaatatatagcacagggcggccccatagtagttcatgaaaaagacagaaaaatcgcaagaatacctagcacgataaataaacgcgcaataatccctgaaaacagacagagtatagcaaggaacaaattcacaatcatacgtggccggcgcttctccggaaaaaccacgctactgacggaaatcctagctgagctaaacgagtttcactgttacttcttcgcatccactgaggtatactcccagcaagttagggacaccatatcatcttcaaacggatcgttttttatatttgattcaaacttcctgaatcttgaagcatttaaagaagtaataaaatcatctgaaaaaaaccaaagcagactgatattttgctttgataactccgactatgaattatatcgccatcacttagcaactcagaagatagagtaccatgagattattgcaaacaacagactgaacgctcatgatgctgatatctactccaggagtttaaacgagcttggcctgcctatataccacacgaaagaaaccctcctagacttcgcttatcgagtttatgatgaatacaaaaacgatctacctgtttccagatactttcaaagaagcaattcagaagaactcttaaaagtttcaattcttgtcgctggattcgaaaaggccacgtctggacaattactggcagcaatgcctgaatttagtgccgaagatttcacaagaaaacactctgttctgtttgaagttgaatccgtcaccggagaccccggcaaagcaattgtatgcaactcaaagccctggctttttaattttcttagagatgcagccaaagaggcaagcactaaactcgcgaccactgtagcagagttagtttcatcgcttttgaagtgcgggtataaagacactgccaacacactaataagatttgataaattaaatgagatacttacctctcaaaatgatcacggggcagccaggctgataaggcaaatatataagcagctatccactgcatgtggggcgatccctcactattggctgcaaatggccaaatgcgaactaatggcgggaaagaatgactccgaaattacagatggaatactctatgctagaaaagttaggacagatgaaaaagagcgaaaaggatttacgtattacagcgcaacattgatattagcccaactactttgcaaaaaatacaccctgacaaaagacactattttgttttcagaaatcctagaaactttaaacgagtcatttgacaattactcaaacaaccaagctcacttagaaaaacttaagtaccaatataaaaggagtaactcaccaataaatgagactcttgcctcccttaaaggaaaaacgaatatctttgctctagagaaaaagcaagatatagcaaagctatttgcacaccttggtgattaa

SEQ ID NO: 364248 - DNA, 492 bp, Pseudomonas aeruginosa
atgaaaaagctgttttctccatacaatctggacagtctggagctggccaaccgggtagttatggcaccgatgacccgcacccggacggaaaacaatgttccgaccgaactgaccgcgctgtattacgcgcagcgggcctcggcgggcctgatcatcaccgagggcctgccgatctccgacgagggacgtggctacctgtataccccgggaatctacacggacgagcaaacccgtgcctggcgagaagtgactgatgcagtgcatgccaacggcggcaagatcttcgcgcagctctggcacgtgggccgcatgtcccatgtgtcgctgcagccaggaaattctgcgccggtctcggcgagtgccgagccagcagtaggtactacagcagcctatcgccgaacttcagggctctctggttggtgttccagtcttcctggtccagcgtcccccaatctcccgccagatggcggttcagcaaaggcgctgggttga

SEQ ID NO: 364249 - DNA, 921 bp, Pseudomonas aeruginosa
atgataatacttggcggaggaacaactggtgaagaacatgttctgaacctatgcagcgaagccacacccagaacagttgttggatatttgagttctgttatttccagaggcgctggcgccgccttacctgaccccgacgactttattgttcgcgcaaaagatttcaatataaaccttactgaaaatctattcttgttatgtggcgatggaaatctcgaaccaatgtctccagcaatctctggagctgccgcagcacctgcactgacaccaaaaatacaaccttggaagtgggttcacttaatctttaaagagctaatagataacatagtaaaaatacagaaaaacaaagaactcgttgttttcattgataccaacccaagcttttcaatctatactgaattagcaatctcctcagcagaaaggcttataacccctgtaaacgcagatgactcatcaagagtagctacaaatgcaatgtttatcctattacatggacaggtacctccgcaccctatatatggctcatggacttttgctgcacaagcacaaaaacacgggataaccataccgcaaattcatgccataataggtaaccgcttaactcagtatgatggtgccgcaacagcatttagggccctttcagatgctactgctgacacccttttctcggcttaccaaaaccacccaacatacttcacctctcgaaaaaccttagctactgacattgaggaattcagagaccattactctgtagcgctccgagacttcaatacagcaggtgttgttgctgcccatctcggaaaaccgctctcaaaactagagcagggttaccataacattcacggaactccagtaaaagtaaactctgaacgagtagaagagtgtctagccgcacttgatgaggcaatcgcttatatataa

SEQ ID NO: 364250 - DNA, 594 bp, Pseudomonas aeruginosa
atgagcacgcagcaactgcaccgtgagcaaaccgatcaggccgacacccgtaactacaaacgcctcgcccagtgtcggctgagcaaggcgaatgccttgcaggcctatgctggcgacgacgacgaatgccgccgactcatcatcgacttcgtcgggaatgcgcgcgcaaagattcttcgacacctttacgacatcggcatgaggtccgttggatacgacccggtctccgaccttgaaaccttccactccggaaccgacctcggaaacgacgcctacattgcagtaacccaggggcaggggctgcccaagcttcgaacgaacagcctcgatagtagtcatcaggccatcggtctggaccttctccagaaccatcttgactttctcgggttgctggcgggccttttccagataggaggccttgccaaatccgacgagcatccgctcggtgccagccgaaataagagagaccctgctgttgatgacgatatgttccttggacgcttgaggcgcaggcgcctcagttaccagcgtcccacccttggccatatcctggagaacctgcttcatacgtccctcaaatccaaatcagaataa

SEQ ID NO: 364251 - DNA, 141 bp, Pseudomonas aeruginosa
atgcagatccgtgagatgaagcactggggcgacttcacaccccagtacttccgccagacggccgactatctgtgcgtattcgccgagcgtaagcgttggcgtgttttcaacgaccagcagtgcctgctgtgcaggatctga

SEQ ID NO: 364252 - DNA, 3096 bp, Pseudomonas aeruginosa
atgtcgaatccgtttttcgatcacccaatcctcaattcaccataccagaggcctagccgccactgggagctagatgaaaccggtcagccgacacagaagattgttgaagaccggcgcaaagcacagttcatcacgccaattccaaagcccaagaagcagaaagcgactctgaagcaggagggctttctctttgacgaaggtaaagggctttctagcggcaagcagcaatacgaccctacctcgatcatcaataaggtgcgcggccatgtagatacatggcgtgcgctgccagccagccaatggcaggttacccccgaaacggcacgcttgctccagcattggcggcatcacgactttcatggcgtgcgcccgttcttttgccaggtcgaagcagttgaaacggcgatttggcttaccgaggtcgcccccttatccaagtctggaaaggaactgctggaacacctcgcggctgccaacaaggacgccaaccctgagttgttacgactggcgctaaagctcgctactggtgcgggaaagacgacagttatggcgatgattattgcctggcagaccgtcaacgcggtgcgtagccctgccagcaagagcttcacgcgcggatttctactctgtgcgccgggcctgaccatcaaggatcgtctgcgcgtgctgcagcccaacgatccggatagctactacaaggaacgcgagcttgttccgagtgacatgcttgacgacattgcccgggccaagatcgtcattaccaactatcacgccttcaagctgcgtgagcgtattgagatttcaaagggcggcagacaactgctcaaagggcgaactggtgatgatccccaaacgcttgaaactgaagggcagatgattcagcgcgtgatgtcggatctgatgggcttgaagaacatcatggtcatcaacgacgaagcgcatcactgctaccgggaaaagcctgcgtcggatgacgactacattgatgacaagggtaatccgcttacaggggaagccctgaaagaagccaaggcgcacgccaaagacgagaacgaagcagctcgcctctggatttccgggctggaagcggtaaatcgcaagctgggaatcaaccgtgtcatcgacctctcggctacaccgttcttcctggccggttctggctatgttgaaggcaccttgttcccgtggacgatgagcgacttttcactgatggacgccatcgagtgcggcatcgtcaagctgccacgcgtccctgttgctgaaaacatcactggcgatgagatgccgatgtttcgcaacctgtgggaaaacatccgcaaggacatgcctaagaaagggcgtggctccaatcaggatctcgatccactcaaacttccgacaaggctacagacagccctgcaagccctctacgggcactacgagaagacctacgcaagatggcaggatgctgggatcagtgttccgccttgcttcatcatcgtttgccagaacaccgctatctccaagctggtgtatgactacatttcaggtttcactcgcaagaacgacgacggaacatcgacaccggtaaatggccgccttgccttgtttcgcaacttcgatgaacacggcaatccgttaccgcgcccaaacacattgcttatcgacagcgaacagctcgaagctggtgatgcgttggacgataacttccgcaacatggctgcagatgaaattgagcgtttccgccgtgagatcgttgaacgcagcggagacgcgcgcgcggctgacaatgtcacggatcaggagctccttcgcgaggtcatgaacacagtcggtaaggcagggcagctcggaggctcgatccgttgcgttgtgtcggtatcaatgctcacagaaggttgggatgccaataccgttacccacgtactaggcatccgcgcttttggcactcagcttttgtgtgagcaggtaattggccgcgctctgcgccgtcaatcctacgagctgaatgacgagggcttgttcaacgtcgaatatgccgatgtgttcggaatccccttcgacttcaccgccaaaccagtaatcgcaacgccttccacaccgcgcgaaactgtgcaggtcaaagcgatgcgccctgaacgcgatgcgttggagattatctttccgcgtgtcgaaggctatcgagttgagctgcctgaggagcgattagctgctgacttcaacgatgagtccaagctcgtgcttacgcccgcgctggtaggcccatcgcaaacgcaaaatgccggcatcattggcgagtcggcagatatgacgctccagcatcttggggacatgcgcccctccagcctggttttcaacctgacacagcatttgctctacaccaagtggcgagaccccggcgaagaacccaagctgcacctcttcggccagctcaaacgcatcaccaaggaatggctggagacctgtctcatttgcaaaggcgatacctatcccgccttgctgatgtatcaggaactggccgacatggcctgcaacaagatcaccgcggccattactcgtcactttctcggtgaccgccccatcaaggcgctgcttgatccatacaaccccagtggatcaacacggaatgtgcgctttaacacctccaagaccagccgttgggaaaccagctctaagtacagccacatcaactgggtggtcctcgatagcgactgggaggctgagttttgccgtgtcgccgagcggcacccgcaagtgcgggcctacgtgaagaaccacggtctcggtttcgaagtgccttaccgcttcggctcggaaacgcgaaaatatctgccggacttcatcgtacgtgtcgacgatggccgcggccctgacgatctgctcaacctcgttgttgagatcaagggctatcgcggcgaagacgcggtggaaaagaagtccactatggatacctactgggtgcccggcgtgaatcacctcggcagctacggccgctgggcctttgctgagctcaccgacgtattccagatgcagcacgactttgctgaaaaaatcgaaagcgaattcaacaaaatgatcgagtccgccaccgtgctggccgacagcgagaaagcatga

SEQ ID NO: 364253 - DNA, 3027 bp, Pseudomonas aeruginosa
atgaccatggcgaagcaacccgaactcaagactgtcgaaaccatcaagcacgacgacgctaagcgcaaaaacatcccttccgccgagcagcaatcctttgtccaggagccttcaacgccaaagcagattcgttatccgcgaaacgccgatctcgatcctcagctcgtttggcgtggtaaagatgaacaggactggagcgatctcgttgtcaacgccccgccgctctacattcaggaaaaagtgcatcccaaggcgctgattgacgagctgctgcgcgagacacgagagcgtgagcacggtgctgggcaggccacggctgacctgttttcagacttcaacggcatccccaagggggcggacaagaccgagttctaccagcacgaccagaactggaccaaccgcatgatcttgggagatagcctgcaggttatggccagcctcgccgagcgcgaaggcctgcgtggaaaggtgcagtgcatttattttgacccaccctacggcatcaaattcaacagcaacttccagtggtccaccacaagccgcgaagtgaaagatggcaaggcagaccacatcacaagggagcccgagcaggtcaaagcctttcgcgacacttggcgcgatggcattaactcctaccttacctacctgcgcgaccggctcaccgtagcgagggatctgctgacggactcaggatctattttcgtccaaattagcgacgagaatgttcaccgggttcgtgctgtaatggatgaggtctttggagaggataactttgcgggactaattaccttctcgaaaaccaccgggcaatccggaggggcgataccatcggtgacggattacctagtctggtatgcgaagagtcttgggagtctgaagaagcggaaagtcgtgattcagaagcctgccattgataatccaaacgaacgttacgtatgtgtcgaaacagagtcaggagaagtaatcgatctgtctgtaaagcaaaagacaggagaggcacctaggcctcagggaagaatccttaagttaacagatacgagctcgcagactggctccgaaaactcccgagtgccttttgtcttccaaggtaggcaacatatcccctctggaagtcgggggtggtcaacaagtaatgatggtttggcccgtgtctcgcgcgctggatatctttattctgttgggaagagtttgctttggaagaactaccgagaagaggggcgcgccagtccggttaataattcttggctcgacctcaggccatctggttttggggggcagaaagtttatgtggtggaaacagagaatgctgttgttgagcgttgcctccttatggccactgaccccggtgaccttgtccttgatccaacctgtggttccggtactaccgccactgtagccgagcaatgggggcgtcgctggatcaccattgacacttcacgcgtggcgttagccctagcacgtgcccgtatcatgggggctcgctatccctattacctgcttgctgattctcgcgatggtcagttgaaagaggctgaggtcactcgtacaccgccgagcagtcaaccggtgcataacaacatccgtcatggtttcgtctacgagcgcgtgccacacgtctccttgaaatctatcgcgaacaattcagagatcgatgtgatctgggagcagtgggaaaagatactagaaccactgcgcgcgcaactgaacgagttgctacagacatcctggcaggaatgggagattcctcgcgaagcgggcaaggagtggccggtgcaggccgagaaaattcttgccgactggtggcgggcacgtattgcgcggcaaaaagaaatggatgcctccattagcgccaaggctgcgttcgagtatctctaccacaagccctatgagaacaagaaagcggtgcgtgttgctggccccttcacggtggaaagccttagtccgcaccgcacgctgggagtaggtgaggatgacgagttgattgactcgctgcaggtttctgagccgggggccgactatgcggcaaagcaatcctttcctcagatgattctggcgaacctgaaaactgccggggtacagcaagcgcataaggaagaccgcatcagcttcaccacgctcacaccctggcctggtgaactggtgtgtgcggaaggtcgctatctggaaagcgaggatgaaaagcgcgcggctatcttcatcggccccgaattcggcacggtgcagcgcgctgatttggtggcagctgcacgtgaagctgcagacgcgggtttcgatgttcttattgcctgcgccttcaacttcgaggctcacaccactgagttcgccaaactcggcaagttgccagtgcttaaggctcgcatgaacgccgaccttcacatggctgaagacttgaagaacaccggcaagggcaatctcttcgtgatcttcggtgagcctgatgtgatgatttgggagggaggaagcaaagcagttagcgatgagctggttgcgattgcgaatcgcactcctcagttgaatgagaaaattcatgagttgagagataggctcacagctctgaagaaggaatctaaagtaagtaaagagagaccgacgaaagatgacggcgctgacacgatcaaactcaagattgatgatgcggagagagcgcttgctcgtgacttgaagttcaaggagtacgcaccggaaatacctcctgcaaactatgtcgtggaggtaagaggtgtagatgtatttaaacctcagactggagaagtcatcagcgatggtgccgacggcatcgcatgctggttcatcgacaccgattacaacgaagaaagtttcttcgtccgccatgcttacttcctgggtgcgaatgatccatacagctctctaaagaccacgctcaaggccgagatcgacgctgaagcttgggcttcgctcaaccgtgatacctcccgtccttttcccaagccgaagtccggtcggattgccgtaaaggtgatcaatcacctgggcgatgaagtgatgaaggtattcaaggtcaactga

SEQ ID NO: 364254 - DNA, 2070 bp, Pseudomonas aeruginosa
atggatttccggatcgcggacacatttaccgatagcctggctcgcctgacgggtgaagagcagaaggccgtaaaaacgacggccttcgatttgcagctgaaccccgccaaccctggcatgagcttccacaagctcgacaaggcgaaggacaagagtttctggtcggtgcgggtcagtagtgacattcgtatcatcgtccatcgcagtgattccagtttgttgctgtgctacgtcgatcatcatgacaaggcatacgcctgggccgaacgtagaaagcttgaaacgcaccccaagacgggcgctgcgcagctagtcgaaatccgcgagacggttcaggaaatcctggttccggtatacgtgcaacaaaagccggacgctgtgcttttgttttctggaacgtccgatgatgagctcttgagctacggcgtccctccggaatggctggcggatgtaagacaggtcacagaaaactctctgctgactttggcggatcacctgcctgccgaggcagctgaggcattgctcgaactcgcgactggcggcaagccgcgaattctggacttccttgcagaacagaaaagccccttcgatcacccggacgcgcagcgccgcttccgtgtgatggcggatgttgaggagctgcagcgtgcgctcgactgcccttgggaaaaatggacggtattcctgcacccagagcagcggcaacttgttgaacgcgattattccgggcctgcgcgagtttccggttctgcaggtacaggtaagacagtggtggcgttgcaccgtgcagcggtgctagtgcgagctaaccccgaagcacgcgtattactgactaccttctccgacacactggcgaaagcactgcaggcaaaattgaaatggttgctgagcaatgagccccgcttggctgagcgcatcgacgtttactcgcttgaggcgataggtctgcggctttacaagtctcgtattggagcggtttccgtggcgagtcgcgagcagatccgttctttgatcgatgcggccagccaggttgtaggtggccataaattcagcccgcacttcttgctgaccgaatgggagcaggtggtcgactcttggcaactgaagaggtgggaagcttatcgcgatgtagcacgccttggccgtaagacacgcctcccagaggctcagcgcaaggtgctgtggagcatctttgaacgcgtgcaggtcgagttgagggcactcaacctactgacgatgtcggaggtcttcacgactttggccgcgaaggttgctgagaatggcaaggtaatctttgatcacgccatcgttgatgaggcgcaggatattggtatcgcacacctcaggtttctcgctgcaattggtagcggccgcccgaatgcgttgttttttgctggcgacttggggcaacgcatcttccaacagcctttctcatggaaatcgttgggtgtcgatgtgagggggcgctcgcgaaccctgcgcatcaattaccgcacctcgcaccagattcgactgcaggctgaccgtctgcttggcccgacggtgactgatgtggacggattcatcgaagatcggagtgacacggtatcagtgttcaatggcccacagccaaccgttcatgtgctgaaaacgatacacgacgagatcgaaagcgttgccaattggcttcgggcacggactcaggctgggtttttggcccatgagtttggggttttcgttcgttcagaggcccaggtggatcgagcatcgcaggctgtggcggcagcgggcttgccattcaaggtactggacgagcatgtggatacagagagcggctacgtatctattggcactatgcatttggcaaaaggcctggagtttcgggcagtggttgtcatggcctgtgatgacgaagtgatcccgctgcaggagcggatcgaaacggtgggcgatgatgctgacctgcaagaggtctatgacactgagcgtcatctcctgtacgtcgcctgtacacgagcaagagatgaactcctagttacaagtgtgagccctgcttcggagttcttggacgatctagtgaagcctcggtaa

SEQ ID NO: 364255 - DNA, 1668 bp, Pseudomonas aeruginosa
atggtttctagtagtggcaagcaggcagggttgggcaaagaaaagattactgttacatttggagctcaagcgtcattgcggacgcaacttcctgcctacacggtacttattgttcctagcgaggacaattggaatgattttggttatcgcactagggttgaggtccgcatccgtttggcagaggacgaggctgaacactctacggtagctttcattggcttcattactacctctccagatgatccaaatggtgtggttccactggagaagatacttcggggcgtagacaatctagcgatacctgcaaccgactcgcaccggttttacactatgttgccgagcatggacgcgtaccgcagcatagtgaaaaaattcggcgcgagtcgatcagctgaagttttgaaggcaatgagggatctcgttgctctgaatgagtttaaaactaacgctaattggctagacttagctgccaaggctgatgttttcttgaagtcgttcgttcgaaattcggagtcttattttgcgtataaaaatgcaggttcgattctgcgggggcttgagtttgaagagttccaccgattgtccaagtcaatatctattaaattccatttgccaggtcggcagagcgcgcatgatctgacattccgatttgatcatgaggcagatctaccgaagcggattgcggtaataattggcaagaacggtgtcggaaagagtcaaactcttgggcgtatagttcgtgctgcgttggaaggagatgagtctcttgtggatggaggggcgggagggcgtattttggttaatcgtattctcgctttcgcaccaaccaatgaggcaggctctgtcttcccaagtgataggcgcaagcgccctcgagtttggtatcgccgtttctcgctcaatcgcatggggactttgcggaaaggggctggtgtggctgaccaggtgctccaagttgctcgctcggaggagtacatcggggaatcgtctcgatgggatatctttctggaagcactggaagcaatcgataactgggagcagatctgtttgccagtcagagagagcgaacctataccgttgggcaagctgaggcttgggggcgagcaaagggtcctcgaaaaatttgctgcggtcgatactcgaaaagaaccgattcgtgtggttggcggcgttggctatcctctgagtagtggcgagatttcctttttgcgatttgctgcccaggcgagtcttagtgtggaaaatggttctttgttgctgctggacgagccagaaactcacttgcatcctaacttcatcagccagtttgtttctttgttagatagtctgctccgccaaacagggtccgctgcgataatcgcaacccactccgcttactttgttcgggaggtgttccaggagcaggtagcggtattgcgtaatgatcaggacggttacgtaagagtcgagcagcccgcgctacggacattcggggcggatgtcggagctatctcatattttgtttttggtgaggacgagccttcacgactagccatgagggtggaggagcgcctgtgtgcaagatttaatacttgggaagatttatatgcacggtataaggacgagctctctttagaggtattaggttcgttaagggagtcgatggagataggggcggccgatgaataa

SEQ ID NO: 364256 - DNA, 867 bp, Pseudomonas aeruginosa
atgaataagattccgcggccagttttaaatgacggagtggcgctgcagaatttatctaataatgagcgggttgcaagttatccgagcctaaagaatgttgtcacgaatattcagcaggcttatgtgcagtacgagggggcgcgtggtaacgcctttgctgtcgcaagggtgaatataccacctgaggtggaggctcatctgaaggctcactacaaggcaccaccgagcgagttaaagcacatcacgacgatgcgcgaggcgacggagcatctaacctgtccaatgtgcggctcatttcaccgtggaactcttgatcacttgcttccacaaaatggttacggtgcattcgcagtcttttccctaaacctagtgcctgcgtgtaaatgcaacagtaagcgaaaagagctcctggtaggaccaaatttaagcgagcgcattctgcatccttattttgacgattgccttgccgaacgactaattgcggcgcatttcgaagatcttggagcagtgcctcgagtggggctacggctgtgtgttgataatacgcatccagattatgcggcgatcgacttccattttcgatcaattgtcaaacggacggcgatcgttggatatattcgtgatagatggatagatttatgccgaaagccgagtttgattgtgagagagctaaagcataatccgcaaactcttaaagagcttcaggacgtgcttcaggatgagctcgatatgctcgacgatgtgcatcggggtaagaataactggaattccatatttgtgggcggcttgcttgatcagcatgtattggactggctatttcagaagatacatgctcccgggcgttcggcgaatggtccactagtttga

SEQ ID NO: 364257 - DNA, 1245 bp, Pseudomonas aeruginosa
gtggtgcagcatgcggcaattgatattatgtatcgggcgattgtatataacgatcaatctgcatggtcagaaatggaaggcgatcgtgcggcagagtatgctgatatgcgcgcagttatatgctctggccattctggatgtattaatcttgatatggggttgggtattaactcgtgtgaatatgtaacttctatttttgaggggccgagggcatcattcgtttctcggcatacgggggtccaggcaatactaactggtggtcgatctaatgttcgaatagattactcactgagctttgactcaaattttgctgagcgtatgagggcattagtattcagggagacatcgggcggtatcaatcacgagcgtgtgctggaggtgctgcgcctgaaggcgcgtaatccttacgtgcaatttgatgtgctgcctttcctttacgaaaatgtgagattgtctcgcgataattcagaaaatcagcggccagttaacacgctcattgcatttcgtatgctagatgaaatggattgggaggagtttggtgatactggtaaattaagattcaatcttgatgaagatcgtctgagggaggatcttcgtatcgatgctgagcaatttatcagcagcctctataccagtgacgcgataatacaacacgaggcaggtgctcttggagtgcaggcgttgctgctacggtttgccaacctatggcatgagtctcagaagaaggaaccaagtcgtattttgacaggtcttctggatttttgtgtctccgacttagggtacgtgccgatgacagagctaagtctgatttggcggggcatatccagtaaggttgttgctcctttctttggtccaattactggggcgtctaaggatgttctaaccaaggtcagatcaatggcttgggatataatgcaccttcgacttatggagcgactggctacccagagtaatcttggctcgttttatattccttatttcgtttcattggacgctaaatggcgtgagttgctgcgtataaatcccattcgagttatgctgcttgacgactcgcaacgtagaatgttatgtgcgcgttccggggagcttgagtttcaagcggcattttctaattatgtaaatcaatttccaaatgaattctcgccggagaaggtttctgccaggcgtaaaattgcatcggcacccagcatgcagagaatgaaacagctaattgctctggaggagcagcgctggctcgatagttga

SEQ ID NO: 364258 - DNA, 1629 bp, Pseudomonas aeruginosa
atgagcagctattcgtctcgcctggcacgccatcttaagagccgagccaagcaactccgcagtgataccaacctggcccatagcagggccttggaaaccgcggcaatcgattttggattcactggctggaagcaagcccaagctcacatggagcaggcagacgccaggattcgcgacctcgaagtatcccttccgcacgagatcgctcgacaagcagcagagctgcggacaatacccgggtatccctacgcgctcgacgaccaggtcggcgtacgttacctgccggctgacaagcagcaaacagagggagtggcaaggcgcctgattcttctgcgcttgttcgaggaggttcacgccccgcagaacctcaatcgatcggagagcgctcagctctggttccgcgctccgatgtcctgggaggatgcttccgaggtttgtcagggcggcccggtgagaatccagcgtttggccaacgcgataaggagtgatccacaggcacctacatggttcgggaccgacagcctgtcgctgactccggagtctgcacgcgccaccgttcttcagtatctgcatgccctgcattcgctgtccgttgtccgcattctgggtggcacttcgcaggaggtgattgaacatccctgcttcaaggagttcgccagcagcgtgttggcgacgctactgggcaggcagaaacaggccgacgcctacaaggctgtcctggactacgcaggaatcagcgattgggtgcagtcaggtcctggattgatcgagcctgatcgactcaactggatcggacgagagtcgccgccgatggcaccgctctcttccggtgtgtcgatgctggtcggctcccccaaccatccacgtcttcgcaaaccgctgaactcgcttcctcttgagcaacaccaggagctcgccggcgccatttcactcctcagccggtatgccccgggtaagacagggctccagaaaaatctggacgagttccgcgacacgttggcgggatggttagcggtggagatcggaagccaggagcgagcatttcagctttacgccaacaagctgcgcgcctatcaagccgtgtcgttccttgcgcctgcggaggagcgggagaacctagcaacactgcaaaacatccgacgctgcatcgaaacgggatacgaacagtgcatcccgcgggctcacttgctcggcaagttcggtaaggtcgagttggcctttgagcgctggatagctcgtacccgcgaccactggaagcgacccaatcacaagcttctgatggactctatcggtctggtgggcatcgacccgaaagaggaacccctgcttgagtcagagggtgactggaagcagaccgacctgatggggaccagcagagagaccaatctgattgcgtccatccggcctcatctgtttatgacctggaaagaagaagatgaggctgaagggtatgcgtttgatgaggcggacgcggacagtgagcaatcgattctcgatcacctgtatgacctgacgttttatcgctacacaggctctgccactacacctgcgaaattcatgaaggacgttcgcaaggccttctacttccgtcccgtgcacgtctggttcaagcagcgaaagataggctga

SEQ ID NO: 364259 - DNA, 1419 bp, Pseudomonas aeruginosa
atgccgcctgagtacgacttactcgcctaccccaggggaaccgtaacggcgccagccggctgcggtaagacgcaactcatcgcggacacgctgacccagcataccggcgaaaagcctgttctcattctgacccacactaacgcgggtgtggccgcgctacgcctgcgcatgcaacgcgccaacgtcccagcgtctgcgtatcgcgtggcaacactcgacggttttgccatgcgcttggtcggcatcttcccagagcgaagcggcgtacctgccgccactcttgagctgagaaacccgggtaccgattatcccgcgacccgcttggcagccttcactttggtacgagcggggcatgtcaacgagaccctggtagcgacttatgctcacctacttgtcgatgagtaccaggactgcaacttggtgcagcacgccttggtcaccgcgctcgctgcggtgctacctacctgcgtgctgggtgaccccatgcaggccatcttcggctttggcggcaatcaactggtggactgggatgcgcacgtacttcagcagttcccgatcattggtgagctgaaccaaccatggcgttggataaacgcgggtacccgtggttttggccaatggcttctggactgccgacgggagctgcaagcaggcggtagtatcgacctgcgccaggcacctgccgaggtcgattggattcagctgctacctgccacggccgagcgtcagcgcatgacagctgcgctggcaaggtcggtgacacccgatgggcaggtcctggtgataggcgacagccgcaacccccgagggcgcaggcagatggccagtcagactcctggcgctactgccgtcgaacctgtggatctagccgacctcacgaattttggtctgacgttcaatttgcaggcagcagacgccactacgcgactcgtcaactttgctgccgatacgatgacacaggtcggcgccgccgctttgctgcaacggttggacatcctgcgacggggcgctgcccgcacaccacctactccggcagaagccgctttggtggtattcgcggctaccccgacttacccgctagccgcgcaggcgcttcgagccttggctaaccaagagcatgcgcgcgtatatcggcccgaggtgttgtatggctgcttgcgtgccttgcagagtgcagctgagggtcgttgcactttcgcggaagccacgctccgagagcgcgagcgcaatcgccatgagagtcgacagctggctcggcgcgctattggtagcacgttgctattgaagggattggaggcagaggtcgcggtgattcccaaccctgaaaacatggacgctcgccatctctacgtggcgatgacgcgtggctcgagtcgattggtcgtgtgttctgctacgccgcatctcgtcccgcgatag

SEQ ID NO: 364260 - DNA, 642 bp, Pseudomonas aeruginosa
atggctagccagaccctgtatctgctcgatagcgatgccgccaaaaaactctgccagtaccagttgctttacgagctgactgtggccttgggctgctccttgggcgatttcgccgtccttccgcagctcaggttccaattgaagctcgacaaggatgacaaggcgctcgccaaactggggactcaggcggctgtcgatctcgcgcgcgatctggtcgcctcggcctcatcagttgaaattgaggctgacgctgcgaaccctttgctgcagctgaatcggcctgacatcgattccggtgaggcgaccctttttgctgcactgcacagcaacgacaacgcacatctctgcagtggcgacaagcgagcgttcattgccctctccaaggttaatgacgtgccagtggtcgatgccttgtgggcgcgattcatctgcctagaagaggcaatttttctcatcctgaagtgcagcgatttccaggtgatttcggacaaggtcagagcacaaccagacgtggatttgtcgcttagcatcgcgtttggtcgagctttagccagttcgcaagagactgtgatcgaagcgctgcagagctacatgggaagcctggccgagaagaccgacgggaagtaccttctgccgggttga

SEQ ID NO: 364261 - DNA, 1041 bp, Pseudomonas aeruginosa
atgcatgacgctaagactccgataaccgttaaatccgcattcgaaagccttcaggctgctggttaccctcgtgccttcgtcacgaagctcctgcctgagtggtgggacaacagccttctgaaaaccagtgccggagcattccagttcgctctgatcctgaagcagcggctgggtctcgaagtgaatttcggacaggacggtaatctggcaatcgagccccgagcggctcatgccaatttcaagcatctcgcgagcactcgggaagaagagctgaatgtcgcagctagcctgggcatcgcgttggctcgccttgccgtgttcgcgaccaagaggccttacgttggcctaccgaatgatccggccgccctgtacgccatggtccggagcattactggccgtgggcatgtggatttcgagggactgcttgctctgtgctggtctcacgggatcccggtgctgttcctaaaggaaatgcccaggaacaccaagcggatgacaggtatggcggtgatggctgacggccgccccgcaattcttctgggtttcaactacacgcactattcgaagcagctgttcgtactggctcacgaactcgcccacatcctctgcggacacgttcagaacaatggcgcgctgattgacgaggaaatcgccgatgtgagtgagggcctcggtggtcgtgcccaagttcgacgtgatgagcaggagcgagaggctgatacctttgcgctcagcctgattcgaaatggtgacctggacgtcatcaagcggatgccacggattgtgagttctggcgccgtcttggctgccgaagcttcaaggttgggtagagagaccggaatcgatccgggccacctcattctgtcgtttgcgaagcagcgcgaagattggatgatggccaaccaagcgctgaactttagtgagcagccgttaagcgcaatagacctggtgcgggcgagcttcatggacaacatcgacctcgatgccatcagcgatgaaagcgctgagcacctcttgtccatgcagggaatcaatggctag

SEQ ID NO: 364262 - DNA, 603 bp, Pseudomonas aeruginosa
atgcgcgaagcagaaattaaactcgccctcactcaccacctggcagccagcctgccggacgaacccttccacttcctggaggaggtcgagctcaacggcggtgagatccgtgctgattttgtgcaggtgaaagacatgcactgctacgagatcaagagcgaggctgactccctcaagcgtctcatcggtcagggctcgcgctatgcacgcgttttcgatcagatcactctcgttactgccgaatgccacctcaaaaaagccatgccaatgctcccaccgtggtggggcgttatggttgttccagaggaagcaggaaaggcgttcaagcaggtgcgcaaagccaagcccaataagcggcatgagccagatgtgctggtcaccttactcaaacgagaggaggcgcttcagatcctcgaggagctcggaatcactcgcggattcaagagcaagagcctgtacgtcatccacgcaaaggttgccgaactgctccccttgagcgaactcaaggagagggttcgtcagtgcctcatcgaccgggccagaacctcgatcagtactgctcttggagcacgtaagcgatgtggtgactccaggcctcagtga

SEQ ID NO: 364263 - DNA, 1026 bp, Pseudomonas aeruginosa
atggcaaaattccctcaccacccgcggtacctcccgatcatcaaatggcagtcctgggagcagaaggcgctggagaatgtggacgcgaccctaatcccgcgcatgcatccctgcatcgaggttcgcgcctctcggcagcacaccaacctgctcaacaggatgaaggacgtctggccgtacgatgctttcgtcgactattcgaacccagctggcgctctcactccggtgagacaaaaagagcttatggattttgcgcgccatgccgtcgcgaacgggctctctgcttctccggtcttggggccggatcatcttgccgccatggggccacaatttctggctgtagcagcggctttgccttcggtggccatccgcttgcgcctgaatgctctggaggttcctcagcagaagctgcagcaagcacagcaggccttcggcacgctccaggcggccggcattccgtctcccctgattgttgacttgggtgtgagtccgaaggattggtctgcggctgaaattgcgagcttcactcatggcctccggcagcttgctggcatcggctaccagtccatgcacctggtgtccggggcttatcccgcaagcctagcggcggtgaagacgggcgtggccaactttaagcgctcggactggggtttctggaaggacgtgaatactcacgctgccgatttgaggatcgggttcggcgactacggaacgctctcaccccaatggacggaagacattctggaattgcgggccaaccgcattgcgattcggtatacccgggatgacaactggctcatcctgcgcgcgggtggcaagactacccaggactcgatcgccatctcccagatcttggtgaatggctatccgcaggacttcaaaggcgccccgtattcctttggcgatctgttgctagccgagcgcgccgatccagcccatccgatcaagaagaagcgctgcggccactaccacatcactgaggcctggagtcaccacatcgcttacgtgctccaagagcagtactga

SEQ ID NO: 364264 - DNA, 438 bp, Pseudomonas aeruginosa
atgaaaaaacgccgtacgcatatcgttccgctcacggagcaagcgctggcgctgctggaggcgatcaagccctacagtggacatcgtgagtatgtcttccccgcggaccggaaccctcgcactcactgcaacagccagaccgccaacatggcgctgaagcgtatgggcttcgaaggacgcttagtcagccatggcatgcgctcaatggccagcaccatcctcaacgaacacggctgggatcctgaattgatcgaggtagcgcttgcccacgtggacaaggacgaggttcgcagcgcctacaaccgggcggactacattgagcgcaggcgcccgatgatgatctggtggagcgagcacattcaaaaagcagctacgggcaatctatctgtatcagccatcaaggaaaatcgtgacaggaaggtcgtctcgatacgctga

SEQ ID NO: 364265 - DNA, 744 bp, Pseudomonas aeruginosa
atgaatctcaaagaggaaattactagatccgagcctgactccgaagatttcagagaaaagataaacgagttgtcgtggaaatacaccgcgtcactcaaaaatatcgatatggcgaatttatctcaactcatcgttcgccgcgcggccatcgtccaaatactagacctggcgtgcggaaagaacctagcaatgcagaagattgatagtgatgcacgccgcaaggatgagagagtaattcacagcatatttttcccaatgcgaagagacagttcagaggttgctgaccacgatatctggcttctgagcgaggagtatcattactacgactatatttcttcagatcttccgctctcgaagcttacttgggatgatggcagcaaaatattttcagaggacattgatcagggtattcagaaaatacttgagaaacgtgccgatgaaaatggtggcaagcttctgaatgcaatgtcaggtggcaagctaaagaaattttatgggtatttgataggcgacactgtcaatccacttcgagtgggtggtagttggacaaagtttccgatgggcaacggatggttccaatcgagtccactgagcgaccctgaaagcggggtcaagcttggcgaaacctatttcgaaatcctgcactttaaggatgttattgaacgggccaagaaaagaattagcgtatatcaaggcaagctaaacctgaagttagactttcaagaggaaacacctcgaaactag

SEQ ID NO: 364266 - DNA, 1437 bp, Pseudomonas aeruginosa
atgcccgtggccttcgtcgtcgacgacatccgccgctgccatccggctgaaatacgtggaagcgccccacagcgcgcggtgcggggcgttttttttaacggcggccacgggcatactaggccggtccaattcccaggtgcccgccaccccatgctccgcctccttcctctcctgctatccctcgcctgtctcgctccggccttcgccgacgagcgcgccgacacccaacgccagctggaacagacgcagaaggacatcggcgagctgaagaagctgctggacggcatccagcaggaaaagagcggcgtgcagaagcagctgaagtccaccgagaccgagatgggcgacctggaaaaacagatcaaggccctgcaggacgagctggacaagagcgaagccgagctgaaacggctggatggggagaaaaaaaaactccaggacgcgcgcattgagcaacagcgcctcctcgccatccaggcccgcgctgcctaccagagcggacgcgaggaatacctgaagctgctgctgaaccaggaacacccggaaaaattcagccgcaccctcacctactacgactacatcaacaaagcccgtctcgaacagctcgccagcttcaacgaaaccctccgccagttggccaacgtcgagcaggacatctctgcgcagaaagccgaacaactgagcaagcaaggcgagctggacagccgccgcgaggcgctggcagcgacccgcaaggagcgccagcaagccctggccaagctgaacagcgactaccgcgaacgcgaccagaagctcaagtcccgtcaacaggaccaggccgagctggccaaggtactgcggaccatcgaggaaaccctggcccgccaggcccgcgaagccgccgcggcggcggagcgcgagcgccagcgcgcgctggccgccgaacgcgagcgtgcgcgccagcagcaggccgcccccggacgagtcaccagcccgccgcgcgaacctgcgccgggcccgctggtctcaagcactggcgcggtctacggcggcgcgttcggctcggcccgcggcaagctgccgtggccggtgaatggccgcgtcgtggcgcgcttcggcagccagcgcggcgacgatccgcgggcgaaatgggacggcgtactgatttcggcgagcgccggcagcaccgtccgcgcggtgcacggcggacgcgtggtattcgccgactggttgcgcggagccggcctgttggtcatcctcgaccacggtggcggctacctcagcctttatggccataatcaaagcctgctgaaagacgccggcgacaccgtgaaggccggcgacccgatcgccaccgttggaaccagcggcggccagagtagcccggccgtgtacttcgccattcgccatcagggccgcccggcggaccctactacctggtgccgcgcgcagggatag

SEQ ID NO: 364267 - DNA, 639 bp, Pseudomonas aeruginosa
atgccccggctcttcagggggcttgcgtactcggacatcagcgttgaagcggtcgatcatggtcgcgttccaagcaagctccagcgtgctcggttgtgcgaagcacggggaagatgcttgcattggtgcgaattccgttcttcatgcagcacggtggcaaagctgctgcgtgccgcaccaaccccaagtgcaaactgcctttcgacgcggcccggtgccgcgtccttttgtcttgccttccgcctttgcccctcgctatcgctcctgccagcagcggtccaatgttgccgctatgcatacagccagtctgttaacgagtgcggcggtgaccacggacaagtcaagacgcctgaacgtgtgacggtcatgcagggcgagcgccaaagctatgatggtgtgaccttgcgcgacgcaatgcccttgagttcgccaccgcgaagcgcctatgttgcacctagctcgaaaagtggaagcggcaaacaatggctggaatctggcctaacccattgccctgaaagacctttatcgccgctgcctagcctctcaaaaagcttgacagcggacatttttcatgggcggggtgatcagtcgtcgtccagcgggcccatggcggtagtgttgaagccgccatcgacgtag

SEQ ID NO: 364268 - DNA, 465 bp, Pseudomonas aeruginosa
atggcaaccgttcaacccttggaagaaccgggcgctttggagaacgcactctcgcgtctccaatgcattctcgtggcgcgacgcacccgctacacccccgaggcggtgagttgggctcagtacgacatcctggagttgctgcgcctgcaaggccccatgacgccctctctgttaggtgacaggctgggtgccgcgcgcaccggcatctccaagtccctgcgcgtgctcaaggatctcaagttggtggaacagatgcagggcgatggggaccgtcgcgagcaagtcacagcattgacgcggcaagggcgtgattttcttgtacgcgcggcctcaggtagacatgacgccgcgcagtgcgtcatggcggtactgacgccgggcgagcaggccatgttcacggaactctgcgagaaagtcggcactgcattgaccgctcatgacgccgagcagggaacacgcgtatga

SEQ ID NO: 364269 - DNA, 2283 bp, Pseudomonas aeruginosa
atgagtgtcgtgccgaccccataccgcgacatggagatcatcggcgcgcgtaacaacaacctgcgcagcgtcaccctgaaggttcccaagcactgcatcacggtgttcaccggtgtatccggttcgggcaagtcctcgttggtgttcgacacgatcgcggccgagtcccagcgccaactcaacgaaagccacagtgccttcgtacggcaccggttgccacactacggccagccgcaggctgacgctttgcgcaacctgcctgcatccatcgtggtcgatcagaaaccgctgggcggcaatgcgcgctcgacggttgggacggccaccgacatacagccgttgctgcggctgctgttctcgcgcctgggccagccttttgtgggctactccaatgtgttctcgttcaatcacccacaggggatgtgcccgagttgccaagggctgggctgggtggacgagcttgacctcgatctgttgttcgaccgcagcaagtccctgaaccaaggggcaatccgatttcccacgtttgcttgcggcacattccgttggaagcgctatgcctgctccggcctgttcgattgcgacaagccgctggccgactacggcccggacgaatggcagacgctcctgtatgcagatgaccttgccgtgagcaatcctctgcccggatggccgtcgtcggcgcgattccagggtgtcgttccgcgttttcggcgcgcctatctggaccatgagcccagccgcctgacccaggccgaacgcgaggggctcgcccgcgtcatcacacgccagcgctgcccggattgcggcggcgcgcggctcaacccgaccatcctgtcctgcaagatcaacggcaaatccatcgcggactgcgccagcctggagatttctgacctgctggccttcatccggacgatcagcgctgaatccgtggtaacggtgctggcagccatcgacgagagactggagcagatgcgcgccattggcctagactacctcagcctaggccgggagaccgccagcttgtcaggcggggagtcccagcgtgtgaagatggttcgccacctaggcagcagcctcgccgacatcgcctatatcttcgacgagcccagcgtggggctgcatccgcgcgacgtccaccagctcaacacgttgctgcgtggactgcgcgacaagggcaacactgtcctggtagtggagcacgacccggacgtcatcgccattgccgatcacgtggtggacatggggcctggcgccgggaaggatggcggcaaggtggtgtaccagggcgacgtcgcaggtttgcagcaggccgataccctgacggggcgctgcctgcggcgggtcacccccctgaaacgtgagccgcgcgccccgaccgggcagatcgccttgcatggtctttcgctgcacaacctgcacgatgtcagcgtgtccattcccacgggcgtgctgaccgtggtgacgggcgtcgccggctccggcaaaagcacgctcgtcaaccgcctgctgccgcgccattgtccgcaggccatcctgatcgaccagaaaggcttgggagggacgcggcgttcgtcggtagcaagttacatcggcgtgctcgacgagattcgcgaaggctttgcgaaggccagcagtcaacccgccagcctgttcagcagcaatgctcaaggcgcttgcccggcctgcaagggcctcgggctgatccaaaccgacctggctttcatggacagtgtggaaacgccctgcgatgcctgcggtgccacggggttcaacgaggcggcacgcgggaccacctggatgggctgcgatatcactcaggttctggccttgccggtggaacaggcgctgcggcatttccagtcctgcggggatctttccgagcccttgcagcggctctccaacgtggggctgggctatctgtcgttgggacagcgtttgagcaccctgtccgggggcgaacgccagcggttgaaactggcatcccgattggccgaggagggcagcctgtacgtcttcgacgaaccgacgtccggcctgcatatgtccgacgcggatcggctgcttgccattctcgatggcctcacgcagcggggcgcgactgtcatcgtggtcgaacacaatctggatgtcatggctcatgccgactggctgatcgagatgggacctggagcgggaaagcaaggaggaatgatcattttcgaaggccctccctcagcaatgatgaataccccggaatcggtcacagggccattccttcggtgccatctatcccaccggtga

SEQ ID NO: 364270 - DNA, 897 bp, Pseudomonas aeruginosa
atggagtttaggcacctacgctgctttttggctgtagctgaggaactccatttcgcccgtgccgctgagcggttacatatcgaacagtcgccactgtcacgtgccatcaaagagttggaagaagacttgggcgtgcgcttgttcattcgcaactcgcgcagcactcgcctttcgcgtgctgggcaagtcttcaaggagcatgtgccgcgcatattcaccgccttgcagcaggcccgcgatggagccaaagccgtcgcggctggctatgacggccaactgcgcattgccttgtccgatggcatcacaccgccacacctaagcgctttcctggcaaagtgccgggacgatgatccagaagtcggtatccatttgattgaagtccccctgtcgcagcagatcaaggggctgcgtgaagacctctacgatgcgggattcgcacagtccgacgatgtgggagatggattgcttgctgtacccgcatggcatgatccgcttgtggtcgcggttctggccaagcatccactgctgacccgtaaacggattcctctggaagaagtcctgcgctatcccgtagtaatgggtgacccacacgtttgcgagggctactgtcggcagattgcacgggtgctgcgcacagctgaaacggagccgctggtggcagaagaagtcgcttcgatcgacctgatgctgaccttggttgccgcaggttatgccttggcactggtcggagcatcgcagatcgccgcttgccgttcaccagacgtaagcagccgtccgctggctggcatgtcgcctgctctcacgacctatcttctgcgggccgatacagtcccttccgagccgctggcccgcttcatcgagcgcgccgttgcggacgctcctgactcacctcgttaa

SEQ ID NO: 364271 - DNA, 1212 bp, Pseudomonas aeruginosa
atggcaaagctcaagctcaccaagtccgccgtcgatgcggcgcacccccaggcgcaggccgtcgagttgcgggataccgtcgtaccgggttttatgtgcaaggttacacccgcaggccgcaaggtgttcatgctccagtaccgcacgaacgccggggagcgccgcaaaccggctttgggcctgtatggggaactcactgtcgagcaggcccgtgccttggcgcaggaatggatggccgaggtacgtcggggcggcgatcccagcgccgccaaggccgcttcccgtgccgctcccacggtcaaggagttgtgcgtcaaattcatggaggactactccaaacaacgcaacaagcccagcacgcaggaaggctaccaaagcgtcatcgaccgcaacatcatcccgatgctgggtcgcatgaaggtgcaggatgtgaagcgttccgacgtggccgcaacgatgaagaagatggcgcacaagcccgccgatgcgaacagaacttttagcgtcatgcgccgcatgttcaacctggccgaagtgtggggctacaggcccgacggtaccaacccttgccgccatgtcccggtgtaccccgacggcaaggccacgcacctcatcagcgatgaagacatgggcaagttgttccgccacctggagcacctggaagccgaaggactggagcactacaccatcccgctggcaattcgcctgcaattcgagttcgcagcccgccgctcggaaatcatctcgctccaatggcaatgggttgatctggaaaaccgccgtgtcgtgtggcccgacagcaagaccggcggcatgtccaagcccatgagcgaggaggcctaccggctgctttccaccgcaccacgcaaagacggttgcccctacgtgctgccttcaccaaacaacccaaccaaggccatcaccgaaggcgagtattacggcggctggagtcgtgccctcaaggccgcaggggctatacacgtcggcacgcacggcatccgccatcgttcgacgaccgacattgccaattcgggcatcccggtgaaggtcggcatggcgctgactgcacacaagaccgtggcgatgttcatgcgttacgttcacaccgaagacgacccggtgcgtaaggcggcggagctggtggcaaaccggcgcaaaaccgtcgtcatgggcaaaccgctagccgcgcaggaaagcaccaccgccgcatga

SEQ ID NO: 364272 - DNA, 369 bp, Pseudomonas aeruginosa
atgaagcagagttcgattctggcggaaactcgccatgagctgctggacgacattgctgcacatactgcaacagtactgtctgaacatggtattgacgctggcctggctgaacaggccggccacgctgtagctgatcatctggcgaaccagtggcgtggtgcgacgctatacatcccctccgactatcgccaccaggttaccaagcgtgatctccagatcctctccgagttcaacggtcgtaaccatcatgccctggcccggaagtacggactgacgcccagctctatatataagctgttaaagcgtattcaggatcggaagttcgaacgtgaccagggcaaactggacctcggcgacggcctggcctga

SEQ ID NO: 364273 - DNA, 1332 bp, Pseudomonas aeruginosa
atgcaatttgttgctaatgggccagacattcctgatgagctattgcaggctcatgaagaaggtcgagtcgtatttttctgcggtgcaggtatttcctatcccgcagggctgcctggctttaaagggttggtggaacagatatatcagctaactggcacaactctctcagccatcgagcaggaggcattcggccgaggccagttcgatgccacgctcgacttgctggagcggcgcttgccagggcagcgtctcgctgttcggcaagccttagcacaggttttgaagcccaagttgcgccgccaaggtgcaacagaaacacatgcagccctgttgagattagcccgcagccgcgagggggctttgcgcctcgtgaccaccaacttcgatcgcgtgtttgacacggcagccaaacgcacgggacaagtattccaggcatattccgcgccgatgctacccattcctaagaacagtcgctggaatgggctggtctacctgcacggcctattacccaaaaaggcggatgacactacattgaatcggctggtgatgaccagcggtgatttcggcctggcatacctcacggaacgctgggcggctcgcttcgtgagcgaactcttccgcaactatgtggtgtgcttcgtcgggtacagcatcaatgacccggtgctgcgctacatgatggatgcgctggctgctgaccgaatgctgggtgaaactacgccgcaggcttgggcattgggcgattgtgagccagggcaagaacatggtaagaccatcgagtgggaagctaagggcgttaaacccatcctttacgatgtccccgctggcagttatgaccactcagcgctgcacaagaccttgcacgcttggggggaaacctaccgtgacggcgtgatgggcaaggagcgcatcgtcgtcagtcatgccctagcgcggccatcggccagtacgcgacaagatgattttgttggccggatgttgtgggctctgtctgacaaatccggactgccagccaggcagttcgcagacttcaaccccaccccgtcgctagactggcttctagatgcgttctcacaggaccgctatcaacacggtgatctcacccgcttcggtgtgccaccaagcgatgagattgatgccaagctgcgctttagcttagttcgccgtccgacaccatactcgcttgcaccaccaatgatgctggtatccggtggcatctcggcttccaagttggacgccgtcatgtatcaacttgtccgctggttggtgagacatttgaatgatccgcagttgatcatttggatcgtgcaacaagggggggcaactgcatga

SEQ ID NO: 364274 - DNA, 369 bp, Pseudomonas aeruginosa; identical to SEQ ID NO: 324231

SEQ ID NO: 364275 - DNA, 285 bp, Pseudomonas aeruginosa
gtggccgaggtcgcgcacggcttcctggagggtttgctgcggcgccgcgtcgtgccccacgccctggtgctccccggcgtagtcgcccagctcgcgggccagctccagcgccgcctccagcacctgcaccacgacgcctcggtcgagatggccggcgccggccctgagctgctcctcggtgctcagcagcagccccttggccgcacgcaccgcgccatgttcgtcggtgcgcagttcgaagccctcgccgcgcggcttgccgccttcgggccgaggatgggttag

SEQ ID NO: 364276 - DNA, 657 bp, Pseudomonas aeruginosa
atgcgtcgccatacgacgctcatagacgccatagccaagataaccgataaccagggctgcaccgacaagcacgaacaacgcccgaggcggcttgaacttgaagtgatgctcagccccatccgcaacggacttataacagccgaagtacgtcttatcgatggtgatccgggtcgattcaccatccgcgaagtcatacttcttattcacgtccgtctgaactttctgaaactcccaccgcttaacgatctttccaccgttaccccggtgataatggatatggcagttacagagttcgcgcatatgcgcatcgatcaacatcgggctttgcgtaatcgcatgcacctcatgcccagaatgccgcatcgtctccagggcgctggcatactcaggaaccttggaaccctgcgggcgcacacgaaagaacgactgcgcttcatcgatcacaataatggcgttgggcggaagcttgaaccactcttgcggattgtcgaactcgacccattccgccttgatcgccggatgatccgccttgaactcacgaatattgtgatagtagaccgtcctcccctctttcgcggctttattgtcgacctctttaattgtattgagagtcttactattaccctgcaaaccggtgcggagaacaaacatggttaa

SEQ ID NO: 364277 - DNA, 303 bp, Pseudomonas aeruginosa; identical to SEQ ID NO: 331007

SEQ ID NO: 364278 - DNA, 186 bp, Pseudomonas aeruginosa
atgacagaatggatactcgcactggtcttggcaggatccacagagcccgtagtgacagccaagggctacaagacggtcgagcagtgcgaaacagcgggcgacctcatgaaagccgccgacgaatccatacgcaaatccggcaaggcatacagtattacctgctccgaaaccccttcaaagtcgtaa

SEQ ID NO: 364279 - DNA, 339 bp, Pseudomonas aeruginosa
atgaacgaagcaaagcttctgaatatcttgcaccacacaaagaccttcgttccagtactaacagtgggggaggacggatggggacgggatattcgctatgccgaaatgaaggagtctactagggctgtaaacggcttatgggtaagacacgaagactaccgcaacctggcgattgagacagttaaaagacaggaagaaaaccagatgctccgttcggcgcttcagtccttcgtgctgcgcgctgaagcatacattgaggcaggacgtggcatgccagacgtatcgatggatgccgtgctggaaaaagccagaacagccctggagggaactgataaatga

SEQ ID NO: 364280 - DNA, 309 bp, Pseudomonas aeruginosa
atgcctgacatgagagaagagtttgaagaccgcttcccgattcctgaggagattgagtggcgtaacaccgattacttcccggtgcagaccgataacgtccacgcatacgtggctcttgccggagtagctgaccgctacacgtcgatgtggcaagcctggaaagccagccgcgcggctctgagggtgaggctgccaaagccatatggtagctcatcacttgatgcttatcctgagcttgccgaattcaaccgagggatcagggaatgtctagcagccctccagagagccggaatcgaggtgaagccatga

SEQ ID NO: 364281 - DNA, 510 bp, Pseudomonas aeruginosa
atgtcgcaactgtccttttcctcgttcgaatcctctctgctggtgcgtgacgcgcaggggcgctacttgccggcgtcggcagaccagataattaaagcagcccgtcaggtcattgaccagaagatgcaacgtggcgtctccttcacgtcaccgacgttagtcaaggaatacctggtcaccaaattatctggcttcgagcatgaagtgtttgctgttctgttcctcgattcgcagcatcggctgatcgagtacgtcgagatgttccgaggcaccatcgacagtgcatcggtgtatccgcgtgaagtgattaaggaggcgttaaggctcaatgcggcggcggtcattatttcgcacaaccatccaagcgggaatcccgagccaagcagtgctgacaaggcactaactacgcgactcaaggaggcgttggcgctggtggatgttcgcacgctggatcacattattgtggcaggtgcggacaccacatcgtttgccgagcgtggcttgatctga

SEQ ID NO: 364282 - DNA, 750 bp, Pseudomonas aeruginosa
atgacttcttccgtaaactggatcgctgcctacaactacctctttgcggcactgaacagcgagaacaaggcgttgtacgtcagcggtgccacgttctgccgcatggttcagcagattgatcctggctcacccagctatcagcagctcttgccattgaggcaaagtcaaggcaagtccagttctcgcaaggatttctactgggatctcatacaggggctttcagagccccagaggtttagcctctatcgcctgttcgtcaatcatgttgaggcacatgacaaggtgcaggctgatgcgatcagagacaatgtgttcggtggtggccgcgctgtgcccactacgattgttcccgttgacctatggaactcggagaagctaaataacagtctcaccgacatcgaccgggccattgacgcccaccattacaaccgggccacgacactgagctacacctgtcttgaagggctgtacaaagcgtacgttcgcaggcatgttcctcagcaggaagggctgacggatctcatgcctttatgcaaagtggtgaaggacgacatcagcaagaaactccaagcccaaggcccgtttcccgttgagatcgtcaacgccatgccgacactgacaaatgcgatagcgaattcacgcaacggcttcagtgagtctcacttcggggatgactcccaaaggtggcttgctctctttgctcgggatctgaccaattccattggtcgcctcatgctcaacttcatctga

SEQ ID NO: 364283 - DNA, 2061 bp, Pseudomonas aeruginosa
atgaacgccattacccataacgaagcccaagccctgcaaaccgtcaccccggcacagccttcgcaaggcatgctgctggtgccgctgtcgcagcttcgccgctcacgccgcaacgtgcgcaagaccacaggccagtctatcgacgcgctggcatcgagcattgagcgcgtgggcttgctacaaaacctgaccgtgattcttgctgctgatggcaaacattacgaagtcgtggccggtggccgcaggctggctgcgttgaagctgctggcgaagaagcgccgcattgccaaggattgggaggtgccttgcctgttggtggctgatgccagcgcccgcacggtgagcctgaccgagaacgtgcagcgcgaagccatgcacccggcagaccagtttgaagccttcgccgcgttggtagcggaaggccgccccattgaggatgtcgccgctgattttgccgtcacgccgctggtggtgcaacgccgtttgaaactggccaatgtctcgccccggctgatggcgaactatcgcgctgatgccgtgagccttgaccagttgatggcccttgccatcaccgatgaccataccgcgcaggaagcggccttttatgatgcgccggaatggcagcgcagccctcacgccttgcgcgaacgtttgaccgagcgtgaaatcgacgcctctcatgcgctggtgcgtttcgtggggctggacgcctacgaggccgcagggggtggtatccgccgcgacctgttcgcggaaggtgatgcaggtgtgtatctgaccgatgccgcgctgctggaaacgctggtgtgcgacaagttggacagccacgccgccgccgttcgcgccgaaggctgggcatgggtggatgccacgcccgccgccacctatgccgacttgcaagcgttccagcaggcaccgagggagcggcgcaatcccaccaagcgggaaagtgaacgcatcgacaagctggaagaaaagatgcaggccattggtgaaactctggatacgctggacgaagacgacgaggaaaaggccgacgctttgcaggaagaaggcgaccgcatgggtgagcaattgcaggcgctggaagatcgcttgcaggattacaacccgaacgtgaaagccgctgccggtgccatcgttacccttgaccggcaaggtcagattgttgtgcatcgcggactgatgcgcgaagccgaagcccgcgcaatgcgcacgttggaacggctgcgccaaggcttcaacggcgaggatgatacgaacggcaacgacggtgaggacgacgaccggcccaaggccgcatccatgtccgaccggctggcgcaacgcttgagcgcccaccgcactgccgcgctgcaaatcgaagtggcccggcatccgcaggcagcgctggccgccgtggtgcatggcatggtgcaggctgtcttgcagcgtgaccgataccatcgcgatggcttgccgctggatatgcgcgtgaccgtgcaggaccggctggaaagcatagccccggattggccggagtcgcccgccgccgtggcattgcgcgaattgcagcaggttgtgggcgagagattgcccgaagacagcgccgaactgttcgccgtgctgctggcaatgccgcaggatgaactggtgcagttgctggcggtatgcgtggcggcgactgtggacgtggtgacgcctcgcgccacgcaacaccaaccgggtgcggaactggcgcaggccgtggggctggatatggccgcatggtggaagccgaccgccgaaggctacttcaagcacgtttccaaggccgtgattctggatgccgtgggcgagttcgcaccggagcatattacccggctggcgaagctcaagaagaccgacattgccagcgaagccgaacggctggccgatggcagcggctggatgcctgccgtgttcaaggccgaggatatggaaaacagagcgcaggaagaaagcgaagtccacggccagcaagacgatggcgacgagaacgcggacgacgcgcaggacagcgctgcagcgatcacacgcgaagccgaagaactggccgcgtaa

SEQ ID NO: 364284 - DNA, 345 bp, Pseudomonas aeruginosa
atggcgctggatgaccatgccaacgcccggcgcaacaacaagtggacgttcttcgatcgggggctgattgatgcggcgtcggcacttgaagaactaacggacgaaccgctactggcaaccctcggacagacccaccgctatcatccgcacgtgtttctggcaccgccttggccggaaatctatgctacggatgcgcagcgccgccacggcatggacgcggcattggtcgagtacgaccggccccagcgcgtataccccgcgctgggctatgagaccacgctattacccaaagtcgatgtggtggcgcgtgccgagtttgtactgagtacgttagcgaaacagtga

SEQ ID NO: 364285 - DNA, 909 bp, Pseudomonas aeruginosa
atgtcttggttcttggtagtggcgggcgtggtaaatattccattgcttacgctatattttgtggctcaattactcatcaatggtcaacggcatttatcaatgaaacctggaatagcattcgagaacgatgttcagagtatttataccttccttcttaatatgcgagatgaaggtgttgtggttggcaactcggtttatatgatgggaaagtcgggcgaacagcatgaagtggatgtgtactatgaattcacaaaagccggtattcgtcaccgggttgccatagagtgcaaggactgggcaagaccagtatcaaaaggccaaatacaggagtttgaatccaagctgcgtgatattggaaacatcactggcgtcgttgtgtcgcgaaatgggtatcaaagcggtgcagagggatatgcaaaatatcacgatatccttccactccgttttgatgatctgccatcgtttaccgctttgataggtcaacgactcaagactgtcgctttgcctgacgcagattatgtcggtgagcctttttggataatcatggaaatgcgtgacggaaaagttactgggtcgcactatggaaccagcgtacctggattcaaagagcacctgatcccgctcactttttctcgccatcacgccgagcgggttttccgagacgctcaacttgatcctgacaggtgggcaatccgtggcctccctcgctttgcgctaagagcctttttgattacgttggaagtatacgaaaaaagaatgaacacgggcgctattatctgttttcttccgccgggagcacagccagatgcaccgtttgtaggtcttagagcctatcgtgaagatctggttcgtgattactacggggaaccaattccatctgttgaagatgcggttaatcgtcagaagtag

SEQ ID NO: 364286 - DNA, 291 bp, Pseudomonas aeruginosa
atgcagaaacgatccatccagcgcggccggcccaccggcgccaccaccttcgacgccgagttggcccgggccttcggcgcggcggtgcgtgcactgcgcacggaacgcggcattgcccaggaggcgttggcgaacctggccagcatcgagcgttcccacatgggtaagatcgagcgcggcgaacacacgccgacactggcgatcatcttcaagatcgccaaggcgctgggatgcagtaccgctgtgctgatgaccgaaaccgaaagcggtatccaggcggcggagctgtag

SEQ ID NO: 364287 - DNA, 351 bp, Pseudomonas aeruginosa
atgaccaatgaactcattactcctcaggagcacgaacgcctgcttgtccacggccaggcccgtgccgaaggcttgaccatcgacccgttgccggtcgttcgcttatttacccctgacgcgcacgtcacctggctgctggcggcactcgatcccaccgacagcgatacggcctacggcctcatcgacttggggctaggcatgcccgcgctgggccatgtgaagttgtccgatttggcgtctattgtcggcccacgccagcagccggtaatgcgggatcggtatttccaggccacgcgtacgctgtcggactatgcgcggctggcgcaggccaacggttctatcgttgattga

SEQ ID NO: 364288 - DNA, 789 bp, Pseudomonas aeruginosa
atggcagacccgagcgcgaaacactggtatccgaccgctgcgtatctctacgtgctgcatcttgatggcctcgccctggcctgggagtatttgcgccgccatcccgattatcggcacgactggctgcgccgtcgccgccggccagaggccgccgagcgctggggcttgcgcgtgttggaagatcccggcctggatgcacgcaacgcgcacccggcttggtttcccgatcacgatagtgtggtgcagctttatccagatgctgacccgccgccggatgccctggtcttcgagttttggcgtattcctggcgacaagcgcctgatccatgatggtaagcgcttggtgctggtcacgcagtggccaggctactgcgtgcggctggccttcgcgccgggtttggacgatggcatggcctacgtctacgccatccgtgcctgcatcacgactaatccgcgttatcagatgcttgttgcggagttaaacaagctggccatcggtgccgtgcttgcagcagccaagcctcggccatctccggcgtcgctgctggagttgcacaccttgcagacgcttgacgccaccctggcgggagcgtcattgcgcgaggtggccgagggactgttcggcgctgatgcggtgattgcgggctggtacaccgacggcggcctgcgctcgaaggtgcgccgactggtgcgacgtggtaacgcgctgatgggcggcggctatcgccgtctggcacagatcgaatcccctggggagggtcgttctgcactacctgcaaaacgaccctga

SEQ ID NO: 364289 - DNA, 276 bp, Pseudomonas aeruginosa
atgagtagcgcaaacgacaagccatccagcaaacgcgcgggcgagcgcatcggcatcggtgcacgtccgcccgcgaacccgcacgccgaagcgtgggttcgccagggcgataccgccgaccttcagaaaggcgacctgtacacggcccgcctgaccctcgacgtgacacccgccttgcgggcgcgcatcaaggtctcggccttcacgcaaggcgtgacggtggccgagctgctgcgtggtctgttggagcgcgagttcccggagaacacaccatga

SEQ ID NO: 364290 - DNA, 543 bp, Pseudomonas aeruginosa
atgactgcccatccggtgcagctgacaccagaaacagccataccaatgcaagcgccgcatacactcgccggacagaccggcaacgtgcccttgacccgcgtttcgctggcttacatcgaccagcgtttcaacctctatctgcgctttggcgagccggcgcgcatgctccagctcgaccgctggcggcgctgcgccgtgttcctgcccgcgtccgtgttctgccgtgtgcgttggcaggccaacgactacggcaccacgcgttggcagctcatggtgatgcaggcttgcacgccgctggacgcggtgcagcgcatccccggcgtgcaaccgggtgcacgtctgctgctgcatgtggaaggcgaaaagaggatacgcgccacgctggcaacgattgatgccattgagtcgctgggtattgccgccatcgacgcgtcgcccgcgtactggcgcacgctgggcaaccgtctggcggcccgcctgccactgccggagtacaccgccgagcgacatgccgcctggctggccgggagggaattgcaatga

SEQ ID NO: 364291 - DNA, 714 bp, Pseudomonas aeruginosa
gtggcctggaacaccaggaacaaggccgaccaggcgcgcctggcccgtcctgcaggacgggacgcgccgcagatcgacctggagatatccgaggcccgcgcccgcgccgaggctgcccagcgggtggccgaccgggcggcggcagatccacgcgagctgctgcgccagatggatgccgcgctcctcgatcgcaagaacgcgctggccgagctgcccagggatgccctggccgagcaccagttggcgcacgaccggcagaccgtgcgggagttgcggcagcagatcgaccagcccgaccggccatcggccgaggcgctggccgagatcctggagcggcaccagatgcaggcccggcactggcagggcgtggccgatggcgtcaaccgcgaacgcacccggcgcgtcctgcaggagcgccaacgggcgcagcaggcgctacgcgaggcggtggagcgggagcaggggatcgaggacgcccagggctacgagctggcccgcatcgagcgtgaggagcggcggatcgagcagctactggccgacgtggacggcttcgaccagggcaaacccaagccgctgccagcactggccgaggagcgtcagcgcctcgaccaggatcgtcgccggttggaggaggtgccgagctgggccgaggaagcgcgggccgaggccgagcaggcgcagcagcacaggccgagcccgttccggccctggtga

SEQ ID NO: 364292 - DNA, 282 bp, Pseudomonas aeruginosa
atgtacgccatcgcttttgacctcgacacggaaaccctgaaacaggcctatccgaccccgtcctacaccaatgcctacggggatatccgcaaggtgctggagcctctgggctttgcctggcagcaaggcagcgtctacttcggcggggccgagatgaacgcagtgaagtgcgtgatggccgctcaggcgctgagcaataacctgccttggttcaaggcttcggtgcgcgacatccgcatgctccgaatcgaagagatgaacgacctggagccagcgctctaa

SEQ ID NO: 364293 - DNA, 375 bp, Pseudomonas aeruginosa
gtgactcaccctctcgccagcctggccagcgtcccgctggctcaggctgcgcctgaggcgctgatcgaggtcgccctgctcgtctggtatgaccccgaccctctcccctcgcttaaacgcgccctggaggccctggagggcatccagcagcgccgcgccaggttcgccctggacgtactccgccgttacccctgcacgccgccagagcgcagccaggcgctgcgcgacctggtgcgcctgaaagttagtttccggggtggcccgctgtcggcgctgctcagcgcctggggcctcgacgaggccgaccggctgaacaccgcgcccgttctgccctaccagacccgccactacgccgccgagcgccgcaagggctag

SEQ ID NO: 364294 - DNA, 285 bp, Pseudomonas aeruginosa
gtggctaccctcgacgatttgaagcagaagcgcgaccaattgaacgcccgcattcagcaggtggaggcccgcgagcgtgcccagcagaagaaggccgacgacaaggtgaagatcctggtcggcgctgcgctgctcgaccagatcaagcgcggcggcgaggggcttaacgacctgctggccctgatggatggcttcctctcccgcccatacgagcgcaaggccgtcctgggcgaagatggcaagggctccgaggtgctgcaccgcctgacccagcgcggacaatag

SEQ ID NO: 364295 - DNA, 708 bp, Pseudomonas aeruginosa
atgcgtagtaatagctatcttatttatttggttctgtctatttcttctgtcgcgctgataggtggttcttttgctgttctagtatttgtcttgacgggtttggatggagtgttcgaacaagagatttgttttaggaatgagtgtgttgagcagtttgtgagtaagttctctgctgttttagatattttggctgtaactggtgcgcttattgggggagttgttacttttggtgggattttggttgctttgtttagctatttaagtgattcgaagtcttcagctttgagtaaccatatttctcatttggctattttttctagtcatatttatactgagattgataagagagataggcttggggctgaatcctttgatgttattaaatggtataattgtatttatgatcgatcgcgtaatggggatctatctgtttctcgattttatcttgattttatgaagtctctagaggggctggttgaaagctcaaatagattagcgcgaaaggagggggatggagggtatagatacaaagagcatcaggtcgctatgaaagaaaaaatgtttgaaataggagtttgcttgagttttatgcctcggttagattttcacgaaatggagggacagctttttgacttaataaaaacagttaatggatctttttgtcagtctcatgggttggtctctctgccagagaggaaatatctttag

SEQ ID NO: 364296 - DNA, 1188 bp, Pseudomonas aeruginosa
atgaccactcggcatacctttaaggttgcaactggatcaattgctacattagataacctatctctggcgcttggcgtttctcattgtgaattagaaaacgccttatctatgcctcaagatgagcgatatactcgtcttgagcgtcataaagcggacggtagtgtaagatccgtgtacaagcctcattatttaattcgccttcttcagagacgaataaaccatcggattttagctaacccggatgttatagcttggccttcctatctgtttggttctataccaagttttaaaaatgaagatggtgagtgggtggctaaagactatgtggcaagtgcacgtttacactgtggagctaaatcgcttctgaaaatggatattaaggatttttttgataatatccactcatctgttgttgaagatatatttttaggcttgttaagttatccgggtgaggttgcgagtgcgttaactaatatatgtacctataattcgcatttggctcagggggcgctgacttcaagttatatcgccaatatgtgtctacatggtttagaagatgaagtctttactaagctttctcggaaaaacttaaggtatagtcgttttgtggatgatataactgtttcctctgtagttagtagatatgatttctcttatgtcaagtcaattattgagggtatgttgcttgaacgagggctgccggtaaatagtcgaaaaacaaaggtgcaatattctactacagaggctctaactgttcacggtcttcgagtttgttttcctgagccaagattaccttctgatgaagttagacgtattagggcggcagtgaaaaatgtagagatgcttgcgcaggaaaacggctataggatgacccatgcatatcgcagagactttaataagtgtatggggcgcgtcaataaactatctagagtttctcataaacagcatggaaacttggttagacgcttggtgaaagtctatccgcttccgtctaaaaaagatataagtcgagctaggtcgatggttgctcggcttgaaagagattatttagagaagcgtgatacatattggtactcgcgtagattttacatagcacatgaaaggttaaatatattgaaaaggagctataaagcttctgccatagagctgagggggcgtcttagaattattcgtcctacttatgtttag

SEQ ID NO: 364297 - DNA, 171 bp, Pseudomonas aeruginosa
atgttcagttcgagacccagagcgacgtgcgcccacatcctgaaaatcatggccgactacaggatcggcgccgtaagagtgccggcggcaagggcagaggccctggagcgtttcgccatgtggcgccggcgcctcgccggatgcatcgatagcgcacagccgctgccgtaa

SEQ ID NO: 364298 - DNA, 1731 bp, Pseudomonas aeruginosa
atgatcagctatggatcggtatgcagtggaatcgaggctgcgagcgtggcctggcatgggctgggcttccgcgccagttggttcgccgagatcgagcccttcccatccgccgtcttggctcatcgctggccggaagtgcaaaacctgggcgacatgaccaggctctctagcaaggttctagccggcatgatcgacgcgcccgacattctggtcggaggcacgccatgtcaagccttcagcgtggccggcatgcgtgaaggaatgtccgacccgcgcggggcgctcacaatcaaatatgtggagctggcaaatgcagttgaccatgttcgaaatgcccgaggcgatgacgagaccattgtcgtctgggaaaacgtcccaggagtcctatccagcaaggacaacgccttcgggtgcttcctcgcagccctggtgggcgaatccgaagaactccagccgccagggggcaaatggaaggacgctggttgtgtgtatggacccaagcgaacagccgcgtggagggttctggatgcccaatatttcggcctggcccaacgacgtcgccgtgtgttcgttatcgcaagtgctcgagcagggttcgatccatgcgaagtactttttgagcgcgaaggcctgcgccgggattctccgccgagccgaggccaggggaaagaagctacctgcagcactgctggccgccctggaagcttcggcccggactccagatgggcggaagactgggggtccacagccaaggcattcggcggagggaaaaactgcaaccccaccgacgtgagcactgcgatcactgcgcatcctggtggacgctatgacctcgacgccgaaaccttcgtagttgctgatatcccgaccgtagccgctacgctcaccgcgcagtacggaaagagcgggggtatccctgcaggtaatgactgcgtgccagtgaacctgatcgcaggcacgctccaggcaaacggaaaggctgccggcagcgcaacgcagcaggacgctgaagccggcctgctggtggtacacggaacgcaagatcctgacgtcgttcaagattgcgcccacacgctgggcaggaaccatggccaggaaaatgccgtattcgacccgaaccagatcaccagcgcggcaaaccgtagccaaccaactcccgggctgtgccacaccctgccggcatcgagccaggcccctatcgcctttccactgcttgaggtcggcaagcggacaggtagaagcacatctgacccgcgcgccgggctgggcgtcggcgcggagaacgatccgatgttcacgctgcaggccagcgcgcagcacggcgtctgcgtcaccggcgacatcacccacaccctgaaagcagaaggcttcgacgccagcgaggatggaactggtcgcgtgcagcccatcatttcggtctctctccgggggcgtgatggtggcggaaccattgaggccggagacgaggttgcgacctgcttgcgcgccagttccggcggcggagacaaaccgcatgcccttgtccattccgccgtccgccgtctcaccccgcgggaatgtgagcgcctacagggattccccgacgactacaccctgatcccctggcgtgggaagcccgcagaggaatgccctgacggcccgcgctacaaggccataggcaacagtaaggctgtccccgtcgtgcgctggatcgggcgccgtcttaaagctcatctggagaaactctcatga

SEQ ID NO: 364299 - DNA, 285 bp, Pseudomonas aeruginosa
atggttgacctggtgaccctggcggctgcggccgtctgcggcgctatcagttgccgcatcttcacgtaccagcgccacggtgcaacgtaccggttcggcgtctcgctctgcgcgtacatcctcgccgccgggaccggcatgcaggcgctgtcgatcagcctggccgtgctgatggcgcgccacgcgacgccgatatcgccgtatctgctggcggtcctggttgtgctgctggtgctggtctaccgcaacaagggcaacatcgcgcccatcttgaggctcagttga

SEQ ID NO: 364300 - DNA, 1203 bp, Pseudomonas aeruginosa
atgggaaaggcgcttgttgaaatcgcccagctgctgaaagatgctgacaaaaaggtgcagctgatctatgccttcaatggcacaggcaaaacgcgcctgtcgcgagagttcaaacatctgattgcacccaaggatgatgccgctggcgagggtgatcaggtcgagctgtctcgtaacaaaattctgtattacaacgcttttactgaggatcttttttattgggataacgatctgcaaaaagacgccgagcccaagctgagaattcagcccaatgacttcactgattgggtgctgaaggagcaggggcaggacatgaacgttatcacgaccttccagcgttacaccaacgacaagctcaccccgcgcttcaatgaagagagaaaaaacgataaaaccggagaggtcattgcgaaagccttctcggaggttactttctcgctggagagtggtgatgcgacccattcgggaaatctgaaaatatccaagggcgaggaaagcatcttcatctggagtattttttatgcgctccttgagcaggtgatcgacgttcttaatgtcgccgagccaggggatcgtgaaaccgaccagttcaataacctcgaatatgtgttcattgacgatccggtaagttctctggatgacaatcacctgattcagttggcggtggatttggcgcagctggtgaaatcaaacgaatccagtgtcaagttcatcatcacaacgcacaaccctctttttttcaacgtgctttgcaatgagtttggtagcgatgataaaagcgagcgctacagctggaagtcaaaatggttcagcaagtcacgtttggagagaaatactgatggcagtttcagcctggtagcacagccaaatgattctccatttgcctatcacctgcacctgatatcgcaactggaagatgcgatcaagagtggccagattgagaaataccatttcaacttgctccggaatgtgctcgagaagacggcaacatttctcgggtacaaaagatgggagcatcttctgccagcaacagctgacggccagcctaatccgtacgcaaaaagaattgttaatttctcaagtcattcaaagcatgctgccgaagaggcgcaaccgctgaagccggaagaaaaggcactcctagcgagattggttagacacattgttgagcagcaccgattcaggcaggacgagaccgcatga

SEQ ID NO: 364301 - DNA, 1215 bp, Pseudomonas aeruginosa
atgagcagtctgaactacatggataagctgctggatggcgctggagtgcgttggacaccattagagtcatgcgcaactatcgatcgaggtcgtcgcgtgacaaaaagtgagttggggctcggcaaaggttaccccgtttatagcgggggtgttacccctatgggatttttcgataaatttaatcagaagaaggatacgatcactatcgtcaaatatgggaccgctggtttcgttaacttcattgaggaagatttttgggccaatgatgtttgttattgcataaaaccgaacaagaaacttaataacaaatatcttttctattacctcaagagtaggcaaagagaaattcaagcgctggcaactgatgccatacccgcgcacctgccgacggaagcgatttcagattaccccatccccatcccctgcccggacaaccccaaaaaatcgcttgaaatccaggccgaaatcgttcgcatactggacagcttcaccgagctgaccgccgagctgaccgccgagctgaccgcccgcaagaaacaatacaactactatcgcgacaagttgttgagctttaaggagtgtgaagcagagtggaaaccgctcagtgaaattggagagtttatccgtggaaagcgttttaccaaagtggattacgttgaggatggcgtcgatgtgatccactatggtgaaatttacacccaatatggcacatggacgacccgcgcccgatcccaagttagaaaagatatggccaatgcgctgcgttacgctgagcctggcgacgtgatcctaacggatgttggcgaaaccatcgaagacgttggtaaggctgtagcttggctaggtaaagagaaagtggcgattcatgatcactgctacgcctttcggcatgcgatgaatccaaaatttgttgcctactgcatgcaaacgacttcgtttattgctcaaaaggcgaagcatgttgccagcgcaaaggtaaatacactgctcatcaatgggttctcaaaggtgaccatcccggtccctttcccagatgatccgaaaaagtctctcaaagagcaggcccgtatcgttgccattttggacaaattcgacgccctgaccaactccatcaccgaaggcttgccgcgcgaaatcgaattgcgccagaagcaatacaagtattaccgtgatctgttgctgagcttcccgaaatcggaagaaacaggggcgtag

SEQ ID NO: 364302 - DNA, 1062 bp, Pseudomonas aeruginosa
atgccccgcctttccgccctgctgttcctcgccctcgcaccctggctggcccaggccgaggagaccctgcgcgtctacaactggaacgactacatcgacccgcaggtgctcgagtccttccagaaggacaccggcatccgcgtcgagtaccacaccttcgccaccgccgaggaactggacaaggcgctgcgcagtggcgaggcgatcgacgtcgccgtcccctcccacgacaccctgccggccctgctgaaggacaacctgctgcggccgctggacttcacccagctgcccaaccgcagccatctcgaccgtcaattgctgagcaaactggccgcggtcgatcctgacaatcgccacgccgtcccctatctatggggtgccgtaggcctggccatcaataccccgcaggccgaagccgcctatggcgggccgctgcccaacagctggagcctgctgttcgacaccagccagagccagcgcctgaaaagctgcggcatcagcctgctggacgcgccggacgaaaccctggcgatcctcctcaactaccagggccgcaacctcggtcgtactgcgccgagccaggtacgccgcgccgccgaggcgctgcacggactgcgaccgaacctgcgctacgtcgacagcgagcgctacatcgccgacctcgaaggcggtcgcctctgcctggccatggcctgggtcggcgacgccctgcgcgcggccaaggcgggccagccggtaagtttcgaggtaccgcaggaaggctcggtgctgttcatcgacaacctggtgatcccggccggcgcccagcatccacgcgaggcgcaccgtttcatcgactacctgatgcaaccgaagatcgccgcacagatcaccgccgccaccctctaccccagcggcaacgccgacgccgccggcttcctcgatcccgccctgcgccagcaaccgggcctgtatccggaccgcgacaccagccgccgcctgttcgccctggaaacgccgccggaaaagctccggccggtggtcgacgagatctggaaggccttccgcggcgccagccactga

SEQ ID NO: 364303 - DNA, 966 bp, Pseudomonas aeruginosa
gtgctcgttgcgcatggcgtcgaccccggtgaccagcttgaagtcgtcccagcgccaggtggccgccaggcgaccgccgagggtgcgtcggtccacctgggacgccatcggcatgggcatcatgctggatgggtcgggagtgcgcaggcggaagttgtccatgatgtggtcggcgtagttgtagtagacctgtgcctcgaccttctccagcacatcgctgacgttcgatttgacgaagcgcaggcccaggctctcgcgcttgaactgcgagccgtccatgccgcgcccggcgtagcgtgcctcgccgtcgcccttgccggcggtgagttcgatcagggtgtcctcgtcgggggtccagccgaccgcgacgtcgccgttccacttcttccagcgcgacggcacggtattcccggcgccgtcctcgtaatcgtcggactgcgcgtggttgccggtgaagcgcaggtagccgagccggttgccggcggcggcgtccagcaccttgtcgaagcggccattggagccggccagcaggctggcgttgacccgcgagccgagttcgccgaagcgctccggctcacgctcgaagaggatcgtcccggccgacgcgcccggcccccagagcaccgtctgcgggcccttgatcacggtgagcttgtcgtaggtttccggcgagatgtaggaggtcggcgcgtccatccggttcggacaggcaccgagcatcatgccgccgttggtgaggatgttcaggcgcgaaccgaacatcccgcgcagcaccgggtcgccgttgctgccgccgttgcggatcaccgcgaagccgggaatggtcttcaggtagtcggccccatcgctggccggcaccggttggcgcggctccttgggattggtgacgatggtcagcggcgaactctgggcgactccggtgaccacgctcggcgccagctccacggcgtgatcctggtgctgtga

SEQ ID NO: 364304 - DNA, 324 bp, Pseudomonas aeruginosa
atgtatgatcgcattctggtagccgtggacggcagcccggtctccgaccgcgccttggaagaggccatcaagctggccggcctcagcggcggcaagctgcgcgtcatcaccatcgtcgacagcccgctgcgccaccttcccgactacgcggtgtactacaaccccgagccgctgcgcgaagccgcgctgaaagccgccgatgacgtcctggccaaggcccgcgagaaggtcgaggcgagcaacgtcgaaggcgccaccttcgatcgcgtctgccaggagcgcgccagcgaggaaatcgccgagcgcatcgagctcgaggcctag

SEQ ID NO: 364305 - DNA, 339 bp, Pseudomonas aeruginosa; identical to SEQ ID NO: 343100

SEQ ID NO: 364306 - DNA, 219 bp, Pseudomonas aeruginosa
atgctgatggccgaccggatgccgctggccgaggtgctcgccgaactcgcccgctaccgtcgcggcttactgcgctgcgacccgcaactggccaggctggcggtgtcgggcgcctatccgctgctggacctgcggcgcacgctgggcatgctgcaggccacctatccgctgaaggtgcgcggggtgaccgactactggatcagcctggtgccggcgtga

SEQ ID NO: 364307 - DNA, 1212 bp, Pseudomonas aeruginosa
atgtcgaaaaagtcccgctccagactctggttcctcgtccacagctggctggccctgcccatctggttcttcgtcctgatcgtctgcgtcaccggcaccctggcggtggtcagccaggagatcgtctggctggccaacccggacgtccgggccagcaagccctacgaagatgccgagccgctcagcttcagccaggtcctgaaggcgatcaacgaagcccaaccggacctcctggtcgaatccatccagcgccccgacgaagagcatttcgcccttactgccgaggtcagctatcccggcggcagcgaggcgaccctgtacatcaacccctacaccggcgccatccagggcgaaagcccctccttcgactttcgtcagttcacccgtgccctgcacggatggtggctggttccgttcaacaacggctacagctggggctggtacatggtctcgctgctcggcctccccatgctggcatcgctcatcaccgggctggtggtctataaacgattctggaagggctttctcaaacccagattacgcatcaaccagggcgcccggatcttctggggcgacttccatcgcctgagcggcatctggtcgatctggttcatcgccctgatttccatcaccggcacctggttcctgatccaggccatccttgccgacaaccacgtcaccctgaccaacgacggcatccctccggtcatcgcacgcgccgacgtgccccgcgccgcacccggtcagaaggttccatacatcgagctggacgaggcggtgcggctcgtcaccgggcgtatccccagcctggaggccagcgcggtgttcctgcccggcaacgcctacagcccgatgttcgtggccggacgcggctggtatccgctcatgttccagtcggccgcgctgaacccttataccggcaagatcgaaaccacccgcctgctcagcgaccgtacccccctgcagttcgtcaccgaatccatgcgtcccctgcacaccggcgatttcggcggtatctgggtcaagctgatctggttcgtcttcggcctgctgctgagcatgatggtgctcagcggcctgctgatctggagcaagcgcaccgcacaggccaccgccgcgctggtcaagcgcggcaagcgcccggcgcgccagccgaaaccggccaagccggcgccggtaatggccaaccagaccgcggagggacagccatga

SEQ ID NO: 364308 - DNA, 777 bp, Pseudomonas aeruginosa
atgaagggcgcaacgttgcaccggctgatcgatatctacgccgacagtcgccgtaacctgcgcgtccgtttggcggccctccggatgttcgtccgcgcggtgtgcgccgatcgcaacaccagcttcgccgagtatcgccaggtgtgtcggcggctcctcaagggcatgccgttcaccgagcaggcgctggaacgcgagcgagaggcatatcgggagcgcaccagagctgcgagacaggccatggaggagagcggtgcctggcttatcggaaactcagccatgatcgagcaggccctgtcgttcgacgacctgtgcgatctcctgggggtgaatcatgcccaccgtgccgaggctgccgaggtctgcgcgggcgacgccggagtcgttggcggcctgctctggattggcggggagttcgaggacagcgcagaccacaagagcggccgctccaaccgagggaacacgggaccccttaccgcagaggtccagaacctgttccagaggttcctgcttgagaatccgtcggcaatccccgatccgttcgccccgggcggccctttctacggcgccccgcggcaggagatggcgccagatggaacggtgcagattcgacgaccggcactcaccgtccacagccaggacggatcgacccgcacggttgagcgaaaggcggaggtggttgacggtgagctggttgcccgcgggcgccacgaagtgccgctacgcctggtcgtagcgcgcaacgaaaaggagatagggaatgggaagctcgactag

SEQ ID NO: 364309 - DNA, 624 bp, Pseudomonas aeruginosa
gtggactgctcaaggagggccttggtccgaacaacctcagactggagatcggcgacgttctgttcccgagcccgcttcagagcatcgttctggcgcttcacgatctgctcttgtcgagccttctcggcggcgagggtggctgtgaggctaccctcccccttttttaccagcgtattcgccgtgttgattcccttggcaacatcgttcaactggttcgcaacccagtcgacgacgcctgtttccttcgcgcgacgcccccagtatttctgggtttcggaaaagatccggttcagccccgcaccaatctccggggcaaatgacgccatctcctcgcggagcttcggcagctctttccgcagcgcgataacgatctgctccgaggtcagctcaccggcggcagccatctcgcgaagccggccgatagtcaccccgaatgtgtccgccagggcgccagcaatgcgatccgaggactccagaacggtattgaactcttcgccccgcagaacaccactgccgatggcctgggcgaactgggtaatgactgaggccgactcctcggcagatgcagcaccaattttcaggccgagcgacaccgcctctacggtttcgagggcggctcgctga

SEQ ID NO: 364310 - DNA, 1119 bp, Pseudomonas aeruginosa
atgagttcggtctcgcctgatgcattacaccctctgccggagccgttgaccccaactgactgcgacctctcgacattcgcattcatgccactggacgttcagcgattgcttacttccgagacttgggtgcttggttctggggacgagcgcgccgctgctatgactctctggcttgccagttggcaccaggttccggccgccagcgttcccgacaatgatcggatgctcgcacacctgtcccagtgcgctcgttgggacaaggtgaaggcccatgtacttcgcggctgggtcaagtgcagcgatggtcgtctgtaccatccagttgttgctgagaaggcgctggagtcttgggttgagaagctgctgaatgccatctcgggcgccaccggtaatgctcgtcgctggggtgtggaggtagatatcagcgggcttcaggggcaactggtcgaggcggttgctgctttaaaaagcatcgccccgcaatcgcgcaccttgaagaagaagggtgtaataactcttgccacgggatcgccacccgaatcgggtagtgatcgccccccgatcacaccccaaatcgaccccgaatcgggtagtgatcgcaacagacagggacagggacagggacagggacagggacagggacagggatatttaaaagatcaagagcaggcgccgcaacagcgtcgcccttcccctgaggccggggatgatcaaccgacggaaaagcccaagcgtgcttcccgcttgccggaagactgggccttgccggatgactggctggattgggcgctgactgagcgcccggagttcagcgaggcggacatgcgtaaggttggggagggcttcagggactactggtgctcggctgccggcaagggggccacgaaggtcgattggctggcgacctggcgcaactgggtgcgcaaggagagcgcaccatctgcaactccgcggaagccggcggtgggcagcaagcgctacccgttcatcccgcccaggggctaccagctcgaggatcacgagttctggcacccgcagatgacggacacggtgctgtccactcggacccacgacttcagcacccttgagcgtttgccggacggggagggcgcatgctga

SEQ ID NO: 364311 - DNA, 186 bp, Pseudomonas aeruginosa
atgttctgcccgtcctcggcgatcttgaacgccttgatggtctcctcggtcagtccacggcccttcaggtacgccatcaccaccgagtccaccttcggcgtcgagcaccttggcttgtccggtcgctggtatgacttccggctctcgaccggccggatgagcttgggctcctgcacgccgaggtag

SEQ ID NO: 364312 - DNA, 333 bp, Pseudomonas aeruginosa; identical to SEQ ID NO: 331044

SEQ ID NO: 364313 - DNA, 309 bp, Pseudomonas aeruginosa
atgaacctcgcaaacctgatcaataagcagtgttcccgcgacccctctgaggtgctcacggaagagcaggcgatgtctctttggggggagcgtgaagtagcccggcaggctgctcagaacatggcgcttggtgtcgccgctgtcgggaacctgctggcgaacgttggcgctgaaggcgaagtaggccaggaaacctcagagcgtctcggctggtttctggaggagattgggggggccatcttccagttggcggagttcgaacaggtctgttctgagcgaatcaaccggcagaaggaggctcagcaatga

SEQ ID NO: 364314 - DNA, 279 bp, Pseudomonas aeruginosa; identical to SEQ ID NO: 328609

SEQ ID NO: 364315 - DNA, 384 bp, Pseudomonas aeruginosa
gtgctgggcctgctgttgctcgatctgctgctgtcggcgctcgagttgcacctgaatctgcgcatgagccagcatctgctcagcctgggtcatcggcgcacgcagagccttcagcctctccagaacactgcggcgcccccccttggactcccgcatgccgacgagcatgcattggtccaaagtgagctcgtaacactccatcaaaacgccgctctgggggtgtgcaatttttttgcataccccaagctcatcgccgagctcatcctgcacccgggcgatgaactggtcattcctgacgcggggttcattcgcagcggcccgcgcctcgttgatgatgtcccgcagatcgatactggtcatggtggcggcctggacgccaattga

SEQ ID NO: 364316 - DNA, 222 bp, Pseudomonas aeruginosa; identical to SEQ ID NO: 331043

SEQ ID NO: 364317 - DNA, 672 bp, Pseudomonas aeruginosa; identical to SEQ ID NO: 333034

SEQ ID NO: 364318 - DNA, 687 bp, Pseudomonas aeruginosa; identical to SEQ ID NO: 333145

SEQ ID NO: 364319 - DNA, 219 bp, Pseudomonas aeruginosa
gtgagccagaagtgggtgccgggccggcactgccaccataagcgcatcgctccacacaggtattgccacaattccatcgccgacttcatcggactgcgcgaagccgacgtcatacaaatcatcttgaaggccttttatctgttgcgaaagcgtcacctcaaaaaaccggagttcaatttccggctcttcttgccgacagagcgcaagcaatatcggtag

SEQ ID NO: 364320 - DNA, 249 bp, Pseudomonas aeruginosa
gtgtgcggtgtgaacagcaaacctttttgtcaggagaaagatcatgcaactcgcatcccgttctcggggttcctgggctatcagcgaaacgatcgccgcgaaatggccggggccgacctgccacacatgaagatccgtgacctcgctgcccgtgggcgcgatcgcctcccggatctcctcccggacttcctcgccttcggcagcggcatcaagcaacacgctgccggtgtcccggatcaggccccatga

SEQ ID NO: 364321 - DNA, 282 bp, Pseudomonas aeruginosa
atgggcaacagcaagcagtacacggatgagttccgggcagaggcggtgaagcaggtgatcgagcgtggcttcacggtggtggacgtcgcctcccggatcggtattcccaagcacacgctctatggatgggtgcaggccgccaggaaggcgacaccggcatccggtgctgcagcagcgccgaccgactcagccgagatccgccggctcaaggccgagctgcggcgggtgaccgaggagcgcgacatcctaaaaaaagccgccgcgtactttgccaaggggtaa

SEQ ID NO: 364322 - DNA, 852 bp, Pseudomonas aeruginosa
atgcgtgcgcacgtccgcgagttccgtctggtggcgatgtgccgggtgcttggcgtgcagcgcagcggctactacgcctggctgcgccatggcgccagcgctcgcgagcgcgaggatcagcgtctgctgggactgatcaagcatcactggctggccagcggcacggtgtacggctaccgcaagatcaccctggacctgcgcgaggccggcgagcgctgcagccggcaccgcgtccttaggctgatgaaggcagaaggcctgcgtgcgcaggtcgggtatggccgcaagccgcgccatcgcggcggccccgtgggcctggtgaccaatgtgctcaaccgggacttcacgccagaggccccgaacaaggtctgggtcacggacatcacctacatccgcacttacgaaggttggctgttcctggcggcagtgatggacctgtattcgcgccagatcgtgggctgggcgacggcgccgacgatgaccagcgatctggtgctgcaggcgctggtggcggcggcttggcggcgcaagccgggcccaggcgtgctggtgcattcggatcagggctgtcagttcaccagcagcgattggcagtcgttcctgaaagcgcaccggatggtgccgagcatgagtcgtcgcgggaactgccacgacaatgccgttgcagagagtttcttcagcgtcttgaagaaggagcggatcaagcgacggatctacccgacacgcgccatggcagcatcggacgtgttcgactacatcgagatgttctacaacccgatccgccggcatggttccgctggcggcgtgtcaccggtagagtttgaaaggcgctacgcgcagagcggcaactga

SEQ ID NO: 364323 - DNA, 3087 bp, Pseudomonas aeruginosa
atgaaactgaagttcaagacgcaggcctaccagacggcggcagtgcaggcggtagtggactgcttcaaggggcaggttccacatcacggcggtattcgctaccggctcgatcccggcagccagaaagcagccccagagagcccgcaagcggcgctcgcgctggaggccgcttcgcctgaagctgctgcggaaaaggaagccgcgtttcgcaacgccgacttcacgctgtcggaaacagcgctgctggacaacatccaggccgtccagcggagtcagaacctgccgttgtcggatacgctggtcaggaccaaagtggctaaggtcaatctcgacatcgagatggagaccggcactggcaagacttactgctacatcaagaccatcttcgagttgaacaagctgtacggatggagcaagttcatcatcgtggtgcccagcatcgccatccgcgagggcgtggccaagtcgctggagatcacggccgagcatttcctggagacgtaccacaagaaggcgcgcttctttatctacaactccaagcaactgcaccacctggagagcttctcgtcggacgcgggcatcaacgtgatggtgatcaacgtgcaggctttcgcttcgcgcggggcggaaaaccgccgtatctacgacgtgctggacgacttccagtcccgcaaaccaatcgacgtgatcagcgccaaccgtccgatcatgattttggatgagccgcagaagatggaaggtgtggcggcgctgaaatcgctggagacgttcaaggcactgatggtgctgcgctactcggccacccacaagactacccacaataagattcaccgcctcgatgcgctggacgcctacaaccagaagctggtgaagaaaattgccgtgcgcggcatcgcggtgaagggactggcgggcacggcgggctatctgtacctgcaatccatcgaaatttcgagcaagaagccgcccgaggcgcgcgtggagttggagcacaagctcgccaatggcgacatcaagcgcgtgctgcgcaagctcggcaagggcgacaacctgttcgatctgtcgggcgggttggatcagtaccgcaattacgtggtgacggacatcaacgccaacaccgacaccctgagctttgccaatggcgtggagctgacggtcggcgacgccaccggcgacgtgaccgaggccgcgctgcgccgcatccagattcgtgaggccatcaaggcgcacttcgacaaggagcaggcgctgttccaacagggcgtaaaggtgctgaccctgttcttcatcgacgaggtggccaagtaccgcgactacacgcaggcggacgaaaagggtgaatacgcccgaatctttgaagaggagtacacgcagtacctgaacgaggcgctcgatctggacgagacggcctacgtcaagtatctgaagggcatcccggtcgacaagacccatagcggctacttttccatcgacaagaaaaccaagcggcttgctgatccgacggttgccgcgcgcggcgagaacgccgggctttcagatgatgtggatgcctacgatctgatcttgaaggacaaggagcgcttgctgtcgctcaccgagccggtacgcttcattttttcgcactctgccctgcgcgaaggctgggacaacccgaacgtgttcgtcatctgcgcgctcaaacacagcgacaacaccatctcccggcgccaggaggtgggacgtggcttgcggctgtccgtcaaccagacaggcgaccggatggatcatccggctaccgttcacgaagtgaacgtgctgaccgtggtcgccagtgagagctacaaggacttcgttgccgcgctgcagaaggacatcagcgagtcgctgtcggaacggccgcgcgtggcggacaaggcattctttactggcaagatggtgaccacagccacgggctcagtgaccgtcacagaagatcaagcgaccgacatcgagttctacctgattcagaacggctacgtcgacaaaaagcgcaacatcaccgagaaataccatcaggccaagaaagacggcacgctggctgcgctgccggatgaactcgctcccttaggcggccaagtgttcacgcttgtggatagcgtcttcagcgaaagccaattgcccgacatcggagacgaccgcaaacccaagaagaacccgctcaacgccaacttcgacaagcaggagttcaaggcgctgtggcaccgcatcaaccgcaaggcggcctacagtgtcgatttcgactcggacgagctggtgcaaaaggcggtcaaggagctggacgcagccctgcgcgtgacaccgctgcaatacaccatccaggcaggtgaacagatcgaccaggtgactggcgaggcgctaaagcgtggagatggtttcaaagtttccgagacaaagaccgaatacaacaagcagtcgattcattcagcggtcaagtacgacctgatcggcaagctggccgaaggtactcaattgactcgccgcacggtggcggaaatcctcaaaggtattaacgtcgcggtttttgcacagttcaagaccaacccggaaagtttcatcgccgaggccacgcgactcatcaacgaacagaaggccacggtcatcatcgaacacctggcctacgacccagttgaggacaagttcgacctcgacatcttcaccgccgggcagaccaagcaggacttcagcaaggccggcaacaagctccagcgacacatctacgactatgtgctgacggattcgaaggtagagcgagagttcgtgaaagagctggacacagcaaatgaagtggtggtctatgccaagttgccacgcggtttcctcattcccacgcccgtgggtgactacaacccagactgggcgatcagcttcaaggaaggcgctgtcaagcacatctatttcgtggcggaaaccaaggggtccatgtcctcgatggacctgcgtgagatcgaaaagaccaagatcaagtgcgcccgcaagttcttcgacgagatgaaccgccgctacgccccggagaacgtcaagtacgatgtggtggacagtttcggcaagctgatggaggtggtgaagtag

SEQ ID NO: 364324 - DNA, 1863 bp, Pseudomonas aeruginosa
atgcactcgcccaacctgactcaagacaacatcgcgcgtatccgcgatctgttccccggctgcgtgaccgaggcgcgaggtgaggacggcagtgtgaagctggcggtggacttcgaccagctcaggcaggaactgtccagttccatcgtcgaggggccgcaggaacgctatcacctcaactggccgggcaagcgcgaggcactgctgacggccaatgcgccgattgccaagaccctgcgcccggtgcgcgaggaaagcgtggacttcgatacgacaaagaacctgtttatcgagggcgataacctggatgcgttgaagctgttgcaggagacgtatctgggcaaggtgaagatgatttatatcgacccgccgtacaacaccggaaatgatttcatctacgaggatgatttttcggaagactatgagcagtatttgctacggtcaaaccaagtagatgcagccaaaaatcggttggtagtgaacccagaaagtagtgggcggcatcattcagactggttggatatgatctatgcgcgtatcagacttgctaggaatctactttcggatgagggagtgattttcatatcgattgatgataacgagcacgcaaatatcaaaaaaatatgtgatgaagtctttggagagcagaactttattaccaatttcgtttggaagcgcaaggctggtggtggtgacgatagcggtcaggtggccacagaacatgaatacgttgtgtgctacggcagggatgtttcgaaaactcaattagcgaatattaagcatgagagcccagcgatgaccgcgaaatataatcggtctgagaatgggcgtaggtattacttagaaagactcgataaaaccagcttgacatatagcgagtcaatggactttccaattgagtgccctgatggttcctttgtgtctccccttcaaccagatgcgaataatccgactacagcgtggcgctgggggaaaaaaaccgtcctcgaaaggagatcggaactggagtttcttaaggacgaaaaaacagggcagtggagagtctatacgaggacatgggagtctctggatggcgtaacgccgcgcagtcttttggtggaaaaagaacatggccgaaatcgcgatggcactcaagagctcagtaatttgctaggcccaaagatttttagcaatccgaagccgacaaaactgctaactcacttgataaagataggggcatccgcggaggattcgattgttcttgatttttttgcagggtcagggtcgttggctcatgcggtgatgcttgctaatgcggaggatggagtttcgaggagagtaatttgtattcaaattcctgcggtcacggagcgggatgattatgtaaccatcgccgaaatttgcaaggagcgaattcgcagggcaggaaaagagagccttagtggaaagtgtcgcgagagctggaacaaagacattggtttccgcgtactgaaaatcgacacctcgaacatgtccgacgtgtactacgcacccgatgctctggacaagaccaacctcgacctgttcgtcgacaacatcaaacccgaccgcacgccggaagacctgctgttccaggtgatgctggactggggcgtcgaccttgccctgcccatcgagaagaggaccatccagggcaaggatgtgtttttcgtggatggtgacgcgctcgccgcctgcttcgacgcgcacggcggcatcgacgaagccttcgtcaaggaactggccacgcacaagccgctgcgcgtggtgttccgcgatgccgggtttaaggacagcgccgtcaagatcaacgtagagcagatcttcaagctgttgtcgccatccaccgaagtgaagagtatctga

SEQ ID NO: 364325 - DNA, 2355 bp, Pseudomonas aeruginosa
atggaggagaactttccgcacctgaacatacaacgagaagcgccagtcaatgaaaagcgagctggacgtgctatgtctccaccaccgccagcggatgctcgtggccatgggcgtgggctgttgaccaaactggctcatgcacaagaagaagccagtgaagatgtaggcgggtttgatgagcgcaagcttttccgcttcacggtgcagaaaggattcaatccggatgacctgagaaagatctcctcggaaatcgaattcgtcagccaggaggacgaaaccatcgtcatcggcttcgccaccaatgccgcattggcgcagtttgaagcccgtctttccagtatggctgctggtgagcacgttaccaataaagaagtgatctatgccctgcaaagtgtggatggctggagttctgaaaatcgaaaagggtgggcactgaagcagcaaggcttccctgatcgggatgagttcatgctggatgtcgagctatggccgctggaagacagtcatcaggcgaggcaacaagcctggcaagcgtttgaaggctggctggcagaacaacgtatcgagaagttggatcaaatcaagaagccagagctgacgctgtatcgtgtacgctgcacagccgcacaggctggcatgctgcttcaccatcgggatgtgcgatccattgacttgccgccgaactttgcgctggagcgatcggtcgtctttcaggatattcagaagattcctgatattcaggctccttcagcgcaagcgccgggcgtggtggtgctcgatagtggcattgcggatggccatcctctgctgaaagccgctgtcggcgaggccaagagcttcttgccgggcgaaggcccgcaggatgaaaatgggcacggcacacatgttgccggtctggctctttacggtgactttgaaaaacacctgcgtgctggcacctttgtgcccaccttgcgcttgtacagcggcagaattctcgacaaacacaatgagaacaccacgggctttgtagagaaccagatagaagaagccgttcgctattttgtaagagagcatggttgcaaagtgttcaacctgtctttcggagatgccaacaagccctacttgggcggacacctgaaaggcttgtcggtgacgttggataccctctcgcgggaactgggtgtgctgtttgtggtgtcctctggaaatcatcgaattaatgagcgctctccggatggtttggaatggcgagatcagtatccaggctatcttctgagtgacgactggcggctcatcgaaccagcacctgcattgaatgcgctgacggttggtagtctggcgcgccacaaccaaaccttcaacagccagtaccattctgcggatcctgcagaactaccgattgcacagccggatcagccatcgcctttcactcgcagcggccattctgtcgatggtgctatcaaaccggaactgacggcatatggcggaaattgggcaatcaatacacgcgccaactacgcattactggacagaactgctgggctgggtgtggtatcgaccagttaccagtttgcgggcggccatccttttatggtggatgtaggcaccagcatggccgcgcctcaagtagcgcatctggccgcatccgtgcttcatgaacacccggatgccactgccaatttcgtgcgcgcccaactctgcctgaacgctgtattgccgcaggccagccaccaactgatggagcatcataaagcacttaaacgtgcgtgtggttatgggcaggtggatgaagccgccctgcatcgctcgctggaaaacgcagtcacgctgattacggatggcaagatcgagaacaagcggcaccatttctacgaaatacccattccgccggaatttaccagcggaggcaaaaaacgcctacgggaaatcgccgtcgcgctggcctatacgccgcctgtgcgctcaacacgcatcaagtaccgtgctacacgtattgacttcaggctggtcgctgctcgtgaccttgaacacgtcacgaccatgttcaacaaggcgaccagaaaggaagattaccagagcatcaaggagctggctggcgccagcattgggcaggtggctcgcagtaaagggacggttcaggccgatttctggcagttcaaacagtttcagaaggattcaccactacgaaccaacaaactgtttgtggtggtcactcgcaatgactttccgtggggtgaaaacctgtgtgacagcgaagaaagctattcgcttttggtcagcctgcgtgacaaagagaaccttctggctcaactctatacccaaatcaaggcacgactggatgccagggttccaccgttgcgcgttcgtgcctaa

SEQ ID NO: 364326 - DNA, 996 bp, Pseudomonas aeruginosa
atggccacagccaagctgcttagacaacttattaaaactggaactgaaggcaatcaggacgctttcaagcgtgtttccgaacagttgattcaggaggagcgcaccaagaatcaccatttgctggcgaatgacctggagagaattctctatggtcgccgtaatgctggtggggcagccaactcgttgctgagtgatcgcatacctaaagataaagagcgcaacctgcctctcttacagatcaaggaggcagtccggcgcatggaagacgtcgtattgtcggatgaaaattcgtccttgttgaatgagttgctgcaagaacaccatcgagcggaagcgctgcaaagctatggtttgtatcccgcggatcgcctgttgttttgtggtccacctggatgcggaaaaacgttaacggctgaggtactggccagtgagctgggcttgccgctggccatagtccgtattgatagcgtggtgtcttcttttctcggggaaacggcagccaatctgaggcaggtctttgactttatagccaccataccaatggtcgtcttgttcgacgagttcgatgcgttggccaaggagcgtgccgatactgccgagcatggcgagttgaagcgcgtggtgaatgctttcttgcaaatgctggacgcctatgaaggtaaaagcatcctggtggccgccaccaaccacgagcgtatcctcgacgccgccatctggcgccggtttgatgaggtattggtctttgaatcgcccaatctggagcagttgcggaggctgttgagcatcaagctgcgtgggttgcgccgtgaattcgagattgaggatactcgcattacgagcatgttcaaaggcatgagtcatgccgatgtggagcgcgttctgcgtcgggcagccaaagacatggtgctgactggaaaagagtttctgagtgaacggcatctgcaatccgccattcgtcgtgaagatgcccgcagggcgcgcatacaagggagctaa

SEQ ID NO: 364327 - DNA, 660 bp, Pseudomonas aeruginosa
atgagtgcgctgatcgcttaccccaaacaggccgccttcgggcgcgttctgcccaagaacaagatctacgagcacggcggagccaactcccgcctcaaagacttgttcgtcaaacaggtggaacaggtcatctggcagtacaagctggccccggagacactgcatctgcctgcgcgcctcggcgtaccggaaatccagatcttcagcatccagctcaaaacgccggaactgcacgccgatgtgctgcgctgcatcgacggggctatcccgtttcccattgtgttcgaactgactttcgacggcagaacgcaggtggtcgccgcctataagcgcccgaacgaagccgacgccagccgctgggtgctctcgggctactttgcatcggactggctgccaatggatagcgaacgcaccgcgatgcccgtggccttgcatctgggcggcctgtacgagcaattgctgcaccgcctgatcccgctgtcagcgcggccacaggaaacactggccgagctggtggcgcgcgtcgaacaggcacaagccaagcagcgcgagctggataagaccacggcgcggctggccaaggaaaaacagttcaaccgcaaggtggagatcaatgccgaactgcggaagctgagaaccgaactgaacgggttaaagtaa

SEQ ID NO: 364328 - DNA, 3288 bp, Pseudomonas aeruginosa
atggaactgatcgacaacattagtcgcttgctgggtgatgaccttaagcaaaccatccggccaggggcgcggctgaagatcgccgcttcgtgcttttcgatgtatgcctacgaagctttgaagtccgaactggaaaagatcgacgaactggacttcatcttcacctcccccacctttgttgccgacgaagtcacggacaagatccgaaaagagcgcagggaattccatatacccaagctcgaccgggagcgcagcctgtatggcagcgagttcgaaattcagttgcgcaaccaactcacccagaaggcggttgccagggaatgtgccgactggatgcggcgcaaggccaagtttcgaagcaaccgcagcaaggcgccgatgcagcaatttgcctgcgtggaagccgatggaacccatagcgcctatgtgcctctgcatggcttcacggctgtcgatctgggttacagccagggtaacgccgtttccaatttggtgaacaaggtcgaggccccttttgcgaacacctacctcagtctgttcgatcaaatctgggatgacctcgaaaaactggaggatgtgaccgcccaaatctgtgagcacatcgcgtccgtctatcaggaaaattcgcccgaaagcatctacttcttgatgctctacaacatcttcaacgagttcctggacgacatcgacgaagacgtgttgcccaatgaccgcaccggctatcaggacaccctgatctggaacaagctcttcaactaccagagggatgcggcaaccggcatcatcaacaagctggaaacctataacggctgcatcctggcagacagcgtcggcctaggaaagaccttcaccgcgctggccgtagtgaagtattacgagctacggaacaagtccgttctggtgctgtgtccgaaaaagctggcggacaactggctcaactacaaccgcaatctcaagaccaacatctttgcccgcgaccgcttcggctacgacgtgctgtgccacaccgacctgagccgcaccagcggcgaatccttcggtacaccactcaaccgcatcaactggggcaactacgacctcgtcgtcatcgacgagtcgcacaacttccgtaacaacgacgccttcaaggatcgcgagacccgctaccagaagctgatgaacaaggtcatcagcgaaggtgtgaagaccaaggtgctgatgctctcggccacgccagtgaacaaccgcttcaccgatttgcgcaatcagctcgcgttggcctatgagggagactccgagaacctcggcaagaagctgcgcaccagcaagtcggtggaagaagtctttcgcaatgcgcagaccgccttcaatgcctggtccaggctcccgccagaggaacgcacgcctcgggcgatccttggcgcactggacttcgactttttcgagctgctggacagtgtcaccatcgcgcgctcgcgcaagcatatccagaccttctacgacaccaaggacatcggccatttccctgagcgtcgcaagcctttgtcattccattgctcgctgacttcccgctcggacgtgatgggcttcaacgagattttcgagcacctgtccaggctcaagctcgctgtctatgccccggtcagctacatcctgccgagccgcttgaggaaatacgaagagatgtacgacacgcaggttccaggtggtgcaggaaaattcaggcaagttgaccgcgaaaagagcctgcaggctctgatgacgaccaatctgctcaaacgtctggaaagctccgtccagtcattccgtctcacgctgcaatccctgcagaccaatcaccagaacacgttggcgaaaatcgcggtatttaaccagagcggcatcgctgccagcgtgggcgatctgaccgaggtactggaaagtatcgatgcagaagaagatgacccattcgaaaggctggatcagggtggcgatgtgggcggcaaggtcaagatcagcttggccgatatggacttgccgtcatgggagcacgacctcaaggtcgatctcgccaacatcgacgcgttgctggcttcgatgtcgaggatcacccccgctgacgatgccaaacttcagcaccttaaggaacttgttctgggaaagatcgccaacccgatcaaccccggcaacaagaaggtgctgatcttcactgcttttgcagatacggcggactacctctacgccaatctagcgcccgacctgctggctcaccagcaactgcattccggcaagattacgggcagtgaccggcccaagtccacattgcccaaagcatatgacttccaggaactgctgacgctgttctcgccgcgctccaaagaaaaagccatcgtgctgcccaacgagtcggcggaaatcgacctgctcattggcaccgactgcatttccgagggccagaaccttcaggattgcgactacctcatcaactacgacatccactggaacccggtgcgcatcatccaacgcttcgggcgcgtggatcgcatcggttcgcccaatagcagcattcagttggtgaactactggcccgatatttcgctggacgaatacatcaacctcaaggagcgtgtcgaaaaccggatgatgatcgtagatgtgaccgccaccggcgacgacaacgtcatttccgcgcaggccaacgacatggcctaccgcaaggagcaactgcgccgcttacaggaagaagttatcgagttggaagacctgaagaccggcgtctccatcaccgacctgggcttgaacgacttccgcatggacttgctgaactacgtcaagacccatggagaactgcataggtcccccaacggcctgcatgccgtcgttccggccgaccctgacctgggccttgcgcctggtgtcatcttcaccctgcgcaatcgcagcgcgggcgtgaacccgcccgcacacttgccccaacacaaccggctgcacccctactacctgatctacatcagtcaggcaggcgaggtgatccacgaccacaccgaggtcaagcgcctgctcgacctggcgcgttcgtgctgcaagggccaggcagcaccgattgcggatgcctgccaacagttcaacaaaaccacggcggacggccgcaagatgcaggcgtactccgacctgttgaaccaagccatccgctcgatgatcgaggtgaaggaagaaaaggatctggacagcctgttcaccggcggcaagaccacggcgctcacgggcaccatatccgggctggacgacttcgaactcatcagcttcctcgtgattcaggaggttggatga

SEQ ID NO: 364329 - DNA, 222 bp, Pseudomonas aeruginosa
atggccagccatctgttcctgatcagctacatcctcgacgaccagccgatgacctgcgaattgcacagcgaggcggataccctcagccgcgaggaggcccgccgccacttggaggcactgcatcgaccgcacgacgccgaggcgatcagcgatatccaggtcagcaaggtggagcgtacccatgagccgggcaccacgccgggacactaccagcacccctga

SEQ ID NO: 364330 - DNA, 399 bp, Pseudomonas aeruginosa
atgggaatcgccgatctccccttcgatctctgcctttggaacaagcgcagcaacggaatcgacaacaattacgttaaccgcacccgaacgagtcaatatgtctacgatctcaagagcctgttcaccggtatctggctgcgagcacaggaggtcatcaatgtttacaccgagtttagctgcgtagattggatcaagagcatgttcggcatccacgaatgcacaggtcaaaccttgacgctgagcttcggcaataaccgaaagagtgagggtagttttaccagaggactctggcccgtagatctcgacaatacgaccacgcggcagaccacccacgcccaaagcgatgtcgagaccaagggaacctgtcgaaacaacatcgatatccattgtccggtctga

SEQ ID NO: 364331 - DNA, 207 bp, Pseudomonas aeruginosa
atgtcaattagcagtcgagcacacatctcgatgctggaacgagggctgaaaggggtcactatcgagaagatgatagagatcgctgaggttatgggggttcaccccctcacagtgctgctcgactcgttcagtagctacgaaggggtgacgtcagagaggcttttaaaacaaattgcccaagagcatgaagagctcggaggggactag

SEQ ID NO: 364332 - DNA, 663 bp, Pseudomonas aeruginosa
atggatattgataactttgcacagtgcatttcttatatgcgcggggtggttgaggctaagagtttttgggagaaagcgctcccgtatggcggtggtgttctaggtgtgttgattggcttttacgctaatgcgattaaagagaaattgaaggagggaagggatactgagaataagatgatgtgtatcaaggaggatgtacatcgtgctagaaactcctttgagttggcagtgattgaaagcatgaaggctttggggcttctaaagagaaatcaggcgcttaaagagcataatatgccgaacgacttttctctgccaatgttggatgagtacttctatgaggtcgcgcataagtacagctctaatgagaggtactggctcaaggagctactttcttattctgatagcttaaatggtcgggttgacaaattgcttaatgctcaggatggggaaaaacttcagatggtaaagtatctgatgacggtggtggattgtgcctcttggtgtgtaaatgtttctagtttatttttgagagacgagaaaaaagaagagattggtagtttgcttgcgtatttggctgataagcatagtgataaaaaagactattgtgattacaatgtctataagcattgggaaaacactttgacagccccgccggaagtttga

SEQ ID NO: 364333 - DNA, 216 bp, Pseudomonas aeruginosa
atgatgccgagggcggtcagtgctctacgcatcgtgcggctctccctggcctgccgccccgcccagctcttcctgaagcgcttgaatggcttcgatgaactcgccggcgccaccttcctgttgctctgcggggattcccagcacttcgccaacggcagcaaggtccagcgccatggcgcggatgatccggtttccgcgcgtgacttcctcccttag

SEQ ID NO: 364334 - DNA, 780 bp, Pseudomonas aeruginosa
atgaaacagaagcgaatcctggtgaccggggccggcagcggcttcggtcgggaagtggcgttgcgcctggccgcccgcggccatcggacgatcgccggcgtgcgcggcgccgggcaggccaccgacctgcgcgaagaggccgggcgacgtggcgtcccgctgcgggtggaaaccctcgacatcaccgtcgccgccgatcgcgaacgcgcctgggaatgggatatcgacgtgctgctgaacaacgccggcagcgccgaggccggggccagcgcggagatcccgctggaactggtgcgcgcgctgttcgagaccaacgtgttcgccaacctggaactgacccagggtttcgtccggcgcatggtcgagcagaagcgtggcggcaaggtgctcttcgtgtcgtccatcgccggcctgatcaccggaccctataccggcccctactgcgcctccaagcatgccctggaggccttcgccgaggccctgcatgccgaactgaagccgttcggcatccaggttggcaccatcaatcccggcccgtaccagaccggcttcaacgatcgcatgatggaaacctggaaacgctggtacgacccgcagcgccacttcaccgaccacagcggcgtgcgctttcccttcgagcagtacgatccggaggaaatgatcgcgcggatggtcgagctggccgaggctgacgaaggcccgttccgcaccctgttgccggaagctttcgtcgaggtggtgaaggacgagcaggcgcaggcctggcagcgccgcctgtag

SEQ ID NO: 364335 - DNA, 864 bp, Pseudomonas aeruginosa; identical to SEQ ID NO: 324093

SEQ ID NO: 364336 - DNA, 309 bp, Pseudomonas aeruginosa; identical to SEQ ID NO: 335991

SEQ ID NO: 364337 - DNA, 1749 bp, Pseudomonas aeruginosa
atgagcgggaagctggaaaatttcctgaatggtatcaaaacctgctgcccgaaggacatcctgacctgggtggaaaagcatcctccaaagcgtcgggcgcccttcatccgcgaatttttcatgatcgctcacgaccttgatccggaatggcatcggaactctggggtgattaccaatgcatgtcggacatttctctttcatcgccgtagtgcaatatcaaaaaccacaggcaagccggtcaaagaagttaccgtaatctctgactacacagcagttagtcattacttaaacaggcttcaaaaagccaagaaactgcctagtaatgcgctgatccccccaatccccaaatcgtcagacgtattctcggaaaaagaatgcaatatccttggttatctgactttggaacatgccgttcaagcagcctccatggaaatcgccctgagcgaaattgcgcaacaaatcgaaaaacatagagctgtcattctctccaaatgcaaacatgttgttgcagaaagttttgcgcgttatttaaaaaccccagacattattcgcagaagcgatgtaattgctattcgactaacaaaggacaacttagatcctaacctgagaggctttggcaccggccaacatattagttttttctcaccttcccacccaaatggcttcattaactctgttgcgtacctagccacagaacaagacggcctttttactcgcaaatcatttcctggatcacatcacatttattcctggtcttcaatgaaaattaaatcatacttgggaatcactgacgaatttgctgttgcggcgatgtgcatcattattgatgagcttggaattaacgtcatcgacttggcaaacgcccaagtaaagaaaacgaaagatgggcaattcgtcaccatccgcgaggatggcgggatcaccgtcactacccttaaaccccgggctaacaaattaattgagcgccatgcaccaaaagcttcgaacgagattaaagtcgatgcagaaagtatagacgctaatactacgctatggatgctgttacaaatgagaactcagcactccaaggctttgaactccaactatcttttcgtcatggatgggtctagccccactcgtcaatgggatgagcatctctaccgtatcttagacacgagacgaaaaagcactttcaaggcaatcattgattcgcttcccccatgggtagctgaagctaagcctaccatgcccaaaatcagagtttcacgtggcctgcttaagtggatcgagagcggtggcgacactctggaaacaagtctataccttggcaactcgttactgactgccttgcgaaattacgtaccaccgtcaatccaagagtttgtataccgaaaaaaactccgtgaccatcaaaatattcagctacttatagccgaagaaatctccccctctacaagccaccccagtagtgaaagttatgagatatcccaagcccagctcattaacgccgtgaagcaaatcagagccacccccctccaagcagcagaaagtaatccaaaccatatgatttactttctctgctcgcctcaaacgattgagcttgtcgtctcatatgcaacattcgggaaagacaacaatcttatttcaacatgcaagacgattatcacaaagatccaagaagaaggcagtcgcaaaatgattaaactgcttgccgatgccaaacctaaacgcatggactttgctctcctcgaggtatccgttaatgaataa

SEQ ID NO: 364338 - DNA, 1863 bp, Pseudomonas aeruginosa
atgaataacgaggaagctcaaaaaatcataccatcggcaccgtcatcccaagccgttcttcctaattggattcaccctgtctccacaaagacagaatggtatgtgccaaaaaccggaacaagagtgtccacctcagatgatccaaacactagacactatgtaaagattagcttcgactataagctattcgacgagtcatccacagcagacccagtgtggaacttgtttatcagggacttacagtcatcagccattgccctgattgaaagctcaaaatcgaaacgaccgaatgcacttgcttcatttgtgaggacagcctttgaaattgccgatcatgtgtacgaggcacgggctcgctcaagccaggctcctaagatcgtaaccttggctgacatcactctggacgatgtgaaaaccttcctagaagcccatgacttaaaattcatgggcataaatattgccaagcttgattcagaattaggatcagcatccagaggactgacaaatattgctcccttgatctcaaatatggggatcccccctattactaaaaagattattattcagaagctcaagaacaacaagtttgatatctgccgagaattcgtctgcacctatgctgcaaacgaagaggatgacgaagatagcctcagcatttgcacactacaaaacaaatgcaccaacctagcttacctgcactccacaaaggaacagcaatctcatccttttgaggttggagcagatgatatttcagacattctaaacaacatgcccgggaaatttatcgagaaaaaccaaaccccattgatgcctacaaacgtagcattccactacatcagcaacgcgattgtctttcaccgcgactatgcgccacatatccgaaaatacattaaaaggcttgacgactactacaacaaggaaattattggacggtacgcggccagcacaatcagatcaaacgtacacaccttcaagaaacagaccttagaggcgataccaatccctaaggcattacgacacctcaatatcagaacgtatgggaaatgcggcagaaccagaggtggaatcagctgcaattctattttgcgagagcacatttctactgacgagctgattgatttctacgccattacaacccgaatcctgatacatactttttcagcttgccgcgtgttgagcgcctccttgcttgacgccaattgcctaacaatatcaaaactggatggcttatgggacttgaaacttaagatcccgaaagccagcaacagccatgagcttgaaattattaagcgaccaatccctaaaatcatttgggactttatttacgaatatatcgagtttatggaggatcgccatccagggatgacttcaatctggccctctggcgcacagaaagggaaagaccgaaacgagacaacttttcgtaaaatacttgaccaatactctgattggattcaaacaccaaccacaggcgaaacacgatggtatgcacgtcctcatcaattcagacgtttcttcgcagccttcttcttctacttgagcggaagcactgaaattgaaccgttgcgatggatgatgggacacatcgaaccgaatgtaacactctactatgctgacatctcgaaccaacctgaatgggagcgagatactctcgaatttctaactgacttcttggagggccacgtaggcaaggatgtcttggtcgacgaagaattacttgacgttttctccaaatgtgaacaagaagtaaaactaggggatcacactttgttgtctgaacacctccaagaactggcaaaccatcacgacatcaagctaaagattatgaacaaccaaaaaatctttatatatgcgagcagataa

SEQ ID NO: 364339 - DNA, 1281 bp, Pseudomonas aeruginosa
atgatacatacagcaaaatctccccatcttgattttcttttcaaccatggtcatacccccccaccactacctcttctatttgactcaaagggcaatttttgttgggagatcaacaactacctaacacagtatggtggcgggcccaacagctacggagcacgcccgtcacccaagaccgtatttagtcgagcagaaacattaaatgtctttcaaggctatcttgagtctaacaagctaaccatcttcgacgtcaccgacgaaacattgtacgactttgttacacacaaacaaaaacttgaaaagtcaaattccaccaccttaaaaagaattgttaggtacatactactcctgctggaacacacccaacaggaaaacaaattttcaaagctcctcacaaccgacactggcgcccatgagtttcagattaacgctacagaagatcattacaatttccagaggcgaaaggtacggtttctaacacacccatgtatagaaaacctgaaagacacaccaaccgaaccaataagctttattcgtaacaacgagctaagcgcgtggcacgatgctattcatgactacacatccaatcagtacatcattgatagatggtacgtgctttccacccttctggaatttacaggatgccggatcgaagaagcgataaatatccccgcgagctcaatcattcacgccttcaaaaacaacgatctcgtcagaaacatcccagttctcaaaggcaagtacaagggatgcttgcggaaagttttgatccctagacctgagctacaagaattatacaagttcgtatcgcttacccatagcctgcatccacacagcctgcttcatgacagaatatttgttagcgaagacagcggcctcccaatgtcacgcacgaccttcaactcgtattatcgagtggttgccaattcatccaaacacaaggatttacttcaaggagtttcttaccacaatttccgccaccgctacttcacaattctggttgcgaaaaacatcagcaaactttcgaaaatatcccaggtgaacatcttggatgtggcaatggcaattgtgcgtaaggattcataccatgcttctaaggacaccctttcgacctacattcaccttacacaagatccagaaatccaggttattctcaaagcagaacctaacgcttctgcgactctaacggcaatagaaaaacttttgaagacagacgacggtagatcacccgaagagaagctggccggaataatggcattgatcaacgccaagtctccctga

SEQ ID NO: 364340 - DNA, 798 bp, Pseudomonas aeruginosa
atgcgggctaacaccccggccgacctgctgctcaccgtggacgccggcaacctctggcaggccgagcagatgggcctgctgcaaccgttcaagtcggccaccatcgaacggaacattccctcgcagtatcgttccagcaccgatagctggaccggactgtcgctgcgcgcgcggaccatcgtctactccaccgagcgggtcaagccggaagagctgagcacctacgaagccctggccgacaagcaatgggaaggccgcctgtgcctgcgcacggcgaagaaggtctacaaccagtcgctgaccgggaccctgatcgagacccacggggcgcagaagaccgaggaaatcctccagggctgggtgaacaacctggccaccgacgtattcgccgacgacaacgcggtgatccaggcggtggacgccggccagtgcgacgtcggcatcgtcaatacctactactacgggcgcctgcacaagcagaacccgaacctgcgggtcaagctgttctggccgaaccaggccgaccgcggcgtccacgtcaacctgtcgggcatcggcctgactcgccacgcgccgcatcccgaggcagccaaggcgctggtggaatggatgaccgggcccgacgcccaggcgctgttcgccgggatcaaccaggaattcccggccaacccgcaggtcgcgccgtcagccgaagtcgccagctggggcagcttcaaggccgacagcatcccggtggaagttgccggcaagcgccaggccgaggcgattcgcctgatggaccgcgccggctggaactga

SEQ ID NO: 364341 - DNA, 708 bp, Pseudomonas aeruginosa
atgtgcggacgattcacccagtaccggacagcgatcgaatacctcgaggcgctgcgctacgacaagcccatcgagagcggcatcgacccagagcccatcggccgctacaacgtaccgccccgctcccgggtgctcgtcttctttgagaccgcttccggcctgcgtatggccaagctcccgtggggttaccagccctggtgggcgaagggcaaacgtcagccggcgatcaatgcgcgtgtagagacggctgccaccagcaaattctttcgggacgtctggcgcaccggccgcacgttggtcggcgctgacggctggtacgagtgggtgaaggacccggtcgatccaaaaaagaagcagccgtattacatccgattgaaatcaggcgaaccgatgtggttcgcggcgctggggcagttcaggcgagaggacaggaccgaggagcaggaaggcgacgggttcgtgatcataacgggggacagcgaccaagggatggtcgacatccatgaccgccggccggtcgtgctaccaccggatctggcccgggagtggatggagccgggcatatcgctcgagcgcgccgaggaactcgtgcgggacctggcgctgccggtggaggcattcgaatggtatccagtggaccgagcggttgggaatgtgaagagcgaaggtgcgcaactaatcgagcaaatcgacgacccctcgctatag

SEQ ID NO: 364342 - DNA, 954 bp, Pseudomonas aeruginosa
atgaagcacgtgatagtggcgagcctcgccaccctattcatcacctccgtcgcgctcgccagtgcaccatcgaccttcaccgctgcaaaagccgtcgccaaggataaggtgttttttgaccaggcatctgccgggctcggcgacctttactgcggctgcgcatgggaatgggtgggcaagtcaggcgggcgaatcgactccgcctcgtgcggctacgaaacgcgcgcacagcagacacgcgcggagcggatcgaatgggagcacatcgtgccggcctggatcttcggccatcagcggcagtgctggcaggatggcgggcgtaaaaactgcgtggcggatgacccggtgttccgggctatggaagctgacctttttaacctttacccatccgtgggcgaggtgaacggcgaccgcagtaactaccagtacgggcgtgtggctggcgcccctgcacagtacggggcatgcggcaccagagtggacttcaagggacgcgccgccgagccgcgtgatgaggtgaagggtctggttgccagatcgacgttctacatgtacgaccgctacggtttatcgatgtcgcggcaacaacagctgctgctgatggcttgggatcgccagcatccggtttcgacctgggagcgggagtggggcagccgcacggcaagagtcatgggacatcacaaccccttcatcaccggcgaacgcgcttggacgcaggggcacaagccatcgcgcgagggtatcgtgagcccggtcctcaccagcgtcacgccccctccttccgctaaagccgtgcccagtgatgtgatcatcggaaacaggaacagccgggtgtaccacctgccgaagggctgcccgagttacaccaaagtggcccccaagaatcaggagcattttgccaatgagtcctcagccattgccgcgggctacaggatggcggggaactgtcgctag

SEQ ID NO: 364343 - DNA, 405 bp, Pseudomonas aeruginosa
gtgactttaaatgatgaagatcaaatggcagcccctaatagtccacttgcaggcaaggtcgcgttgacgtttttctttaaccttatggaaaaatgggactgctctgaagctgagcagaaagttctgctgggaataataggcgacgccgcctatcacaagtacaagtgtttgccagaggtatgcctgtgccacgatctcatggagaggatttcctacctgatggggatccacagatccttgagggtgatcttcagcaatcatgccgactacggctaccattgggttagaaaacccaacaaaacacccctcttcaacggccaaagcgctctgcagttcatgctgtcagggcgcactgctgaactggcggaggtgcaccgctacctagcttcgatacggaacttgtag

SEQ ID NO: 364344 - DNA, 507 bp, Pseudomonas aeruginosa
atgatacgcatccatcacatttttatagatattcccgccacaaacaatattgcgctgagcatctactggctggtacgtcacagcagtcacaccatacaggcatccatcgatatagttaccttgaaaaataaccccatcaacatcacccatggtatatccagcattttcgatatccagcgctgcataagtgctgttatagaacccattcgacaaaatccggatattaaatccggattcaaccgttatgcactgtctttctatattgctaaatgtgcacccaaaaacctcgcaatcctcgcattgaaagtcaccttctgggattgttggacgaaaaattacgccatcgcccaacgagaaaaccgaactgctgccgatattttcaataaaaagatctttcacctttactttcttcgctacacagtgaataccgtgctgcctatgctccggatcgaaactatccttatcaccgttaacgataccaggaccatagaacccgatatcgcttag

SEQ ID NO: 364345 - DNA, 222 bp, Pseudomonas aeruginosa
atggtcgttgtcggcatggctcagcaacaggccgtccaggcgccgcaggtccaggctccgcagcaccggcaccaccacccgctcgcccatgtcgaacgccccctgccgcgcaccgctgtcatagagcaagacatgctctcgggtacgcaccagcacggccagcccctggccgacgtccagcacccgcacttccgcccgcccccattcgacaggcggcgatga

SEQ ID NO: 364346 - DNA, 348 bp, Pseudomonas aeruginosa
atgactgaaccgatttcgccgtcggccgtcgtagttgggggccttggtggtgggctggtgggcgtgctggccagcgtcaatgctgacgccgctgttggctctctctgcggcgcactgatctatttcatcgtggcgaaggaactgcctctgccaacccggctagtgtgcttcctgatctcgttcgtgatgggctacttgttcgcgcccgccctggccaaggcccagattatgggtatcggcccaatcgagtttcctggccctgccgccttcatctccgctgccctggtggtaaccgccactatggcagcgatccgcagtcgcgggcgggccgctccccgggagggctga

SEQ ID NO: 364347 - DNA, 318 bp, Pseudomonas aeruginosa
atgctaacgctgacctcgatcatgaacatagtgaccatgctgctctgcgcccttactttcggcaggctgtttaccttccagcgcgaggggcgcaggttccgccgactgatgtcggctgcggctgctcttgtcatggccttctgcggtgccatggtgatttacatcctggacggcaaagtgcggatggagccgcgcctctggccgctggtgggtctgctggcagtatttgctgtcggcgtctggcgatgccggggtaacctggctgcgctgctggactatccccaggggtgggaaggcgccgaacggagaaagcgttga

SEQ ID NO: 364348 - DNA, 276 bp, Pseudomonas aeruginosa
atgtatgagctttcctatatgcaattgcttttcaatggtggcttgctggggttttctctgattactggatgtattggcttcttctatctgaaagcattgtttgtgataaaatatttttccttctacagggcagaggccatatccactctcattggcgtattggttttttgcgcgggaagtgccactaatccttatttttccggatttgactctctgtttcttttaggtttcatcccgctcatcgctagcgtggggaaggtctatgcgcactcgtga

SEQ ID NO: 364349 - DNA, 723 bp, Pseudomonas aeruginosa
gtgacgccgatcgccatcgtcaccaccggcgagaccaccaagatgggcgtggtctcgccccacttgctgcccgacctggcgctgctcgacgccgacctgaccctcggcttgccgccggcggtcaccgcggcgaccggtatcgacgcgatggtgcatgcgatcgagagctataccagcaaactgaagaagaacccgctgtccgacctgctggcgcgggaggcgttgcgcctgctggcggccaacctggaacgcgcggtaggcgacggcggcgaccgcgaggcgcgccaggccatgctgctgggcgcctgcctggccgggcaggccttcgccaatgcgccggtggcggcggtgcatgccctggcctatccgctgggagggcatttccacattccccacggcctgagcaatgcgctggtgctaccggaggtgatccgtttcaacgctcccgctgccgctggactctatgccgagctggcgccgctgctgctgggcgaccgcttgcgtccgggcgatcgcgacgcgcttaccgtgcagctgatcgacgaactggcccagctcagtccgcgcaacggcctgccgagccgcttgcgcgacgccggggtggacgaggcgatgctgccgcgcctggccgccgacgcgatgctccagcagcgtctgctggttaacaacccgcgcgaggtcggcgaggcggatgccctggcgatctatcgcgcggcatactga

SEQ ID NO: 364350 - DNA, 681 bp, Pseudomonas aeruginosa
atgagccccttcattgaacttccgatctctcgccggcgggagccggcaaggagtctagtcatgcgtgaccagcagcccgctaacaatctcctttcgatagcgagcgccgaatggatacaagccttgcagaacttctgccaccacggacgagtgtatgacgggtccaccgccaatgcctggctattggatgcctgcctacttgttcccaacgctgccctcatccacggtgtcatcgagtacgttcttaacagccgtgaggacataccatacggagggctacgcccaagctgggtagctcagcggctcaagcaggagggattgattagtcaccggtgcggggcagtcttgcactggcaggagcacggctatcgcttttccacggtggtcaggatcgaccccgaacagatttggcccgataagcgctcgagacccgaagcattcgttaccggaccactagatagccaggagcttggggtaattgaaatcctggcgcatccgaacgccagacgtcgtagtccgtccccggtgcgcctggcagcactggttcgatcttcgctagccatacctgctgagcctcttcatcccattgcaagtccgccagctcttcatgcagtgctagccacctatcccgaattggcatatcccgaatggtttccagtggccaggagtagcgacgcatga

SEQ ID NO: 364351 - DNA, 708 bp, Pseudomonas aeruginosa
atgactcgctctgctctctcgaacatcgcctacgaggctctggtgcgtgcccgccgcaaattcagcaaccgagaggagcgctgcatccacgaaacctggaccgccgaacaggaactggtgctgctgcgcctgtatccggatatgccgaacgaggtcctggcagccaggttgaacaaaacgctccagcagatctgctccaaagcgtatcggctcgggctgaaaaaaagccccgagttctccaagaagatccggcaggactggggcagcgcaactcggttcaagaagggaaacaccccatggaactgcggcatgaaggggcttcccgcgcgaggacgctcatcggaaacgcagttcaagaaggggcaaaaaccccacacatggctcccagtcggcagcacgcgggtcagcgctgatggctacctgcaacgaaagatctcggataccggctatcccccccgggactggaagagcatccacatcctgctctgggaagaacacgtcggccccatcccaaccggccattgcgtctgcttcaaggacaacaacaagcagaacgtcgtcatcgacaacctggaactcatcacccgggccgaacgcatgcgccgcaactccatccatcgctatccacctgagctgaagagcgcaatccgcgtcatcagcaagctcaagcgcaccattcaggaggtcgagcatgaaaaacaagattga

SEQ ID NO: 364352 - DNA, 687 bp, Pseudomonas aeruginosa; identical to SEQ ID NO: 355270

SEQ ID NO: 364353 - DNA, 756 bp, Pseudomonas aeruginosa
atgaagcctatgattcaagcccacctggtcgagcgcgaccagttcggcttctggacccatccgaactatccggacctggccgacaactgctcttccagcgaggcgcaggaaacgctgcgccggcttggactggagttgcagaacgtcttcatggagtcggatgcgcctcgcctctacgactctgcccgttcggaccaacgatacagcgagtggatcccaacgcggcccgaaggcgccggttggttcgtgctgtcgatccacgataccgataacggcccggtgtgtcagtacgtgcgaccgctcggagagcacctgagtccaatcgatctcgatgcggcagcagaacagcatgagcgcctgctcagcgaggcttgtgccaaggccttgaatcagcgtgacgtcgccctggccagggtcgcctcgcttgagtccaagctggccgaactggagaagcaggaacccgttggtgtgatgcgcgcgtcaagcgagatgggggtagcgccttacgcggatatctggccttggctggagcctggccaaaagctctacaccaccccagtagcccaggctcagcactgcgtggtgctggacgctgagaagctgatcgcacaattcaaggactgtgcgtcgcatgccggagatcccgagcgagctgcagcattcaacgatgcaatcagcgaggtacacgccatgctcgccggcgccccttcccaagctaaacccagcagcgacgaagagcagggaggcaggccatga

SEQ ID NO: 364354 - DNA, 498 bp, Pseudomonas aeruginosa
atgaacctccagaaccgcaacaacctcatcctgagcctgatcgccgagacccagttcgacgcctacgtgcaaggctacatggccaaagcaggcgctgccgccggtgcttccgacaatctgctggtcgaggctgaaggtgctgcgatgctgcagggccttgtcgctccggttcgcgctcagcagcgtgcctgtggacagccactgcagaacgccctgctccaaatcgcccacgacctactgttgcagacgaagtcgcaactggccatcgcggccaatgccagctcgatccacgtgatccagcgggacatgaacagggctatctggaatatcgcgactgccatcgatcacctggccgagttcgcccaaccctcccaggacaccgtgaaggtcatcgagcggctgatgctcttcgtcggcagctcgcctagcccggaaggccagcaactggccgcagaggcaagtgcagtgcttggcatgagcgaggggggcctggcatga

SEQ ID NO: 364355 - DNA, 861 bp, Pseudomonas aeruginosa
atgaaagcgacttcggttgtatccaccaagggtggtgtagggaaatccaccaccgccgccaacctcggtgcattttgcgccgatgctggcctgaagaccctcctcatcgacctggaccccgtccagccctccctatcttcgtactacgagcttcctgaagtcgcccagggcggcatctacgacctgctcgccgccaacataactgacccagcgaggatcatctccaggacgattatccccaacctggacgtcgtgatttccaacgaccagaacaaccagctcaacaacctactgctccaggcgcccgatggccggctccggctggcaaacctcatgccgtccctgaaacagggctacgacctggtgctgatcgacacccaaggtgcgcgctccgctttactagaaatggtcgtgctcgcatcggatctggttgtttcccccctgcagcccaacatgctcactgcccgcgagttcaaccgcggcaccatgcaaatgctcgatggactgcgtccctacgagcgcctcggcatgcggatcccctcggttcagatcgtcatcaactgcctggaccagaccaatgactcccgggcgattcacgagaatgtgcgtgccatcttcgatgagcatcaggacatttctgtgctcgaaacgactgtcccggatgccgtcgtgtttcgcaacgcagcatcgcgcgggctaccagcgcaccgcctcgaaacgcggcaaccctccaatcgcacatcagcgcccgcgctggaaatcatccgtaacctggccatcgaggtctttcccgagtggactgaccgcttcctcgcgctgacgccggaggcggtagcagcactggtcaagggagggcgctga

SEQ ID NO: 364356 - DNA, 1626 bp, Pseudomonas aeruginosa
atgttgtcgtcctgccttgccaatgccgccccggatgcggggcaggcgctgcgtgacgtggaaagccgacgcctgaacctgcccgcgccggtggaactggacgccgagcgccccagccccgaggacggcgtatcacgggctgccgaagagggcggcccgacggtgctggtcaagcgcttccaactcagcggcaacaggcagttcgacgatcgacgcctgctggcgctcctgcacgacctgccgggccaggaactcaatctgagccaattgcacgccgccgccgcccgcatcggcgatttctatcaggaaaagggatatgtgctggcgcgcgccttcctcccggcacaggaaatccaggatggaacggtacgcatcgaagtgctcgagggacgctacggcaggatcgaactgcacaacacgtcccgaacgctggaccgcgttctactccgccccttgagcgcactcgaacgagataccgcggtccagggctcggagctggagcgtgcgcttctgctcctgagcgacattcccggcctccaggccaaaggcaccctgctgccgggccaggcgcagggaaccacggacttgcgcgtcgaggcccgccccggcccgctggtcggcggcaggctggaggcagacaactatggcggccgctacatgggggaatatcgcctgggaaccaccctcgacttcaacagcccgctgcgactgggcgaccaggcgagactgagcctgctgggcagcgaccggcaccaacgctactaccgtgcagcctatcaactgccccttggttcccgaggcacgcgcatcggactggcccacgccgagacgacctatcgactggtacgcgatttctcgcgcctggacgcccatggccgggccattaccgacagtctgttcgtcagccagcccctgctgcgtagccgcagcttaagcctgtccacccagttgcaatatgaaaacaagcgacttcgcgatgaccaggagcgtaccgggaggcatagccgcaaggagatccgcctgtggaccgccagcatcagcggaaacgcccaggaccgcttgttcggcggtggacagagcggcttctcgctggcctatgcccacggccagctcgccatcgactccggcgaagagcggctgctggaccgctacaccatcggtaccgccggcagcttcgacaagatcatgctcaacgccgtacgcctgcagcacctgggcgaccgcctgcagttgttcgcccaactcaacgcccagtggagcggcggcaacctcgacagcgcggaacagttcgacatgggcggcccctacggcgttcgggcgttccccctgggcagctacaagggctacggcgacgaaggctggcaagccagtgcggagctgcgctacagcctggctccgggctggcagctgagttcgttcgtcgaccagggcgcggtgaaattcctcaagcaccccaacaccacggaaggcaatcgcaaccgcatggccgccgtcggcagcggcgcaacctggtacggaacggatcaccaggtcagcctgaccgccgcctggcccctgagccaggaaaacaacatcgagcccgagcgcactccccggctgtggttgcaagcgacccgctacttctga

SEQ ID NO: 364357 - DNA, 1059 bp, Pseudomonas aeruginosa
atgaccggcaccaagcccacaacgcccgtagcccgctatttccaccaagaggcgcaacggcgcggctatgtgctggacacagcccagggcaatgccattcttcatctcgatcgattggcggagcgcttgcgtcgaggtccgtcgctattccggcaagcgccgcgcagcctctacctgtgggggccggtcgggcgcggcaagagctggctgatggatggcttctttcgtagcgccgatttgcagggcctgcgccggacgcatttccatgcgttctttcgccggcttcatgacggtatgttccgccgccaggggcggcccgatgccctgggcggtgcgctcgatgaactgctaggagattgccggctgctttgcttcgacgaattccatgtccacgacattggcgacgcgatgctgataacacgcctgttcagggagctgttcggcaggaagatcaccctggtctgcacctccaactacgcgccgcggcaactgctgcccaatccgctctaccacgaacgcttcctgccggcgatccggttgatcgagacgcgcatggaagtgctggaagtagccggcgcccgggactaccggacgatttcgccgcggcaggagatcgcttccggttatgccagcggcgggtattgctggccagcctcatgcgcttgcctggacgagctgggcttgtccgcgcccgaaccctcgcaacgcgtgaccctgcaaagcggcgcgaggacgttgcaggcgcgcgcggtgtgcggcgacctggtgtggttcgccttcgccgacctttgcgaggcgccaaccgcggtgatggactaccttgccctcggcgaacgcttctctacctgggtgctggagggcgtaccgccgatggcgcgctgttcggtcgccgcccagcagcgcttcatcaatctcgtcgacgtcctttacgacaatgaccggcgttttttcctgagtgccgaaaaggcgctgccggacctggtcgagggcagcgacctgcctgcggacatgcagcgtaccgccagtcggctggcgcagttgcgccagcttcgctgttga

SEQ ID NO: 364358 - DNA, 630 bp, Pseudomonas aeruginosa
atgaacgaagcggattatctgcgcctgctcacccgtcaggccgaacaagccaacgacttcctctccaacgcacgtaaatgggaccgcgagcgctgggtctgccagcgcttcctcgaggccctcaacgtgccctatcgccaggaggatttcgccgcccccggggaacagccgccggacgtcctgttcaagggtgccggcttcgaggtgttcttcgtcctcgatgaaggtcgccggctgaacgaggagtggcgcgaggaactgacccgtcgccgccaggccgtcagcctgcgccaactgatccgccgcgaagagcggccacaacggatcgccgccgccgagctgcaggcacggctggcgccaaccctgcgcaagaaggcgcacaactatagcgagcgcggcatcgaccacggcgaactggacctgctggccttcgtcaacctgaagcgcgcggtgcccgatttcaatacgcccttcccgccgcccaccgaatacctgcgccaaggctggcgctcgctgtcgatggtcggtccgacctttgcccgggtgctcttcgctcactccggcgcccccgaattcctgcgcgccaacctcggccgcagcatcctgttcgacgccggggtaggcctgtga

SEQ ID NO: 364359 - DNA, 426 bp, Pseudomonas aeruginosa
atgcaacttcgcagcgtcatcgccgccgatcacccggcactcttcgcgctatggtcgcgaacgccaggtatccgcctccgtgcggaggacgcctatcccttcttcctcgcctaccttcaacgcaaccccgggctgagcctgctggtcgaaaccgaaggggaggtgatcgcctgcctgatggccgggcatgacggtcgccgtggttacctccagcacctggtggtcgatcccggttatcgagggctggggctggcgcggcggatgctcgacgaggtgttggcacgcctggcgagggaggggatcggcaaatcccatgtcttcgtcctggatgccgccgaggaggcacaggcattctggcgagcccagtcggactgggagcggcgcaaggacatccaggtattttccactcgggagggacacgcgtga

SEQ ID NO: 364360 - DNA, 471 bp, Pseudomonas aeruginosa
gtgaaacgactgcattgggttctgctggccatgctgctgcccggcctggcgctggccgtggagaagggctccaccctggagccctggacgttgcaggaccagttcgaaaaggcgcactcgctggacgactccacccgggtcctgctggtggcgcgggacatggacggctcgaagctggtcaaggcggcgctggcggaacgcccaaagggctacctggaggcacgccacgcgctgttcctggcggacatcagccgcatgccggcgctgatttcccggcttttcgcggtgccggccatgcgtgactacagttatccggtgctgctcgatcgcgacgcggccatcgcttctcgctatgcctcggacgagggcaaggtcctctgggtcaggctggagcagcgccgcgtgttggaaacccgccagttggattcgccggtggccctgcgcatcgccctggaacaactgcagccgtga

SEQ ID NO: 364361 - DNA, 690 bp, Pseudomonas aeruginosa
gtgatcgctgccgaattgctgtcggcggaaagcctggaactgggctgggccatctatgcgccggtgctgctgctcgccgcctggcgcgcgccctgggtcgagctggtcagcgatacccgccgccagcacctggtgttcggtaccatgctcgggctgttcctgctctggctggtgcgccgggacttcgagtcgggactgtccttccatttcatcggtatgaccgccgtcaccttgctgctcgactggccgctggcgatcgtggtggggctggtggcgcaattgggcttgtgcctgctcggccgccaggattggctggcgatcggcgtcaacggcgtgctgctggtggcgatccccgcgctgatcgcggagctggcggcgttgttcgtggaaaagcgccagccgcgcaacctgttcgtctacatcttctgctgcggtttcttcccggcggccctcaccgcggtggtggtcctgctgctcggccttggcgtggtctggatcgacggccttttcccgatgccgccctggctggaggacttcgctggttacctgtggctgatcatgttccccgaggccttcatcaacggcacggtgatcaccggcctggtggtctactacccggagtggctggaaaccttcaatcgcacgcgctacctgcaggcgccctggaaggacgaagagcgcaagccctga

SEQ ID NO: 364362 - DNA, 612 bp, Pseudomonas aeruginosa
atgacccaaccctggatactaggccttacgggcggtatcggcagcggcaagagcgcagccgccgagcatttcatttccctcggcgtccacctggtggacgccgaccatgccgcccgctgggtggtggagccggggcgtccggccctggcgaagatcgtcgaacgcttcggcgacggcattctcctgcccgatggccagctcgaccgagccgccttgcgcgagcggatcttccaggcgccggaggaacggcgctggctggagcaattgctgcacccgctgatcggcgcggagatcgtccagtacctggccagggccgaatcaccctacgctatcctggtctcgccgctactggtggagtccggccagcgccagatgacccagcgcgtgctggtggtggataccccggaacatctgcaactacagcgcaccatgcttcgcgacaaggtctccgaggagcaggtgcgctcgatcctccaggcccaggcccggcgcgacgagcgcttgaagcacgccgacgacgtgctggtcaacgacggcgacctgtcccacctgcagcgtgaagtcgaacgactgcacgccttctacctgaccttgcgaggaggccgagcatga

SEQ ID NO: 364363 - DNA, 1221 bp, Pseudomonas aeruginosa
atggcggacaaagcgttaaaaaccagcgttttcatctgggagggcaccgacaagaaaggcgccaaggtcaagggcgaactgaccgggcagaatcccatgctggtgaaagcccatctgcgcaagcaaggcatcaatccgctcaaggtacgcaagaaaggtatctccctgctgggcgcaggcaagaaagtgaaacccatggacatcgccctgttcacccggcagatggcgaccatgatgggcgctggcgttcccctcctgcaatcgttcgacatcatcggcgagggcttcgacaaccccaacatgcgcaagcttgtggatgaaatcaaacaggaagtttcctcaggtaacagcctagccaactccttgagaaaaaagccccagtattttgacgagctttattgcaacctggtagatgcaggggaacagtctggcgccttggaaaaccttctcgatcgggtggcaacctataaagaaaagacggaatcactgaaagccaagatcaaaaaggcgatgacctatcccattgccgtcatcattgtcgcactgattgtatctgcgatcctcctgattaaagtggttccacaatttcagtcggtctttgaaggtttcggcgcggaacttcccgcctttacccagatgattgtcaatctatcggagttcatgcaggagtggtggttcttcatcatactggcgatagcgatatttggctttgcattcaaagaattgcataaacgctcacaaaaattccgtgacacactcgacagaacgatcctcaaacttcccattttcggaggcatcgtctacaaatctgcggtcgcccgttatgcacggaccttgtccacgaccttcgccgcgggtgttcccctggtcgatgcgctcgactccgtctccggagcgaccggcaatatcgtgttcaagaacgcggtcagcaagatcaagcaagacgtttccaccggcatgcagctcaacttctccatgcgcaccaccagcgtctttcccaacatggcgatccagatgaccgccatcggcgaggagtccggttcgctcgatgagatgctgagcaaagtcgccagctactacgaagaggaagtcgacaacgccgtggacaacctcaccacgctcatggaaccgatgatcatggccgttctcggcgtactggttggcggtctgatcgtggccatgtaccttccgatcttccaactcggcaacgtcgtcggataa

SEQ ID NO: 364364 - DNA, 849 bp, Pseudomonas aeruginosa
atgcctaacctcacccttgccgacctccaaggcgaaatccaggccaacgtccgtaccgccctggcggaagacgtcggcggcggcgaccttaccgctcagttgatcgatccacagcgcgaggccgaggcccgggtgattacccgcgagcacgcgacgatcgcgggccgcgcctgggtcgacgaggtcttccgccaggtcgatccgcgagtgctggtgacctggcaggtggaggacggccagcgagtcgagccgaaccagatgctgttccagctaaaaggtccggcccgcgcgctgctcaccggcgagcgcagcgcgctgaacttcctccagctgctttccggtaccgccacccgcagccagcactacgccgacctggtcgccggcaccacggtgaagctcctcgacacgcgcaagaccctgcccggcctgcgcctcgcgcagaagtacgcggtcacctgcggcggttgccacaaccatcgcatcggcctctacgatgccttcctgatcaaggaaaaccacatcgccgcctgcggcggtatcgaccgggcaatcgccgaggcccggcgcatagcacccggcaagccggcggaagtggaagtggagaacctcgatgaactgcgccaggcgctggaggccggtgccgatatcgtcatgctcgacgaactcagcctggacgacatgcgcaccgccgtcgccctcactgccggccgtgccaagctggaagcttccggcggaatcaacgagagcaccctgcgcaacatcgccgagaccggcgtcgactacatctccatcggcaccctgaccaaggacgtcagggctgtcgacctgtccatgcgcctcaccctctga

SEQ ID NO: 364365 - DNA, 2256 bp, Pseudomonas aeruginosa
atgcagaacgatgctaatgtggtgcacctgaccagggtcgcttccgagccgtcgccgaacgccggagcggggcgcctgccggtcatcctcgtgcaggtgcgcgacaaggcggcgctgcagctgaaacaggcgttgcaggcgttgttcgacaacgccgacgacaccctcttcgaaatggccgaccgagccaccagcaacctcgaacagaacgctttcttcgaagccatgcgcgacctgcgcctcaagcgcaagagtatcgagcgggtctacctgcagaaggtcttcgaggagttctcggcgctcaaccaggtacagtccggcaaatccgtgccgaccctggataccgtgtccttcgatagcctcagcctggtacagaacgaggaactggaggagtccgtcgcggtggacgcgatggtggcgcgggtgatgagccgcgatgcctccgcgctggcccacctgagcacccgcctgaacaccctggtcggccggaaggtcgacgagaagagcaatcccctcgctccgcgtccgctgaccgcggctttcctcgatgcctgccaggggctcggcgtcgagatcaaggtcaagctgatcattctcaagctgttcgagaagtacgtcctggcccattgcgaccagttgtacgccgaggccaaccagatcctggtcgctgcgggcgtgctgccggaactcaaatccgcactgccgcggcgtcagcccgctgtccgtcccgaagcggtacgcgatgccgggaccctgcaggcacaggctgcgctactcgacggcggccagcaggaagtcttcggcgcgctacaggaactgctggcgcaggtccgcgacaatccttccttctaccgtcgcgaaacgcctgagaatgccgcgccgatttccagcaacgacctgatgcgcctgctttcccacctgcaacagcacttgccgggccctggcgccgcggagttcgacgtccgcgacggggtcgaccaactgctccagcgggtcagccacaagagcggccgttctcgggtggtcggccaggtggacgatgacgtcatcaacctggtgtcgatgctgttcgaattcattctcgatgaccgcaccctgcctgactcgctgaaggccctgatcggtcggatgcagatcccgatgctcaaggtggccctgctcgacaagaccttcttcagccgcggtagccatccggcgcgtcgcctgctcaacgagatcgcatccgcgtcgctgggctgggccgaacacaatgatgcccggcgcgacagcctgtaccagaagatcgaacaggtcgtgatgcggctgttgaacgactttgtcgacgacccggcgatcttcgccgagttgctggaggacttcattgccttcaccggcgacgagcgccgccgcagcgagctcctcgagcagcgcacccgcgacgccgaggaaggccgcgccaaggccgaactggctcgtcaggacgtggagcaggtgctgaaccagcgactgctcggcaaggtcctgccggaggtggtggtgcgcctgctgcgggatgcctggagcaaggtgatgctgctgatctgcctcaagcatggcaaggcttcggccgagtggcgggaggccctggataccatggacgagctgatctggagcgtcggcccgcatgacgatccgctgtcccgccaacagttgctggagcgtgtgccaggcctgctcaaggcgctgcgcgagggattggccagcgcagccttcgatccgttttccaccggagaattcttcagccagctggaaaccctgcatgtccaggggctgcagcgcgacaagcgcggcgaggcggcggtcgcggactgcccgctgctcgacgaagcgagcctgggcacggccgcggaaaagccccgggcgccggtcatgctgcgggtggtcgaggaaatcgtcctgacttcgccggacgccgccccggcgcctgtcgagagcgaagtgcgcctgccggacaacgacgaggcactgctgcgggtcgatgcgctgcgtgtcggcagttgggtggagatccaggaggacgccgagcacaagctgcgctgcaagctggcggcagtgatccggcccaccggtcgctacatcttcgtcaatcgcaccgggatgaaggtcctggaaaagacccgcatgggcctggcggtggagtttcgccggcaggcggtacgcctgctggacgatgccttgctgttcgaccgggccctggagtcggtgatcggcaacctgcggcgcctcaagggcgcctag

SEQ ID NO: 364366 - DNA, 837 bp, Pseudomonas aeruginosa
atgacgttcctggtgttgctgctggcccttgcgctggagaagttctccggctggcgccggcgtatccagcgcgatggcgcctggctcgcctggctgagcctggtcgaggacctgccctcggtgtcccgccgctcctggctggggctgctgctcgcggtagtcctgccgttgctgccgctggccctgttgctgacattgctgcagccgctggcctatggctggctgagtcttccgctgcatcttctggtggtggtctacagtctcggccgcggcgacgtcatggccgacctcgggccgttccgcgacgcctggaggcgcgaggaggcccaggctgccttccatgtcgccgaacgcgatctggggatcctgggcggcagcgagagcgaactgatcggccgggtgcacggccatctgctctggcagggctaccagagcttcttcgcggtgatcttctggtatgccttgctcggcccggtggcggccctggcctatcgcctgctggcactggcgctggagcacgcccgccagccggcgttgcgcgaacaggcggcgcgcgtccggcatatcctcgactggttgccggtgcgtgcgctggtgctgagcttcgccctggtcggcaacttcctcgcggttatccgcgtgctgctgcactggctgctggcctgggacatctcggcggccgcgctgctgggcaaggccggacgggtcgccagcgatgtcgaagcggtcgaactgggtgccgccggcgtcgccagcctggatgcgctctggcaattgctggtgcgcgcggccgtgctctggtacgccgtgttcgccttctgcgcgctgttcctctga

SEQ ID NO: 364367 - DNA, 2022 bp, Pseudomonas aeruginosa; identical to SEQ ID NO: 327402

SEQ ID NO: 364368 - DNA, 1164 bp, Pseudomonas aeruginosa; identical to SEQ ID NO: 320814

SEQ ID NO: 364369 - DNA, 426 bp, Pseudomonas aeruginosa; identical to SEQ ID NO: 320815

SEQ ID NO: 364370 - DNA, 1803 bp, Pseudomonas aeruginosa
gtgtcccccactccaccaagcgttacgcgcaatcgcatcgactgggccggcctgggctggctgttcctgttcttctggttcttctccggcatcacccaactgctcctgctgacctccggcaacagcggtttctccggtttccgcaacgccatggtgctgagcaccatctggcttgcgccggtgttgctgttcccgcgctggaccaagccgctggccgccgtcatcgggctggtgctgtgggccgcctcgctggtcggcctgagctatttcggcatctatcaccaggaattctcgcaaagcgtgatcttcgtgatgttcgagtcgaacaccgccgaggccagcgaatatttcagccagtacttcaacccctggatgaccctcggcctggtgctctacagcctggtcgccatcctcctctggcgccgcctgcgcccagtctacctgccgcgcttcagcgccctgccggtggcggtgctgctgatcgtcgcgaccatcggttatccgttctacaagcaactggtcagccagggccggcccttcgacgaagccctggacaaggtccaggcgcgcatggaaccggcggtgccctggcaattgctgatcggctaccagcaataccgccagcaactgggcagcatgcaggcgctgttgcaaaagaacgcggccctaccgccgctgaagaacctcgtcgatgccaatggcgatacgccgcgcacgctggtcctggtgatcggcgaatccacgtcgcgcaagcacatgagcctctacggctatccacgcgaaacgaccccgcagttggacgcactgaaggccgcgaaccggaacctcacggtattcaacaacgtggtggcgtcgcggccatacaccatcgaggtgctgcagcaggtgctgacgttcgctgaccaggagcatcccgaccgcttcctcaccgatccgtcgctgatgaacctgatgaagcaggccggctacaagaccttctggatcaccaaccagcagaccatgaccaagcgcaacaccatgctgacgaccttcgcccagcagaccgatgcgcagttctacctgaacaaccagcgcagccagaacgccagccagctggacggcgcggtgctggcgcccttcgccaaggtgctggacgacccggcgccgaagaaattcatcgtggtccatctgctcggcacccacatgaactacaagtaccgctatcccgccgattacgctcgcttcgtcgaccgccagggcgccccggcggccctcagcgacgaccaggtggaggtctacaacagctacgacaacgccgtactgtacaacgactacgtggtctccagcctgatcaagggcttcgccaacagcgatccgaacggcttcctggtctacctctcggaccatggcgaggaagtcttcgacgaagccccgcacgaccgtctcggccgcaacgaaggcgacccgacccgcggcatgtacaccgtgcccttcctggtctggacttcgcccagctggcagcagacccatccgcgcgacctgcaggccctggtcgaccgacgctacagcagcgaagacctgatccatacctggtccgacctcgccggcctcaactatgacctcttcgatccgaccaagagcctggtgagcaacgacttccagcatgaagtccgctggatcggcaacccctatgcccacaatggcttgcgcgacttcgacaagctgccgctggacaaggccgacgccgggcagcaggtagcccaggccggacgacccgcgccaacgacgccgcgcgcaccgtcccgccagccgaacgaaggctga

SEQ ID NO: 364371 - DNA, 816 bp, Pseudomonas aeruginosa
atgcgccacctgctgcttcgtcacgacgcgctggacgccgaaggtttcgccgcacaactggccggtgccccgggcgaggttgcccaggccatccttggcgctgcgcgcgagggcctgacggaagcccaggccctgctcggacagatccttctggacggccaaggcatccagcgcgacccgagcctggcgcggacctggttcacgatcgccgccgaacgcggccacgcaatggcgcgcaatatgctcgctcgctgtcttgaacatggctggggcggcccggcggatccagccgcggcagccgtccactatcggatcgccgcccaggccggccttgactgggcccgctacaacctggccaatctccacgccaccggccgcggcgtgtcccaggaccagccgcgcgcctatgcgctgtatcggcaagcggccgagcagggccacgcgaaatcgatgaacctggtggggcgctaccacgaagaaggcctggtggtcgctcgcgacctggcgcaagctgcgcactggtatcgacgttccgccgagggcggcgattttcgcggccagttcagccacgccgcgatgctcagcgcctcgggccgccatgccgaagccgaaacctggctccggcgtgccctcgaaggcggcaacctgaacttcctgcgcagtgcccgccatggcctggagcagtcggcccacccgccgttccgcagcctggcgctggcctactaccgacgcgcggcgcagttgggcgacgacaccgatcgagaggctctggaacaggcgctcgaacgtcacgggtacgcacgactgcccgtctga

SEQ ID NO: 364372 - DNA, 729 bp, Pseudomonas aeruginosa; identical to SEQ ID NO: 327401

SEQ ID NO: 364373 - DNA, 2262 bp, Pseudomonas aeruginosa
atgtcgcgtcagtccacggataccgccgtttcttcgcaacgtctgctggcttcggccatcggtgtggccatcaccgccatcgccgtaccgcaggcagcccacgccgacgaggccgggcagaaaaagaccgacaaggaccgcgtactgtcgctggatgcggccaccatcgtcggcgagcagcaggacgaaaccacctacaacgtcgaccgctcggcgtcgaagaagtacaccgcgccgctcttggatacgccgaagaccgtcaccgtgatcccgcagcaggtgatcaaggacactggcgccctgaccctggccgacgcactgcgcaccaccccgggtatcaccttcggcgcgggcgagggcggcaaccccgcaggcgaccggccattcatccgtggcttcaacgccgagagcgatacgttcctcgacggtatgcgcgacgtcgcctcgcaaacccgcgaggtgttcaacgtcgagcagatcgaggtcagcaagggcccgggctcggcctacaccggcgccggctccaccggtggcagcctgaacctgatcagcaagaccgccaagcaggacaacttcaccgacgccggcttcacctggggctcagaccagactcgccgcactactctcgacgtgaaccggatgattggcgacaacgccgccttccgcctcaacctgatgaagcacgatgcccacgtcgcagggcgcgacgaagtcagcgtcagccgctggggcgtggctccgaccattaccttcggcttcgacacgccgacccgcgccaccctgtcctattaccatctcagcaccgatgacatgccggactacggcctgccgctgaccaacgtcaaccgcagcaaagctaatccgagcaagccggcctcggtggatcgcgataacttctatggcctgaaggaccgcgactaccgcaagagcaccaccgacagcggcaccttccgcatcgagcatgacctgaacgacaacctgaccctgtcgaatagcacccgcctggtgcgcacgacgctcgactacatcgtcagcaaccccgacgacagccgtggcaacgttgccaacggctacgtctaccgttcggcgaaaagccgcaattcgacctcgaagggctgggtcaaccagaccgacctgaaggccaacttcgaaaccggcttcatcaagcacaccctggtgaccggcctggagttcagctacgaggacgtgcacaaccgtccgtacgccattacttccggtggcggcgccggcaacacctgcaatgcacgattgctcgccagtggcgactgcaccagcctgaatcgcccgactccgggcgacaactggaccggcagcatcaccgacggcctggcctataccgataccgacaccaagaccagcgcggcttatgtgttcgataccctgaagctaagcgaacaatgggagctgaatctcggtctgcgctacgacgacttcgataccaagtccagcggctaccagacggctggccgcaacggtcccgccggctacttcaagcgcgagaacaacagccacttctggaactaccagaccgggctggtctacaaaccggcgcccaacggcagcatctacctggcctggtcgacctcgagcaaccccaccggcgagaccggcggcgagggccaggcggatatcagcgtaggcaacaacgggttggatccggagcgtaaccgtaacctcgaactgggtaccaagtgggccttcttcgacgatgctctgtcgctgaacgccgcgcttttccgcaccgacaagaccaatgcccgggtcgcttcgccggatgtctccactcttcaggtactggacggcgagcagcgggtgcagggcgtcgagctgggcttcaatggcaagctgaccgagaagtggaaggtcttcggcggctacacctacctcgacagcgaaatccgcaagtcgacggtgaagagcgacgaaggcaacaagatgccgcagaccgcgcagaacaacttcactctgtggaccacctacgatctgttgcagaacttcactatcggcggtggtaccacctatgtggacaagcagtacggcaacactgcgaactctacctatatcccgtcctactggcgctatgacgccatggccagctacaaggtgagcaagaacgtcgacctgcaactgaacgtgcagaacctgaccgacaagcgctacttcgaccaggtctacagcacgcacatggcccacgtcgctccgggccgcacggcattgctcggggtgaacttccacttctga

SEQ ID NO: 364374 - DNA, 900 bp, Pseudomonas aeruginosa
atgaaagttctcatcctggcggcctatgcgctgagcatcctctatgtccatttccgcggccgggtacgccacaagctgtcgcgccaattgagcgaccactccagcttcctcgctccgatcaactgcctgatgtacctgttctcgaaggtaccgaaccgcccttacctggcaccgcagaccttccccgaactgcaggttctggtcgacaactggcaagccatccgcagcgaggcgctgcacctgcacgacgccggcaacatcaagcgttccgaacagtacgacgatatcggtttcaactcgttcttcaagagcggctggaagcgcttctacctgaaatggtacgacgaggcccatccctccgccggacaactctgcccgcagaccaccgccctgttgcggcagattccctcggtcaaggcggcgatgttcgccgaactgccgccgggctcgaagctggtgcgacaccgcgatccctacgccggctcgctgcgcttccacctgggactgttcacccccaacgacccggcctgcttcatcgaggtggacggcgagcgctaccactggcgcgacggcgaggcggtggtgttcgatgaaaccttcatccactacgcggaaaacgccaccgaacacaaccgcatcattctcttctgcgacatcgagcggccgctgacccagggctgggccaccgccttcaaccgctggttcagccgcaacgtgatggctgccgcggccgccccgaacaacgcaggcgaccggaccggcggactcaatcggatcttcgacagcctctacaagatccgcctgcagggcaaacgtttgaagaagcgcaaccgcaagctctactacctgcagaaatggggcttcttcgccctggtactggctttcatcctgtggatctga

SEQ ID NO: 364375 - DNA, 756 bp, Pseudomonas aeruginosa
atgaacgacaccggccggcgtatcctgctcaactgcgacatgggcgaaagctttggcgcctggcgcatgggcgacgatgtccacagcatgccgctggttgaccaggccaacctggcttgcggcttccacgctggcgacccgctcaccatgcggcgcgcggtggagctggcggtacgccatggcgtgagcatcggcgcgcacccggcctatcccgacctgagcggcttcggccggcgctcgctggcctgctctgccgaagaggtgcatgccatggtgctgtaccagatcggcgcgctggacgctttctgccgttccctcggtacccaggtggcctatgtcaagccgcatggcgcgctgtacaacgacctggtcggcgacgatgagctgctgcgcgccgtgctcgatgcctgcgccgcctatcgcaagggcctgccgctgatggtgctggccctggccgacaacggccgcgagctggaactggccgacgaggccgacgtgccgctgctgttcgaggccttcgccgatcgcgcctacctgccggacggtcggctggcgccgcggcggcttggcggcgcggtgcatcacgatccgcagcggatcatcgaacaggccctggccatcgcccgcggcgaagccttccccgactacgacggcaacccgctgcgcctgaccgccgacagtctttgcgtgcatggcgacaacccgcagtcgctggcggtcctccggcgcctgcgcgcggccctggacagcctgtga

SEQ ID NO: 364376 - DNA, 678 bp, Pseudomonas aeruginosa
gtgatccgcatcgaacccgctggtgccgaagccctgctgctgacgctcgccgaagagcccgaagtggacctgtctgtgcgcctggccgagctggccagacgtctgcgcgaggggctcggcgaaggcgtcagggatctggtgccgggctggaccaccctgatgctgcattacgacccctaccgcatcgccccgcaggtactggaagaacgcctgggtccgctgctggcggagtggcacgcctggcgccccgccgaggatgccgggcgcctgcacgagattcccgtctggtacgccggcgaggacctcgcgacggtagcggttgcctgcggattgactggcgaaggggtgatcgaactgcacagcgcggccgaataccgggtcggcgcgatcggtttcgctccgggattcgcctacctcggcggcctcgatccgcgcctggtcctgccgcggcgggccaccccgcgggcgcgcgtaccggccggcagcctggccattgccgaggcgcagacggcgatctatccgcaggcctcgcccggcggctggcacctgctgggacgcagtccgtggcgtcccttcgatccggccgccactcctccgtgcccactggcgctgggcgaccgggtgcgcttcgtcgccatcgggcgcgaggctttcctcgacctgggcgggcgcgaatga

SEQ ID NO: 364377 - DNA, 930 bp, Pseudomonas aeruginosa
atgaatggtttgcgggtcgtcaaggcgggtccgcagagcctgctgcaggacgacggccggcgcggctggcagcacctcggcgtatccccgggcggccctctggaccgccaggcggcagcctgggccaatcgtctgctcggtaatccctgggggacgccattgctggaaatcgctttcggcggcttggtgctggagtgcagggtggaggcgacctggctggcgttgaccggagcgcgcctggcgctgacggtggacggtcgcgaatgcctgccctggagtcgcttccgggtccgccgcgggcaacgcatcgaactgggcttcgccgaggccgggcagcgtgcctacctggcctgcgccggcggtttccgggcgaggccggtactgggcagcgtcgcctgccaggttcgcgacgggctcggcggtttacagggcgatggccggatcctggcggagggcgattgcctgccgtgtgccgaagcgggagcggcgtgtccgtgggatgccagcgtgccctggcgtttccagccggactaccggcagcagcggcccttgcgcgtgctgttcggcggcgatgcggcggccttcgacgcagccagccggcaagccttcttcgccagcgcctggcgaatcagcccgcggtccgatcgcatgggtgtccgcctggccggcaagccactgcgcggggcgccgcgcgcctggtcgcagggcgtggtggagggcgctatccaggttccgcccgatggccaacccatcgtgctgatggccgaccgccagagcatgggcggctatccgctgctgggcttcgtccatccactggacctctcgcgcctggcgcaaagccccgcgcatagcgaggtaaccttcgtcgagagcgacctggcgacgcagcaggccgatctgctgcgcttctaccgcttcttccgcggctga

SEQ ID NO: 364378 - DNA, 474 bp, Pseudomonas aeruginosa
atgaaactcgacgcctatgaccaccgcatcctcgccgccctccagcgcgacggccgcctgagcaacgtccagttggccgaggagatcggtctctccccgtccccctgcctgcgccgcgtgcgcctgctggaagaggccggggtgattcgcggctaccaggccagcatcgaccgcgacgaggtcggcctcggcctcacggtgttcgtcgggatcaaggtggaacgccaccgccaggagcaggccgaggccttccaccgtgcggtggtcgacctgccggaggtgatctcggtgcacctcgtctccggcgagtcggacttcctcctgcaagtggtggtccccgacctgcgcgcctacgaacgcctgctcagcgagaccctgctgcgcctgcccggggtcagcgacattcgcagcaacttcgcgatcaagacggtcaaggcgccctcgccgctgccgctcggccacctggccggctga

SEQ ID NO: 364379 - DNA, 633 bp, Pseudomonas aeruginosa
atggacacgagcgctttcctgattgccctggcggtggtttacctggtgcccggaccagacatgctcctgctgttccagaccggcgcccgccagggccgtcgcgcggcgctggtcaccgccctcggcctggcgctggctcgggcctgccatgtgctgatggccgcgactggactggcgctgctgttccgtaccgctccctggaccttcgacctggtgcgcttgctcggcgccgcctacctcgcctggcttggcctgcagatgctgcgcggtggcggactggccttgccgaccagcgacgcgggctccgcgccggtggtcccttacgccgaccgccgggccttgctgcgcggactcctgaccaacctgctgaaccccaaggccctgctgttctgttcggtgctgctgccgcagttcgtcagccccggggccggttcgctggccgtccagttcgccgcgctcggtacggtcttggttctggttggcctggccttcgactgcgcctatgcgctggccggtggccgcctgggccgctggctggcgtcccggccgcgggcacagcgcctgcagcagtggggcttcggtgggttgttgatagggttcggggtaaggctggcgctgctgcgccagctctga

SEQ ID NO: 364380 - DNA, 972 bp, Pseudomonas aeruginosa
atggaaaccgttctgaccgcccgtgatctgacccgtcactacgaagtctcccgcggcctgttcaagggccatgcccaggtgcgcgcgctgaacggcgtatcgttcgaactggaagccggcaagaccctcgccgtggtcggcgagtccggctgcggcaagtcgaccctggcgcgcgccctgaccctgatcgaggaacccacctccggctcgctgaaaatcgccgggcaggaggtcaagggcgccagcaaggaccagcgccggcagttgcgccgcgacgtgcagatggtcttccagaacccctacgcctcgctcaatccgcgacagaagatcggcgaccagttggccgagccgctgctgatcaacaccgcgctgtcgcgcgaggaacgccgcgaaaaggtccagcagatgatgcgccaggtcggcctgcggccggagcactaccagcgctacccgcacatgttctccggcggccagcgccagcgcatcgccctggcccgggcgatgatgctgcaacccaaggtgctggtggcggacgagccgacctcggccctcgacgtgtcgatccaggcccaggtactgaacctgttcatggacctgcagcagcagttccgcaccgcctacgtgttcatctcgcacaacctggcggtggtccgccacgtcgccgacgatgtcctggtgatgtacctcggccgaccggcggagatggggccggcggacaagctctacgagaacccgctgcatccctacacccgcgcgctgctctccgcgaccccggcgatccacccggacccgacgaagccgaagatccgcatccagggcgaactgccgaacccgctgcacccgccggagggttgcgccttccacaagcgctgcccctacgccaccgagcgctgccgcagcgaggtgcccgagctgcgcctgctcgaccagcgccaggtggcctgtcaccacgccgagcagttcctcggctga

SEQ ID NO: 364381 - DNA, 975 bp, Pseudomonas aeruginosa
atgagcctcctcgatatcaagaacctcagcgtacgcttcggcgacaccaccgccgtgcccgtggtcgacggcctcgacctgagcgtcgacaagggcgaggtgctggccatcgtcggcgagtccggctccggcaagtcggtgaccatgatggccctgatgggcctgatcgacgcccccggctgggtatccgccgatcacctgcgcttcgacggccacgacatgctcaccctcaagggccgccagcgccggcgcatcgtcggcaaggacatggcgatggtcttccaggacccgatgaccgccctcaaccccagctacaccgtcggctaccagatcgaggaagtcctccgcctgcatctcggcctgcgcggcaaggccctgcgccagcgcgccctggaactgctcgaacgggtcgagatcccggccgccgccagccgtctcgacgcctacccgcaccagctctccggcggcatgagccagcgcgtggcgatcgccatggctatcgccgccgagcccaagctgctgatcgccgacgagccgaccaccgccctcgacgtgaccatccaggcgcagatcatggagctgctgctgaacctgcagcgcgaccaggacatggcgctgatcctgatcacccacgatctcgccgtggtcgccgagaccgcccagcgcgtctgcgtgatgtacgccggcgaagcggtggagatcggcggcgtgccggcgctgttcgaccgcccgacccatccctacaccgaggcgctgatcaaggcgatccccgagcactgtgccggcgaagcccgcctggccaccctgcccggcatcgttccggggcgctacgaccgcccgcgcggttgcctgctgtcgccacgctgcccctatgcccaggagcattgccgccaggagcggccggccctggaagcgcacgagcgcggcgcggtgcgctgcttctatccgttgaacctgctgaacgaggtggcctga

SEQ ID NO: 364382 - DNA, 912 bp, Pseudomonas aeruginosa
atgaacgccatgcacaacgctcccgccagcgacccgagcctggtctacccgtccccgctgaaggaattctggcaggccttcgcgcacaacaagggcgccctcggcggcctgctgttcatgctgctgatcgtgttctgcgcgctgttcgccccctgggtcgccccctacgatccgagcgagcagttccgggacttcctgctgaccccgccatcctggctggaaggcggccaggcgcgcttcctgctcggcaccgacgagctgggccgcgacctgctctcgcggctgatccacggcgcccgcctgtcgctgctgatcggcctgtcctcggtggtgatctcgctgatccccggcatcctcctcggcctgctcgccggcttctcgccgaaccgtgccgggccgctgatcatgcgcctgatggacatcatgctggcgctgccgtcgctgctgctggcggtggccatcgtggcgatcctcggcccgggcctgatcaacaccgtgatcgccatcgccatcgtctcgctgccggcctacgtacgcctgacccgcgccgcggtgatgaccgagctaaaccgcgactacgtcaccgcctcgcgcctggccggcgccggcaccctgcgactgatgttcgtctgcgtgctgccgaactgcatggcgccgctgatcgtccaggccaccctgagcttctcttcggcgatcctcgacgccgccgccctcggcttcctcggcctcggcgtgcaaccgccgacccccgagtggggcaccatgctcgcctccgcccgcgactacatcgagcgcgcctggtgggtggtcagcctgcccggcttgaccatcctgctcagcgtactggcgatcaacctgatgggcgacggcctgcgcgacgccctcgatccgaaactgaagaacgcggcatga

SEQ ID NO: 364383 - DNA, 1596 bp, Pseudomonas aeruginosa
atgctccatccgttgctccgacacctgcccctggccctggcgctatgcgccgccggcgcggcccaggcgaagaacctggtggtctgcaccgaggccagcccggaaggcttcgacatcgtccagtacaccggcgcggtgaccgccgacgcctccgcggaaaccgtgttcgaccgcctgctcgccttccgccccggcaccaccgaggtgatcccggggctggccgagcgctgggacgtcagcgccgacggactgagctataccttccacctgcgccccggcgtgaaattccataccaccgactacttcaagccgacccggagcctgaatgccgatgatgtgctgtggaccttccagcgcgccctcgatccgaagcacccctggcatgcctcggcgctgcgcggctacgcctacttcgacgcgatgggcatgggcgagctgatcaagtcggtggaaaaggtcgacgagctcaccgtgcgcttcgtcctcaaccgtcccgaagcgccgttcctgcgcgatatggcgatgcccttcgcgtccatctattccgccgagtacggcgaccagttgctcgccgccggcaagcagggccagctgaacaaccagccgatcggcaccgggcccttcgtcttcaagcgctacgccaaggatgcccaggtccgctacacggcgaacccggactactacgccggcaagccgccgatcgacaacctggtgttcgccattaccctcgatcccaacgtgcgcatgcagaaggtccgtgccggcgagtgccaggtctcgctgtacccgaaaccggaggacgtgccgcgcctgaagcaggacccgaacctggcggtggacgagatcgatgccctgctgaccacctacattgccatcaacacccagcacaagccgctcgacgacccgcgcgtgcgccaggcgatcaacctcgcgctggacaagaaggccatgctcgacgcggtgttcggccccggcgcggccagtccggcggtcggtccctatcccccgaccctgctcggctacaaccattcgatccaggactggccgcacgatcccgaacgcgccagggcgctgctcaaggaagccggcgcggaaaatctcaggatcaccctgttcattcgcaacggcacctcgcctaccatccccaaccccgccctggcggcacagatgctgcaggcagacctggccaaggccggcatccagctgaccatccgttccctggaatggggcgagctgctcaagcgttcgaaggccggcgagcacgacctgtcgctgcttggctgggccggcgacaacggcgacccggacaacttcctcagcccgaacctgagctgcgccgccgccgagtcgggtgaaaaccaggcgcgctggtgcgacaaggacttcgaggcgctgatgcgcaaggcccgcgaggtgagcgatccggccgagcgggcgaaactgtacgagcaggcccaggtggtattccacgaacaggccccatggataccgctggcctacccgaagctgttcaacgtccggcggaacacggtgcagggctacgtgatcaatccgttgagcaacaacaacttcgccaccacctcggtgaagccgtag

SEQ ID NO: 364384 - DNA, 1452 bp, Pseudomonas aeruginosa
atgagataccaacgagtgaccggcgcgacgctgggattggccttgatggcatcggccgcgccaggctgggcagcggacgagcaggcaaccccgccgaccccagacaatcccagctacgccgcccaggtgcagagcatccccagcgtggagaaaccgatcaagggccaggccggcgccagcgggctgttcgaggggcagagcctgaccctgaccacccgcaacttctactcgcgggaaaacatgaaggacagcttcaccttccgcattcccaaggccggcggcggctcccagcgcatccaccagcgcaacgcctgggtccagggcacggtgctcaagtacagctcgggctacacccagggcagcatcggcttcggcttcgacgtcgcagccttcaacgagatcgccctggagcgcggcaagggccgcatcggcggcggtggcaaccggaccctggcgaacagcgatggcgaggcgatcggcgagtggtccaagctgggcgtcgccaacatccgcctgcgcgcctcgaataccgaattcaaggccggtcgcttcctggtcaacactccggtgttcagctacatcgacaaccgtgccctgccctccagcttcaccggcttcgccgtgaccagcgaggagctggacaacctcagcctgcaagccggcagcttccgcaaggtcagcccgcggaccggttccggcgacgaggacatgaccaccgagtacggcacccgccaggtcaagggcgaccgcctgaactacctgggcggcaactacaagccgctcgacgggctggagatctccctctatggctcgcatttccaggacgtctggaaccagtactacctgggcgtgacccacgacatcggcgacctcgagagcggcatcgccctgcgcaccgccttcaacggctaccacaccggcgacaccggcgcgcgcgaggccggttacatcgacaacgacacctggagcctggccttcaccctcggccatcgtgcccacgccctgaccctggcctaccagcaggtcgacggcaacgaatacttcgactacgtgcacgagacctcggcgatcttcctggccaactcgatgctggccgactacaacagccccaacgagaagtccgcgcagatccgctacgagaccgactggagctactacggggtccccggcctgagcaccggcgtgtggtacgtgaagggctgggacatcgacggcacccactacgacggcgatcgcaacggtgcctacggcaactacgccgaggtgcgcgcccaggacggcgagaagcaccacgagctgggcctgatggcggcctacaaggtgcagaacgggccgatcaaggacagcaccttcaagctcacctacatgatgcacaaggccagccagaaccaggtcgacggcagcgtcaacgaactgcgcctggtcagcaccttccccttcaacctgctgtaa

SEQ ID NO: 364385 - DNA, 1218 bp, Pseudomonas aeruginosa; identical to SEQ ID NO: 320835

SEQ ID NO: 364386 - DNA, 1614 bp, Pseudomonas aeruginosa
atgcgtagaaacgccgtcatccgctccgcgatcatgccctcgctgctcggcgcagcgctggtcgccgccgttccccaggccttcgccagcaacctgatcttctgctcggaaggcagcccggccggcttcgatcccgcccagtacaccaccggtaccgatttcgacgccgcggcggaaaccgtcttcaaccgcctgacccagttcgagcgcggcggcaccaaggtccttcccggcctcgcggaaagctgggacgtcagcgacgacggcaagacctataccttccacctgcgcaagggcgtgaagttccacagtaccgactacttcaagccgacccgcgaattcaatgccgacgacgtgctgttcaccttcgaacgcatgctcgacaaggatcatccgttccgcaaggcctaccccaccgagtttccctacttcaccgacatgggcctggacaagaacatcgccagggtcgagaagctcgacgagcatacggtgaagttcaccctcaacgaggtcgacgcggccttcatccagaacctggcgatgcccttcccatcgatccagtccgccgaatacgccgcgcaactgctcaagcagggcaaggccagcgacatcaaccagaagccgatcggcaccggcccgttcgtgttcagccgctaccagaaggatgcgcagatccgcttcaagggcaacaaggactactggaagccggacgaggtgaaggtcgacaacctgatcttcgccatcaacaccgacgcctcggtgcgcgcgcagaagctcaaggccggcgagtgccagatcaccctcaacccgcgccccgccgacctcgacgcgctgaagaaggacccgaacctgaacctgccgtcgcaggccggcttcaacctcggctacatcgcctacaacgtcacccacaagccgttcgacaagctggaagtacgccaggcgctggacatggcggtgaacaagaaggccatcatcgacgccgtctaccagggcgccggccagttggcgagcaacggcatgccaccgacccagtggtcctacgacgagaccatcaaggacgcgccctacgatccggccaaggccagggagctgctgaagaaggccggcgtcgccgaaggcaccgagatcaccctgtgggccatgccggtacaacgcccctacaaccccaacgccaagctgatggcggaaatgctgcagaacgattgggcgaagatcggtatcaaggcgaagatcgtcacctacgaatggggcgaatacatcaagcgcgccaagggcggcgagcatgacgccatgctgatcggctggagcggcgacaacggcgacccggacaactggctcggcaccctctacggctgcgacgcggtggacggcaacaacttctccaaatggtgcgacgccggctacgacaagctggtcaaggatgccaagcgcaccaccgaccagggcaagcgcaccgagctgtacaagcaggcccagcacatcctcaaggaacaggtgccgatcaccccgatcgcccactccaccgtgtaccagccgatgcgcaagacggtacacgacttcaggatcagtcccttcggcctgaactcgttctacgaggtcagcgtcggcaagtag

SEQ ID NO: 364387 - DNA, 711 bp, Pseudomonas aeruginosa; identical to SEQ ID NO: 342768

SEQ ID NO: 364388 - DNA, 1269 bp, Pseudomonas aeruginosa
atgcgcgcaccggttttcctgctctccgccagtcgccagaaccttggccgtctgctcctcatccgtattctcgtgctggccgcgcaggccggctcggtgggtttcgcctggctctccgacctgttgccgctgccgtggctggcgctcggcctgacccttggcctgtccgcctgcctgattctgttcaccgcgctgcgcctgcgcgcgccgtggccggtgaccgaccaggagtacgcggtacaactggcctgcgacctgatcatccacagcaccttgctgtattactcgggcggctcgaccaaccccttcgtttcctattacctggtaccgctgaccatcgccgctgcgaccctgccctggatctactccatggtgctctccggcctggccctgaccggctacaccctgctgctgatctggtaccacccgctgcacctgcaggcggttcagcacgaggcgatgctgatcaacctgcacctgttcggcatgtggctgaacttcgccctgtcggcggccttcatcaccttcttcgtggtgaagatgtccgaggcgctgcgctggcaggcgcacatgcaggccgagcggcgcgaggaaagcatgcgcgaccagcagttgctcgcggtggccacccaggcggccggtgccgcgcacgaactgggtacgccgctggcgaccatgagcgtgctgctcaacgagctgcgccaggagcgcccgcaggacccgaccctgcaggaagacctggcattgctccaggaacaggtcaagcagtgcaagcacaccctccagcaactggtacgggcggccgaggccgaccgtcgtcaggcgatcgaggagcaaagcgccgcggaatggctggaatcggtgctgcgccgctggcacctgatgcgtccggaggcttcctaccgctaccagtgcctgggcctcggctccgcgccgcgcctgaccccgccgaccgacctcagccaggctctgctgaacctgctgaacaatgcggcggacgcctgtcccgacgacctcgacatccgcctggactgggacagcagcagtatctgcctgagtatccgcgaccacggcgtcggggtgcccctggcgatcgccgaacagatcggcaaaccgttcttcaccaccaagggcaagggcttcggcctcggcctgtttctcagtcaggccagcgtgacccgcgctggtggaacggtgaagttgtataaccacgaagatggcggcactctgaccgaactgcgcttgccgcgcagctacggaatggcttga

SEQ ID NO: 364389 - DNA, 561 bp, Pseudomonas aeruginosa
atgtctgaagagctgctcttcgaaggggaagaacaaccccatctcctgctggtggacgacgatcccacctttacccgggtcctggcgcgggccatgagccgtcgcggcctgcgggtcagcaccgccggctccgccgaggaaggcctggcgctggcccagcaggacacgccggactatgccgtgctcgacctgaagatggaaggcgactccggcctggtgctgctgccgaagctgctggaactgcacgcggacatgcgggtggtgatcctcaccggctattccagcatcgccaccgcggtggaggcgatcaagcgcggcgcctgcaactacctgtgcaagccggcggatgccgatgacgtgttggccgcgctgctctccgagcacgccgacctggacaccctggtgccggaaaacccgatgtcggtggatcgcctgcaatgggagcacatccagcgcgtgctcgccgagcacgagggcaacatctccgccaccgcccgcgccctgggcatgcatcgacggaccttgcagcgcaagctgcagaagcggccggtacggcgctga

SEQ ID NO: 364390 - DNA, 810 bp, Pseudomonas aeruginosa
atgcgtatcttcggttcgagtgccggctgcctgtcggtgctgttcggactggccttcgggctgcctgcactagccgagccttcggtggacctggatggtccgacggcaggctggcgctattccggcctgctcgagcagcccgatgccccgcgtgtcgcctatccgactccgcccatcgatcgcggcggccagcgcggccgcagcctgatcgaaggacacctgcgcgaactggtcggcaccgagcgcgcccagcgcctggtggtcaacggcaatcctctccctctctataccgacggcgccgggcgcttcgtccgcccctatgcgttcggccacggctccaacggcgttcaggtcggcagcgccgacggcaagatcctcaagcgcgtacagttctacgaggccaatcgctcccaactgccgccgcgcgtgcgcgtggtgctgggttgggacgatccgaaggccgagcttgacctgcatatcgtcacccccgatggccagcacgcctactgggcgcatccgcgcctgagcaacagcggcggcctcgatccggacggcgtcgacgggcccggcccggagatgttcaccatgggcgcgccgctgcacggcacctacctgatctacgtgaactactggggcaacctcaacaaccagggctacaacttccaggccggcagcaacgtacaggacgtgatcaccgcgcaggtcaacctggtgttcaacgaaaacagcgtcgacgagaagcacgagaccttcgtcgtgcccctgcgcaccatcggcgacctggtgctggtcaagacctttacctactga

SEQ ID NO: 364391 - DNA, 1770 bp, Pseudomonas aeruginosa
atgagcgagaacaacacccccagccctgccaacggaacccctgcgcccgccgctgcgcgcacccgaagcgccctgtggccggtgctggggatcgtcgccgcgctggccgccggcggtgtgctggcctggcagatgggctggctggagcggctcggcggagggcgcccggccgaagaggacctcggccagccgatcggcgcccaggcacccgcggacgccgacgcgccacgtgcctaccgtgacctgcgcaagcccgacgcgctgatcgagagcgtgtcgctgagccgcctgccgaaggaaatcctcgaggtgccgttgctgcgcgataccctgaccgaggacttcgtcttctattacgagaacaatggcgaccgcctcggcctgaccggtacgttgcggcggatcatctacgagcacgacctgaccctgaaggacagcctggtcgaggaactgctcgaccaaccggcccaggtcgccctctggcgcggcgccgacggccgcctgcgcgacttcgtggtggtgctcaagcgcggcggcctggcgcgggtgctcgagccgctggcccatatcgccgccgacgaccagcagttgcgcaaggtcggcgagctggcgggaacctcggtctatcgcctgcgctacggcaacgacaaggcgatgctgttcctgtccaagggcgaccggctgttgttgctgtcgaacccacggatgctcttcgacgatggtggcgaaagcgacgacagcccgctgaacgctccggccagcgaagacctggaggcactgctcgacggcgacgaactgttccccgagcgcttcggcctgccgggccgcggcgagctgcgccagcgcatcaccctcaatgccagcgtcctggccatgggctaccagcgcttcatcccgagcttcgccggggtgcgcttcgagaagggcgagcagggctggagcagctacctggcgctgaacgaggtggaacgccagccgccgctggacttcgccccggtctggcaggccatgccgatgggcgccagcgcctgcgtggcgctgccggtcacccctggcctgtacggggtgatgctggagcgcctgggggccgagcagaagatggcccaggccttctccgagcatctcagcggcgctgccggtctctgctggtacgccagttcgcggctgcattcgccgctgctggtgggccagttgagcgcgccggccagtgccgaactcgacgacgagctgggcaagctgttcggtcgcgtgatcggcgcgaaggaagccaaggtcgagggtggcagcttcccggtggaagaccgggtggatggccagacccgccgctggacccgccaggtcagctcgaacttcggcgcctatccggccagccaggcggacaacccggagagcatcagcggccgcgcgttcttccgcatcggcatggcgcgccatggcgagaccctgctgttctccctcgacgaccagttgctcggcaaggccctggacacactcgacaaacgctatccgccgctcgccgaggtgttgccgaaggatgcgctggtaccggcctacctggcgccgcagccgctctccgaactgctgcaacgggaaaccctcgacagcctgccgcaggacatggagccggtattccgcaatgccgccgacacctacctgatgccgcgcctgaaaaccctcgccggcaagggcagctacgccctcgggctgcctgccggaagccaggccaacgcaccgtggcaatggctgccgctggaatggcggtcgctgtga

SEQ ID NO: 364392 - DNA, 651 bp, Pseudomonas aeruginosa
atggcggtcgctgtgagacgcctgactgccttcggcctggcgctgctcctgctggccagcggcgttgcccgtggcgagcccgcggtaacgctcgacccgcagcaatcgcaggtattccgcgcctggttcgtgcgcatcgcccaggaacagttgcgccaagggccgagtccgcgctggcaccagcaggactgcgccggcctggtgcgcttcgccgccaacgaggcgctgaaagtccacgatggcaagtggctgcgcgccaacggcctgtccaaccgctacctgcccccggagctggcgctcagccccgagcaacggcgcctggcgcagaactggcagcagggtggcggccaggtcgggccctacgtgaatgcgatcaagctggtgcagttcaacagccggctggtcggtcgcgacctcaaccaggcgcgccccggcgacctgatgttctacgaccagggcgacgaccagcacctgatgatctggatgggccgctccatcgcctatcacaccggcagcagcaccccgaccgataacggcatgcgctcggtcagcctgcaacaactcatgacatggaaggacacccgatggatccccgacgaatccaatcccaactttatcggcatctatcggctggctttcctctctcaatga

SEQ ID NO: 364393 - DNA, 4581 bp, Pseudomonas aeruginosa
atgaatcgcgtcccagtgaagaccacagcaatgagcaacctgcgccgtttcagccgtagcctggcggtcgccgccctggtcctgctgccgttcgccgccgtccaggcggaagacacggtggaaccgagcggctacacgccgatggccggcgaatccttcttcctgctcgccgacagcagcttcgccaccgacgaggaagcgcgggtccgtctcgaagcgcccggccgcgactaccggcgctaccgcatggagccctatggcggggtcgacgtgcgcctgtaccggatcgaacagccgctggagttcctcaagcggcagaagaacctgcaccgggtcctggccgagggacagttcaagggcgaaggcctgtcgaacaccctggcctatctctgggacaactggtatcgcaagtcgcgccgggtgatgcagcgcgccttctcctacgagtcgcggcaacaggtcaccgaggcggtgcccgagctgaagatgggcaacgccatgaccgcgccgacgccctacgacgcgcagccgcaatacgcgccgattcccggcctgccgctggtcagccagttccgctatccgctgtgggacgccaagcccatcgagccgccgcaggacgtcaagctggccggttcctccagcgagttcatcaacgtcgtgccgggcaatgtctacatcccgctgggcaagctgaagccgggcctgtacctggtcgaggcgcttgtcggcaagtaccgcgccaccaccgtggtgttcgtctccaacagcgtggcggtgagcaaggtcgccggcgacgagctgctggtctggaccgcacgcaagcacgaaggcaccccggtgcccgacaccaaggtgctgtggaccgacggcctgggcgtgatgagcagcggcaataccgacgccgacggcctgctgcggctcaagcacgccagtccggagcgctcctacgtgatcggcgaggaccgcgagggcggggtcttcgtctccgagaacttctattacgacagcgagatctacgacaccaagatctacgccttcaccgaccgcccgctgtaccggccgggcgactgggtctcgttgaagatggtcggccgcgagttcaaggacgcccggcaatcccaggccgccgccagcgcgccggtgcgcctgagcgtgatcgacgccagcggcacggtattgcaaagcctggacctccgcttcgacgcgaagagcggcgccaatggccgcttccaactgccggagaacgccgtcgccggcggctacgagttgcgcttcgactaccgcgggcagacctacagcagcgccttccgcgtcgccgaatacatcaagccgcacttcgaagtcgccctcgacctggccaagccggacttcaagaccgccgagccggtgaagggcgagatcgtcctgctctatccggacggcaagccggtggccaacgcgcgcctgcaactgagcctgcgcgcccagcagttgtcgatggtggacaacgaactgcagtatctcggccagttcccggtggaactgagcagcaccgaactgaccaccgacggcaagggccgcgccgccatcgaattgccgccggccgagaaacccagtcgctacatgctgaccatcttcgccagcgacggcgccgcctaccgggtcaagaccagcaaggagatcctcatcgagcgcggcgccgcgcgctaccgcctgagcgcgccgcagcgcttcagcgccgccggcgagaaggtcgagttcagctatgccagcgaacagccgaccccgctcaagccgagcagctaccagtggatccgcctggaggaccgcgccaccgatagcggtccggtcgccgacggccgcttcgcgctgaccttcgagcgccccggtacctattccgtggagctgcgcgacgacaagggccagctccttggcgccaccggccactcggtgagcggcgagggcgtgaagtcggtgccgggcaccgtcgaggtggtgttcgacaagcccgagtaccgcaccggcgaggaagcctccgcactgatcaccttccccgagccggtggaggatgcgctgttgtccctggagcgcgacaaggtcgaggccaccgccctgctgtccaagggcgccgactggctgcgcctggaaaagctcaatccgacccagtaccgcgtgtggatcccggtgcgcgaggagttctcgccgaacctgaccttctcggtgctctacaccaagggcggcgactacagcttccagaacgccgggatcaaggtcggcatgccccaggtagagatcgacatcgccaccgacaaggagcgctacgaaccgggcgagacggtgaccgtgaccctggccacgcgcttcgccggcaaaccggtttccagccacctgaccgtcagcgtggtggatgagatggtctatgccctgcaggcggagatcgcccccggcatcgaccagttcttctaccatccgcggcgcaacaacgtgcgcaccagcgccagcctggccttcatcagctacgacgtggcgttgcccggcagcaccagcgcacccggacgggcgaaccgcagcgagcgcggcgtcaaggtactggagcggccgcgccgcgaggacgtcgacaccgccgcctggcagccggagctggtcaccgacgcccagggcaaggccagcttcagcttccgcatgcccgactcgctgacccgctggcggatcaccgcgcgggccatcgacgacaacggccaggtcggccagaagaagcagttccttcgctcggagaagccgctgtacctgaagtggagcgggccgactcgcttccgccagggtgaccagcccgacctcggcctgttcgtcttcaaccaaggcgaacagccggtcaaggccgagctgctcagcgggccgcctggcagccagcgcagccagaccctggagctggccaagggagtcaactacattccgctggcgcaacagccgctcagcgatggcgactggagcgccgagctgcgccaggacgggcaggtccgcgaccgcctggcggtgcgcttcaacctgctggccgacggctggcaggtggagcaggtgcagaacctcagcctggcggcggcgagcaacccgctgcaactgccggcggacgcgcgcgacgtacgcctgcgcctggccgatggcccggccgctgcctacctgggcaatctcgatgatctgctggagtatccctacggcggcgtcgagcagaccgccagccaactgctgccgctgagcatcgcctatccggcgctggccggcggcgagccgcggattcgcgaccgcctgcgcctgatcatgcagaacagtcgcctgcgcctggtgcagatggccggcccggacgcctggttcgcctggtggggtggcgacgtcgatggcgacgctttcctcaccgcctacgcctactacgccgactggtacgccagccgcgcactggagatccaactgccggccgaacactggcagcgcatcctcgagccctacgccaagcaggcgacgcagaccccgctgctgcagcgtgcgctgatcctggctttcgcccgcgacatgcagttgccggtgaacaccctgctcggcggcctgctcaacgatctggccaacgccggcgaagggcaggcgcgcgcggagccgctggaggccgacgacggcctggtgctgggcgacccggactcggccgtcggcctggccgcggcgcgagtactggcggtggacctggcacggcaactgcgggtcgcggtgcccgctccgctggccgcccaggccgagacggcgacgcagcgcctgcgtgaggccggcttgccgttcaccgatgccttgctggcctctcactcggccgtggatggccagcaggccagcgctttgctgcaacgcctggcgccggcgcaatcgaccctggaacgcgccctggccctgacctggctgcagggcgccctggcccaggcgccgcagggcaagctgccgcagccgccgaaggactggcaggcgcagcgcggcgccagcggcgaaacctactggcaatggcgcggccgcggcattccgagctgggtcgacctggacgaggcgccggcccggccgttgccggttgcgctcagctaccgcagcgcccaggcgccgagcgggcaactgccggtgcagatcagccgtcgtctgctgcgcctggtgcccggtgagggggcgttcgagttcaaggtcgaggaggttggcgacaagccgctttccagcgacgaactgtatctcgacgaagtgaccctgaacgttccggaagacaccgctctacgctacggcatgctggaactgccgctgccgcccggcgcggatgtcgagcgcaccacctggggcatcaagatcagcggcctggccggcgacgaagcgaccaccctggagcgcgcgcgcaacgaaccgggcgagctgttctacggggtgccggtggacagcctgagtggcgagcagcgtttccgtcacctggtgcgtttctcccagaaaggcagcttcaacctgccaccggcccgctacctgcgtctctacgcgccggaacagcaggccctggaagccaagccggcgctggccaaggtcaaggtcgagtga

SEQ ID NO: 364394 - DNA, 1650 bp, Pseudomonas aeruginosa; identical to SEQ ID NO: 342775

SEQ ID NO: 364395 - DNA, 834 bp, Pseudomonas aeruginosa
atgtcgaaagcctggcccggcgcctgctactggaatgactccatgaaccgaatgtcccttgccgccctgctcagttgccttcccctcgtcgcctgggcggacaaccccgtgaaactggatacgccggtctccggctggcgtgccggcgacggttccgccgccaattaccggcaggtggtgaactacccggcgtcctcggtcaacgtcgccgccgaccaggcgaccaccgcgcgcattcgcggcgcgatcgagagccagcccaaggaccgcccggcgacgctggtggtgaacggtgtgagcatgccactgaaggtggacgccgatggcagcttcgaccgcccgttcgccttcccgtccggcagcaacagcgtcgaggtgcgcaacgccgccgggcagtcgcgacgggtccagttctatcacggtggcggcggcggggaagtgccggccaagctgcgcgtgctgctgtcctgggacagcgacaacaccgacctcgacctgcacctggtgaccccggacggcgaccatgtctggtatggcaatcgttcgctggccaacggcgcgaccctggatgtcgacgtcaccaccggctacggcccggaaatcatcgccacgccgacgccgcagaaggggccctacctggtctacgtcaactacttcggcggtggctacggcagcagcgaggatggcgccgaacaggccgcccaggacctgaccacggcgcgcatcaccctggtcactgaagagggcacgccgaacgagaaacaggaaaccttcctggtgccgatgcgcaagcctggcgagctgacgctggtgaagcgcttcagttatccgtag

SEQ ID NO: 364396 - DNA, 378 bp, Pseudomonas aeruginosa
atgcccaccccatccgccgccgcgcgcctcgccctcgccgtcctgcccctgttcctcgccggctgctccagcctcgccggcagcggttccgcggataccggcgaagcctcctactatggcagccgccacgcaggcctgcgtaccgctagcggcgagcgctacaaccccaacgcaatgaccgctgcccaccgcacgttgccgttcggtacccgcgtgcgggtaaccaacctcgacaaccgccgcagcgtggtggtgcggatcaacgatcgcgggccgttccgccgcgggcggatcatcgatgtatcgcgcaaggccgccgaaggcctgggtatgatccgcagcggcgtggcgccggttcggatagagtcgctggattga

SEQ ID NO: 364397 - DNA, 1446 bp, Pseudomonas aeruginosa
atgcaatgggaaaccgtgatcgggctggaaatccacgcacagctcgccacccaatcgaagatcttctccggcagctcgaccgccttcggcgccgcgccgaatacccaagccagcctggtcgacctggccatgccgggcaccctgccggtgctcaacgaagaggccgtacgcatggcctgcctgttcggcctggcgatcgacgcacggatcgaccggcagaacgtgttcgcccgcaagaactacttctaccccgacctgccgaagggctaccagaccagccagatggaccatcccatcgtcggcaagggccatctcgacatcaccctggaagacggcaccaccaagcgcatcggcatcacccgcgcgcacctggaggaggacgccggcaagagcctgcacgaagacttccagggcatgagcggcatcgacctgaaccgcgccggcacgccgttgctggagatcgtttccgagccggacatccgcagcgccaaggaagccgtggcctacgtcaaggcgatccacgccctggtgcgctacctgggcatctgcgacggcaacatggccgagggctcgctgcgctgcgactgcaacgtctcggtacgaccgaagggccaggccgaattcggcacccgcgccgagatcaagaacgtcaactccttccgcttcatcgagaaggcgatcaaccacgagatccagcgccagatcgagctgatcgaggacggcggcaaggtagtccaggaaacccgcctgtacgacccgaacaaggacgagacccgctccatgcgcggcaaggaagaagccaacgactaccgttacttcccctgtcccgacctgctgccggtggtcatcgagcccgagtacctggcgaagctgcgcgagcaactgccggaactgccggtgcagaagcgcgaacgcttcgagagccagtacggcctgtccgcctacgatgccagcgtgctgtccgccagccgcgagatggccgactacttcgagaaggtccagggcatctgcggcgacgccaagctggcggccaactgggtgatggtcgagctgggcagcctgctcaacaaggacggcctggagatcgagcagtccccggtgtccgccgagcaactgggcggcatgatcctgcgcatcaaggacaacaccatctccggcaagctcgccaagatggtcttcgaagccatggccaacggcgagggttccgccgaccagatcatcgaggccaagggcctgaagcaggtcaccgacagtggcgccatcgagaagatgctcgacgaggtgctggcggccaacgccgagcaggtcgagcagtaccgcgccgccgacgaggccaagcgcggcaagatgttcggcttcttcgtcggccaggcgatgaaggcctcgaaaggcaaggccaacccgcagcaggtgaacgagttgctgaagaaaaagctcgaagcgtga

SEQ ID NO: 364398 - DNA, 1455 bp, Pseudomonas aeruginosa
atgctgcatcaattgaccctcgccgagatcgcccgcgccctcgccgacaagcaattttccgccgaagagctgacccgcaccctgctcggtcgcatccggcagctggacccccagctcaacagcttcatcagcatcaccgacgacctggccatcgcccaggccaaggcagccgacgagcggcgcgccaacggcgagaacggcgccctgctcggcgcgccgatcgcccacaaggacctgttctgcacccagggcgtacgcaccagctgcggttcgaagatgctcgacaacttcgtctcgccctacgacgccaccgtggtcgagaagctcgccgccgccggcgccgttaccctcggcaagctgaacatggacgaattcgccatgggctcgtcgaaccagtccagccactacggcgcggtgaacaacccctggagcctcgaccgtgtgcctggcggctcctccggcggttccgccgcggcagtcgccgcgcgcctgctgccggccgccaccggcaccgataccggcggctcgatccgccaaccggcggcgctgaccaacctcaccgggatcaagccaacctacggccgggtttcccgctggggcatgatcgcctacgcttccagcctcgaccagggcggcccgctggcgcgcaccgccgaggactgcgcgctgatgctgggggtgatggccggattcgatccgaaggactcgaccagcgtcgaacagccggtggacgactacctggccgccctgcagaagccgctgagcggcctgcgcatcggcctgccgcgggaatacttcagcgccggcctcgacagccgcatcgccgacgcggtgctggccgtggtcgaggagctgaagacgctcggcgccacggtgaaggacatttccctgccgaacatgcagcacgccatcccagcctactacgtgatcgcgccggccgaggcgtcctccaacctgtcgcgcttcgacggcgtgcgctatggctatcgttgcgacgccccgcagaacctggaagacctgtacaagcgctcgcgcgcggaaggcttcggcagcgaagtgaagaaccgcatcatggtcggcacctacgcactctcggccggctactacgatgcctattacctgcaggctcagaagattcgccggctgatcaagaacgacttcgtcagcgcctttgccgaagtggacgtgatcctcggcccgaccacgccgaacccggcctggaagatcggcgagaagaacgacgacccggtttcccagtacctggaagacatctacaccatcaccgccaacctcgccggcctgccggggctgtccatgcccgccggcttcgtcgacggcctgccggtgggtgtccagttgctcgcgccctacttccaggaaggccgcctgctcaacgtcgcgcaccagtaccagcaggtcagcgactggcacacccgcaccccggccggcttctaa

SEQ ID NO: 364399 - DNA, 288 bp, Pseudomonas aeruginosa
atggcgcttgaacgctccgacgtggaaaaaatcgcccatctcgcccgcctgggcctgagcgaggccgatcttccgcgcaccaccgagaccctgaacaacatcctcggcctgatcgaccagatgcaggcggtcgacaccagcggcgtcgaaccgcttgcccacccgctggaagccacccagcgcctgcgtccggacgcggtcaccgagaccgatcaccgcgacgcctaccagaccatcgcccccgccgtggaagaaggtctgtacctggttccgaaagtcatcgagtaa

SEQ ID NO: 364400 - DNA, 1038 bp, Pseudomonas aeruginosa
atgttcaaaaaattgcgtggcatgttttccagcgatctgtcgatcgacctgggtactgccaatacccttatttatgtgcgcgagcgcggcatcgtcctgaacgaaccgtccgtggtcgccattcgcagccatggcagccagaagagcgtcgtcgccgtgggcaccgaggccaagcgcatgctcggccgtaccccgggcaacatcgccgccatccgtccgatgaaagacggcgtgatcgcggatttcagcgtctgcgagaagatgctgcagtacttcatcaacaaggttcacgagaacagcttcctgcagcccagcccgcgcgtgctgatctgcgtaccgtgcaagtccacccaggtcgagcgccgggccatccgcgaatccgccctgggcgccggcgctcgcgaggtgttcctgatcgaagagccgatggctgccgccatcggcgccggcctgccggtcgaggaggcccgcggctcgatggtcgtagacatcggcggcggcactaccgagatcgccctgatttccctcaacggcgtggtctacgccgaatccgtccgcgtcggcggcgaccgcttcgacgaagccatcgtcacctacgtgcgccgcaactacggcagcctgatcggcgaatccaccgccgagcgcatcaagcaggagatcggcaccgccttcccgggcggcgacgttcgcgaagtcgacgtccgcggccgtaacctggccgaaggcgtaccgcgcagcttcaccctgaactccaacgaggtcctcgaggccctgcaggagtccctggcgaccatcgtccaggcggtcaagagcgccctcgagcaatcgccgccggagctggcctcggatatcgccgagcgcggcctggtgctgaccggcggtggcgcgctgctgcgcgacctggacaagctgctggcacaggaaaccggcctgccggtgatcgtcgccgaggagccgctgacctgcgtggctcgcggcggtggccgtgcgctggagatgatggatcgccactccatggacctgctctccaccgagtaa

SEQ ID NO: 364401 - DNA, 993 bp, Pseudomonas aeruginosa
gtgctggccgtgctgtcggtcagcctgatggtggtggacgcccggttcgactatctggagcccgtccgcagcaagctggggatggtgctcacgcctttctacggcctggcggaaatgccggtgcgcgcctgggaaggcgtgcgcgaccagttcagcagccgtagcgagctgatcgccgagaacgaacgcctcaaggccgagtccctgctgatgcagcgccgggtgcagaaactcgccgcgctcaccgagcagaacgtgcgcctgcgcgagctgctcaattccgccgcgctggtcgacgacaaggtactggtcagcgagctgatcggcgtcgatccgaaccccttcacccaacgcatcatgatcgacaagggcgagaacgacggcgtcttcgtcggccagccggtgctcgatgccagcggcctgatgggccaggtggtcgaggtgatgccctataccgcgcgggtcctgctgctcaccgacaccacccacagtatcccggtgcaggtcaatcgcaacggcctgcgcgccatcgctgtcggcaccggcaatcccgagcgcctggaattgcgctacgtcgccgacaccgccgacatcaaggaaggcgatctactggtcagctccggcctggggcaacgcttccccgccggctatccggtggccacggtcaaggaagtgatccacgattccggccagccattcgccgtggtgcgcgcggtgccgaccgcgaagatgaaccgtagccgctacgtgctgctggtgttcagcgacagccgcaccccggaacagcgcgccaacgacgccgccgaggcccaggaagaggcggacaagaaagccgccgccggcgcccaggcgccccagcctgccgcgcaaccggccgccgcgccgtcgccggccaccccggcagcccagggcgctgcgcagcagcccgccgccgcgcccgcgccagcccccacgcagcctgccgctccggcggccaacgggggacgccactga

SEQ ID NO: 364402 - DNA, 495 bp, Pseudomonas aeruginosa
atggctcgcgcgactcaaggttcgaacaatgtctgggtgatctggctgagcctgctggtcgggctggtgctggccgtagcgccgatgcctaccttcaccgagatcggccgcccgctgtggctggcgatgctgctgacctactgggtgttgctgctgcccgagcgcgtcgggatggtcaccgcctggctgctcggcctggcccaggacgtgctctacggcaacctgctcgggcagaacgcgctgatcctcggcctgatcaccttcctcgtgctgtccctgcaccagcgcctgcgcatgttcccggcctggcagcagtgcctggtgctggtggtggtctacggcctggcgcagctgctccagctctggctcaacgccctgaccggcaatcgtccgccgaccctgaccttcctgctcccggccctggtcagcgcgctgctctggccctgggtgtacgccctgctgcagttcgtccgcctgcgtctcaacgtgaggtag

SEQ ID NO: 364403 - DNA, 606 bp, Pseudomonas aeruginosa
atgccgtcgctgtatctcgcctccgcctcgccccgtcgccgtgaattgctgacccagatcggcgtgccgctgtccgtgctcgccaccgctatcgacgagtcccccttgccgaacgaagcgcccgccgcctacgtcgagcgcctggcgcgctgcaaggcggccgccgggctggctatgctggaagggcgcggcgaggacggttgtgtcctgggcgcggatacctcggtggtgatcgacgggcgaattctcggcaagcccgtggaccaggccgacgggctggccatgctggctgcgctgtccgggcgcgaacaccaggttctcaccgccgtggccctggccgccgctggcggcgtcgaggcgcgggtggtggagtgccgggtgcgcttccgccaggtcgctccggaagaagcgctgcgctactggcagagcggcgagccggcggacaaggcaggcggatatgcgatccagggcctcggggcgatattcgtcagtcgcatcgaaggcagttacagtgcggtggtcgggctgcctttgtgtgaaactgcggaactgttgagggaattcggcatcccttgctggcagcccgtgggtggcaacccgccgtaa

SEQ ID NO: 364404 - DNA, 1458 bp, Pseudomonas aeruginosa
atgagcgaagagatcctgatcaatatcacgccgatggagtcgcgcgtggcggtggtggaaaacggcgtcctgcaggaagtgcatgtcgaacgcacccagcggcgcggcatcgtcggcaatatctacaaggggcgggtggtacgggtactgccggggatgcaggcggcgttcgtcgacatcggcctggaacgtgcggcgttcatccatgccgccgagatatccaatcgcgaaggcagcgccgtggaaagcatcagtgccctggtccatgaggggcaggcgctggtggtgcaggtgaccaaggatccgatcggcaccaagggcgcacggctgaccacccacctgtcgattccttcgcgctatctggtgtacatgccgcgcaccagtcatgtcgggatatccctgcggatcgaggacgaagtcgagcgcgagcgcctgaagaaggtggtggccgactgcgtggcggcggaaggcatcgaggggcagggcggcttcattctgcgcaccgctgcggaaggtgcgggcgaggacgagattctcgccgacatccgctaccttcgccggctatgggaccagatcgccgcgcagatccagaccgtcggcgcgccttcggtgatctacgaagacctgtccctggcgatccgtaccctgcgcgacctggtgaacccgcggatcgagaagatccgcatcgactcgcgagagaacttccagaagatcacttccttcgtcgaagaattgatgccggagatttccgatcgcctcgaacactacccgggcgagcgaccgatcttcgatctctacggcgtcgaggacgaaatccagaaagccctggagcgcaaggtactgctgaagtccggcggctacctgatcgtcgatccgaccgaggcgatgaccaccatcgacgtgaacaccggcgccttcgtcggccatcgcaacctcgaggaaaccatcttcaagaccaacctcgaggcggccaccgcgatcgcccgccaactgcgcctgcgcaacctgggcgggatcatcatcatcgacttcatcgacatggaggacgaggagcatcgccggcaggtcctgcgcaccctggagaagcaactggagcgcgaccacgcgaagaccaacatcatcggcatcaccgagttgggcctggtgcagatgacccgcaagcgcacccgcgaaagcctggtgcagatcctctgcgagccctgcccctgctgccagggacgcggcatgctgaagactgcggaaaccacctgctacgagattttccgcgagattctccgcgaggcacgtgcctaccaggccgactcctacctggtgctggccaaccagaaggtggtggaccggctgctcgacgaggagtcgggtaacgtcgccgatctcgaagcgttcatcggccgcaccatcaagttccaggtcgaggcgatgtactcgcaggagcaatatgacgtggtcctgctctga

SEQ ID NO: 364405 - DNA, 3831 bp, Pseudomonas aeruginosa
atggcggatgtgggaagcctcggaacgcgactgctacggatcgtcctgggtctgtgcgccctggtactggtgctgctggcgctgtacgtcagccttggccggcaactggtgccgctggtggccgaataccgccagcagctggaggacgaagctggcaagcaactcggcataccggtgcggattgccgaactgacgggctcctggcgcggcttcgagcctctggtggtagcgcgcgacattcaggtcggcgacggcgaacagagtctgcgcctggcgcgggtgcggctggcgccggacctgctcggcagcctgctggcgcgccaggtgcggatcggcagcctggagctggagggactcaagctgaccctgcgcgaaggcgaggatggccagtggagcctggatggcctgccgcacagcgacaagcccagcgatccccggaaactcctgcaattcctgctgcagacccaacgcatctcgctgctggacagtcaactggaggtggcgccgcggggaagcgcagcgctgtcgctcagcgcggtcggcgcgaccctgcgcagttcatcggtcggtgggcagagtctcgatgcccgcctgcaactgccggatggccaacccctggcgctgcacgccgaagggcggatcgacagcgaggactggccgcgcagcagcgccaggttctatctcagcctgccgcagagcgactgggcgcaatggttgccggccggtctgacccaggaatggacgatcgtccgggccaaggccggcggcgacttctggttcgactggcgcgacggcaaggcgcaacggctggtggcacggctgctggcgccgcagttgaaggcgtcgtatgccgcgcgcaagccggtggaaatcaacgacctgggcatgaacctgttcttcgatcgcgaagcgcagggctggaaggttcgggtcggcgacctggcggcgaatttcggcgagcagcgctggggcgaggtggagttgctgttgcgtcgcgaccagcagaacaacgagccacactggaaactgcaggccgaccgcgtcgacctgacgcccctggtgccggcgatagaagcgctggcgccgctgccggacgcggcggcggagtgggtggcgggcctgaagccgaagggcatcctgcacaacctgaacgccgatttctggccgcagcgagaggtgcccgagcgggtcagctacgcgaccaacctggaaaaggtcggtatctcggcgttccatgaggttccggcagtggaaaatgtcagcggcaccttgaccggcaccctggctggaggccagctcgacgcatcggcgcaggatttcatgctgcacctggccaaggtgtttcccgagccgtggcgctaccgcgaggctcgcacgcggatgttctggagcctggacgaccgcgccttcaccctcggcagccacctgatgcgggtcgagggcgaggagggccgcctggccggcgacatgctgatccgcctgatgcgcgatcccggcgctgaagactacatggacctgcaggtcggcctcagcgacggcgacgcgcgcttcaccgccaagtacctgccgacccagttgccgggaatgaacaaaagcctggcgaactggttgaagacggcgatccgcagtggccatgtcgagcagggctacttccagtggcagggctcgctgaaccgcggcgcggcggccgaagcccacgtcatgaacctctacttcaaggtccgcgacggcgagctggcctaccagcccggctggcccgtcctgagcaaaacggtcggcgaggtgttcgtcgaggattccggagtccgcgtgctggcctccagcgggaatctgctgaattcccgggtcagcgacgtcaaggtcgacattcccctcggccgtccgggacagacgccgcacctgtatgtggatggggccgtcgacagtaacctgaaggacggcatcaagctgctccaggaagcgccgatcccgacccgcaagatcttcgccggctgggagggcgatgggcccttgcagggccacctgaagctggatattccgctggaccacgacgaggccggcaagaccggggtggtcgtggatttctccaccgtgggcgcgaccctgaagatgcccagtccgaagctggatatgagcgaagtgaagggcgacttccgtttcgacctggccaagggcctgagcgccccggcggtgcaggcccgggtgctgggcagcgaggtacgcgggcggatcgtcgccgaggggcgcggcgatgcgcgcacgcgcttgctgctcaacggccaggtggcggtcaagtcgctgagcgactggctcggcgctggccagcgtccgttgccggtctcgggacgcctgccgttccagctcaacctgctgctggatggcaaggacagccaattgcagatcgattcggatctcaagggcgccgtcgtcgacctgccggcgccgttcggcaagacggccgcccaggcgcggccgacccaatggcggatgaccctggatggcgccgaacgacgttactgggcgcgttacgacggcctcgccagcctggcctatgcggccccggcggacaagccgctgaacggacgcggcgccctgcgcctgggcggtgacccggcgttgctgccctcggcacaggggctgcgggtgcgcgggcgtctggcggaactggactgggacgcctggcaggccaccctgaagcgctacggcaacggcgaccaggccgccagtagcgctgcgggcctgctgcgcggcgccgacctgcgcatcgacagcttcaagggcttcggccaggagctgaagaacctgaccgtcgacctggcccgccaggagcgggcctggcaactggtgctggtcagcgacctcgcatcggggcgcctggtcctgccggatgccaggggcgcgccgatcgtggtcgatctggaccgcctgaacctgccgaagtcgacccttcccgacgagaacaaggtggaggactcggacccgctggccgccgtcgatccgcgcagcctgccggcggtagacgtgaagatcggccaggtcgccctcggcggccagccgctgggcgcctggagcctgaaggtacggccgggcagcaacggcgtggcgttcaacgacctggacctcgacctgcgtggcctgcacgtcaacggcagcctgcgttgggacggcagtccgggcaatacccgcagcacctatcagggccggatcgagggcaagaacctggcggatgtgctcaaggcctggaatttcgcgccgagtgccaccagcgaacgtttccgcatggatatcaacggccagtggccgggatcgccggcctacatggccctgaagcgcttcagcggcagcatggatgcatcgctgcgcaaggggcagttcgtcgaggtcgaaggcagcgcccaggcgctgcgagtgtttggcctgctcaatttcaacgcgatcaaccgccggctgcgcctggatttctcggacatcctcggcaagggactgagctatgaccgggtgaagggggttctctccgccaccgacggcgtctacgtcacccgcgagccgctgaagctggaaggaccgtcgagcaacctggagttgaacggtaccctggacctggctcacgatcggatcgacgccaagctgctggtgaccttgccattgaccaacaacctgaccctggcggcactgatagtcggcggtccggcggtcggcggcgcggtcttcgtcgtcgacaagttgctcggcgaccgggtctcgcgcttcgccagcgtgcaatacagcgtcaagggcccctggcaggatccgaagatcagcttcgacaagccattcgagaagccccgctga

SEQ ID NO: 364406 - DNA, 849 bp, Pseudomonas aeruginosa
atgtccattgccgtgatccagatggtcagccaggacgacgtgacggccaacctggccgccgcccgtcgcctgctggaacaggccgccgagggcggggcgcggctcgccgtgctaccggaaaacttcgccgccatgggccggcgcgacctggccgaactggggcgcgccgaggcgcgggggaacgggcctatcctgccgtggttgaattccgccgctcgcgacctcaggttgtggatagtcgccggaacgttgccgctgccgccggatgggcaacccgaggcgaaggcgaatgcctgttcgctgctgatcgacgagcacggagagcgggtcgcccgctacgacaagctgcacctgttcgatgtggatgtagccgatgcgcggggccgctatcgtgaatccgacgactatgctttcggtcagaagatcgtggtggcggatacgccggtcggccgcctcggcctgacggtctgctacgacctgcgttttccggagctctataccgccctgcgcgaggccggcgcggagctgatcacggcgccgtcggcgttcaccgcggtgaccggcgcggcgcactggcgggtactggtccgcgcccgcgccatcgagacccagtgctacctgctggcggccggacagggtggcgtccacccacggggccgggagacgttcggccattcggccatcgtcgatccctggggccgggtcctggccgagcggccgcagggcgaagcggtgctgctggcggtgcgcgacgccgcagaacaggcggatatccgccggcgcatgccggtggtggcgcacagacgatttttcccgccggccgaaccgcggccggcgcgtacggagtga

SEQ ID NO: 364407 - DNA, 1443 bp, Pseudomonas aeruginosa
atgagcgagttgttgtcatccgtcagccagcaattgctggcccccggtggtctggaactggacagcctgcccggcattcttcatgaactgaacggcccgggcatcgatgccgccgacctgtatttccagagtcaggtctccgagtcgtggatgctcgaggacggcatcgtcaaggaaggcagcttcaatctcgaccagggtgtcggggtacgcgcgcagtcgggcgagaagaccggcttcgcctatagcaatgcgatcaccgccgaggcgttgaaacaggccgcggtggcggcccgttcgatttcccgtgcgggacagaacggcagcgtgcaggcgttcaaggccgtggtgccggctcgcctgtacgccggcgagaacccgctggacgtgctcagccgtgccgagaaggtcgagttgctgaagcagatcgacgccgctacccgtgcgctcgatccccgcatccagcaggtcacggtgagcatggccggcgtctgggagcagatcctggtagcggccagcgacggttctctggccgccgacattcgtccgctggtgcgtttcaacgtcagcgtgatcgtcgaacagaacggccgacgcgaacgcggcggccacggcggcggcggtcgcaccgactatcgctatttcctccaggaggatcgcgccatgggctacgcccgcgaggccctgcgccaggcactggtcaacctcgaggcgattcccgcgccggccggcaccctgccggtggtgatgggcgcgggttggtccggggtcctgctccacgaagcggtcggccacggcctggagggcgacttcaaccgcaagggcagctccgcctacagcggccgggtcggcgaaaaggtcgcctcgagcctgtgcaccatcgtcgacgacggcaccctggccgggcgtcgcggctcgctgagcgtggatgacgaaggcacgccgagcaactgcaacgtgctgatcgagaacggcgtgctcaagggctacatgcaggacaagctcaacgcccgcctgatgggtgtggcgcgcaccggtaacggccgccgcgagtcctacgcgcacctgccgatgccacgcatgaccaacacctacatgctggccggcgagagcgatccgcaggaaatcatcgcctcggtggagaagggtatctactgcgccaacctcggcggtggccaggtcgatatcaccagcggcaagttcgtgttctccaccagcgaggcctacctgatcgagaacggcaggatcaccaccccggtgaaaggcgccaccctgatcggcaacggtccggaagcgatgagccgggtgtccatggtcggcaacgacctggccctggacagtggcgtgggaacctgcgggaaggacggtcagtcggtgccggtcggcgtcggccagccgaccctgaagatcgatgcgatcaccgtcggcggcaccggcgcctga

SEQ ID NO: 364408 - DNA, 525 bp, Pseudomonas aeruginosa; identical to SEQ ID NO: 342790

SEQ ID NO: 364409 - DNA, 1350 bp, Pseudomonas aeruginosa; identical to SEQ ID NO: 354727

SEQ ID NO: 364410 - DNA, 396 bp, Pseudomonas aeruginosa
atgtccttcgaggcgcacgacccgcaagcattggatcactggtactggctgggcacgcagatccgctgcgcgctcgatcccgacgaaccgcgcctgctcgaccagtacctcggcgaggcgcgctatctcgccggttgggaaggtgtggccgcctggccgctgttcgagaaagcctacaacctcctgctcgataccggtcgcgatccgatattgccctggcactggcgcagcctctgcctcgactacgcctaccggcccctctgcgaacttcagcgattgaccaccaacggcagccagcggcgacggctgcgccagctctccgtacgaatggccaggcaggacctggcgccgtcgatgagcttcgatcacccgcaacaaggaaaccaagatgactga

SEQ ID NO: 364411 - DNA, 1377 bp, Pseudomonas aeruginosa
atgactgacacccgcatcgaacgcgacagcatgggcgaactggcggtcccggcgaccgccctctatggcgcccagacccagcgcgcggtgaacaacttcccggtcagcggccaacgcatgccccaggccttcgtccgcgccctgctgctggccaaggccgcggcggcgcgggcgaacgtctccctgcagcaactggatgcaccgatgggcgaggcgatcgccgagacctgcctgcaactgctgcaggaggacttcatgcagcatttcccggtggatgtgttccagaccggctccggcaccagttccaacatgaacgccaacgaagtggtggcgaccctggccagtcgtcgcctgggcggcaaggtcaatccgaacgaccatgtgaactgcgggcagagcagcaacgacatcattccctcgaccatccacatcagtgccgccctcgagatcagcgaacgcctgctgccggcgctgcgccacctggagcagactatccagagcaaggccggcgaagtgcatgcctatgtgaagaccggccgcacccacctgatggatgcgatgccggtacgcatgagccaggtgctcggtggctgggcgcagcaggtgcgacaggccggcgtgcacatcgagagcgtacttcctgccttgcagcagttggcacagggcggcaccgcggtgggcaccgggatcaacgcccatccgcggttcgccgaacgtttcagccaggagctgaacgacctgaccgggctggcgttccgccccggcgacgacttcttcgccctgatcggttcgcaggacaccgcggtcgctgcgtccggccagttgaagaccctggccgtgaccctgatgaagctggccaacgacctgcgctggatgaactccgggccgcttgccgggctcggcgagatcgagctggaagcgctgcaaccaggctcctcgatcatgcccggcaaggtcaacccggtgatcccggaggccaccgcgatggtcgccgcccaggtgatcggcaatgacgccgccattgccgtcgctggccaatcgggcaacttcgaactgaacgtgatgctgccgctggtggcggacaacctgttgcacagcatccagttgctggccaacgtcagccggctgctggcggacaaggccatcgccagcttcaaggtcaaccagggcaagctcagcgaggcgttggcgcgcaacccgatcctggtcactgcgctgaacccgatcatcggctaccagaaggctgcggaaatcgccaagcaggcctatcgcgagggacggccgatcatcgatgtggcgctggaaaacaccgatctggaccgtgcgcgcctggaggtgttgctggatccggaaaaactcacggctggcggcctctga

SEQ ID NO: 364412 - DNA, 450 bp, Pseudomonas aeruginosa
atgcgtcattggcaacgaacgatcgaacagggcaaccgctgtttcgtcaccggcgcattgatcgatgcgcgtgagcactacctccatgccctggccctggcccaggtgctgctggagcgctggggcgacgccgacgaggcggtgatggcgttcgtcatttcccatcacaacctggccgacttgcacctgcaactggagcaaccggaggagaccgcagaatacctgtgcgcctgccacgagcgcctgttgcgggtcagcgccgaccagaagctgccgctggccctgcgccaggcggcccagcatcacagccggcgcacctatgtcgaactgctgtcgttcatcggcgaacacggtgcctatccgcgcaccgagcgcctgctcaagggaccgccgaacgcggaggtccgacccgagttcctcgctccgcccccctcacttcgctatcactga

SEQ ID NO: 364413 - DNA, 612 bp, Pseudomonas aeruginosa
atgccccacgccttgccgcccttgccttacgcctacgatgccctggaaccgcacatcgatgcgctgaccatggagatccaccacagcaagcaccaccagacctatgtgaacaacctgaacgccgcgctggaaggcacgccctatgccgagcagccggtggaaagtctgctgcggcaactggctggtctgccggagaagctgcgcaccccggttgtcaacaatggcggtgggcatgccaaccactcgctgttctggaccgtgatgtcgccccagggcggtggccgtcccgatggcgacctggggcgggccatcgatgagcagctcgggggcttcgaggcgttcaaggatgcgttcaccaaggctgcgctgacccgcttcggcagcggctgggcctggctcagcgtgactcctcagggcagcttgctggtggagagcagcggcaaccaggacagcccgctgatgaacggcaatacgccgatcctcggcctggacgtatgggagcacgcctattacctgaagtaccagaaccgccgcccggaatacatcggcgctttctacaacgtgatcgactggcgggaggtcgcgcgtcgctatgcgcaagccctggcctag

SEQ ID NO: 364414 - DNA, 903 bp, Pseudomonas aeruginosa
atgaaggcgttgctccatggcatcgccgaaggtaacgggcggacgctgcgcaacctgctgggcctgctgatcttcatcggcggcggctacctgctcggccgccacgcgctgttgctggccgagctcaacctgccggcgcccatcgtgctggcgttgaaaggcggcctgctctgcgccttcggtaccgctctcggggcgatgccggtgctggtggtgaagaccatgccggcgcgcctgtcggatgcgctgctgggcttcggtgccggcgtgatgctctcggcgacggccttctcgctgatcatgccggcgctatccgcggccggcgacctcggctactcgaagttcggcgcggggttcctggtcagtttcggcctggcggtcggcgtgatggggctgttcatcctcggccggctgatgccggacgtccatcccggttgcgagggcgcgccactgtccggtggcattcccccgcgcatcctgctgttcgtcacggccatcgtcctgcacaacatccccgaaggcatggcggttggcgtgtcggccggtgccggcctggacgaggccaacggcctcgccctgggcatcgctctgcaggatgtgccggaaggtctggtggtggcgctggtgctggccggagtcggtatgtcgcgtttcaaggcgatgctggtcggtgccgcgtcgggcctggtcgagccgctgttcgcggtgctctgcgcctggctggtcggcctctccgcgctgctcctgccctgggggctggccgccgcggggggagcgatgctcttcgtggtcacccacgagatcattcccgagtcccactgccagggacatgccgccgaggctacgctgggcctggtgttcggtttctgcctgatgatggtgctggataccgcgctgggctag

SEQ ID NO: 364415 - DNA, 273 bp, Pseudomonas aeruginosa; identical to SEQ ID NO: 320867

SEQ ID NO: 364416 - DNA, 861 bp, Pseudomonas aeruginosa; identical to SEQ ID NO: 320868

SEQ ID NO: 364417 - DNA, 465 bp, Pseudomonas aeruginosa
atgatccgacttgagcaaatcctgacccccggccgttccctcgtgaacgtgccgggcggcagcaagaaacgcgtactcgaacaaatcgccaacctggtagccagggagctgccggagttcgacgcccagaccatcttcgaaaacctggtggcccgggaaaaactcggttccaccggcttcggcaatggcatcgccattccgcactgccgcctgtctggctgccagagccccatcagcgccgtgctgcacctggatgctcccgtggacttcgacgcgctggacggcgcgccggtcgacctgctcttcgtcctgctggtaccggaggccgcgactgaagaacatctcgaactgctccggcagatcgccgccatgctcgaccgtgccgacgtacgcgaccgcctgcgcagcgctcccaccgccgaagcgctttatcagatcgtggtagacgtacagaacgggcaatga

SEQ ID NO: 364418 - DNA, 309 bp, Pseudomonas aeruginosa; identical to SEQ ID NO: 320870

SEQ ID NO: 364419 - DNA, 1494 bp, Pseudomonas aeruginosa
atgaaaccatcgctagtcctcaagatgggccagcagctgacgatgacgccgcagctgcaacaggccatacgcctcctccagctatccaccctggacctccagcaggaaatccaggaagcgctggaatccaatcccatgctcgaacgccaggaagacggcgacgatttcgacaacagcgaccctctcgccgatggcgccgaacaggcggccagcgcgccccaggagagccccctccaggaaagcgccacgcccagcgtcgaaagcctcgacgacgaccagtggagcgaacgcatacccagcgagttgccggtggataccgcctgggaagacatctaccagaccagcgccagcagcctgcccagcaacgacgatgacgaatgggacttcaccgcgcgcaccagcagcggcgagagcctgcacagccacctgctctggcaggtcaacctggcaccgatgtcggacaccgatcggatgatcgcggtgaccatcatcgatagcatcaacaacgatggctacctcgaagagtccctcgaagaaatcctcgccgccatcgatccggaactggacgtcgagctcgacgaagtggaagtcgtgctgcgccgcatccagcaactggaacccgccggcatcggcgcccgcaacctgcgcgagtgcctgctgctgcaactgcgccagttgccgtccaccacgccctggctgaacgaagcgctgcgcctggtatccgactacctcgacctgctcggcggccgcgactacagccaattgatgcggcgcatgaagctcaaggaagacgaactgcgccaggtcatcgagctgatccagtgcctgcatccccggcccggttcgcagatcgaatcgagcgaagccgaatacatcgtccccgacgtcatcgtgcgcaaggacaacgagcgctggctggtcgagctgaaccaggaggcgatgccacgcctgcgcgtcaacgccacctacgccggcatggtccgccgcgccgacagcagcgccgacaataccttcatgcgcaaccagttgcaggaagcccgctggttcatcaagagcctgcagagccgcaacgaaacgctgatgaaggtcgccacccagatcgtcgagcaccagcgcggtttcctcgactacggcgaagaagccatgaagccgctggtcctgcacgacatcgccgaagcggtgggcatgcacgaatcgaccatttcgcgggtcaccacccagaaatacatgcatacgccgcgcggcattttcgagctgaaatatttcttttcaagtcacgtcagtaccgccgaaggcggggaatgctcgtccaccgcgatccgcgcgatcatcaagaaactggtggccgcggaaaatgcgaaaaagccattgagcgacagcaagatcgctggtttactggaggcacagggcattcaagtggctcgccgcaccgtcgccaaataccgcgaatccctgggcatagccccttcgagcgagcgcaagcgactggtgtga

SEQ ID NO: 364420 - DNA, 726 bp, Pseudomonas aeruginosa; identical to SEQ ID NO: 342802

SEQ ID NO: 364421 - DNA, 528 bp, Pseudomonas aeruginosa; identical to SEQ ID NO: 342803

SEQ ID NO: 364422 - DNA, 573 bp, Pseudomonas aeruginosa; identical to SEQ ID NO: 342804

SEQ ID NO: 364423 - DNA, 540 bp, Pseudomonas aeruginosa; identical to SEQ ID NO: 342805

SEQ ID NO: 364424 - DNA, 975 bp, Pseudomonas aeruginosa; identical to SEQ ID NO: 342806

SEQ ID NO: 364425 - DNA, 810 bp, Pseudomonas aeruginosa; identical to SEQ ID NO: 342807

SEQ ID NO: 364426 - DNA, 798 bp, Pseudomonas aeruginosa; identical to SEQ ID NO: 342808

SEQ ID NO: 364427 - DNA, 474 bp, Pseudomonas aeruginosa; identical to SEQ ID NO: 342809

SEQ ID NO: 364428 - DNA, 648 bp, Pseudomonas aeruginosa
atgctgactcttctgcgtcgcggcctgctggtgttcctggcggctttcccgctgctttccatggcggcgccgaccccgcaacaggtggtgcagggcacggtcgacgaactgctttccgacatcaaggccaacaaggccgcctacaaggccgatccgcaaaagctctacgccactctcgaccgtatccttgggccggtggtcgatgccgaaggcatcgccaagagcgtgatgaccgtcaagtactcgcgccaggcctcacccgagcaaatcaagcgcttcgaggaagtgttcaagaacagcctgatgcagttctacggcaacgcgctgctcgaatacgacaaccaggacatccgcgtgctgcctagttcggccaagccgagcgacgatcgcgccagcgtcaacatggagatccgtgacagcaagggcacggtctatccggtctcctacaccatgaccaacctggccggtggctggaaggtccgcaacgtgatcatcaacggcatcaacatcggcaagctgttccgcgaccagttcgccgacaccatgcagaagaaccgcaacgacctcgagaagaccatcgccggctggggcgaggtggtcgccaaggccaaggaaaccgcgaaagcggaagaggccggggcgaaatga

SEQ ID NO: 364429 - DNA, 309 bp, Pseudomonas aeruginosa; identical to SEQ ID NO: 320881

SEQ ID NO: 364430 - DNA, 240 bp, Pseudomonas aeruginosa; identical to SEQ ID NO: 320882

SEQ ID NO: 364431 - DNA, 1266 bp, Pseudomonas aeruginosa
atggataaactgattattaccggcggtaaccgcctcgatggcgaaatccgcatttccggcgcgaagaactcggcgctgccgatcctggccgcgaccctgctggccgatactccggtcaccgtctgcaacctgccgcacctgcacgacattaccaccatgatcgaactgttcggccgcatgggcgtgcagccgatcatcgacgagaagctcaacgtcgaagtcgatgccagcagcatcaaaaccctggtcgcgccgtacgaactggtgaagaccatgcgtgcctcgatcctggtgctgggcccgatgctggcgcgcttcggcgaggccgaagtggccctgccgggcggttgcgcgatcggttcgcgtccggtcgacctgcatatccgcggtctcgaggccatgggcgcgcagatcgaggtcgaaggcggctacatcaaggccaaggcgccggccggcggcctgcgtggcggtcacttcttcttcgataccgtcagcgtgaccggcaccgagaacctgatgatggccgccgcgctggccaacggccgtaccgtgctgcagaacgccgctcgcgagccggaggtggtcgacctggccaactgcctgaacgccatgggcgccaacgtccagggcgctggctccgataccatcgtcatcgaaggcgtgaagcgcctcggcggtgctcgctacgacgtactgcccgaccgtatcgagaccggcacctacctggtggccgcggccgcgaccggtggccgggtgaagctgaaggataccgacccgaccatcctcgaggcggtcctgcagaagctggaagaggccggtgcccacatcagcaccggcagcaactggatcgagctggacatgaagggcaaccggccgaaggcggtcaacgtgcgtaccgcgccgtacccggcgttccccaccgacatgcaggcccagttcatctccatgaacgcggtagccgaaggcaccggcgcggtcatcgagacggtcttcgagaaccgcttcatgcatgtttacgaaatgaaccgcatgggcgcgcaaatcctcgtcgaaggcaacaccgccatcgtcaccggcgtacccaagctcaagggcgctccggtcatggcgaccgacctgcgcgcatccgcgagcctggtgatcgccggcctggtggccgaaggcgacaccctgatcgatcgcatctaccacatcgaccgtggctacgagtgcatcgaagagaaactccagctgctcggcgccaagatccgccgcgtaccgggctag

SEQ ID NO: 364432 - DNA, 636 bp, Pseudomonas aeruginosa; identical to SEQ ID NO: 320884

SEQ ID NO: 364433 - DNA, 1323 bp, Pseudomonas aeruginosa
atgaccgctcccttcgctatccgtcgactcaatgccgctgatccggacttcgggcgtcatctggatcatctgctgagctgggaaagtgtctccgacgattcggtcaaccagcgcgtcctcgacatcatcgccgccgtacgcagccgtggcgacgccgccgtggtcgagttcacccagcgcttcgacggtctccaggccgcctcgatggccgacctgatcctgccgcgcgagcgcctggagctggctctcacccgtatcaccgtagcccagcgcgaagccctggaagtcgccgccgagcgcgtgcgcagctaccacgagaagcagaagcagggttcctggcgctacaccgaggccgacggcacggtgctcggccagcaggtcaccccgctggaccgcgccgggctctatgtgccgggcggcaaggcgtcctacccgtcctcggtgctgatgaatgcgatcccggccaaggtcgccggggtgtccgaagtggtcatggtcgtaccgaccccgcgcggcgagatcaacgagatcgtcctcgccgccgcctgcatcgccggcgtcgaccgtgtcttcaccatcggcggggcacaggccgtggccgcgttggcctacggcaccgaaagcgtgccgcgggtggacaagatcgtcggccccggcaacatctacgtggctaccgccaagcgtcacgtgttcggccaggtcggcatcgacatgatcgccggtccctcggaaatcctcgtggtctgcgacggccagaccgatcccgactggatcgccatggacctgttctcccaggccgaacacgacgaagacgcccagtcgatcctggtcagtccggacgcggcgttcctggaccgcgtcgcggacagcatcgctcgcctgctgccgaccatggagcgcgccgagatcatccgcacctccctggaggggcgcggcgcgctgatccaggtcgccgaccaggcccaggcctgtgcggtcgccaaccgcatcgccccggaacacctggagctgtcggtggccgatccggaaagctggctgccggagatccgccatgccggcgcgatcttcatgggccgctacactgccgaggccctgggcgactattgcgccggcccgaaccacgtgctgccgacctccggtaccgcgcgtttctcttcgccgctgggggtatatgacttccagaagcgttcgtcgatcatcaactgctcggccgagggcgcttcggtcctcggtcgtaccgcctcggtgctggctcgcggcgagtcgttgaccgcccacgcgcgtagtgccgaataccgcatcctcgacgagaaggaggcctga

SEQ ID NO: 364434 - DNA, 1056 bp, Pseudomonas aeruginosa
atgagcaaattctggagtcccttcgtcaaggacctggtgccttatgtgccgggcgagcagccgaagctgtcgcggctggtcaagctgaacaccaacgagaatccctacggtccgtcgccacaggcgctcgccgcgatgcaggcggaactcaacgacgacctgcgcctgtatcccgatcccaacggcgagcggttgaagcaggcggtcgccgcgcactacggcgtacaggccaaccaggtgttcgtcggcaacggctccgacgaggtgctcgcgcacattttccatggcctgttccaacacgacctgccgctgctgtttccggacgtgacctacagcttctatccggtctattgcggcctgtacgggatcgcgcacgagaagatcgcgctggatgaaaggttccgcatccgcgtcgaagactacgcgcggcccaacggcggaatcatcttccccaatccgaacgcgccgaccggctgcctgctgccgctggacgccatcgaagcgatgctgaaggcgtcgccggattcggtggtggtagtcgacgaggcctatgtcgacttcggcggcgagagcgccatcgccctggtcgatcgctacccgaacctgctggtcacccagacgctgtccaagtcgcgctccctggccggcttgcgggtcggcctggcggtcggccatgccgatctggtcgaggcgctggagcggatcaagaacagcttcaattcctacccgctggatcgcctggcgatcgccggcgcggcggcggctttcgaggacgacgcctatttccgtcggacctgccaggcagtgatcgatagccgcgaggcgttgagcgcctctttgcaggcgctgggcttcgaggtactaccgtcggccgccaacttcgtcttcgcccgtcatccgcggcacgatgccgggcagattgcctcgaccctgcgcgagcagggagtgatcgtccgccatttcaagcaggcgcggatcgaccagttcctgcgtatcaccatcggcagtccggagcagaaccaggcgctactggacgccctgcacttcctcaagtga

SEQ ID NO: 364435 - DNA, 1170 bp, Pseudomonas aeruginosa
atgcccaaggccctgcgtttcctcggctggcccgtgctggtcggcgtgctgctggccctgctgatcatccagcacaaccccgagctggtcggcctgccacgccaggaggtgcacgtcgagcaggcgcctctgctcagccgcctgcaggaaggcccggtgtcctatgccaacgcggtgagtcgagcggctccggcagtggccaacctgtacaccaccaagatggtcagcaagccctcccaccccctgttcgacgacccgatgttccgccgcttcttcggcgacaacctgccgcaacagaagcgcatggaatcgagcctcggctcggcggtgatcatgagcgcggaaggctacctgctgaccaacaaccacgtgaccgctggcgccgaccagatcatcgtggccttgcgcgacggccgcgaaaccatcgcccagttggtcggcagcgacccggaaaccgacctggccgtgctgaagatcgaccttaagaacctgccggcgatgaccctcggccgctccgacggcattcgcaccggcgacgtctgcctcgccatcggcaacccgttcggcgtcggccagaccgtgaccatgggcatcatcagcgccaccggacgcaaccagctcggcctgaacacctacgaagacttcatccagaccgacgcggcgatcaaccccggcaactccggcggcgcgctggtggacgctgccggcaacctgatcggcatcaacacggcgatcttctccaagtccggcggctcccagggtatcggcttcgccatcccgaccaagctggccctggaggtcatgcagtcgatcatcgagcacggccaggtgatccgcggctggctcggcgtcgaggtcaaggcgctgaccccggaactggcggagtcgctgggcctcggcgaaaccgccgggatcgtcgtcgccggcgtctatcgcgacggtccggcggcacgcggcggcctgctgccgggcgatgtgatcctgaccatcgacaagcaggaagccagcgacggccgccgctcgatgaaccaggtggcgcgcacccgtccgggacagaagatcagcatcgtggtgctgcgcaacggacagaaggtcaacctgaccgccgaggtcggcctgcgtccgccgccggcaccggctccacagcagaaacaggacggcggcgagtga

SEQ ID NO: 364436 - DNA, 759 bp, Pseudomonas aeruginosa; identical to SEQ ID NO: 321458

SEQ ID NO: 364437 - DNA, 1104 bp, Pseudomonas aeruginosa
atgcgccgtaccgccctcgccctgcccctgttccttctggtctcagcatgcagcagcgaaccgacgccaccaccgaaacccgccgccaaaccccaggctcgcaccgtcatttcaccccgccccgtacgccagtcggtgcaaccgatactgccgctgcgcggcgattacgcgaacaatccggcggcacagcgcttcatcgacaggatggtcagccagcacggcttcaaccgccagcaactgcacgacctgttcgcccagacccagcgcctggactgggtgatccgcctgatggaccggcaagccccgacctataccccacccagcggaccgaacggcgcctggctgcgctaccggaagaagttcgtcacgccaggcaacgtacagaacggcgtgctgttctgggaccaatacgaaaccgacctgcaacgggcatcgcgcgtctacggcgtgccgccggagatcatcgtcggcatcatcggcgtggaaacccgctgggggcgtgtgatgggcaagacgcggatcatcgatgcgctgtccaccctgtccttctcctaccctcgccgcgcggaattcttcagcggcgaactggagcaattcctcctccaggcgcgcaaggaaggcaccgacccgctggccctgcgcggttcctatgccggcgccatgggctacggccagttcatgccgtcttcattcaccaagtacgcggtggacttcgatggcgatgggcatatcgacctgtggaatccgcgtgacgccatcggcagcgtcgccaactatttcaagcagcacggctgggtcagcggcgatcgcgtggcggttcccgccagtggccgggctccctcgctggaagatggcttcaagacgctgtacccgctggacgtgctcgcttccgccggattacgcccgcggggtccgctcggcggccaccggcaagccagcctgctgcgcctggacatgggcaggaactaccagtactggtacggcctgccgaacttctacgtgatcacccgctataaccacagcacccactacgcgatggccgtctgggaactgggcaaggaagtcgaccgggtgcgtcaccgctccgtcgtcaggcaggattag

SEQ ID NO: 364438 - DNA, 918 bp, Pseudomonas aeruginosa
atggtcgacaaactgacgcacctgaaacagctggaggcggaaagcatccacatcatccgcgaggtggccgccgagttcgataacccggtgatgctgtactcgatcggcaaggattccgcggtcatgctgcacctggcccgcaaggccttcttccccggcaagctgcccttcccggtgatgcacgtggacacccgctggaaattccaggagatgtacaggttccgcgatcggatggtcgaggaaatgggcctggacctgatcacccacgtcaacccggacggcgtcgcccagggcatcaacccgttcacccacggcagcgccaagcacaccgacgtgatgaagaccgagggactcaagcaggccctggacaagttcggtttcgacgctgccttcggcggcgcgcgccgcgacgaggagaagtcgcgggccaaggaacgggtctattcgttccgcgacagcaagcaccgctgggacccgaagaaccagcgtcccgagttgtggaacatctacaacggcaaggtgaagaagggcgagtcgatccgcgtcttcccgctgtccaactggaccgagctggacatctggcaatacatctacctggaaggcatcccgatcgtcccgctgtacttcgccgccgagcgcgaggtcatcgagaagaacggcacgctgatcatgatcgacgacgagcgcatcctcgagcatctctctgacgaagagaaagcccgcatcgagaagcgcatggtgcgcttccgtaccctcggctgctacccgctcaccggcgcggtcgagtccagcgccaccacgctgccggaaatcatccaggaaatgctcctgacgcgtacttccgaacgccagggtcgggtcatcgaccatgaccaggccggttcgatggaagaaaagaaacgtcagggctatttctga

SEQ ID NO: 364439 - DNA, 1902 bp, Pseudomonas aeruginosa
atgtctcatcaatccgatctgatcagcgaggacatcctcgcctacctggggcagcacgaacgcaaggaactgctgcgcttcctcacctgcggcaacgtcgatgacggcaagagcaccctgatcgggcgcctgctgcacgactccaagatgatctacgaggatcacctggaggccatcacccgcgactcgaagaaagtcggcaccacgggcgacgacgtcgacctggcgctgctggtcgatggcctgcaggccgagcgcgagcagggcatcactatcgatgtggcgtaccgctacttcagcaccgccaagcgcaagttcatcatcgccgacacgcccggccatgagcagtacacccgcaacatggctaccggtgcctcgacctgcgacctggcgatcatcctgatcgatgcccgctacggtgtgcagacccagacccgccggcacagtttcatcgcgtccctgctgggtatccggcatatcgtggtcgccatcaacaagatggacctgaagggcttcgaccagggtgtcttcgaacagatcaaggccgactacctggcctttgccgagaagatcggtctgaagaccagttcgctgcacttcgtgccgatgtcggcgctcaagggcgacaacgtggtcaacaagtccgagcgttcgccctggtacgccggccagtcgctgatggaaatcctcgaaaccgtcgagatcgccgccgaccgcaacctcgatgacatgcgcttcccggtgcagtacgtgaaccggccgaacctgaacttccgcggtttcgccggcaccctggccagcggcgtggtgcgcaagggcgacgaggtggtggccttgccgtcgggcaagggcagcaaggtgaaatccatcgtcaccttcgagggcgaactggagcaggccggtcccggccaggccgtcaccctgaccctggaagacgagatcgacgtttcccgcggcgacatgctggtgcatgccgacaatcgcccgctggtcaccgacggcttcgatgccatgctggtgtggatggccgaggagccgatgcttccgggcaagaagtacgatatcaagcgcgctaccagctatgtgccgggttcgattccgagcatcgtccacaaggtggacgtgaataccctggagcggaccccgggcagcgagctgaagctgaacgagatcgccagggtcaaggtcagcctggacgcgcccatcgcgctcgatggctatgagcagaaccgcaccaccggcgccttcatcgtcatcgatcgcctgaccaacggcaccgttggcgccggcatgatcgtctccgctccgccggcggcccatggcagcagcgcgcatcacggttcgaatgcccatgtgacgcgcgaggagcgtgccggccgcttcggccagcagccggcgaccgtactgttcagcggcctctccggcgccggcaagagcaccctggcctacgccgtggagcgcaagctgttcgatatgggccgcgcggtctacgtgctggacgggcagaacctgcgccacgacctgaacaaggggttgccgcaggaccgcgccggacgcaccgagaactggctgcgcaccgcccatgtcgccaagcagttcaacgaggccgggttgatcagcctctgcgccttcgtcgcgccgagcgcggaagggcgcgagcaggccagggcgctgatcggcgccgagcgcctgatcaccgtctatgtgcaggcgtcgccgcaggtctgccgcgaacgcgatccccaggggctgtatgcggcgggcgaggacaatatccccggcgagtccttcccctacgacgtgccgctggatgccgacctggtgatcgatacccaggcgctgagcgtcgaggacggcgtgaagcaggtgctcgacctgttgcgcgagcgccaggcgatctga

SEQ ID NO: 364440 - DNA, 447 bp, Pseudomonas aeruginosa; identical to SEQ ID NO: 321454

SEQ ID NO: 364441 - DNA, 630 bp, Pseudomonas aeruginosa
ttgtctacccgcgaaatccctgtatccatcgatggcccctgcgggccgctggaagccctgcacctcgatctgcccgatgcccgcggcatcgccctggtctgccatccgcacccgctgttcgccggcaccatgcagaacaaggtggtcgccactctgcaacgcagcgcccgcgatgccggcctggcgaccctgcgtttcaacttccgtggcgttggccagagcgccggcagctatggcgaggggatcggcgaaatcgacgacgccgaggccgccgcgcgctggttgctggcacgccatccggggctgccgctgacactgatgggcttttccttcggctcctgcgttgccggcaatctggcgggtcgcctggaggcggagggcgtcgggctggcgcggctgttcatgatcgcgccgccggtggagcgcttcgcggtcagcctgcctgcgcgctgcccgctgaccgtggtgcagccggaggacgacgacgtggtcacgccggccgcggtatatgcctggagcgagtccctggcacgaccgcacgagctgttgcgggtggcagaaagcggacatttcttccatggcaagctgatcgatctgaaggacctgttgctgccacgcctgcaggactga

SEQ ID NO: 364442 - DNA, 1347 bp, Pseudomonas aeruginosa
atgactactcgtatcctgaccggcatcactcctaccggcactccgcacctgggcaactacgccggcgccatccgcccggcgatcctcgccagccgtcggagcgacgtggattcgttctacttcctggcggactaccacgccttgatcaagtgcgacgatcccgctcgtatccagcgctcgcgcctggaaatcgccgcgacctggctggccggcggcctggacgtcgagcgtgcgaccttctaccggcagtcggacatccccgagattcccgagctgacctggttgctcacctgcgtcagtgccaagggcctgctcaaccgcgcgcatgcctacaaggccgcggtggaccgcaatgtcgaggccggcgaagacccggacgccggcgtgaccatgggcctctacagctatccggtgctgatggccgcggacatcctgatgttcaacgcgcacaagatcccggtcggccgcgaccaggtgcagcacgtggagatggcccgcgacatcggccagcgtttcaaccacctgttcggcaacggccgcgagttcttcgtcctgcccgaagcggtgatcgaggaaaacgtcgccaccctgccgggcctggacgggcgcaagatgtccaagagctacgacaacaccatcccgctgttcagcccgtccaggcagctcaaggacgccatcgcacgcatcgtcaccgactcgcgcgcgccgggcgagccgaaggacccggacagttcgcacctgttccttctttactcggccttcgccagcgccgaacaggtcgccgcgttccgccaggaactgctcgacggcctggcctggggcgaagccaagcagcgcctgttccagttgctcgacaacgaactgggcgaggctcgcgagcgttaccaggcgctgatcgccaagcccgacgatatcgaggacattctcctcgccggcgccgccaaggcgcgccgcatcgccaccccattcatcgccgagttgcgcgaggcagtcggcctgcgctccctgcgcgagccgctgaaaagtaccgagagcggcaagaagaaggccgccaaggctgcgcgcctggtcagcttccgcgacgacgacggcagcttccgcttccgcctgctggacgccgccggcgaacagctactgctgtcccgcgccttcgccgacggcaaggccgccggtgcggtgagcaagcgcctgctggctggcgagactgctgacctgcgggccgagggcaatgcctttggcctgtggctggatggcgaggcggtggcgcagagcccggccttcgccgacgccgccgcccgtgacgccgccatcgagcgcacccgcgaagcgctggcgccgcaggagtag

SEQ ID NO: 364443 - DNA, 1095 bp, Pseudomonas aeruginosa
atgacgcccctcgagcgctaccaggccgatctccaacgccccgatttcttccacgatgccgcacaggcgaatgccgtgaagcatctgcaacgcctctacgatgacctggtcgccgccgaccacgccaagcccggcctgttcggcaagctgctcggcaggaagtccggcgggccggtgaagggcctgtatttctggggcggcgtcggccgtggcaagacctacctggtggacactttcttcgagtcgctgccgttcgagcagaaggtgcgcacgcacttccaccgcttcatgaagcgggtgcacgaagagctgaagaccctcaagggcgagaagaacccgctgaccatcatcggcaagcgcttcgccgacgaggcgcgggtgatctgcttcgacgagttcttcgtctccgacatcaccgacgcgatgatcctcgccaccctgctggaagagctgttcaagaacggcgtgagcctggtggcgacctccaacatcgtgccggacggcctgtacaaggacggcctgcaacgcgcccgtttcctgccggcgatcgccctgctcaaggagcataccgagatcgtcaacgtcgatagcggcgtcgactatcgcctgcgcgcgctggagcaggccgagctgttccactggccgctcagcgaacaggtcgaggaggagatggcgcgcagcttcaaggccctgaccccggactgcgccaaggcccagcgcgacgaggcgctgatgatcgagaaccgcgagatccgcgcgcgcttgacctgcgacgacgtggcctggttcgaattccgtgagctgtgcgacggcccgcgcagccagaacgactacatcgagctggcgaagattttccacgccgtgctgatctccaacgtcgagcagatgggcgtcaccaaggacgacatggcgcggcgtttcatcaacctggtggatgagttctacgaccgcagcgtcaagctgatcatctccgccgaggtcgagctaaaggatctctacagcggcggccggctggagttcgaattccagcgcaccctcagtcgtctgctggaaatgcagtcccacgaatacctgacgcgtccgcaccggccctga

SEQ ID NO: 364444 - DNA, 963 bp, Pseudomonas aeruginosa
atgcgcctttatctgctcgccttcctggccctcttcggtatgaatgctatggccgccgacaactggaaagccttcccctacgaccagagcgcctatgactatccaggcgataagttgaaggaagcctggccgcgcctgacccgcggcttcggcgactatccctatccggacgccgactgggtggtgaacatggcgaccgcccatccggatgccctggaaaagaccgtgaaggccggcaccggcttcaccggcaagccggaagaggccgcgcaatatgcggcgcgcctgcaggatgtctggcgcctgctgttccgcggcgactacgcgaaggccaaggagcagggactggccctgggagtcggcggccaggtaccggcgatgttcgcccaggtgctctacgccatgttcctggctcccggccaggcggagaaacagcgcctgctcgaagaggtcatcgactacaccgaacaggccggcccgctggtcaaggccgatatcgtcgcccagttcggcagcgtctacgccaaggcgcgcctggccgaggagctatcggtaccggtagtgctcaagcgcggctataccagcgagatacccaaggaactggacgccctcctggccaggcaacccaaccagccgttcgccctggcgctctacggcggctacgaggcgggagtgatccgcaaggtcggcaagctggtcggcaagatgacctacggggtcagcgccgacaagatggaacagtacttcgcccgctccttccgccaggccaacgacctgccgatcggccactacgagtacgccaacgcgctgacctacgtatacggcgacgacgagcgggagaaggccatcgcccaactgaagcaggccgtggcgatcaagccgatcaacgccatggaagccctcgaagtggcccatgcgaagaagctcctcgccggcttcgagcagaacaccgcgcagcgctga

SEQ ID NO: 364445 - DNA, 999 bp, Pseudomonas aeruginosa
atgcgcgctcaatccgctccggtgctgaaacatgtcggcatcgtcgccatcgacggcgtcttcgcctcgaccctgatgcaggccaaggacttcttccacatggccagcctgcgccacggcaagcagcagggcctcggtctccagccggccttccgcacccgcatcctcagccccgacggccagccggtacgcagcttcagcggcgacagcatcgccgtcgacggtcccctcgccgcctgcgatatcgtggtcctgcccgccttctggggcgacttcgacgcgctcgaacagcgctatccgcaaatcgttccctggttgcgccgcagccatgccgagggaaccgccctctgcggcgaggcgaccggggttttctggctggcccaggcaggcctgctggatggcaaggaagcgaccacctactggcgcttctatcgggaattcgccgaacgcttcccgaacgtgctgctcaaccaggagaagcacctgactgatgccgacgacctgttctgcgccagcggcgtcacctccgcctgcgacctctacatctatctgatcgagcgtttctgcggcggatcggtggcccaggcggtggcccgggataccctctacgaagtacagcgcagctacaccccagggcgtatcggcttcggcggacagaagctgcaccatgacccgacgatcctgcagatccagcaatggctggaagaccacttcgccgacaagttccgtttcgaggacgtcgcccgcgaccacggcatgagcatccgcaacttcatgcggcgcttccaggccgctaccggcgacaagccgctgcactacctgcagcgactgcggatcgagaccgccaagggcatgctctcgagcacgcgcaagagcatcaagacgatcagctacgaggtcggctacgacgacgccagcttcttcgcccgcctgttccgccagcacaccgaactctctccccaccattaccgtcgccagttcatgcagaaggaaagctga

SEQ ID NO: 364446 - DNA, 1137 bp, Pseudomonas aeruginosa
atgataccgagaaccctgttcagctccgaccacgaactgtttcgcgacagcgtgcgcaagttcctcgaacaggaagccgtgcctttccatcaccaatgggaaaaggatgggcatgtcgaccgcgcgctctggaacaaggccggcgaggccggaatgctctgttcgcacctgccggaagagtatggcgggatgggcgcggacttcctctacagcgccgtggtcatcgaagagatcggtcgggccggcctgaccgggatcggtttctccctgcattcggacatcgctgcgccctacatcctccactacggcagcgaggcgctgaagcgcaagtacctgccgaagctggtatccggcgagatggtcgcggccatcgccatgaccgagccgggggccggttccgacctgcaaggggtgaagaccacggcggtactggatggcgacgagtacgtcatcaatggctcgaagaccttcatcaccaacggcttcctcgccgacctggtgatcgtggtggcgaagaccgatccgaaggctggcgccaagggcataagcctgttcgtggtcgaggcgggtacgccgggcttcagcaagggcaagcgcctggagaaggtcgggatgaaggcccaggatacctccgagctgttcttccaggatgtgcggattccccgggagaacctgctcggcaaggacggccagggattcatctacctgatgcaggagctgccgcaggagcgcctgaccgtcggtatcggcgcgctggcgtcggccgaggcggccctgcaatggacgctcgactacactcgcgagcgcaaggcgttcggcaagtcggtggcggacttccagaatacccgcttcaagcttgccgagatggctaccgagatccaggtcggccgggtcttcgtcgatcgctgcatggagctgcatctccagggcaagctggacgtacccaccgccgccatgtgcaagtactggacgacggacctgcaatgcaaggtgctcgacgaatgcgtgcagttgcacggcggctacggcttcatgtgggaatatccggtggcgcgggcctgggccgatgcccgggtacagcggatctacgccggtaccaacgagatcatgaaggagatcatcgcgcgggccctgtga

SEQ ID NO: 364447 - DNA, 1038 bp, Pseudomonas aeruginosa
atggagtatcgcccgctcggccgcaccgatctgaaagtcagcgccctctgcctcggcaccatgacctggggcgagcagaacagcgagcaggacgccttcgcccagatcgccagggccaaggccgccgggatcaatttcatggataccgccgaaatgtatccggtgccgccccgcgtcgagacctacgccagcaccgagcgcatcatcggcaactggttccgccgcagcagcgaccgcgccgactggatcctcgccagcaagatcgccggccccggcaacggcatcagccatgtacgcgacggcaacctcaagttcaaccgccagcacatcgtcgccgccctcgatgccagcctggagcgcctgcagacagactggctggacctctaccagttgcactggccggagcggcggaccaacttcttcggccagctcggctaccagcaccaggaagagagcttcacaccgctggaggaaaccctggaagtgctcgacgagcaggtgcgcgccggcaagatccgccacatcggcctgtccaacgagacgccctggggcaccatgaccttcctcaggctcgccgaggagcgcggctggccgcgcgcggtatcgatccagaacccctacaacctgctcaaccgcagcttcgaggtgggcctggcggaaatcgccatccgcgagcagtgcggcctgctggcctactcgccgatggccttcggcatgctttccggcaagtacgcggacggcgcccgcccggccaacgcgcgcatcagtctctacagtcgcttcacccgctacaccaacccgcaggcggaagcggcctgcgcgcgctacgtggcgctggcccgcgaacatggactggaaccggcgcagatggcactggcctacgtcacttcgcggccgttcgtgaccagcaacatcatcggcgcgacctcgctggaacagctggaaaccaatctcggcagcgtcgacctgaggctggacgaggaggtgctcgccggtatcgatgcgatccaccgggagcaaccgaacccggctccctga

SEQ ID NO: 364448 - DNA, 429 bp, Pseudomonas aeruginosa; identical to SEQ ID NO: 321446

SEQ ID NO: 364449 - DNA, 393 bp, Pseudomonas aeruginosa; identical to SEQ ID NO: 321445

SEQ ID NO: 364450 - DNA, 594 bp, Pseudomonas aeruginosa; identical to SEQ ID NO: 321444

SEQ ID NO: 364451 - DNA, 1212 bp, Pseudomonas aeruginosa
atgaacaagttcatggcttgggtcgatgcgcgttttcccgctaccaagatgtgggaagaccatctgagcaagtactacgcaccgaagaacttcaacttctggtatttcttcggctccctggcgctgctggtgctggtcaaccagatcctcaccggcatctggctgaccatgagcttcacgccgtcggccgaagaggcgttcgcttccgtcgaatacatcatgcgcgatgtcgactacggctggatcattcgctacatgcactccaccggtgcatcggcgttcttcatcgtggtctacctgcacatgttccgcggcctgctctacggctcctatcagaagccgcgcgagctggtgtggatcttcggcatgctgatctacctggcgctgatggccgaggccttcatgggctacctgctgccttggggtcagatgtcctactggggcgcccaggtgatcatttccctgttcggcgcgattccggtggtcggcgaagacctggcccagtggatccgcggtgacttcctgatctccggcatcaccctgaaccgcttcttcgccttgcatgtgatcgccctgccgatcgtcctgctcggcctggtcgtgctgcatatcctggcgctgcacgaagtcggttcgaacaacccggacggcgttgacatcaagaagaagaaggacgagaacggcgtaccgctggacggcatcgcgttccatccgtactacaccgtgaaggatatcgtcggcgtggtggtgttcctgttcatcttctgcaccgtgatcttcttcttcccggaaatgggcggctacttcctcgagaagcccaacttcgagatggccaaccagttcaagacccccgagcacatcgctccggtctggtacttcaccccgttctacgcgatcctccgcgcggttccggacaagctgatgggcgtggtggcgatgggtgcggcgatcgccgtgctgttcgtcctgccgtggctggatcgcagcccggttcgctcgatccgctacaagggctggctgagcaagctgtggctggtgatcttcgcggtgtccttcgtgatcctcggctactacggcgcccaggctccgagcccgctgggtactaccctgtcgcgcgtttgcaccgtcctgtatttcgccttcttcatcctgatgccgttctacacccggatggagaagaccaaaccggttccggaaagggtgactggctga

SEQ ID NO: 364452 - DNA, 783 bp, Pseudomonas aeruginosa; identical to SEQ ID NO: 321442

SEQ ID NO: 364453 - DNA, 618 bp, Pseudomonas aeruginosa; identical to SEQ ID NO: 342835

SEQ ID NO: 364454 - DNA, 408 bp, Pseudomonas aeruginosa; identical to SEQ ID NO: 321440

SEQ ID NO: 364455 - DNA, 579 bp, Pseudomonas aeruginosa; identical to SEQ ID NO: 342837

SEQ ID NO: 364456 - DNA, 594 bp, Pseudomonas aeruginosa; identical to SEQ ID NO: 321438

SEQ ID NO: 364457 - DNA, 246 bp, Pseudomonas aeruginosa; identical to SEQ ID NO: 321437

SEQ ID NO: 364458 - DNA, 1815 bp, Pseudomonas aeruginosa
atgatcgcttgcctgcgtccgctttctgctctgatcctggccggtctgctgaccgcctgcgcgacctcgtccaattccggactgggcgaacttccccgtacgccgaatgccagcatcgagcagttgttgcaacaggccagccagagcaagcccgaggaagcggcgctgctgcgcctctcggcagcggaccttgcctaccagcagaaggacctcgccaggtccaccgccatcctgggacagattccgctggaaagcctgaagccggcccagcaggtcttcgccagcaccctgaacgccgaactggccctcgcccgcagcaagcccaaggccgccctgcaggcattgcagcatccgagcatgcagcatctcagcgaactgccggtgacccagcaggttcgtacccagcgcgccaaggcccaggccctcgccgccgacggccaggtccttgccgcagccaaggagcgcatctacttcgcaccgctgctcgagggcccggcggtgatcgagaaccaggaaaagatctggaccctggtcagcagcctgccggtcgaccagttgcaaccgagcgccaacgaaggcgacctcagcggctggctgaccctggcacgcatcaccaagacctcgccgaccctgcagcaacagcaggccagcatcgagagctggcaacagcagaaccccgagcacccggcggccaagcacttgccggcggcgctggagaaactcaagacgctgtcccagcagccgctgacccgcatcgccctcctgctaccccagcaggggcagttggccaacgtcgcccgggccctgcaggacggcttcctcgccgcccacttccaggcccagcaggccggccagaatcctccttcgatcaagctctacgacagtacccaggtgcgctcgctagatgacttctaccgccaggcccaggccgatggcgtcgaactggtcgtcggtccactggagaagccgctggtcaagcaactcgctagccgcgagcaactgccgatcaccaccctcgcactcaactacagcgacaacagccaggaaggcccggcgcagctgttccagttcggcctcgccgccgaggacgaagcgcgcgcggtggccagccgggcctggggcgacggcatgcgccgggccgtggcgctggtgccgcgcggcgaatggggcgaccgcgtgttggccgccttcagccagagctggcagtccgcgggcggcagcctgatcgccgccgagcatgtcgaccagccggtacaactggcgcaacagatcgccgacctgctgcaactgcgccagagcgaaggccgcgcccagcgcctgcagggcgccctcggcagccagatcgccacccagccgtcgcgccgccaggacatcgacttcgtgttcctcgccgccaccccgcagcaggcccgccagatcaagccgaccctggccttccagtacgccggcgaccttccggtctacgccacttcgcacctctacaccgggaccaacaacccgacccaggaccaggacctcaacggcatccgcttctgcgagaccccgtggctgctcaaccccagcgacccgacccgccagcaggtcgccgcccaatggccccaggccaacggcagcatgggccgcctctacgccatgggcgtcgacgcctaccgcctcgctccgcgtctgcctgaactgaaggccgtgccgagcctgcagatcgacggcctgaccggtaccctgagcctgaatccgacccaacgtatcgaacgccagttgcaatgggccgagttccgcaatggccaggtccagccgctggggaccagcagcttttga

SEQ ID NO: 364459 - DNA, 849 bp, Pseudomonas aeruginosa
gtgtcagcaggcactctgttcgtagtggcgaccccgatcggcaatctcgacgacatcagcccgcgcgccctgcgggtgctgcgggaggtggccctggtggctgcggaggatacccgccattcgatccggctgttccagcacttcggcatcgagacgccattggcggcctgccacgagcacaacgagcgcgaggagggcgggcgcttcatctcccggctgcagggtggggaggacgtcgcgctgatctcggacgccggtaccccgctgatttccgatcccggcttccacctagtgcgccaggcacaggcgctgggtatccgggtggtcccggtgccgggctcctgcgcgctgatcgcggcgctgtcggcggcgggattgccgtcggaccggttcatcttcgaaggtttcctgcccgccaaggctgcgggacgacgcagccgcctccaggcggtacaggaagagccgcgcacgctgattttctacgaggcgccccatcgtctgctggaaagcctggcggacatgcgcgacgtgttcggcggggagcgccgtgcggtgctggcgcgggagctgagcaagaccttcgagaccattcgcagcctgccgttggccgaactgcacgattgggtcgcgtcggacagcaaccagcagcgcggcgagtgcgttgtgctggtggcggggtggcaggcgccggaaggcgaggagtcgatcggtgcggaggcgctcagggtgctcgacctgctgcttgccgagctgccgttgaagaaagccgcggcgctggcggcggaaattaccggggtgcgaaaaaaccttttgtatcaacaggctttgcaacgccaagggaagagttga

SEQ ID NO: 364460 - DNA, 405 bp, Pseudomonas aeruginosa
atgccgagtcggtatcgtgacgagctcgtttcgcgttgtgccggccagctcatcgtcactatcgacgcagtcgacccctgcctcaccgtttaccccttgcccgaatgggaactgatcgaagccaagctgcgcgagctgccttctttgcgagaagaaacgcggcgcctgcagcggctgctgatcggtaatgccgtcgatctggaactggacggaaacggacgtttcctgattccgccgcgcctgcgcgagtacgccaagctggacaagcgggcgatgctggtggggcaactgaacaagtttcagttgtgggatgaggatgcctggaacgccatggctgaagccgacctggcggcaatcaaacaacccggtgggctgccggacgaactacgcgacctgatcctttga

SEQ ID NO: 364461 - DNA, 942 bp, Pseudomonas aeruginosa
atgaatgccacctaccgccatatcaccgttctgctcgaggaggccgtttccgcactggccccgcgggaggacggctgctatctggacggtaccttcggaagagggggccatagtcgagccttgctcgagaaactgggcgccgggggacgcctgctcggattcgacaaagatccccaggccatccagacaggaaaagcattggcggccgaagacggccgcttcgtcattgtgcagcgctcgttcgccgaactgggcgatgaggtgcgcgcacgcggtctcgaagggcgggtcgatggcgtcctgctcgaccttggcgtgtcgtcgccgcaactcgacgatcccgagcgcggcttcagcttcctcaacgatggtccgctggacatgcgcatgaatcccggccagggcatcagcgcagcggagttcatcgccaacgccaccgaagaggaaatcgcccgggtcttcaaggaatatggcgaagaacgcttcgccaagcggatggcccgcgccatcgtgcagcgccgtcaggagcggccgttcgaacgaactgccgatctcgccgaagtgatcacggttgccaaccccgcctgggagaagggcaagaatccggcgacccgcgcattccagggcctgcgcatccatgtgaacaatgagctgggcgatctcgagcgtggccttgacgccgcgctcgaatcgctggccgtcggcggccggctggtggtgatcagtttccattccctggaagaccgcatcgtcaagctgttcatgcgcaagcacgccaagggcgaggcggacaacctgccgcgcgacctgccgatccgttccaaggtcttcgagccgcgcctgaagctgctgggcaagccgcagtacgcttcggaagaagaactcaaggccaacccgcgctcgcgcagcgcggtcatgcgcgtggcggagaagctgagatga

SEQ ID NO: 364462 - DNA, 294 bp, Pseudomonas aeruginosa; identical to SEQ ID NO: 321432

SEQ ID NO: 364463 - DNA, 1740 bp, Pseudomonas aeruginosa
atgaaactgaattatttccagggcgccctctacccatggcggttctgcgtgatcgtcggcctgctgctggcgatggtcggcgccatcgtctggcgaatcgtcgacctgcacgtgatcgaccatgacttcctcaagggccagggcgacgcgcgtagcgtgcggcatatcgccatccctgcgcaccggggcctgatcactgaccgcaacggcgaaccgctggcggtgagcaccccggtcaccaccctgtgggccaaccccaaggagctgatgaccgccaaggaacgctggccgcaactggcggcggcgctcgggcaggataccaagctgttcgccgaccgcatcgagcagaacgccgagcgcgagttcatctatctggtccgtgggctgaccccggagcagggcgaaggcgtgatcgccctgaaggtgcccggcgtgtactccatcgaggagtttcggcgtttctacccggctggcgaagtggtggcccatgcggtcggctttaccgatgtcgacgaccgcggtcgcgaaggtatcgagctggctttcgacgaatggctggccggcgtgccgggcaagcgccaggtgctcaaggatcgccgtggccgcgtgatcaaggacgtgcaggtcaccaagaatgccaaaccgggcaagacccttgcgctgtccatcgacctgcgcctgcagtacctggctcatcgcgaactgcgcaacgctctgctggaaaacggcgccaaggccggcagcctggtgatcatggacgtgaagaccggggagatcctggccatgaccaaccagccgacctacaacccgaacaatcgtcgtaacctgcagccggcggccatgcgcaaccgggcgatgatcgacgtgttcgagccgggctcgacggtcaagccgttctcgatgagcgcggcgctggccagcgggcgctggaaacccagcgatatcgtcgacgtctacccgggcaccctgcagatcggccgctacaccattcgcgacgtatcgcgcaattcgcggcaactcgatctcaccggcatcctgatcaagtcgagcaacgtcggcatcagcaagatcgccttcgacatcggcgccgaatccatctactcggtcatgcaacaggtcggccttgggcaggacacggggttgggcttccccggcgagcgcgtcggcaacctgcccaaccaccgcaagtggccgaaggcggaaaccgcgaccctggcctacggctacggtctctcggtaaccgcgatccagttggcgcatgcctatgcggccctggccaacgacggcaagagcgtgccgctgagcatgacccgagtcgaccgcgtgccggatggcgtgcaggtgatctcgcctgaagtggcttccaccgtgcagggcatgctgcaacaagtggtcgaggcccagggcggggtgttccgcgcccaggtgccgggttaccacgccgccggcaagagcgggaccgcgcgcaaggtctcggtcggcaccaagggctatcgggaaaacgcctatcgctcgctgttcgccggtttcgccccggccaccgatccgcgcatcgcgatggtcgtggtgatcgacgagccgagcaaggcgggctacttcggcggcctggtgtcggcgccggtgttcagcaaggtcatggctggcgcgctgcgcctgatgaacgtgccgccggataacctgccgacggccaccgaacagcagcaggtcaatgctgcgcccgcaaaaggagggcgtggctga

SEQ ID NO: 364464 - DNA, 1464 bp, Pseudomonas aeruginosa
atgcctatgagcctgaaccaactgtttccccaggccgagcgcgatctgctgatccgcgagctgaccctggatagccgcggcgttcgtccgggcgacctgttcctggcggtgccgggcgggcgccaggatggtcgtgcgcacatcgccgatgccctggccaagggcgcggctgccgtggcttacgaggcggaaggcgccggagagctgccgcccagcgatgcgccgctgatcgcggtgaaggggctggccgcgcaactgtcggcggtcgccgggcgtttctacggcgagccgagccgcgggctggacctgatcggcgtcaccggcaccaacggcaagaccagcgtcagccaactggtggcccaggccctggatctgctcggcgagcgctgcggcatcgtcggcaccctcggcaccggtttctacggcgccctggagagcggccggcacaccacgccggacccgctcgcggtgcaggccacgctggccacgctgaagcaggccggcgcccgcgcggtagcgatggaagtgtcttcccacggcctcgaccagggccgcgtggcggcgctcggtttcgatatcgcggtgttcaccaatctgtcccgcgaccacctcgactatcacggttcgatggaagcctatgccgccgccaaggccaagctgttcgcctggccgggcctgcgctgccgggtgatcaacctggacgacgatttcggccgtcgactggccggcgaggagcaggactcggagctgatcacctacagcctcaccgacagctcggcgttcctctattgccgcgaagcgcgcttcggcgacgccggcatcgaggcggcgctggtcactccgcacggcgagggcttgctgcgcagcccgttgctcggccgcttcaacctgagcaacctgctggcggcggtcggtgcgttgcttggcctgggttatcccctgggcgatatcctccgcaccttgccgcaactgcaggggccggtcggccgcatgcagcgcctgggaggcggcgacaagccgctggtggtggtggactacgcgcatactcccgacgccctggaaaaagtcctggaggccctgcgtccgcacgcggccgcgcgcctgctgtgtctgttcggctgcggtggcgatcgcgatgccggcaagcgtccgctgatggctgcgatcgccgaacgcctggcggatggggtgctggtcaccgacgacaacccgcgcaccgaggccagtgcggcgatcatcgccgatatccgcaaaggcttcgctgccgctgacaaggttaccttcctgccgtcgcgcggtgaggcgatcgcccatctgatcgcttccgctgcggtggatgacgtggtgctcctggccggcaagggtcacgaggattatcaggagatcgacggcgtacgccatccgttctccgacatcgagcaggccgagcgcgccctggccgcctgggaggtgccgcatgcttga

SEQ ID NO: 364465 - DNA, 1377 bp, Pseudomonas aeruginosa
atgcttgagcctcttcgcctcagccagttgacggtcgcgctggacgcccgcctgatcggcgaggacgccgtcttttcggcggtttccaccgacagtcgcgccatcgggcccggccaactgttcattgccctgagtgggccgcgtttcgacggccacgactatctcgccgaggttgccgccaagggcgcggtggctgcgctggtggagcgcgaagtcgccgacgcgcccctgccgcaattgctggtgcgcgatacccgtgcggccctggggcgactgggcgcgctgaaccggcgcaagttcaccggcccgctggcggccatgacgggctccagcggcaagaccacggtcaaggagatgctcgccagcatcctgcgtacccaggccggcgatgccgagtcggtgctggctacccgtggcaatctgaacaacgacctcggcgtaccgctgaccctgctgcaactggcgccgcagcaccgtagcgcagtgatcgaactgggcgcctcgcgcatcggcgagatcgcctacacggtcgagctgacccgcccgcacgtggcgatcatcaccaatgccggaaccgcccatgtcggcgagttcggcggaccggagaagatcgtcgaggcgaagggcgagatactcgaagggctggccgccgacggcaccgccgtactgaacctggacgacaaggccttcgacacctggaaggcccgtgccagcggccgtccgttgctgactttctccctcgaccggccccaggccgatttccgcgccgccgatctgcagcgcgatgcgcgcggctgcatgggcttcaggctgcagggcgtagcgggtgaagcgcaggtccagctcaacctgctggggcggcacaatgtcgccaatgccctggctgccgccgctgccgcccatgcactgggcgtgccgctggatgggatcgtcgccgggctgcaggcgctgcagccggtcaagggccgcgcggtagcgcaactgaccgccagcgggctgcgtgtgatagacgacagctacaacgccaaccccgcgtcaatgctggcggcgattgatatactgagcggcttttccgggcgcaccgtcctggtcctcggagacatgggcgaactcggttcctgggccgagcaggcccaccgcgaggtgggcgcctacgccgctggcaaggtgtccgcgctctatgcggtcggaccgctgatggcccacgccgtacaggcgttcggcgccacgggccggcacttcgccgaccaggccagcctgatcggggcgctggccaccgaacaaccgacaaccaccattttgatcaagggttcccgcagtgcggcgatggacaaagtcgtcgcggcgctgtgcggttcctccgaggagagtcactaa

SEQ ID NO: 364466 - DNA, 1083 bp, Pseudomonas aeruginosa
atgctcctgctgctggccgaatacctgcaacagttctacaagggcttcggcgtcttccagtacctgaccctgcgcggcattctcagcgtgctcaccgcgctgtcgctgtcgctgtggctggggccctggatgatccgtaccttgcagatccgccagatcggccaggccgtgcgcaacgacggtccgcagtcgcacctgtcgaagaagggcaccccgaccatgggcggcgccctgatccttaccgccatagccatcagcacgctgctgtgggcggatctttccaaccgctacgtgtgggtagtgctggtcgttaccctgctgttcggtgccatcggctgggtggacgactaccgcaaggtgatcgagaagaactcccgtggcctgccgagccgctggaagtacttctggcagtcggtgttcggcatcggcgccgccgtgttcctctacatgactgccgaaaccccgatcgagaccaccctgatcgtgccgatgctgaagagcgtcgagatccagttgggcatcttcttcgtggtcctgacctacttcgtcatcgtcggctcgagcaatgcggtgaacctcaccgacggtctcgacggcctggcgatcatgccgacggtaatggttgccggcgcgctgggcatcttctgctacctgtcgggcaacgtgaagttcgccgagtacctgctgattcccaacgtaccgggcgccggcgagctgatcgtgttctgcgccgcgctggtcggcgccggcctcggcttcctctggttcaacacctatccggcgcaggtcttcatgggcgacgtcggcgcgctggcgctgggcgccgcgctgggcaccatcgcggtgatcgtgcgccaggagatcgtgctgttcatcatgggtggggtgttcgtcatggaaaccctctcggtgatgatccaggtcgcttccttcaagctgaccggacgccgcgtcttccgtatggcgccgatccatcaccatttcgaactgaaaggctggccggagccgcgcgtgatcgtgcgcttctggatcatcaccgtgatcctggtgctgatcggcctcgccaccttgaagctgcgttga

SEQ ID NO: 364467 - DNA, 1347 bp, Pseudomonas aeruginosa
atgagcctgatcgcctccgaccacttccgcatcgttgtcggcctcggcaagagcggcatgtccctggtgcgctacctggcgcgccgcggcttgcctttcgccgtggtcgatacccgagagaacccgccggagctggccaccctgcgtgcccagtatccgcaggtggaagtgcgttgcggcgaactcgacgccgagttcctctgctccgcccgcgaactctatgtcagccccggcttgtcgctgcgcacccccgcgctggtacaggccgccgcgaaaggcgtgcgcatctccggtgacatcgatctcttcgcccgcgaggcgaaggccccgatcgtcgccatcaccggttccaacgcgaagagcaccgtgaccaccctggtgggcgaaatggcggtggccgcggacaagcgtgtcgccgtcggcggcaacctcggcaccccggcgctcgacctgctggccgacgacatcgagctgtacgtgctggagctgtcgagcttccagctggaaacctgcgatcgcctcaacgccgaggtggcgaccgtgctgaacgtcagcgaagaccatatggatcgctacgacggcatggctgactaccacctggccaagcaccggatcttccgcggtgcccgccaggtcgtggtgaatcgcgccgatgccctgacccgaccgctgatcgccgataccgtgccgtgctggtcgttcggcctgaacaagccggacttcaaggctttcggcctgatcgaggaagacggccagaagtggctggcgttccagttcgacaagctgctgccggttggcgaactgaagatccgtggcgcccacaactattccaacgcgctcgccgcgctggcgctgggccatgcggtcggcctgccgttcgacgccatgctcggcgcgctgaaggcgttttccggcctggctcatcgctgccagtgggtacgcgagcggcagggcgtgagctactacgacgattccaaggccaccaacgtcggcgccgccctggcggcgatcgaggggctgggtgccgacatcgacggcaagctggtgctgctcgccggcggagacggcaagggcgccgatttccatgacctgcgcgagccggtcgcgcgcttctgccgggcggtggtactgcttggccgtgacgccgggctgattgcccaggcactgggcaacgcggtaccgctggtgcgcgtcgcaacgctggacgaagcagtccggcaggccgccgagctggcccgcgaaggcgatgcggtgctgttgtcgccggcctgcgcgagcctggacatgttcaagaacttcgaagaacgcggacgcctgttcgccaaagccgtagaggagctagcgtga

SEQ ID NO: 364468 - DNA, 1200 bp, Pseudomonas aeruginosa
atgctgtcggtgttgcgccccttcccgtcgccgctgttgagccggcacggcatcgacctggacttcccgctgctggcgggttgcctggcgctgctcggcctcggcctggtgatggtgacttccgcctcttccgaggtggcggcggcgcagtcgggcaacccgctgtacttctccgtccgtcacctgatctacctggtgatcggcctgatttcctgcggcctgaccatgatggtcccgatggccacctggcagcgttggggctggaagctgctgctggtcgccttcggcctgctggtgctggtgatcacccccggcatcggccgcgaggtgaacggctcgatgcgctggatcggcttcggcctgttcaacatccagccttcggagatcgccaaggtctgcgtggtgatcttcatggccggctacctgatccgccgccagcaggaggtccgggaaagctggatgggcttcttcaagcccttcgtggtgttgctgccgatggccggcctgctgctgcgcgagccggacttcggcgccaccgtggtaatgatgggcgctgccgcggccatgctgttcctcggcggggtggggctgttccgcttcggcctgatggtgctgctggcggtcggcgcggtggtcctgctgatccagacccagccctaccggatggcacgcctgaccaacttcaccgacccctgggccgaccagttcggcgccggctatcagttgagccaggcgctgatcgccttcggccgcggcggctggttgggcatgggactgggcaacagcatccagaagcagttctacctgccggaggcgcacaccgacttcgtcttcgccgtgcttgcagaggagctgggcatcgtcggcgccctggcgaccgtcgccctgttcgtgttcgtcagcctgcgcgcgctgtacatcggcatctgggccgagcaggccaagcagttcttctccgcctacgtggcctacggcctggccttcctctggatcggccagttcctgatcaacatcggggtgaacgtcggcctgctgccgaccaagggcctgaccctgccgttcctcagctacggcggcagttcgctggtgatctgctgtgcctgtctggggatgttgctgcgcatcgaatgggaacggcgaacccacctgggtagcgaggaatatgagttcaacgaagaggactttgccgatgaaaggtaa

SEQ ID NO: 364469 - DNA, 1074 bp, Pseudomonas aeruginosa
atgaaaggtaatgtcctgatcatggcgggtggcaccggcggacacgtgttcccggcactcgcctgtgcgcgggagttccaggcgcgcggctatgccgtgcactggctggggacgccgcgcggcatcgagaatgacctggtacccaaggccggcctgccgttgcacctgatccaggtcagcgggctgcgcggcaagggcctgaagtcgctggtcaaggcgccgctggaactgctcaagtcgctgttccaggcgctgcgggtgatccgccagctgaggccggtctgcgtgctcggcctgggtggctatgtcaccggcccgggcggcctggccgcgcgcctcaacggcgtgccgctggtgatccacgagcagaacgccgtggccggcaccgccaaccgcagcctggcgccgatcgccaggcgcgtctgcgaggcattcccggataccttcccggccagcgacaagcgtctgaccaccggcaatccggtgcgcgccgagctgttcctcgacgcgcatgcccgcgcgccgttgaccggccgtcgggtcaatctgctggtgctcggcggcagccttggcgcggaaccgctgaacaagctgttgccagaggccctggcgcaggtgccgctggaaatccgtccggcaatccgccatcaggccggtcgtcagcatgccgagattaccgccgagcgttatcgcacagtggcggtcgaagcggacgtcgcgcccttcatcagcgacatggccacggcctatgcctgggccgacctggtgatctgtcgcgccggcgcgctgaccgtcagcgagctgacggcggcgggattgcccgccttcctggtgccgttgcctcacgcgatcgacgatcaccagacccgcaatgccgaattcctggtacgcagcggcgccggccgcctgctgccgcaaaagtctaccggcgcggccgaactggccgcgcagctgtccgaggtcctgatgcatcccgaaaccctgcgctccatggcagaccaggcacgcagcctggcgaaacccgaggctacccggacggtggtcgatgcctgcctggaggtggcccgtggttaa

SEQ ID NO: 364470 - DNA, 1443 bp, Pseudomonas aeruginosa
gtggttaaagaaccgaatggcgtcacccggaccatgcgccgtatccgccgcatccatttcgtcggcatcggcggcgccggtatgtgcgggatcgccgaagtgctgctgaacctcggctacgaggtatccggctcggacctcaaggcctcggcggtgactgagcgcctggagaagttcggcgcgcagatcttcatcggccaccaggcggaaaacgccgacggcgccgacgtgctggtggtgtccagtgccatcaaccgggccaacccggaagtggcatcggccctggaacggcggattccggtggtgccgcgtgcggagatgctcgccgagctgatgcgctaccggcacggcatcgcggtagccggcacccacggcaagaccaccactaccagcctgatcgcctcggtgttcgccgccggcggcctggacccgaccttcgtcatcggcggccggctgaacgccgccgggaccaacgcccagctcggcgccagccgctacctggtggccgaggccgacgagagcgacgccagcttcctgcacctgcaaccgatggtcgcggtggtcaccaatatcgacgccgaccacatggcgacctacggcggcgacttcaacaagctgaagaagaccttcgtcgagttcctccacaacctgccgttctacggactggcggtgatgtgcgtggatgatccggttgtgcgtgagatcctcccgcagatcgcccgcccgaccgtgacctacggcctcagcgaagacgccgacgtgcgcgcgatcaacatccgccaggaaggcatgcgcacctggttcaccgtgttgcgcccggagcgcgagccgctggacgtctcggtgaacatgcccggcctgcacaacgtgctgaattccctggcgaccatcgtcatcgctaccgacgagggcatctccgacgaagccatcgtccaggggctgtccggcttccagggcgtaggccggcgcttccaggtctacggcgagctgcaggtcgagggtggcagcgtgatgctggtggacgattacggccaccatccgcgcgaagtcgccgcggtgatcaaggcgatccgtggcggttggccggagcgtcgcctggtgatggtctaccagccgcatcgctatacccgtacccgcgacctgtacgaagacttcgtgcaggtgctgggcgaagccaacgtgctgctgttgatggaggtctatccggccggcgaagagccgatcccgggagccgacagccgccagctgtgccacagcatccgccagcgcggccagcttgacccgatctacttcgagcgcgacgccgacctggcgccgctggtcaagccgctgctgcgcgctggcgacatcctgctttgccagggcgctggcgatgtcggcggcctggccccgcaactgatcaagaacccgctgttcgccggcaagggagggaagggcgcatga

SEQ ID NO: 364471 - DNA, 960 bp, Pseudomonas aeruginosa
atgaacctttgcctcgatagcctgctgaacggcacccaggatcccaaggcgttcggccgtgtcgccgtgctgttcggcggcaagagcgccgagcgcgaggtgtcgctgaagtccggcgcgatggtcctgcaatccctgctggccgccggggtcgatgccttcggcatcgatgtcggcgaagacctgctgcaacgcctggtcgaggagaagatcgaccgtgccttcatcattctccacggtcgtggcggcgaggatggcagcatgcagggcctgctcgagtgcgcgggcattccctacaccggcagcggcgtgctggcctcggcgctggcgatggacaagctgcggaccaagcgggtctggctcagcctcggcctgccgaccccggactacgcggtgctggccagcgaggatgactgccgcgaagcggcgcagcgactgggtttcccgctgatcgtcaagccggctcacgaaggctcgagcatcggcatggccaaggtcggcgggctcgacgaattgatcgcggcgtggcgcgaagcggcccgctacgactcgcaggtgctggtcgagcagtggatcagcggcccggaattcaccgtggcgaccttgcgcgggcaggtgctgccggcgatccgcctgggtacgccgcacaccttctacgactacgacgccaagtacctggccagcgatacccgctaccaggtgccctgcggtctcgacgaggccaaggaacgcgagctgaaggaactcaccgcgcgcgcctgcgacgccctgggcatccagggctgggggcgggcggacgtgatgcaggacgccgaagggcgtttctggctgcttgaagtcaacaccgcaccgggcatgaccgaccacagcctggtgcctatggccgcgcgggccgccggcctggatttccagcaactggtgctggcgatcctggccgatagccgcgaggcgaggggataa

SEQ ID NO: 364472 - DNA, 864 bp, Pseudomonas aeruginosa; identical to SEQ ID NO: 342854

SEQ ID NO: 364473 - DNA, 1254 bp, Pseudomonas aeruginosa; identical to SEQ ID NO: 342855

SEQ ID NO: 364474 - DNA, 1185 bp, Pseudomonas aeruginosa
atgtttgaactggtcgataacatcgcacaaaccgccgtcataaaagtgatcggtgtaggtggtggtggcggcaacgccgtcaatcacatggccaagaacaacgtcgagggcgtcgagttcatctgcgccaacaccgacgcacaagcgctgaagaacatcgcggcgcgcaccgttctgcaactcggcccgggcgtcaccaaggggctgggtgccggcgccaatccggaagtcggtcgtcaggcggctctggaagatcgcgagcgcatttccgaagtgctggaaggcgccgacatggtcttcatcaccaccggcatgggtggcggcaccggtaccggcgccgcgccgatcatcgccgaagtggcgaaggaaatgggcatcctcaccgtcgcggtggtgacccgcccgttcccgttcgaaggtcgcaagcgcatgcagatcgccgacgagggcatccgcgcgctggccgagagcgtcgattcgctgatcaccatcccgaacgagaagctgctgactatcctcggcaaggacgccagcctgctggccgcctttgccaaggccgatgacgtgctggccggtgccgtgcgcggtatctccgacatcatcaagcgtccgggcatgatcaacgtcgacttcgccgacgtgaagaccgtcatgagcgaaatgggcatggcgatgatgggtaccggctgcgccagcggtccgaaccgtgcccgcgaggccaccgaggcggcaatccgcaacccgctgctggaagacgtcaacctgcagggcgcgcgcggcatcctggtgaacatcaccgcgggtccggacctgtccctgggcgagtactccgatgtcggcaacatcatcgaacagttcgcttccgagcacgccactgtgaaggtgggcaccgtgatcgacgcggacatgcgcgatgagctgcacgtcaccgtagtcgccaccggcttgggcgcgcgcctggagaaaccggtgaaggtcgtcgacaacaccgtgcagggcagtgcagcccaggcagccgctccggcccagcgcgagcagcagtcggtgaactaccgcgacctcgaccgtcctaccgtgatgcgcaaccagtctcacggcagcgcggcgaccgcggccaagctgaacccgcaggatgacctggattacctggatatcccggcgttcctgcgtcgtcaggccgattga

SEQ ID NO: 364475 - DNA, 912 bp, Pseudomonas aeruginosa
atgatcaaacaacgcaccttgaagaacatcatccgggctactggcgtcggtctgcactcgggggaaaaggtttacctgaccctgaaaccggcgccggtggacaccggtatcgtgttctgccgcaccgacctggatccggtcgtggaaatcccggcccgggccgagaacgtcggcgaaaccaccatgtcgaccaccctggtcaagggtgacgtcaaagtggatacggtggagcacctgctctcggccatggccggcctgggtatcgacaacgcctacgtcgagctgtccgcttcggaagtgccgatcatggatggcagcgctggtccgttcgtattcctgatccagtccgccggattgcaagagcaggaagctgccaagaagttcatccgcatcaagcgcgaagtcagcgtggaagagggcgacaagcgcgccgtcttcgttccgttcgacggcttcaaggtcagcttcgagatcgatttcgatcatccggtcttccgtggtcgcacccagcaggcctcggtcgatttctccagtacttccttcgtcaaggaggtcagccgcgcccgtaccttcgggttcatgcgcgacatcgagtacctgcgttcgcagaacctggcactcggcggtagcgtggagaacgcgatcgtggtcgacgagaaccgcgtgctcaacgaagacggcctgcgttacgaggacgagttcgtcaagcacaagatcctggatgccatcggcgacctgtatctgctcggcaacagtcttatcggcgagttccgtggcttcaagtccggccatgccctgaacaaccaactgctgcgtacgttgatcgcagacaaggatgcttgggaagtggtgaccttcgaagacgcgcgtaccgcgcctatttcctatatgcgcccggcggcggcagtgtag

SEQ ID NO: 364476 - DNA, 462 bp, Pseudomonas aeruginosa
atgtcttttcgtcccttgcccgcccaggcatcgacccagttgctgcgccaggccaggccgctgcagatgctgttcgccgaagcccggcgcatctgccgcctgcagcaactgctggaaagccagttgcaaccggcggcgcgcccgtactgccatgtggcttcgtggcgcggcggttgcctgctgctgatcgtcaccgatggccactgggccacacgcctgcgctatcagcagcggcgcctgcagcggcagctgcaggctttcgaagaattcgcgaacttagcgaaaatccttttcaaggtgcaacccaccacgtccacacaacgtgcggcacgtcgcagcttgaccctgtctgccgtcgcggcggaaaaccttcgcgaatccgccgagatcgtcggcaatccacgcctgcgggaagcgctcgagcggttggcaagccgcgccgagaaaagccggcaagaataa

SEQ ID NO: 364477 - DNA, 924 bp, Pseudomonas aeruginosa
atgcacatcatttttctgagccggcaccatggggccgctcgctccgtccatctgcagccgcggttgctgatgctggccggggcctgcgtggtcggtgccagcctgttggccgggggcttcctgggcgcctggctgttccgcgcgccggctccggtggccggcatcgaagtcgatgccgcgctgcaggcgcagagcgccgagatcagcagcgcccgcgaggacgcgcagcggcagatggacgcactgagcgtgcatctcggcgaactgcaggcgcgcctggttcggctggatgccctcggcgaacgtctcaccgagctggccgacgtcgaccccgacgagttcgacttctccctgagcgtcggccagggtggcgtcgacgaaccgctggagggcagcgcctatgccccgccgtcgttcatggcgacgctggacgaactggcggcacgcctggatacccgcgagcagcagctcgaggtgctggagcaactgctcgccgacaagcacatcagccagtcgacctacctggccggccagccggtgcgccagggctacatctcctcgccgttcgggcgccgggtcaatccggtgagcggccgcctgagcatgcacaagggcatcgacttcgccgcgccggccggcagcgacgtggtggccgtggcggcgggggtggtgacctggtccgggcgcaagaacggctatggcaacgtggtcgaggtcgggcacgccgatggctacaccacgttgtatgcccataaccagaagaacctggtcgaggtcggtgacctggtcaagcgcggccaggtgctggccaaggtcggcagcaccggacgctccaccggctaccacgtacatttcgaagtgatgaaggatggccgggtaatgaatccgcaaagcttcatcgcacgcgcgtctgtttccgagtga

SEQ ID NO: 364478 - DNA, 2751 bp, Pseudomonas aeruginosa
atgtttgcgcctttgttgaagaaactctttggaagcaagaacgagcgtgatgtaaagcgcatggccaaggctgtacaggccatcaatgcgctcgagccccagatggtggcgctctccgacgagcagttgaaggcgaaaacggctgaattccagcagcgctacgccaagggcgaaacgctcgaccaattgctgcccgaagccttcgccgtggttcgcgaggctggcaagcgggtgatgggcatgcgccacttcgacgtccagctgatcggtggcatgaccctgcacgacggcaagatcgccgaaatgcgtaccggcgagggcaagaccctggtgggcaccctgccggtctacctcaacgcgctgtccggcaagggcgtgcacgtggtcacggtgaacgactacctggcgcgccgcgacgccaactggatgcgcccgctgtacgagttcctcggcctcagcgtcggcgtggtcactcccttccagccgccggaagacaagcgcgccgcctacgccgccgacatcacctacggcaccaacaacgaattcggcttcgattacctgcgcgacaacatggccttcagcctggacgacaagttccagcgcgagctgaacttcgccgtggtcgacgaagtggactcgatcctcatcgacgaggcgcgtaccccgctgatcatctccggccaggccgaagacagctccgagctgtacatcaagatcaacaagctgatcccgcgtctcaagcgccaggtcgaagaggtcgagggcaagccgaccgaggaaggccactacagcatcgacgagaagacccgccaggtcgaactcaacgagcagggccaccagttcatcgaggacctgctgagccagaacggcctgctcggcgaaggcgagagcctctactcggcgcacaacctgagcctgctgacccacgtctacgcagcgctgcgcgcgcacaccctgttccaccgcaacgtcgagtacatcgtccagggcgaccagatcctcctgatcgacgagcacaccggccgcaccatgcctggccgtcgcctgtccgagggcctgcaccaggccatcgaggcgaaggaaggcttgccgatccaggccgagagccagaccctggcctccaccaccttccagaactacttccgcctgtacaacaagctggccggcatgaccggcaccgccgataccgaggccttcgagttccgccagatctacggtctcgacgtggtggtgatcccgacccaccggccgatcgcgcgcaaggacttcaacgacctggtctacctgacccaggaagagaagtacgcggcgatcatcaccgacatcaagcagtgccaggccctcggccggccgatcctggtcggcaccgcgtcgatcgagagttccgagtacgtttccaagctgttgcaagaggcaggcatcgagcacaaggtgctcaacgccaagtaccacgagaaggaagccgagatcatcgcccaggctggcgcgcccggttcggtgaccatcgccaccaacatggccggccgcggtaccgacatcctcctcggcggcaactgggaagtcgaagtcgcggccctggagaaccccaccgaggagcagatcgcccagatcaaggccgaatggcagaagcgccaccagcaggtgatcgaggcgggcggcctgcacgtgatcgcctccgagcgccacgaatcccgccggatcgacaaccagttgcgcggccgtgccggtcgtcagggcgacccgggttccagccgcttctacctgtcgctggaagacaacctgatgcggatcttcgcctccgaccgggtgaagaacttcatgaaggcgctgggcatgcagtccggcgaggcgatcgagcaccgcatggtgaccaacgccatcgagaaggcccagcgcaaggtcgaagggcgcaacttcgacatccgcaagcaactgctggaattcgatgacgtagccaacgagcagcgcaaggtgatctaccacatgcgcaataccctgctgtcggcagaggacgtgggcgagaccatcaaggaattccgcgaggaaaccctcagcgccaccatcaaccagcacattccgccgcagtcgctgcccgagcagtgggacatcgaaggcctggaggctgcgctgtacagcgacttcgccgtgcgcctgccgatccagcagtggctggacgaagacgacaagctgtacgaggaaaccctgcgtagcaagatcctcgagcagatcgtcgccgcctactacgagaaggaagagctggccggcgccgaagccctgcgcgccttcgagaagcagatgctgctgcgggtactggacgacctgtggaaggaccacctgtcgaccatggaccacctgcggcacggcatccacctgcgtggctacgcgcagaagaatccgaagcaggaatacaagcgcgagtccttcaccctgttccaggagctgctggactcgatcaagcgcgacaccatccgcgtgctgtcccacgtccaggtccgtcgcgaagacccggccgaagaggaggcccgcctgcgtcgcgaggcggaggaactggccaagcgcatgcagttccagcacgccgaggctccctcgatggagcaggccgtggccggcgaggaagaagagcttcccgagggcccggctccggtcgtgccgctcgagcctgtgcgcaacgagcagaagatcggccgcaacgagccttgcccgtgcggttccggcaagaaatacaagcactgccacgggcagctggactaa

SEQ ID NO: 364479 - DNA, 1218 bp, Pseudomonas aeruginosa
atggctgtcggtcttggccccctgtccaccctgcacccggtccccggtttcgaactcggcatcgcttccgccggcatcaagcgaccggggcgcaaagacgtggtggtcatgcgctgcgccgaaggctccagcgtggccggggtgttcaccctgaacgcgttctgtgccgcgccggtgaccctggccaaacagcgtttcctcggtgaggtgcgctacctgctgaccaataccggcaacgccaacgccggtaccggcgaggccggcctcgccgccgccgcgcaaacctgcgccaagctcgccgaactggccggggtcgccgagacttcggtgctgccatattccaccggggtgatcggcgagcccctgccggtggccaagatcgaggcggcgttgcctgcggccctggccgacctggccgaggaccgctgggccgaagctgccgcggggatcatgaccaccgataccctgcccaagggcgccagccgccagttcgtgcacgatggcgtgaccgtgaccgtcaccgggatcagcaagggcgccgggatgatcaagccgaacatggcgaccatgctcggttatatcgccaccgacgccaaggtcgcccagggcgtgctgcaggatctgttgcgcgacgccgccaacaagtccttcaaccgcatcaccatcgacggcgatacctccaccaacgactgctgcatgctgatcgccaccggtcgcgcggcgctgccggaagtcacccaggccagcggcgcgctgttcgccgcgttgaagcaagcggtactggaggtttccatggagctggcccaggccatcgttcgcgacggcgagggcgcgaccaagttcgtcactgttcaggtcaacggcggcgccacccaccaggagtgcctggatgtcggctatgccgtggcccactcgccgctgatcaagaccgcgctgttcgcctccgacccgaactggggacgcattctcgccgcggtcggacgtgccggcgtggccaatctggacgtgagcaagatcgacgtgttccttggcgacgtctgtatcgccagccgtggcggccgggcggccagttacaccgaggaacagggcgcggcggtgatggcccaggccgagatcggcatccgcatcgaactgggacgcggcacctgcagcgagaccatctggaccaccgacctgtcccacgaatacgtgaagatcaacgcagagtaccgcacctga

SEQ ID NO: 364480 - DNA, 636 bp, Pseudomonas aeruginosa; identical to SEQ ID NO: 342862

SEQ ID NO: 364481 - DNA, 948 bp, Pseudomonas aeruginosa
gtgaaacgagtacatgtcgccgcggccgtgattcgtggctccgatggccgggtgctgatcgcccggcggccggaagacaagcaccagggcggcctgtgggagtttcccgggggcaaggtggaggacggcgagccggtgcgcgcggcgttggcccgtgagctggaagaggaactgggcatccgtgtcgagcgggcccggccgctgatccaggtccggcacgactatgccgacaagcacgtcttgctcgatgtctgggaggtcgacgggttttccggcgaagcccacggcgccgagggccaaccgctggcctgggtggagccgcgcgagctggccgactacgagttccccgccgccaacgcgccgatcgtccaggccgcgcgcctgccggcgcactacctgatcaccccggacggattggagccgggcgagctgatcagcggcgtacgcaaggcggtggaggcgggcatccgcctgatccagttgcgcgcgccgaacatgttcagtcccgaataccgcgatctcgccatcgatatccagggactctgcgccggcaaggcgcaactgatgctgaaaggcccgctggagtggctgggcgacttcccggctgccggttggcacctgacctccgctcaactgcgcaaatacgccagcgccggtcggccgttccccgaagggcgcctgctggccgcctcctgccacgacgcggaggaactggccctggctgcctcgatgggagtggagttcgtcaccctttcgccggtacagccgaccgagagccatcccggcgagccggcgctgggttgggacaaggccgccgaactgatcgccggcttcaaccagccggtctacctgctgggtggcctcggtccgcagcaagccgagcaggcttgggagcatggagcccagggcgtggcgggtatccgtgcgttctggccgggcggcctttga

SEQ ID NO: 364482 - DNA, 579 bp, Pseudomonas aeruginosa
atgggcaatcgattgtcgaagatctacacccgtaccggcgaccgcggcgagaccggcctggccggcggacgccgggtgcccaagagccatccacgcatcaaggcgatcggcgcggtggacgaattgaacagccagttgggcctgctccttgccgagttgctggaagcgcgtggcgcacatcccggcctggaggagatcgtccaggcgctggcgccggtgcaacaccgcctgttcgacctcggcggggagctggcgatgccggagtatcgggccctggacgagacggaagtggcacgcctggaaagctgcatcgaccgctggaacgacgagttgggcccgctgaagaatttcatcctccccggcggttcccgcctggtcgcccaggcccatgtctgccgcagcctggcgcgcagtgccgaacggcgctgccaggcgctggaccaggaggaaacgctggagggcgtcggcctgtgctacctgaaccggctctccgacctgctgttcgtcgccgcccgcgccatcgcccggcgccagggcgtggcggagattctctgggaggcggcggcaaaaccggactga

SEQ ID NO: 364483 - DNA, 2097 bp, Pseudomonas aeruginosa
atgaacctgcgccagcgcctcgacaacctgcccgtagggcagaaactgctcgccgccctgctgatcctgctggctaccgtgctgctggtggccaacctggcgttcatcagcgccgcctactggatttcccaggagagcgtcgccccccaggcgatgcagaccatcggccggctgatcgccaacccggcgctcagccagccggcactcagttcgccgcagaccgccgaggtcctgctgcgccagctcaacgattaccagccgttgcgcgccgcggccctgtacgacagcaatgggctgatgctggccgacctgcaacgcggcgacaccctcaagctgccggcccgcctggaccgcctggagcactggaggcgcggcgagtaccgcctcaacgcgctgatcgaactgccccaggaaaacgcccgccccggctacctgctgctggtggccagcggtgaactgccgagcgcgttctacaccggaaccctcaccgccagcctggcgatcctcggcgtcagcgtgctgctctggctgctggtggcgcagcagatacgccgcctgatcacccggccgatccgcgatctcgaggaactgtcgcggcaggtcacccgcgaggagaactacgccctccgcgcccagcgcggcaacggcgacgagatcggccgcctggccgacgcgttcaacaccatgctgacccgcatcgaggcccgcgagcagcagctcaagcgcgcccgcgacgatgcccaggaagcggtcgagcaggcccagagcctggccgaggaaacccgccgctcgaaccgcaagctggaactggaagtgcaggtgcgcagcaagatcgagaagaagctcaccggtttccagcactacctcaacagcatcatcgactccatgccttcggcgctgatcgcggtggacgagcaactctacgtcacgcagtggaaccaggaggccagccagctttccggcaccagcctggacgatgcggtcaaccagccggtgttcctcgcctttccctcgctcaagccgttccttccgcagctcacccgggctgccgagaagcacagcgtggagcgtgtcgaacgggtcacctgggcgctgatcgacacgccacgccactacgccctgaccttctacccgctgatgggcggcaccggccgcggcgcggtgatccgcatcgacgacatcacccagcggctgagcctggaagaagtgatggtgcaatcggagaagatgctctcggtcggcagcctcgccgccggcatggcccacgagatcaacaacccgctcggcgcgatcctgcacaacgtgcagaacatcaagcggcgcctgtccccggagctggcgaagaacgtcgagctggcggccgaggtcggagtgccgctggaagacatcaatcactacctcgacggccgcgacatcccgcgcctgctggaaggcatccagcacgccggctcgcgggcagcgaagatcgtcacccacatgctcgccttcagccgccgcagccaccggcagatgaccgcttgcgaactgcccgcactgctcgaacaggcggtggaaatcgccggtaacgacttcgacctggccgaaggcttcgacttcaagtcgttgcagatcgtccacgagttcgaccccaacctcggcccggtgccggtgatcgccaacgaggtcgagcaggtcctgctcaacctgctgaagaacgccgcccaggccatccaccagcgcgacgacgaagaggaaggcgaacagggccggatcgtcctgcgcacgcgcctgacgccgccctgggcggaagtccaggtggaagacaacggcagcggcatgcccgaactggtgcgcaagcgtatcttcgagccgttcttcaccaccaaggaagtcggccagggcaccggtctcggcctgtccgtctcgtatttcatcatcaccaacaatcacaagggccagatggaagtacgctcggaactgggccgcggcacctgcttcagcatccgcctgccgctggaaagctccgaagcggtcgccccggcacaagccaaggccctgccgcccgctctgccgcaacccggtagcagcctgcggcggggcgacgaagaggaaggttga

SEQ ID NO: 364484 - DNA, 912 bp, Pseudomonas aeruginosa; identical to SEQ ID NO: 321410

SEQ ID NO: 364485 - DNA, 1101 bp, Pseudomonas aeruginosa
atgcccgccggtgtggcggagaccgacgatttcttcccgatggcgcgcgcgaccgcggccgggacccggcctcccgcgacgaaccgggcccttgccggcagcgtaccggcgcccatcctcttctcgagtccgttcatgcccaaccccgatctcagcatcctggtcgtcgacgacgccaagttttccagcgccatgatcggccgcgccctcagccaggccggctaccaggacatccgcttcgccagcagcgccagcgaggccctgcagcagctcgaacaacgcccggtcagcgtgctcctggccgactggctgatgccggagatggacggcctggaactgaccgcccgggtccgccaactggacgaaagcatcaaccactacacctacatcgtcctgctcaccggcaaggaaggcgagaacgtcctcggcgaggccttcgaccgcggcgtcgacgacttcgtcagcaaggccgcgatgaacgagcaactggtgccgcgcatctacgcagccgaccgcctgtgcaacaccctgcaacggttgctggtggaaaaccgcctgctcaccgaaaacatcgcgcggatggaagaacgcaacctggtggataccctcaccggcctcggcaatccccgctacctgcgacagaagctggccgacagcctgcgccaggtggaaacccgcggtggagcgctgtgctacctgctggtcggcatgcccgaggcaccggtcctgcgccagcggcacggcgaggccttccatcgcgagctgctgctcggcgtggccaggcgcctgcaacagctggtccggccgctggacgtgctggtgcgcctggacgagcagcatttcgccctgatcaccctggtggaggacctgcacgaatgctcgtcgagcagcttcaagcggctgcacgacgggctcaacctgaaggccttcaagaccagcgaaggcttcatcagcctgaaagccggcatcgccatgctcggcctcgacagcggggcattgccgctgggcatcgacgaactgctgcagcgcaccgaggccctgttgcccgatgcctatgccagcggcaggatcgcaacctgccggctaccggcactgcgctag

SEQ ID NO: 364486 - DNA, 480 bp, Pseudomonas aeruginosa; identical to SEQ ID NO: 321408

SEQ ID NO: 364487 - DNA, 837 bp, Pseudomonas aeruginosa
atggaattgaactacgaccgactggtgcagcagaccgagtcctggctgccgatcgtgctggagtacagcggcaaggtcgccctggcgctgctgaccctggcgatcggctggtggctgatcaacaccctgaccggccgggtcggcggcctgctcgccaggcgcagcgtcgaccgcaccctgcaaggcttcgtcggcagcctggtgagcatcgtcctgaagatcctgctggtggtcagcgtggcttccatgatcggcatccagaccaccagtttcgtcgccgccatcggcgccgccggcctggccatcggcctggccctgcaaggcagcctggctaacttcgccggcggcgtgctgatcctgctgttccgcccgttcaaggtcggcgactggatcgaggcacagggcgtggccggcaccgtggattcgatcctgatcttccacaccgtgctgcgtagcggcgacaacaagcggatcatcgtgcccaacggggcgctgtccaacggaacggtgaccaactactccgccgagccgctgcgcaaggtgatcttcgacgtcggcatcgactacgacgccgatctgaagaatgcgcagaacattcttctggccatggccgacgatccgcgggttctgaaggacccggcaccggtggcggtggtttccaatctcggcgaaagcgcgattaccctgtccctgcgggtctgggtgaagaacgccgactactgggacgtgatgttcatgttcaacgaaaaggcccgcgacgcgctgggcaaggaaggtatcggcattcccttcccgcagcgggtggtcaaggttgtgcagggcgcgatggccgactga

SEQ ID NO: 364488 - DNA, 1785 bp, Pseudomonas aeruginosa
atgactcagcaatcctggcgagaggccctggtcgcctacaagtctcccgccagcctggccctcctgctgctcggcttcgccgccggcctgccgaccatgctggtgttcaacaccctgtcggtgtggctgcgcgaagccggcgtggcgcgggataccatcggtttcgccagttggctggggctggtgtacgccttcaagtgggtctggtcgccgatgctcgaccagtggcgcctgcccttcgtcggccgtctcggccggcgccgttcctggctggtgttctcgcaggtgctgatcgccctgggactgctcggcatggccctgtgcaatccgcagagccacctgccctggctgatcggcctggccctgctggtggcgttcgcctccgccacccaggacatcgcgatcgacgcctaccgcctggaaatcgccgaggatagccgccaggccgccctcgctgcctgctacatgaccggctaccgcgcggcgatcctgctggccagcgccggcgcgctgattctcgccgaatggttcggctccaccagcctcaactacagccagtcggcctggggcctgacctatgcgttgttcgccctgctgatcctgcctgggctggtcaccagcctgctgatccgcgagccggcggtggacgtgccgatccacgtcaacccgtcgcgtttcgacttcaaccaccaactgctctcggtgctcctgctgctgatcctgctgatctcgctgccggcgatgatcaccgccctcctcgaccgcgcctggccgcgcgccggcctctacgcgctgctcatggggatctgcctgtcgccgtggggacgccagcagatccgcccggtccgcgaactgctcgccaccgtgcgcaggccgctgctggtggcggcgcgcggcaaggaagtgccgctgttcgatttcgtccaccaggcggtctcggtgatggtgctgatcatcctcctcgtcaccgtcaccgccatgtgccgcgcctactactccggcgcctggccgcgcggcacgctgttcctgctgatcgccgcgtcctgcctgtcggcacccggacgcctgctgatggccccggtgctgacgccgatcaccgagttcgtccagcgctatcgctggcaggccctgctgctgctcggcctgatctccacctatcgcctgtcggacacggtgatgggggtgatggccggggtcttctacatcgacatgggcttctccaaggaagtcatcgccagtgtcagcaaggtcttcggcgtactcatgaccctgatcggcgccgccgccggcggggtgctgatcgcccgcttcagcatcctctccatcctgttcatcggcggtgccgcttcggctgccaccaacctgctgttcgccatgctcgcccagctcggcccgctgcacgccgaggccctgcccagccatgacgtgatcagcctggtgatggcgctcgagccgcacgtgctgatgctggtgatgaccatcaccctcgacaacttcagcggcggcctcgccgcctcggccttcgtcgcctacctgtcgagcctgaccaacctgaagttctccgccacccagtacgccatgctcagctcgaccatgctcctgctgccgcgcttcatcggcggctactccggaaccatggtcgagagcctcggctacgagcacttcttctacgtcaccgcggtgatgggcattcccaccctgctgctgatcggctggttgtggctgcgccgcgcgccgtccagcgagacgccggcgccgggacaccagaacgccgagcagcactga

SEQ ID NO: 364489 - DNA, 384 bp, Pseudomonas aeruginosa; identical to SEQ ID NO: 342871

SEQ ID NO: 364490 - DNA, 969 bp, Pseudomonas aeruginosa
atgctcctggccggccccgcgctggccgacaccgtatggctggacaacggcgaccgcctgtccggcgagatcgtgctgatggacggcggcaagctggcgctgaagacccgttatgccggccaggtgctgatcgattggaaggatatcgacaccatcagttccgacaaacccctgctgatcaagcagcagggcgtatccgggcagcgtagccgaaccctggaggcggcgggcaagggcatggtgcggatcgtcgatggcggcagccataccgtcccgctggccagtattcgccagatggtgccgccgcgaccgctggtggaggacctggtctgggagggcaatctcgacgtcaagctggatagcaagcgcaacgacagcgacaaggacgaatggaagctcaagggcgatacccggcttcgccacggtgcctggcgccacgtgctggcgggggaagtggagcgggaaaagaaggacgggcgcaaggtcgaggacaactgggagctggactacgacctcgatcgcttcttcgacgaacactggttctggcgcggcagctattcgcagaagcacgatgcgatcgacaacctggagcgccagagcgcgctgggaaccggccccggctaccagttctgggacgacgaactcgggcgtttcgacctggtcgccgagatcagtcgctggcaactggagtggcgcgatcagccgcgcgaggatttcacctcctattcgctggagtgggactacaagcggctgctcgccggcacccggctggagctgtacagcaaggggaccgtgctggttcccggcatcgagcggatcgactacctgctcgacagcgaatacggcctgcgctatcgcctgaacagttgggcgcgtctttcgttcctctatgaactggaccagttgcgcaccgaggggggcacccagtccgaccggcattacctgatcggggtcggcgtcggctggtga

SEQ ID NO: 364491 - DNA, 930 bp, Pseudomonas aeruginosa; identical to SEQ ID NO: 321403

SEQ ID NO: 364492 - DNA, 759 bp, Pseudomonas aeruginosa; identical to SEQ ID NO: 321402

SEQ ID NO: 364493 - DNA, 540 bp, Pseudomonas aeruginosa
ttgaattcttccccggctggcgccaactactggtggtaccgggggcaaacgggccccgccaaggactctgaaatgcgcgctttcctctttctgctgttgctcttcccgctggtcgagctggccgtcctgatcaaggtcggcagtgtcatcggggtcggctggaccctgttcctgatcgtcgccagcgccttcatcggtgccgcattgttgcgcgtggccggcgtggccaccgcctggcgcgcccgcgaacgactggcccgtggcgaactgccggagcaggaaatgctcgaaggcctgttgatcgccgtcggcggcggcctgctgatgctgccgggtttcatcagcgacatcttcggcatcctctgcctgattcctttcacccgtcgcctgatgctcggcggcctgcgccgccgcgtcgaacagcaggcgctgcgccggcgcgccttcgccgacgacctgaacgcccgctacggacagggtccgtcgcggccgaacgtcatcgagggcgagtacgagcgccgcgacgattcgcgcaactga

SEQ ID NO: 364494 - DNA, 294 bp, Pseudomonas aeruginosa; identical to SEQ ID NO: 321399

SEQ ID NO: 364495 - DNA, 1644 bp, Pseudomonas aeruginosa
atggctgccaaagaagttaagttcggcgattccgctcgcaagaaaatgctggtcggcgtgaacgtgctggccgatgccgtcaaggccaccctcggcccgaaaggccgcaacgtggttctggacaagtccttcggcgctccgaccatcaccaaggacggcgtttccgtcgccaaggaaatcgagctgaaagacaagttcgagaacatgggcgcgcaactggtgaaagacgttgcctccaaggccaacgacgctgccggtgacggcaccaccaccgcgaccgtcctggcccaggccatcgtcaacgaaggcctgaaggccgttgccgccggcatgaacccgatggacctgaagcgtggtatcgacaaggccaccgtggccatcgtcgcccagctgaaagagctggccaagccctgcgccgacaccaaggccatcgcccaggtaggcaccatctccgccaactccgacgagtccatcggccagatcattgccgaagccatggaaaaagtcggtaaagaaggcgtgatcaccgtcgaggaaggctcgggcctggaaaacgaactgtccgtcgtcgaaggcatgcagttcgatcgcggctacctgtccccctacttcgtgaacaagccggacaccatggctgccgagctggatagcccgctgctgctgctggtcgacaagaagatctccaacatccgcgaaatgctgccggtgctggaagccgtcgccaaggccggccgtccgctgctgatcgtcgccgaggacgtcgagggcgaagccctggccaccctggtggtgaacaacatgcgtggcatcgtcaaggtcgcggccgtcaaggctccgggcttcggcgaccgccgcaaggccatgctgcaggacatcgccatcctcaccggcggtaccgtgatcagcgaagaagtcggcctgagcctggaaggcgctaccctggagcacctgggcaacgccaagcgcgtcgtgatcaacaaggaaaacaccaccatcatcgatggcgccggtgtgcaggctgatatcgaagcccgcgtcctgcagatccgcaagcagatcgaggaaaccacttccgactacgaccgcgagaagctgcaagagcgcctggccaagctggccggcggtgttgccgtgatcaaggtaggcgctgccaccgaagtcgagatgaaagagaagaaagcccgcgtcgaagacgccctgcacgctacccgtgcagcggtggaagagggcgtggttcccggcggcggcgtagccctggttcgtgccctgcaagccatcgaaggcctgaagggtgacaacgaggagcagaacgtcggtatcgccctgctgcgtcgcgccgtcgaatcgccgctgcgccagatcgtggccaacgccggcgacgagccgagcgtagtggtcgacaaggtcaagcagggctccggcaactacggcttcaacgctgctaccggcgtgtacggcgacatgatcgagatgggcatcctggacccggccaaggtcactcgttccgctctgcaggctgcggcctccatcggcggtctgatgatcaccaccgaagccatggttgccgagatcgtggaagacaagccggccatgggcggcatgcctgacatgggcggcatgggcggcatgggcggcatgatgtaa

SEQ ID NO: 364496 - DNA, 687 bp, Pseudomonas aeruginosa
atgcgcccagtcctgctgctttgctgcctgttcctgtccgccaccgcccaggccgaggattgctcgccgcaaacctctgtcggtagctggtgcgagctgccgctcgcggccctccacccgacccagcagaatgtcggcctgctgcaggtcgaggatgaccaggccaagctcgccgggaagaagcccaaggctctcgagcgctacttgcgcaagaaggagattccggtggtgatcggccccggcggccgcttctacctcaccgatcgccatcacctgagtagcgcgctctggcgcctggacccgaaacagggcgtgccggtgaaggtgatcggccggctaccccaggccagcgacttctgggagaagatgcaggaaaaccactgggtctggctgcacgatgcgcgtggcgcggagatcccgcccgaggccctgccggacgctctcgccgggcttggcgacgatccctaccgcgccctggccggctacgccgaggacgagaacgccttcgacaaggatcggcagagctatttcatcgaattccactgggcgcgctatttcggcgaacgcatgcactggcggccgatcagccgcgccactctgcccgacgacctgaagcaggcactgcgcctggcctgcgaaccggcggcaagggagctgccgggctaccgccaggactgcccgcactga

SEQ ID NO: 364497 - DNA, 384 bp, Pseudomonas aeruginosa; identical to SEQ ID NO: 321396

SEQ ID NO: 364498 - DNA, 330 bp, Pseudomonas aeruginosa; identical to SEQ ID NO: 321395

SEQ ID NO: 364499 - DNA, 795 bp, Pseudomonas aeruginosa; identical to SEQ ID NO: 321394

SEQ ID NO: 364500 - DNA, 684 bp, Pseudomonas aeruginosa
atgcgaatactggtggtcgaagacaaccgcgacatcctggccaacctggccgattacctgtcgctcaagggctataccgtggattgcgcgcaggacgggctgtccggcctgcacctggcggccaccgagcactacgacctgatcgtgctcgacgtgatgctgccgggaatcgacggctatgccctgtgccggcgcctgcgcgaagacgcacggcgcgacaccccggtgatcatgctcaccgcccgcgaccagttggacgatcgcctgcaggggtttcgttccggagccgacgattacctggtcaagcccttcgccctttccgaactttccgcacgcatcgaggcggtgctgcgtcgcgcccagggtggcggccgccgcgagctgagcgtggccgatctcagctatgacctggacaccctggaggtcaagcgcgcgggcaagtcgctcaagctcaatccgatcggcctaaagctgctcgcagtgctgatgcagaagagcccccatgtggtgcgccgggatgccctggaagaagcggtctggggcgacgactgcccggacagtgacagcctgcgcagccacgtccatcaactccgtcaggtgatcgacaagccattctccgtggccttgctgcatacggtgcatggcgtcggctaccgcctggcggaggagccgaatggagtataa

SEQ ID NO: 364501 - DNA, 1281 bp, Pseudomonas aeruginosa; identical to SEQ ID NO: 342884

SEQ ID NO: 364502 - DNA, 705 bp, Pseudomonas aeruginosa
atggctcccgatctggcatccctgcaacgtatctccggcgactccgccatcgaccagtggttgcaggtacccggcagctgggtcgaggagcccaacgagcgccgcggcggggcgagcggcgtgcagcgggtgtacaccggcgatggacggctgctctatcgcaagcagcagaccggccacgtctaccgcgactggcagcgccctttcggctatcccaccgccatgcgcgagcgcgatgcgctacgggccttcgagtcgctcggtatacgcgtgccgcgcctgatctattccggctgccgcaaggtcgacgggcaatggcaggcgctgctggtgaccgaagccctggagggtttctccagcctcgacgagtgctatgcgcgcggtgaccaggaccgctggggcgaagcgaagcaccaaagaattctgcaacaaatcggcgctaccattgcccggatgaatctcgcccactggcagcacggttgtctctatccgaagcacatcttcgtccgcgtcgagggtgaggccatcgaagtagcgctgatcgacctggagaagagccgccgccgccttacggtgaacaaggcgtcccagcacgacctgaagcagttgaagcgccgttcgtcgtggactggcgcgcagtggcaagccttcatctatggttaccagacggcgtttggcagcgccatcaaagggttgcagacatga

SEQ ID NO: 364503 - DNA, 243 bp, Pseudomonas aeruginosa; identical to SEQ ID NO: 342887

SEQ ID NO: 364504 - DNA, 1197 bp, Pseudomonas aeruginosa
atggccgagagcgctttttccgaacgtatcgtgcagaacctgctggataccgacttctacaagctgaccatgatgcaggcggtgctgcacaactatcccaacgccgaggtggagtgggagttccgctgccgcaaccaggaagacctgcgcctgtacctgccggccatccgcgaacaactggaatacctggcgggcctggcgatcagcgacgagcaactggccttcctcgaacggattcccttcctcgcgccggacttcatccgcttcctcgggttgttccgcttcaacccgcgctacgtgcagaccggcatcgagaacgacgaattcttcctgcgcctgaaaggtccctggctgcacgtgatcctcttcgaagtgccgctgctggcgatgatcagcgaggtgcgcaaccgcgcccgctacccggccgccaccgtcgagcaggcgcgcgaacgcctgcaggaaaagttcgattggctgcgccgggaggccagcgccgaggaactggccggcttcaagatggccgacttcggtacccgccgccgcttctcctatcgggtccacgaggcggtggtgagcggtctgaaggaggactttccgggctgcttcgtcggcaccagcaacgtccacctggcacgcaagctcgacctcaagcccctcggcaccatggcccacgaatggctgatggcccaccagcagctcggtccgcgcctgatcgacagccagagtgccgcgttggactgctgggtccgcgaataccgtgggctgctcggcatcgcgctgaccgactgcatcaccaccgatgccttcctgcgcgacttcgacctctatttcgccaagctcttcgacggcctccgccacgactcgggcgacccattgctgtgggcggaaaagaccatcgcccactacctcaagctgggcatcgacccgctgaccaagaccctggtgttctccgacggcctcgacctgccacgggccctgaagatctatcgcgcgctgcagggccggatcaacgtcagcttcggcataggcacgcatttcacctgcgacctgccgggcgtcgagccgatgaacatcgtggtgaagatgagcgcctgcaacggccatccggtggcgaagatctccgatacgcccggcaaggcgcaatgccgggaccctgacttcatccactacctcaagcacgtgttccaggtcgcctag

SEQ ID NO: 364505 - DNA, 3057 bp, Pseudomonas aeruginosa
atggcttttaccgatccgttcatccgtcgtccggtcctggcgagcgtggtcagcctgctgatcgtcctgctcggcatgcaggccttcagcaagctggtgatccgcgagtatccgcaaatggagaacgcgctgatcacggtgaccacgctctatgccggcgccaacgcggaaaccatccagggctacatcacccagccgctgcagcagagcctggccagcgccgaaggcatcgactacatgacctcggtgagccggcagaactattcgaccatctccatctacgcgcggatcggcgccaataccgatcgcctggtcaccgagctgctggccaagtccaacgaagtgaagagccagctgccgccggacgccgaggacccggtgctgcagaaggaggccgcggacgcctcggcgctgatgtacatcagcttctacagcgagcagatgaacaacccgcagatcaccgactacctgtcgcgggtgatccagcccaagctggcgaccctgcccggtatcgccgaggcggagatcctcggcaaccaggtgttcgccatgcgcctgtggctggacccggtgaagatggccgcgttcggcgtcaccgccggcgagatcaaccaggcggtgcagcagtacaacttcctcgccgccgccggcgaggtgaagggccagttggtggtcaccagcgtcaatgcttccaccgacctcaagtcgccccaggccttcgccgccatcccggtgaagaccgacggcgaccgccgggtgctgatgggtgatgtcgcacgggtcgaactgggcgccgccagctacgacgcgatcagttcgttcaatgggattccctcggtctacatcggcatcaagggcacgcccagcgccaacccgctggacgtgatcaaggaagtgcgggcgaagatgcccgaactggaagagcaattgccgcccaacctcaaggtgtccatcgcctacgacgccacgcgcttcattcaggcctccatcgatgaagtggtgaagaccctcggcgaggcggtgctgatcgtcatcgtggtggtgttcctgttcctcggcgcgttccgttcggtactgatcccggtggtgaccattccgctgtcgatgatcggcgtattgttcttcatgcaggccatgggctactcgatcaacctgctgaccctgctggcgatggtcctggccatcggcctggtggtggacgacgcgatcgtggtggtggaaaacatccaccgccacatcgaggagggcaagccgcccttcgaggctgccctggagggcgcgcgggagatcgctgtaccggtggtcagcatgaccatcaccctcgccgcggtctacgcgccgatcggcttcctcaccggcctcaccggcgccctgttcaaggagttcgccttcaccctggccggcgcggtgatcatttccgggatcgtcgccctgaccctgtcgccgatgatgtgctcgcgcctgttgcgccacgaggagaatccctcgggcctggcgcatcgcctcgacctgatcttcgagggcctgaagcgacgctaccagcgcgccctccacggcaccctggacacccgtccggtggtcctggtgttcgccgtgctggtactggcgctgatcccggtactgctgatgttcaccaagaaggagctggcgccggaagaggaccagggcatcgtgttcctcatgaccaactcgccgcaaaccgccaacctcgactacctgaatcgctacaccgccgagttcgaaggcatcttccgcagcttcccggagtattactcggcgttccagatcaacggctacaacggcgtccaggccggcatcggcggcatgctgctcaagccctgggacgaacgcgaaaagagccagatggaattgctccatgcggtgcaggcgaagctcaacgagattcccggcgtgcaaatcttcgccttcaacctgccgtcgctaccgggcaccggcgagggcctgccattccagttcgtgctcaacaccgccaacgactacgagtcgctgctgcaagtggcgcaacgggtgaagcagcgcgccagcgagtccggcaagttcgccttcctcgatctcgacctggcgttcgacaaacccgagctggtggtcgacatcgaccgcgagaaggccgcgcagatgggcgtctccatgcaggacctgggggtggcgctggccagcctgctcggcgagggcgagatcaaccgcttcaccatcgacgggcgcagctacaaggtcatcgcccaggtcgaacgcccctatcgcgacaatcccggctggctcggcagctactacgtgaagagccacaacggccaactggtcgccctctcgaccctgatcgagacccacgaacgggcacggccacggcaactgaaccagttccagcagctcaactcggcgatcatctccggcttccccatcgtcagcatgggcgaggccatcgagacggttcagcagatcgcccgcgaggaagccccgcgtggcttcgccgtcgactacgccggcgcttcccggcaatacgtgcaggaaggcagcgcattgctggtcaccttcggactggccctggcgatcatcttcctggtcctcgccgcacagttcgaaagcttccgcgatccgctggtgatcatggtcaccgtgccgctgtcgatctgcggtgcgctgataccgctgttcctcggcgtgtcgagcctgaacatctatacccaggtcggcctggtgacactgatcggcctgatcagcaaacacggcatcctgatcgtcgagttcgccaaccagttgcgccacgaacaggggctggggcgtcgcgaggccatcgagcaggccgccgcgatccgcctgcggccagtactgatgaccaccgcggctatggtgctcggggtgatcccgctgatcctcgccaccggcgccggggcggtcagtcgcttcgacatcggcatcgtgatcgcgaccggcatgtcggtgggcaccctcttcaccctgttcgtcctgccgtgcatctacaccctggtggccaggccggatgccccgccaggcgtgacgcaagcggcaaacgcacactga

SEQ ID NO: 364506 - DNA, 1131 bp, Pseudomonas aeruginosa
atgttgctccgccgcatgttgatcatgctcgccgcggtgatcgccgtggtggcgattctcgccggctacaaggtctactccatccgtcagcagatcgcccttttcagcgcaccgaaaccgccgatcagcgtgaccgccagcctggccgaaaagcgtccctggcagagccgcctgccagccatcggcagcctcaaggcattccagggcgtgaccctcaccgccgaagtctccggcacggtacgcgacgtactgttcctttccggcgaccaggtgaagctggaccaaccgctgatccagttggaaagcgacgtcgaggaagccaccctgcgcactgccgaggccgatctcggcctggccagggccgagtaccagcgcggccgcgaactgatcggcagcaaggccatctcgaaaagcgaattcgatcgtctcgccgcgcagtgggccaagaccagcgccaccgtcgccgagctgaaggcggcgctggcgaagaagcgcgtgctcgcgcccttcgccgggaccatcggcatccgccaggtggacgtcggcgactacgtctcgcccgggacgccgatcgccaccttgcaggacctttccaccctgctcctggatttccacctgcccgagcaggacttccccctgctcagccgcggccaactggtgaaggtccgggtcgccgcctaccccgcccaggtgttcgacgccgagatcgccgccatcaaccccaaggtcgacaacgaaacccgcaacctgcaggtccgcgctgccctggagaacccggacggcaagctgctgccgggcatgttcgccaacctcgaggtgatgttgcctggcgaggaacaacgcgtcgtggtcccggagacggcgatcaccttcaccctctacggcgactcgatctacgtcgtcgggcagaagaaggacgagcagggccaggtgtcgaaggatgacaagggccagccgcaacaggtcgtcgagcgccgcttcgtcaggatcggcgaacgccgcgaaggcctggcggtggtgctcgaaggccttgagggcggcgagcaggtagtgacttccgggcaactgaagctcgacaacggcgccgcggtggccatcgtcgccgagcgggacctccagcaagagcactga

SEQ ID NO: 364507 - DNA, 1095 bp, Pseudomonas aeruginosa
atgctgcgacgtcatgtgatcggcctgggcagcctgctgctcggcgccttgtccttcggcggctggagcttcagccgcctgggtagccaaccgctggtgctgtcggcgcgcgacgacgccgatggccagcattacgcggtgggctaccgcctggacggcaagtgccagttcgccacccgcgtggcccagcgctgccacgacatcgtccagcacccgagcctgccgctggcgctgttcgtcgcccgccggccaggcaccgaaagctacctgatcgacctgaacgacggtcgcctgctgcagaccctggtctcgcagaaagaccgccacttctacggccacggcgtgttccaccagagcggcgagtggctctacgccaccgagaacgacactaccgatcccggtcgcggcgtgctcggcgtctaccgtttcgacggcgagcgactgcagcacagcggcgagatctccacccacggcctcgggccgcaccaggtttcctggatgcccgacggcgagaccctggtagtggccaatggcggcattcgcaccgaggcggaaagccgggtcgagatgaacctcgacgccatggagcccagcctggtgctgatgcgccgcgacggcaacctgctgtccaaggaaaccctggcgcagcagatgaacagcgtccgccacctggcgatcggtcgcgacggcaccatcgtcgccggccagcagttcatgggcgatgcccacgaacatgccgacctgctggcgatcaagcgccccggccgtcccttcgaagccttccctgtggccgaggagcagcgcctggcgatggcccagtacaccgccagcgtggcgatccacgacgacctgcgcctggtggccctgaccgccccgcgcggcaaccgtttcttcatctgggacctggacagcggtgccgtacgcctcgacgcgccgttgccggactgcgccggcgtgggcgcggtgaagaacggcttcgtcgtcacgtccggacagggccgttgccgcttctacgactgccagggcgagcgcatcgccgcgcaaccgctagagctgccttccggcctctgggacaaccacctgcacctggcctga

SEQ ID NO: 364508 - DNA, 1065 bp, Pseudomonas aeruginosa
atgttccgcccacgactgctcttgaccagcctcgccatcgccctcggcgcctgctcgccgcaagacccgcaggccgtcaccagtgccgccctggcgcaacaggtgatcctgccgacctacagccgctgggtggaggccgaccaggccctggccagcagcgccctggcctactgccagggcaaggaagacctggccaaggcccgcgacgcgttccacgccgcgcagaaggcctgggccgagctgcaaccgctgctgatcggcccgctggccgagggcaaccgcgcctggcaggtgcagttctggccggacaagaaggacctggtcgggcgccaggtcgaacagttgctgaagaacaacccgcaggtcgacgccgcggccctggccaaggccagcgtggtggtgcaggggctctccgcctacgaatacatcctcttcgacagcaagatcgacctcgccgacgccgccaccaaggcccgctattgcccgttgctggaagccatcggcacccaccagcagcaactggcccaggacatcctggcgcgctggaagaacgacggcggcatgctcacccagatgagcaagttccccaacgaccgctacgccgacgcccacgaggcgatcgccgagctgctgcgggtccaggtcaccgccctggacatgctgaagaagaaactcggtactccgctgggccggcagagcaagggcattccccagccctaccaggccgaggcctggcgcagcaacgcctcgctggccagcctggacgccagcctgagcggcgcccaggcgctctgggaaggtatcgacggcaaaggcctgaagaccctgctgccggccgaacagaaggacctggccggcaagatcgacgccgcctacgccgacagccacgcgaagctggcggcgctggaacagaaaccgctctccgaactgctcgccagcgaagacgggcgcaaccagctcaacgccctctatgacagcctgaacgtggtccaccgcctgcacgaaggcgatctggcccgcgccctcggcgtgcaactgggcttcaacgccaacgatggcgactga

SEQ ID NO: 364509 - DNA, 1422 bp, Pseudomonas aeruginosa
atgtcgttgccgtcaccttccatgccgctcgcctgtctcctgacggcgctccttctgggcggatgcggcgccgacgacgaaccgctgcgcgccgagcccggcgaacacctgtccgggggcgcgaccacggtgctgcaaagcgaccgcaacgccttctccctgccctccgccaacctcgccccgagccggcgcctggacttcagcgtgggcaacagtttcttccgcaacccctgggtcatcgccccttcctccaccaccgcgcgcgacggtctgggaccgctgttcaataccaacgcctgccagaactgccatgtgaaggacggccgcggccacccgccgggagcggacgcggtcagcgcggtgtcgatgctggtacgcctgtcgatcccggccggccctgcggacggcaagaccctgttgcaccagggggtgattcccgagccgacctacggcggccagttgcaggacgtcggcattcccggcgtcgccccggaaggcaaggtgcgggtggactacgagccgctgaaggtgaggttcgaggacggcaccgaggtcgaactgcgcaagccgatcctgcgtatcagccagctcggctatgggccgatgcatccgcagacgatgttttccgcccgcgtcgccccgccgatgatcgggctcggcctgctcgaggcgattcccgaagaggcgatcctggccaatgccgatccggacgaccgcaacggcgacggtatccgcgggcgcgccaaccaggtctgggatgccgcgcggcagcgcaccgcgctcggccgcttcggctggaaggccggccagccggatatcccgcagcagaacgcgcacgccttcgccaacgacatgggcctgaccagcagcctgcagccccatgacgactgcagcgccgcccaggtcgagtgccgccgggcgcccgacggcggcgagccggaagtcagcgacaacatcttcgcccaggtgctgttctacagccgcaacctggcggtcccggcgcggcgcaaggtggacgacccgcaggtgctggccggcaagcgtctgttcgcccaggccaactgcgtggcctgccacgttcccgccttcactaccggttccgacgccagcgagccggagctggccaaccagcggattcgtccctattccgacctgttgctgcatgacatgggcgacggcttggcggacaatcgcccggaatttctcgccagcgggcgggactggcgaaccccgccgctatggggcatcggcctgaccgaaacggtcaacggccacacccagttcctccacgacgggcgcgcccgcaatctgctggaggcgatcctctggcacggcggcgaagccgaagcggccaagcggcacgtgctcggcttcgacgccgaccagcgcagcgccctgctggccttcctgaattcactctga

SEQ ID NO: 364510 - DNA, 1341 bp, Pseudomonas aeruginosa
atgactcgtatgcccctggccaccgccagtctgctggccctcgccatctccctcgccggctgcggcgacgacaagaaagccgaagcgcccgcaacaccggcggccagcacgcagcccgccgcgcccgccgccgccccggccgccaaggtcgacgaggccgccgccaaggcggtgatcaagaactacgcggacctcgccgaagccaccttcgccgatgccctgagcaccgccaaggacctgcagaaagccatcgacgcgttcctcgccaagcctgacgcggagaccctgaaagccgccaaggaagcctggttcgccgctcgtaccccttactcccagagcgaagccttccgcttcggcaacgcgatcatcgacgactgggaaggacaggttaacgcctggccgctggacgaaggcctgatcgactatgtcgccaaggactaccagcacgccctggggaaccccggcgccaccgccaacatcgtcgccaacaccgagatccaggtcggcgaagacaagatcgacgtcaaggaaatcaccggcgagaaactggccagcctgaacgagctgggcggttccgaagccaacgtcgccaccggctaccacgccatcgagttcctcctctggggccaggacctgaacggcaccggtccgggcgccggcaaccgtcccgccaccgactatgcccagggcaaggactgcaccggcggccattgcgaccgtcgcgccgcctacctgaaggccgtcaccgacctgctggtcagcgacctcgaatacatggccggacagtggaaagccggcgtcgccgacaactaccgcgccaagctggaagccgaaccggtggataccggcctgcgcaagatgttcttcggcatgggcagcctgtccctcggcgaactggccggcgagcgcatgaaggtcgcgctggaggccaactccaccgaagacgagcacgactgcttcagcgacgacacccaccacaccctgttcttcaacggcaagagcatccgcaacatctacctcggcgagtacaagcgcatcgacggcagcgtggtcaagggcccgagcctggccgacctggtcgccaaggccgacgccgccgccaacgacaccctgaaggccgacctggccgacaccgaggccaagctgcaggccatcgtcgacagcgccgagaaggatggcgtgcacttcgaccagatgatcgctccggacaacaaggacggccagcagaagatccgcgacgccatcgccgccctggtcaagcagaccggcgccatcgagcaggccgctggcaagctgggtatccaggacctgaagccggacaacgccgaccacgagttctga

SEQ ID NO: 364511 - DNA, 573 bp, Pseudomonas aeruginosa; identical to SEQ ID NO: 321381

SEQ ID NO: 364512 - DNA, 903 bp, Pseudomonas aeruginosa
atggacttcgacctgcgctggctgttcatcgcctccagcctggggctctgcgcctgggccggctggcagttcgtgcaccgccttgcccgggcgcgtctgctcggcgacgtaccgacctcgcggatccgttcggcggcgcaaggtttcgtcgaactctacggggtgctcgaggagggcccggaaggcccgctgcaggctcccttgaccggcaagccgtgcctgtggtggcgctaccgcatcgaagtcgaggaaaagcgcagtggccgcgagaaggcctggcgcaccgtcgacaaaggtgccagcgagtcgccattcggcttgcgcgatgccaccgatgcctgcctggtcgacccacgcggcgccgaggtgcgacccttgaccctgcagcgctgggaggcttttcgcgaagcaccgatcgataccctgcgactgctgcagagcttcggcaccctggtcggcggagagcggctctaccgctacaccgaggagcgcctgcatgccggcgagccgctctatgcgctgggcgaattccgcagcagcggtggcggtcgccagggactcgatgccgaacgggcgcagggtgcggtgatccgtgaatggaagggcgatttccacggcctgctggcgcgcttcgacagcgacggcaacggcgagctggacgagcgcgaatggaaccgggtgcgcctggcggcacggctggaggccgaggatcggcatcgggcaagcagcgccgcgccgacccgccaccggctcggcaagccgggggaggcgcatcccttcattctctccagccagggcgaggacgatctcgccgtgcaactgcgccgccaggcggcgggggccgcgttgctctgcctgggcagcgcgctattggcgggctggctgttcagccgcctgttctga

SEQ ID NO: 364513 - DNA, 2064 bp, Pseudomonas aeruginosa
ttgaaactggactcccgacacagcctctcgctcaagctgctgcgtgtcgtgctactggcggcgctagccgttggcgtagtgctcagttgcgcgcagatcgtcttcgacgcctacaaggccaagcaggcggtgagcagcgacgcccaacgcatcctcgcgatggtccgcgacccttccacccaggcggtctacagcctcgaccgggaaatggcgatgcaggtcctcgaaggcctgttccagcacgaggcggtgcgccaggcgagcatcggccatcccggcgagccaatgctggcggagaaatccaggccgctgctggacctgccgacgcgctggctgaccgacccgatcctcggccaggaacgcaccttcagcattcgactgatcggccgcccgccctatagcgaatactacggcgacctgaagatcaccctggacaccgcgccctacggcgagaacttcgtcaccacttcggaaatcatcttcatctccggcattctccgcgccctggccatgggcctggtgctgttcctggtctaccactggatgctgaccaagccgctgtcgaagatcatcgagcacctggtcagcatcaatcccgaccgccccagccagcaccagttgccgctgctcaaggggcacgaacgcaacgagctggggctctgggtgaccaccgccaaccagttgctcgcctcgatcgaaagcaacagccacctgcgccgcgaggccgaggacaacctgctgcgcatttcccagtacgacttcctcaccggcctgccgaaccgccagttgctgcagcagcaactcgaccagatcctcgacggcgccggccgccagcagcgccgggtggcagtgctgtgcctgggcctcgacgatttcaaggggatcaacgagcagtacacctaccagctcggcgaccagttgctgatcgccctcgccgaccgcctgcgcgggcacagcgcgcggctcggttcgctggcgcgcctgggcggcgaccagttcgccctggtccaggccgacatcgagcaaccctacgaggcggccgaactggcgcagagcatcctcgacggcctggaagcgccgttcgagatcgaccagcacgaggtgcgcctgcgcgccaccatcggtatcaccctgttccccgaggacggcgagaccacggagaaactgctgcagaaggccgagcagaccatgaccctggccaagacccgctcgcgcaaccgctaccagttctacatcgccagcgtggacagcgagatgcgtcgccgccgggaactggaaaaggacctgcgcgacgccctgcagcgccacgagctgcacctcgtctaccagccgcaggtggactaccgcgaccaccgcgtggtcggcgtcgaggcgctgctgcgctggcaacatccgttgcacggcttcgtcccgccggacctgttcatcccgctggcggaacagaacggcagcatcttcagcatcggcgagtgggtgctcgaccaggcctgccggcagttgcgcgaatggcacgaccagggcttcgacgacctgcgcatggcggtcaatctttccaccgtgcagctccaccacaacgccctgccacgggtggtcagcaacctgctgcaggtctaccgcctgccggcgcgcagcctggagctggaagtcaccgagaccggcctgatggaggacatctccactgccgcccagcacctcctcagcctgcgccgcgccggcgcgctgatcgccatcgacgatttcggcaccggctattcctcgctgagctacctgaagagcctgccgctggacaagatcaagatcgacaagagtttcgtccaggacctgctgcaggacgaggacgacgcgaccatcgttcgcgccatcatccagctcggcaagagcctgggcatgcaggtgatcgccgagggcgtggaaaccgccgagcaggaggcgtacatcatcgccgaaggttgcaacgaaggtcagggctacctgtacagcaagccgctgccggccagggaactgacccagtacctcaagcaggcgcgacgcctgagccaggccaccagcagcgaacggccctga

SEQ ID NO: 364514 - DNA, 582 bp, Pseudomonas aeruginosa; identical to SEQ ID NO: 321378

SEQ ID NO: 364515 - DNA, 603 bp, Pseudomonas aeruginosa
atgtggcagagctatctcaacggcatcctggtggctgccggcctgatcatcgccatcggcgcgcagaatgccttcgttctcgcgcagagcctgcgccgcgagcatcacctctcggtggccgcgctctgcgtattctgcgacgcggtgctggtcagcctcggcgtgttcggcctggccaagctgctgctggaaaacccgacgctgctggccatcgcccgctggggcgggatcgccttcctgacctggtacgggctcaaggcgctgcttcgcgcgttgcgcccggacgctctcggcaacgcagcggaaaccgggccacgctcgcgcaaggcggtgcttctggcggcactggcggtcaccctgctcaacccccacgtctatctcgataccgtacttctgatcggttcgctcggcgcccagcaggccgcgccgggcgcctatgccctcggcgcggccagcgcctcgctgatgtggttcttcgccctcgccctcggcgcggcgtggctggccccctggctggcgcgcccggccacctggcgcctgctcgacctgatggtggcggccatgatgctgggcatggccgcgcaactgctgttccggggataa

SEQ ID NO: 364516 - DNA, 402 bp, Pseudomonas aeruginosa
atggctggcgaaacctcgctgcgcaccctgctgcgcacgctcactcccgaactcaatcccggcgactatgtgttctgtacctgcgccgctggcgcgctgccgaacggcgccgagccgctcgccagcttccgcgagcgcgagggcctgaccctggtgctcgaacgccggcaggccgaacgcctgggcctgccctacgaatacgtggcggcctggatcaccctgacggtgcactcctcgctggcggcggtgggcctgaccgccgccttcgccacggcgctggccgaagccgggatcagttgcaacgtgatggccggctatttccacgaccacctgttcgtcgcccgcgacgagggccggcgcgccctcgccgtgctccagcggctggcggcggaggcacactga

SEQ ID NO: 364517 - DNA, 897 bp, Pseudomonas aeruginosa
ttgttcgactacaagttgctcgccgcgctggccgcagtggtggagcagggcggtttcgagcgcgccgcacaggcgctggggctgtcgcagtcggcggtatcgcagcggatcaagctgctcgaggcgcgggtcggccagccggtcctggtgcgcgagacgccgccgcatcccaccgatctcgggcgccgcctgctcaaccatgtgcagcaggtgcggctgctggagggcgacctgcagcgctgggtgccgaacctggatgagggcggtgccccggaacgcctgcgcatcgctctcaacgccgatagcctggcgacctggtgggccgccgcggtgggcgatttctgcgccgagcggcgggtgctgctggaccttgtggtggaggaccaggaggtcgggctcaagcgcatgcgcgcgggcgaagtggcgggctgcgtctgcggtagcgcgcggccggtggccggcgcgcgttcgctgctgctcggagccatgcgttatcgcggcctggccagcccggatttcattgcccggcactttccccgcggggtcgaggcggccgccctggccggcgtgccggcgatcgtgttcggcccggacgacctgctgcaacaccgctttctcaaggacctcggcgtcgagggcggtttcatccaccacctctgcccgtcctcggaaggtttcgtccgcctcaccgccggcggtctcggctggggcctggtgccggagcgccaggtgcaaggcgagctggcgcgcggcgaactggtcgagctgctgcccggccaggtcatcgacgtaccgttgtactggcactactggcgcaacggcggcgaactgctcgcgtcgctcaccgagcacctgctcgcccgcgccggcgacggcttggtgcgggtgtcaggctga

SEQ ID NO: 364518 - DNA, 1059 bp, Pseudomonas aeruginosa
atggccagtcactggatgatctacggcgccaacggctacaccggccggctggtcgctgaacaggcgcagcgcgagggcctgacgccgctcctcggcggacgcaacccggccgccctgcacgcgctcggcagccagctcgggctggagtgccgggtcttcgacctgggggatccgcaggcctgccgcgaagccctggaccaggtgaaggtggtggcccattgcgccggtccgttctctgccaccagcacgccgatgatcgccgcctgccgcgccgccggcacccactacgtggatatcactggagagatcgcggtgttcgagcaggcccacgccggcgacgccgaggcccgcgaggccggcatcgtggtctgcccgggcgtcggcttcgatgtgatccccaccgattgcctggccgcctgcctgaaggaggcgctgccggacgcgcaacggctggcgctgggcttcgacaccggcagcgggctttcgacgggaaccgcgaagaccagcgtcgaaggcctcaagttcggcggcaagatccgcgagaatggccgcctgcgcgacgtgcccctgggctacaagcgccgcgacatcgatttcggccgcggcctgcggcacgccgtgacgattccctggggcgacgtggccaccgcctactacagcaccggcatcccggacatcgaggtctacctgccggcgccgccgctgctggccctgggcatgcgcctgatcgacccgctgcgtccgctgctcggtcggcaacgggtccaggactggctcaaggggcaggtcgacaaacgcatcgccggccccgaccaggcggcccgcgagcgcctgcgcacctgggtctggggcgaggcgcgcaacgcccgcggcgaacgccgcacgacgcgcctggagacggccaacgtgtacgacctgaccctgcacggcgtgctcctggcagtgcgccacctgctggactaccagggtcccggcggctacttcacgccatcgcggttgctcggcgcgcgctgcgtcgaattgttgcccggctccggacgaatcaccgtcatcggctga

SEQ ID NO: 364519 - DNA, 990 bp, Pseudomonas aeruginosa
atgcggattctggtaacgggggcgacgggcttcatcggcgggcgtttcgctcgcttcgccctggagcagggcctgtcggtacgggtcagcggtcgtcgtgcggacgcggtggaacatctggtggtgcggggcgccgagttcgttcccggcgacctcgccgacccggcgctggtcctgcgcctctgcgaggatgtcgaggcggtggtgcattgtgccggcgcggtcggagtctggggaccgcgcgaacgcttcctggcggccaacgtcgggcttgccgagagcgtcgtcgaggcctgcatgcggcaaaaggtgcggcgcctggtgcatctgtcgtcgccgtcgatctatttcgacgggcgcgaccacctggacctgaacgaagagtacgtaccccggcgtttttccgaccattacggggcgaccaagtaccaggccgagcaactggtgctcagcgcccgcgacctgggcctggaagtgttggcgctgcgtccgcgcttcgtggtcggcgccggcgacaccagcatcttcccgcgaatgatccaggcccaccgcaagggacgcctgcggatcctcggcaacggcctgaaccgggtcgacttcaccagcgtgcacaatctcaacgacgcgctgttcagttgcctgctggccggcgagccggcgctgggcaaggtctacaacatcagcaacgggcagccggtaccgttctgggatgcggtcaactacgtgatgcgccagctcgacctgccgccggtcggcggtcacctgccgtatgccgtcggctatggcctggcggcgctcaacgaaggcgtctgccggatcctgccggggcgcccggagccggtgctgttccgcctgggcatggcggtgatggcgaagaacttcaccctggacatcaaccgcgcccgcgaatacctcgactacgacccgcgggtcagcctttggaccgcgctcgacgagttctgcgcctggtggcgcgcccagggactctga

SEQ ID NO: 364520 - DNA, 264 bp, Pseudomonas aeruginosa
atggagttgaacaaatccttgctggattgcatgcgcgccgtgcgccgacgcctgcgcgaggaacaggcgctggatatccacttccagcaacgcgatgcgatcgccgcgatgcaggcggcctgcgcccgctccggcgatgcgacgacgcgggagctgggacagcgcctcggcaggctcagcggggtcgcgctgccgccggcggaaccttccctgttgcccgcgcaggcgccgagccgacaatacgccggcccgttgcgcggctga

SEQ ID NO: 364521 - DNA, 837 bp, Pseudomonas aeruginosa
atgcgtaacgatgctttcgacgaactcgacgatgtgcccagcctgaccaccgatgctgccgaccgtgatgaattcggccaccacccgcggcacgtctacgaaccggagcagcgccgggtcgtcgacaccaaggagcgccgtccggcctctaccggcccgctctgggccctgctcggggcgatgctgatcgccctcgccggggtgggttggtggagccaccagcaaatcagcctgatggaacagcagttggtggcgacccaggaaagcttcgtaaggatcagcgaagaagccgccgggcgcctcgacgacattcgcggcaaggtggtcgccagcgagtccagcgtcaccagcgaacgcgaggcgctgcgcctgcaggtcaagcaactgcaggagaaactcggcagccaggaacgccagcaggccgatgtgagcaaccagttcggcggccagggcaaacgcctcgaccaactggccagcgatctcaaggcccagcaggaaagcgcggcgcaactggtcgcgcaactggacggcaagctgcagacactggccgccgaacaggagaagctgaaagccctgcaggtcgaactgggcaagaccaacgagcaactcaaggccctcggcggcgatgtcgcggcgctgaagaagcagggcaacccgagccagacgatcaagggtatccaggatgacctgctggtattgcgcagccagctcgacaaccgcccggcccagggcggcaataccgccgagttcgacgccttccgcacccaggtgatgcgcaacatcaacaccctccaggcccaggtgcagaacctgcagcagcagctcaatacccgctga

SEQ ID NO: 364522 - DNA, 228 bp, Pseudomonas aeruginosa; identical to SEQ ID NO: 342907

SEQ ID NO: 364523 - DNA, 2301 bp, Pseudomonas aeruginosa
atgaccgcattgaccctcggcctgatcggcaatcccaactccggcaagaccaccctgttcaaccagctcaccggctcgcgccagcgggtcggcaactgggccggcgtcaccgtggagcgcaaggagggtgcgttccataccgtccgtcacgcggtgcgcctggtcgacctgcccggcacctattcgttgaccagcgtttccgcccaggcctcgctggacgagcagatcgcctgccgctacatcgccagcggcgaagtcgacgtgctggtcaacgtggtggatgcggcgaacctggagcgcaacctgtacctcacggtgcagctgcgggagatgggcatcccctgcatcgtcgcgctgaacatgctcgacatcgcccgtagccagcgcatccgcatcgatatcgacggtctggcgcggcgtctcggttgcccggtggtgccgctggtatccacccgcgccgatggcatcgacgaactgaaggcggccatcgactccctacagctcccgcaggcggcgctggcggtggactacccgccggccatccaggcgcaggtcggctacctcctggaaacgcgcgctccggcggcctcggccatcgagccgcgctggctggcgttacaggcgctggaaggcgacatcttcaacggcccggcgctgggcttgccgcccgccaccctggaacaggcgcgccagggctgcggcgaggagcccgagctggcgatcgtcgatgcgcgctaccgactgatcggcgagatctgtgcggcggtctgcgaccaccagcaggctcagccgcaccggctgacccaatggctcgaccgggtcgtcctgaatcgctggctgggtctgccgatcttcctgctggtgatgtacctgatgttcttcttcgccatcaacatcggcggggcgctacagccgatcttcgacaagggctcgtcggcgatcttcatcgacggcatccagtggctgggtatccgcttcggcctgcccgattggctcacggtgttcctcgcccagggcatcggtggcggggtcaacacggtgttgccgctggtgccgcagatcggcttgatgtacctgttcctctcgctgctcgaggattccggctacatggcccgcgcggccttcgtcatggaccgcctgatgcaggcgctgggcctgccgggcaagtcgttcgtgccgctgatcgtcggtttcggctgcaacgtaccgtcgatcatgggcgcgcggaccctggacgcgcagcgcgagcggctgattaccatcatgatggcgccgttcatgtcctgcggcgcgcgcctggcgatcttcgccgtattcgccggggccttcttcggccagggcggcgcgctggtgatcttctccctgtacctgctcggcatcgtcgtggcgatcctcaccgggctgttgctcaagcacaccttgatgcgcggcgaggcctcgccgttcgtcatggaactgccgctgtaccatgtgccacaccttaagagcctgctgctgcagacctggtcgcgcctgcgcggcttcgtggtgcgggccggcaaggtgatcatcctggtcagcctggtgatcggcggcctgaacagcatcaccctcgacggcaagccggtgcagggcgacatcggccattccgcgctggccagcgtcagccagcgtctcactccgctgctggcgccgctcggggtgcagccggacaactggcaggccaccgtcggcctggtcaccggggcgatggccaaggaagtggtggtcggcaccctgaacaccctctacaccgccgagcagatccagggcgaggccttcgactacgaaggctacgacctgcccgggcaactgcgcgacgccctggtcgagacctgggacggcctggtcgataccttcagcctcagcgtgctggccaacccggtggaggcgagcatggccgacggcgacatggagaccggctcgatgggcaccatggcgagcaagttcggcagccccatcgcggcctacagctatctggtcttcgtcctgctctacgtgccctgcgtgaccgccatgggcgcgatcgcccgggaaagcagcaagggctggatggctttctcggtgctctgggggctgaacgtcgcctactcgctggcgaccctctgctaccaggtcgccaccttcgccgcgcaccccgagcgtagcgtcctgaccatcgccgtggtgctgctcttcaacctgatcctgatgacctgcctgcgtctgttcggccgtgagcaggtactgcaactgccaggccgaatggccgatgccccgagcgggcagggaggatgtcactga

SEQ ID NO: 364524 - DNA, 243 bp, Pseudomonas aeruginosa
atggcgacactcatgcagatccgcgccgccctggaagacggccaggcgcgtgggctgaaacagctcagccgccaggtggacgcgccgccggcgctggtggaggcgatcctggagcggctgatcgcgctcggcaaggtcgagcgggtggctgcgcaaagctcgggcggttgcggcggcggttgcaagggctgcgcccagcgcgatccgtgcgcggagccggagccgtatttccgcctgcgctag

SEQ ID NO: 364525 - DNA, 1053 bp, Pseudomonas aeruginosa
atggctactctgttcgatcccatcgtgctcggcgacctcgagctgcccaaccgcatcgtcatggcgccgctgacccgctgccgcgccgatgaaggccgcgtgcccaacgccctgatggccgagtactacgcccagcgcgccgatgcaggcctgatcctcagcgaggccaccgcggtcacgccgatgggcgtgggctaccccgacacccccggcatctggtccgatgaccaggtccgtggctggagcaacgtgaccaaggcggtgcacgccgccggcgggcgcatcttcctgcaactctggcacgtcgggcggatttccgatccgctctacctgaatggcgagctgccggtggcgccgagcgccatcgccgccgaggggcacgtcagcctggtgcgcccgaagcgtccctacgtcaccccgcgcgcgctggacaccgaggagatcgccgacatcgtcgaggcctaccgccagggcgccgagcgggccaaggccgccggcttcgacggcgtggagatccacggcgccaacggctacctgctcgaccagttcctccaggacagcaccaacaagcgcaccgaccgctacggcggctccatcgagaaccgcgcgcgcctgctgctggaggtcaccgacgcggcgatctccgtatggggcgcccagcgcgtcggcgtacacctggcgccgcgtgccgactcccacgacatgggcgattccaaccgcctggaaaccttcagccatgtcgcccgtgagctgggcaagcgcggcatcgccttcatctgcgcccgcgaagcgcaggccgacgacagcatcggcgtagccctgaagaaagccttcggcggaccctacatcgccaacgagcagttcaccctcgacagcgccaacgccatcctggccaagggcgacgccgatgcggtggccttcggcgtccccttcatcgccaacccggacctggtcgaacgcctgcgccagggcgccgaactgaacccgccgcgcccggaaaccttctataccggcggtcccgaaggctacctggactatccgaccctggcctga

SEQ ID NO: 364526 - DNA, 1167 bp, Pseudomonas aeruginosa; identical to SEQ ID NO: 322606

SEQ ID NO: 364527 - DNA, 303 bp, Pseudomonas aeruginosa; identical to SEQ ID NO: 322605

SEQ ID NO: 364528 - DNA, 573 bp, Pseudomonas aeruginosa; identical to SEQ ID NO: 322604

SEQ ID NO: 364529 - DNA, 861 bp, Pseudomonas aeruginosa
atgaaacgaatcctggtggcgaccgacctgtcctcgcgttccgagctggcggtcatgcgcgccgcggcgctggccaaggcgaggaatgccgaactgaccgtgctgaacgtgctcgacgacgaccagccgccggtgctgatcgcgccgcaacggctggccatcgccaacctgctggaagtgaacggacaggccctgaaggagcgcctcggcgtcgagtccaaggcgatcgtgcgggtcggcgatccggtggtggtgatcaacgcggtggccgaggagatcggcgccgacctgctggtgatgggcgcgcaccggcacacgccgctgcgcgatctgttcatcggcaccaccctggagcgggtggtacgcaatgcgaagatcccggtgctgcgcgcggccggtgcgccggaagaggagtaccgccgggtgctgctggcgctggacttctcgccgacctcgacgcgcgcggtgcagatggccggccagctcggcttcctcgacgccgccagcctcaccgcgctgcatgccttcgagccgttcgccaaaggcatgatgcgttattcggggatcaaggaagaccgcgtcgagcattacgtcgaccaggaggaactcaaggccaacgtcgagctgcgcgactacgtcgccggcctggggctgggccgcgaggacatccagttgcgcgtcggcgaaggcttgccgatcaacgtgatcatgaccgaggtacgccgccaggcgccgcagttgacggtgctcggcacccagggcctgaccggcttccgccgcgcgctgatcggcagcgtggccgaggcggccctcggcgacctgccgtgcgacgtgctggcggtgccgcccaagcgcgactag

SEQ ID NO: 364530 - DNA, 777 bp, Pseudomonas aeruginosa; identical to SEQ ID NO: 342915

SEQ ID NO: 364531 - DNA, 756 bp, Pseudomonas aeruginosa; identical to SEQ ID NO: 322601

SEQ ID NO: 364532 - DNA, 897 bp, Pseudomonas aeruginosa
atgtcctggcaacgcttgctcggcccgctcgaccgcctgcccaccgaaggctccctggaagactggcacgccgccgtcctggcgcgcgccgacggtcttggcaccctggagcgggcggtgctcggcggacgattggccgcgagtccgggcctggccttcctcgccggctaccaggcggccctgcgcgcgctctggccggcggcgccggaaggtctcggcgcgctgtgcgtgaccgagaagcgcagcgtgcgcccggcggacctgcagacccgcctggaggggctggtcctgcatggacaaaaggatttcgtcaccgctggcgacagcgcctcctggtggctggtggccgcccgcgacgaggctccggggcagccgccgcgactgtcgatgacggtggtcctggccggcgccccgggggcgcgcctggaggcgttgccggcgctgccgctgatgccggatgtgccgcattcccgcctgttgctcgacggtgcccattgcgagcgcctgcccggcgatggttgggacgactacgtcaggccgttccgcctgctggaggatgtccatgtgctggcggcgctggtcggctggctctatggggtcggccatgaatgcggctggccctcgccgctgctgctgcgcctggccggcatcctcggcggctgcgccgaggtcgcgcggcatccggtcgcctgcgtcggcacccaggcggtactggctgggctgttcgaacagttctcggcgctggaggggcaactggatgccgccttcgccgccaacgcctcgacctgggaggcattgtggcaacgcgatcgcggcttgctggcgattgccaacggggcccgcaaagttcgcctggagaaggccttgacccgcctcgggcttgacccaggtcagtga

SEQ ID NO: 364533 - DNA, 786 bp, Pseudomonas aeruginosa; identical to SEQ ID NO: 322599

SEQ ID NO: 364534 - DNA, 1116 bp, Pseudomonas aeruginosa; identical to SEQ ID NO: 342919

SEQ ID NO: 364535 - DNA, 336 bp, Pseudomonas aeruginosa
atgatccgtcgccatcccttgctcttcctgttcgtcctggggctgctcgctgccctcgcgtgggcctggcagaaccgcatccacctggcggcctttcccgccatcatcggcgcctacacggccaaggagtactgctcctgccgctacgtgatggggaactccgcggactattgccgggcctatacccaacagtacgtgccgatcagcggcttcttcgacgacgaagcccgccgccgggtgaccgcccgcggcctcggcagtacgcagacggccgcctggctgggcccgcgcgagggatgccggctcatgcccgaggcggacaggctgccggactga

SEQ ID NO: 364536 - DNA, 591 bp, Pseudomonas aeruginosa
atgcctgttgtattgtgtgtcctgttattgctcctcagcccgctgctgtcggcggcggaatggcaactggagccggattactcgcggatcagcttcgtttccgtgaaacgcgcgaagatggccgaggtgcagcgcttcgatcgtctcagcggccagatcgacaagcagggcgtcgcgcgcatcgtggtgccgctgggcaccctggacagcggcctggccctgcgcgacgagcgaatgaaggacaacttcttcgaaacctcgcgcttccccgaggccaccgtggagagccgcctggacatggccggcttcgacgacctgcgggtcggccagtcgcgggtcgagaagctcgacttcaccctcgacctgcacggccagcagcgccgcctgaaggccgacgtgctggtcacccgccagggcgaagggctggtccaggtggcgaccctggagccggtgctgctgaagctgctcgacttcgacctggaagagaagctcaagcccttgaaggagatggccaatattccctcgatcactcccgaggtaccggtgttcgccgtgctgaacttccgcgaagtgccgccggaacagttctga

SEQ ID NO: 364537 - DNA, 1221 bp, Pseudomonas aeruginosa
atggctcgacatcgacacatcgtggcctggctcgaggaggtcgccgacgacctgcgtagcctgcgccaggacatccacgcccatcccgaactgggcttcgaggagcgacgcaccgccgcgctggtcgccgaatgcctgcgcggctggggctacgaagtgcacgaagggatcggccgcaccggcgtggtcggcgtcctccgccagggcgacggtacgcggcggctcggcctgcgggcggacatggatgcgctgccgatcgtcgaggccacggggctcggctacagcagctgccacggcgggcgcatgcacgcctgcggccacgacggacacaccgcgatgctgctcggcgcggcacgctacctggcggcgacgcggcgtttcgacggcaccctggtactgatcttccagcccgccgaggaaggccagggcggcgccgaggcgatgctcgccgacgggctgctggagcgctttccctgcgatgcgctgttcggcatgcacaacatgccgggactggaggccgggcacctgggcttccgcgcgggaccgatgatggcttcccaggacctgctgagcgtcaccctggagggcgtcggtggacacggttcgatgccgcacctgagcgtcgatccgttgctcgccgcgtcgagcgcggtgatggccctgcagagcgtggtggcgcgcaacgtcgatccgcagaaggccgcggtggtcacggtcggcgcattgcaagccggcgaggcggccaacgtcataccccagcgcgccgtgctgcgcctgagcctgcgggcgctcgacggccaggtgcgcgagcaggtgctgcagcgggttcgccagatcatcgagttgcaggccgccagctatgggtgccaggccagcatcgagcactacccggcctatccggtgctggtcaacagcgtcgaggaaaccgagttcgcccgccaggtcggggtcgagctggccggcgcggagcaggtcgacggcgacacgccgaagctgatgggcagcgaggatttcgcctggatgctacagcgctgccccggcagctacctgttcatcggcaacggcagaggacggccgatggtgcacaacccggcctatgacttcaacgacgacatcctggtccggggcgcggcctattggggcgcgctcgccgagacctggctggccgcccccgcggcgtccggccttcgactgactgccgccaataacggcgcggcctga

SEQ ID NO: 364538 - DNA, 1320 bp, Pseudomonas aeruginosa; identical to SEQ ID NO: 342923

SEQ ID NO: 364539 - DNA, 1485 bp, Pseudomonas aeruginosa; identical to SEQ ID NO: 322593

SEQ ID NO: 364540 - DNA, 771 bp, Pseudomonas aeruginosa
atgccggaaagagaagaggcgggaaccgtgcgttcggtggagcgggcgctggcgatcctcgatctgctgggccagcaccaggcgctggggctcgaggaactgcattacctgaccgaactgcccaaggccacggtgtcgcggctgctgcataccctgctggagcagggctggctgtaccgcggcttgaccgaccggcgctaccggctgcgttccacccgcctctacggtgacgccgccgagcgcttccgttgccaggtggtggagcgttccgcgccgctgctggtggagttgagcgagcgaaccgggctggtcgccgatttgtcgattctcgacggcgaccgcctgctggtggcggaaagctcggtgcccggcgtcctgcgcaagcgctacccggccaaccggctggtggtcggccagcacgccagcctgttccattcggccatgggcaaggcctgcctgggcgaactggcagacagcgaggtgcgccgcctggcgcgccagcaccaggtagacgaggacctctggttgcgcacccgcgagcaggcccacggccagggctacggcgagcgtaccgagggacactgggagtatccggtgcgcctgccgttcctgatccgcgcggtggccttgccggtacgcgcccagggtcgcctgctcggcagcgtggcgctgcactggccgcgcgaccaggattgcgtcgaacgggtgcgccgccggcacctgggaaccctggccgataccgtcagtcagttgcagcacgcgctcgactga

SEQ ID NO: 364541 - DNA, 573 bp, Pseudomonas aeruginosa; identical to SEQ ID NO: 322590

SEQ ID NO: 364542 - DNA, 1158 bp, Pseudomonas aeruginosa; identical to SEQ ID NO: 342927

SEQ ID NO: 364543 - DNA, 1281 bp, Pseudomonas aeruginosa
gtggcaacgcccgactccaaggaacgtttcatcggactggaatggttgcgcttcctgctcggcctgtacgtggtggtgtaccacaccctgcatacctatccgaaagagcagaagtttcccggtctcgacgaactgaccagcctggggttcttcgccaccagtaccttcttcgtgctttccggcttcctcctggcccatgtttacgcacgcagcggccggttgcgcgaaagcgcccgcagcttctggaccaagcgactgtccaatctctatccgctgcacctgttctccctgctgctgtcgatcctggtgttgctggccctcagccacctgggaatcggtcccgagctggacaaggccaccccgcgcttcgtcatctacgacaccaacgaagtgctcggccgcacccacccggaactcttcctgcactggatgagcaacaccgaactgttcgtcaacagcatcctgcagatcctcctgctgcaggcctggaatccctattacctgaccttcaacgcgccgttgtggtcgctgtcgacgctgatgttcttctacctggcgtttcccttcgtcgccccgcggctgatgcgcagccggcacaagtggaaggtgctggcgctggtctggctggtctacctgatcccgccggcgctggtagtggccagcgagagctacgggatcccctggaccggcctgctgcaccgcaatccgttgctgcgcctgccggaattccttggcggcatcctggcctacgggttgttccgcggctaccgcgaccgtggcatggtgccgggacgcggcctgctggccgcgctggtggcgctggtggtggcggccttcctggtggccgactacctgttcacccagggcgccaaacattggtacttcctgctgcacaacggcctgctgctaccggcccagttgctgctggtgtgcctttgcgcgctgcccgccgacccgaagagcgctttcgtccgccactggtcgccgcgcctgggggccgcctcgctgtcgctgttcgccctgcatgtgccgatgttcaccctgttctcccgtagcgagcgccttatcgccgtgccggggcgttgtctcgacgactggcgcgcctgcaccgaggcggcggccgcgctgccatcgtcgctgctctgctacccgctgttcctggtcctgctggtggcgttctgcgtgctgttccaggagcgcggcgtggtgccggtgcgcaagtggctggtgcgccggctgatgccggcgccggcgctggccaaggtgccgcgcccggcctga

SEQ ID NO: 364544 - DNA, 612 bp, Pseudomonas aeruginosa
atgctgcgcagcctgtcgctggccctgtcgatcgtcgcgagcctggtcggctgtagcacgcccggcgcgttcttcggtgcggtggacggaccggccttcgtcgcccatccgagcgccgatgccagccacgccaccgtctacctctaccgtccgcggagccagtgggcggacgaggaactcgaggcgccggggatcttcctcaacaacgaactgatcggcagcctgccgagcaacggctacctggcgttcgagttcgagaccggcagctacaagctggaaatgcgccggccgctggcgggcagcttctggaccctgttcgccgacggtccgatggatttcacccgcatcgccagcttcatgctcgaggccagggccggctcggtctactacctgcgctacgacgaactcaacccgccaccgaagagcgagcacccggcgggtgagggcgatggcccgctgcaattggtggcggccgatctcggcgctgcggaaatcggcgctacccaccaggtccaggagcccatgcagttcgccgccagcggctaccggaaacgcgtgcagcgctcgttctgggaaggcgtcgggcgggccctggacaagatcggcatctga

SEQ ID NO: 364545 - DNA, 582 bp, Pseudomonas aeruginosa
atggctgcgaagaagatcctgatgctggtcggcgactatgctgaagactacgaaaccatggtcccgttccaggccctgcagatggtgggccaccaggtgcatgcggtgtgtccggacaagcgggccgggcaaagcgtgcgcaccgccatccacgatttcgaaggcgaccagacctacagcgagaagccgggccacaacttcaccctcaatgccgactttgcccaggcccgcgccgaggattacgatgccctgctgatccccggcggccgcgcgcccgaatacctgcgcctgaacgagcaggtgctggctctggtgcgtgacttcgatgccgcgcgcaagccgatcgccgcggtctgccatggcgctcagctgctggccgccgccggcgttctgcaagggcgggcgtgcagcgcctatccggcctgcgccccggaggtgcggctggccggcggcgagtacgtcgaccttccgccggaccaggcccacgtcgacggccacctggtcaccgcgccggcctggccggcgcatccggcgtggctggcgcgcttcctcgaggcgctcggcacccgcatcagccactga

SEQ ID NO: 364546 - DNA, 309 bp, Pseudomonas aeruginosa
atgtgcgaactctatgtgaaagccgatccgatcctctatgaatcgcgctcgcgttccttgcgcatccgcggggtggtgaccaccctgcgcctggagaaccagttctgggacatcctccgggaaatcgccgaaggcgagggcctgagcaccaaccagttgatcaccaatctctacgaggaagtgatggactatcgcggcgaggtgctcaacttcgcctccttcctgcgtgtcagttgcacccgctacctggcgcagcggcgcgagaaagtcgccgagctgagcctggtcggccagcgcgcccaggcctga

SEQ ID NO: 364547 - DNA, 1524 bp, Pseudomonas aeruginosa
atggccgtgatcaagcaagacgacctgatccagagcgtcgccgatgccctgcagttcatctcctactaccacccggtcgatttcatccaggccatgcatgaggcctacctgcgcgaagaatcgccggctgcccgcgactccatggcgcagatcctgatcaactcgcgcatgtgcgccaccggccaccgcccgatctgccaggacaccgggatcgtcaccgtgttcgtccgggtcggcatggacgtgcgctgggacggcgctaccatgagcgtcgacgatatgatcaacgaaggcgtgcgtcgcgcctacaacctgccggagaacgtcctgcgcgcctcgatcctggccgacccggccggcgcgcggaagaacaccaaggacaacacgccggcggtgatccactactccatcgttcccggcgacaaggtcgaggtcgatgtcgcggccaagggcggcggctcggagaacaagtcgaagatggccatgctcaacccgtccgactcgatcgtcgactgggtgctgaagaccgtaccgaccatgggcgccggctggtgcccgccgggcatgctcggcatcggcatcggcggtaccgcggagaaagcagcggtgatggcgaaggaggtcctcatggacccgatcgacatccacgaactgaaggcccgcggccctcagaaccgcatcgaggaactgcgcctggagctgttcgagaaggtcaaccagctgggcatcggtgcccagggcctgggcggcctgaccaccgtgctcgacgtcaagatcatggactacccgacccacgccgcctcgctgccggtgtgcatgatccccaactgcgccgcgacccgccacgcccacttcgtgctcgacggctccggccccgccgaactggaagcgccgtcgctcgacgcctacccggagatcgtctgggaagccggcccgtccgcgcgccgcgtcgacctggacaagatcaccccggaagaggtgcaaagctggaaaccgggcgagaccctgctgctcaacggcaagatgctcaccggccgcgacgccgcgcacaagcgcatggtcgacatgctgaacaagggcgaaacgctgccggtggacctgaaaggccgcttcatctattacgtcggcccggtcgatccggtcggcgacgaggtggtcggcccggccggtcccaccaccgccacccggatggacaagttcacccgccagatcctcgaacagaccggcctgctgggcatgatcggcaagtccgagcgcggtcccatcgccatcgaggcgatcaaggacaacaaggcggtatacctgatggccgtcggcggcgccgcctatctggtcgcccaggcgatcaagaagtccaaggtgctggccttcgccgaactgggcatggaagcgatctacgagttcgaggtaaaggacatgccggtcaccgtcgcggttgacaccaacggcgagtcggtgcacatcaccggcccagcggtctggcagaagaagatcgccgaaagcctggcggtcgaggtcaagtaa

SEQ ID NO: 364548 - DNA, 1128 bp, Pseudomonas aeruginosa; identical to SEQ ID NO: 342934

SEQ ID NO: 364549 - DNA, 927 bp, Pseudomonas aeruginosa; identical to SEQ ID NO: 322581

SEQ ID NO: 364550 - DNA, 774 bp, Pseudomonas aeruginosa; identical to SEQ ID NO: 342936

SEQ ID NO: 364551 - DNA, 1452 bp, Pseudomonas aeruginosa
atgtccgttcgccgcaccaaaatcgtcgccaccctcggcccagccagcaattccccggaagtgctggagcaactgatcctggccgggatcgacgtcgcccgcctcaacttctcccacggcacccccgatgaacaccgcgcccgcgccaggctggtgcgcgaactggcggccaagcacggccgcttcgtcgccctgctcggcgacctgcaaggaccgaagatccgcatcgccaagttcgcccacaagcgcatcgaattgcaggtcggcgacaagttccgcttctccaccagccacgcccgcgacgccggtacccaggaagtggtcggcatcgactacccggacctggtgaaggactgcggggtcggtgatgaactgctgctggacgacggccgggtggtgatggtggtcgaggaagtcgccgccgacgaactgcgctgccgggtgctgatcggcggcccgctgtccgaccacaagggcatcaaccgccgcggcggcggtctcaccgcgccggcgctgaccgacaaggacaaggccgacatcaagctggccgcggacatggacctggactacgtggccgtttccttcccgcgcgacgccaaggacatggaatacgcccgccgcctgctcaccgaggccggaggcaaggcctggctggtagccaagatcgagcgcgccgaggcggtcgccgacgacgacgcactcgacggcctgattcgtgccagcgacgcggtaatggtggcccgtggcgacctcggcgtggaaatcggcgatgccgagctggtcggcatccagaagaagatcatcctgcacgcccgccgcaacaataaagtggtgatcaccgcgacccagatgatggagtcgatgatccacagcccgatgccgacccgcgcggaagtctccgacgtggccaacgccgtgctcgactacaccgacgcggtgatgctctcggcggaaagcgccgccggcgagtacccggtggaagcggtgaaagccatggcccgcgtctgccagggcgccgagaagcacccgaccagccagaaatccagccatcgcctcggccagactttcgaccgctgcgacgagagcatcgccctggcgtcgatgtacacggccaaccacttcccggggatcaaggcgatcatctgcctgaccgaaagcggcttcaccccgctgatcatgtcgcgcatccgctcgtcggtaccgatctacgcctactccccgcaccgcgagactcaggctcgcgtggcgatgttccgcggcgtggaaaccatccccttcgacccggcggcgctgccggcggagaaggtcagccaggccgcggtcgacgagttgctcaagcgcggcgtggtgaccaagggcgactgggttatcctgaccaagggcgacagctacaccgcccagggcggcaccaacaccatgaaggtgctgcacgtcggcgacctgctggtataa

SEQ ID NO: 364552 - DNA, 915 bp, Pseudomonas aeruginosa
atgaacctgcataacctgctggtggtcgtcgacccgagcagcgacgaacagccggcccttacccgtgcccagtggatcgccgaacgcagcggtgccagcgtcgagttgctgctgtgcgacttcaacccggcgctggacggcgggctgttcttcgacagtcactcgctgcagcgtgcccgcgacctttacctggacgaacgggtcacctggctggagcagctttccatgccgctgcagcaggccggcatccgcactcaggtcgaggcccagtggggcaagccgctggaccggatggtcctgcaacgggtcggcgaaacccggcccgacctggtcctcaagagcacccgcaagcacaacctgctgcgccgcctgctactgggcaacagcgactggcaattgatccgccactgcccgcagccgctctggctggtccatcacgacgcctggcgcggccagcgcctgtgcgcggcgctcgacccgctgcatgccagcgacaagccggccgccctcgatcaccggctgatcgccgccgcccgccagctcgaagccagcctggggctgcgcgccgactacctgcatacccacgcggcgttgccgcgcagcctgctgttcgacgcggaaatgctcgccggttacgagcgtttcgtgctgcaacatgaggaacgtcaccgccaggccttcgacgacctgctggcagcctacccggagatcgccgcggagcgccgccacctgctggccggctatgccgagcaggcgatccccgacttcgtccgggccaacgacatcgacctgctgctgatgggcgcggtcgcccgggggcacctggacaacgcgctgatcgggcagaccgccgaacgcgtcctggaggaggtggaatgcgacctgctggtgctcaaaccgacaaatgacatctga

SEQ ID NO: 364553 - DNA, 807 bp, Pseudomonas aeruginosa
atgcgcttcgcccgccgtctcgtcctgctcccgttgctgtcgctgctggccgcctgctcgccgaccacgccgctgttcgtcgcccaggtgaccactggcgaagtcgccgaatacaagcagatgaagagcaaccgcatgaccgccgccatcgaggaggaaggcgacctgctgacctacagcgccatggcgatccgcgacaacaggagcgccgaggcggaaaagctctacctcaccggctacgacaatcgccgctacagcgccgaggtgcgcggtatctcgctgtaccagatcggcctgatctacatgagccgctacaacgaccagcgcgacgacgccaaggccaccgactacttccagcgcgtggtccgcgagttccccggcacccacgccgccgagcatgcccaggcgcgcctgctggcaatgcgccagcgggccagggagccggtgcagaagagcgctcgcgaattgctcgccacctggaagccacagcagaacctcgatctctacaagaccagcctcgacccggacatgacgctgctgtcgcgccgcgcggtgctcaaggatcgggtcgacgaagccgccgagctctacctgctggcggtcaacgatccggcgattcctgccggtataaaggaaaaagccctctaccagctcggcctgatgtacctggcgccggacaacccgcacccgaaccgcgacaaggccatcgaatacctgcgtcgccagttgctcgactatcctgaaggcgaattgtcgaacaaggccggccggcacctcgaccaggcgctcaacgtgcaacctcgctga

SEQ ID NO: 364554 - DNA, 378 bp, Pseudomonas aeruginosa; identical to SEQ ID NO: 342940

SEQ ID NO: 364555 - DNA, 423 bp, Pseudomonas aeruginosa
atgcgtgccctgtggttctgtgtcgccctgatgcccgtgctggcgcaggcggacatctatcgctggaccgatgcccagggcaaggtacacttctccgccacgccaccggccggcgcgcaacgcgtcgaagtcaggccgcaggtggtggaacgtgacgccgcgacccgccagcgcgagcagcgcacccaggagtatttcgatgctcgtcgcgaggaacgcaccgccgccgccgaacgtgccggccagcgccaggcggcgctggccgaggaatgcgggcgcttgcggcaacagttgtcccagctcgaacgcggcggccgcttctatcggcaggacgccggcggcgggccggtttatctgagcgatgccgagctggacgccattcgtcgcgaactggcctcgcgggagtccgaacgctgccgctga

SEQ ID NO: 364556 - DNA, 360 bp, Pseudomonas aeruginosa; identical to SEQ ID NO: 342942

SEQ ID NO: 364557 - DNA, 1332 bp, Pseudomonas aeruginosa
atgaagccatcgcgcgccctgctggcgctgttcgccgcgctcctgctgctggccatcggcctgggcagcctgtcggcgctcggccagcggttgcctgcgcaactgcatacattctggtgggcggcgctcgccgcgctgctcctgctcggcctgctggacgccctgtgggcgcgccgccaggcggtgccgaagctgagccgccagctcagcggcaacctgccgctggggcgctggagcgaagtgcgtctgcatctgcagcacacctatcggcgtccggttcgcctgaccctgttcgatcacctgccggccggcatggatttcgagtacctgccgcaggaggtcgaactgcgcccgggcgaaagcaccgaggtcggctaccgggtgcggccgctcaaccgcggtcacttcgtgtttccccgctgcgagctggaactgcccagcccgctgcgcctgtggcggcagcgccgctacctggaagcacgcggcgagacccgcgtctacccggacttcgcccgcctctacggcgccgaactgatggcggtcgaccactggctcaaccagatcggcgtacgcggcggccagcgccgcggcctcggcctggagttccaccagttgcgcgaattccgcgacggcgacaccctgcgccagatcgactggaaggccaccgctcgcaaacgcacgccgatcgcccgcgaataccaggacgaacgcgaccagcagatcctcttcctgctcgactgcggccgccgcatgcgcagccaggacggcgacctgtcgcacttcgaccatgccctcaacgccagcctgctgctggcctacgtggccctgcgccagggcgacgcggtgggcgccatgaccttcgccggcgacgaccgccggcatctcccgccgggcaagggcagcgcccagctcggcgcgctgctcaacaccgtctacgacctgcagaccagccagcgtcccgccgatttcccggaagccgtgcaggcggtgctgtcccgccagcggcggcgggccctggtgatcctggtaaccaacctgcgcgacgaggacgacgaagaactgctcggcgcggtgaaacgcctgggccgccagcaccgggtgctggtcgccagcctgcgcgaggaagtgctcgacaccctgcgccacgagccggtcgcccgctacgagcaggcgctcgcctacaccggcaccatcgactacctgaatgcgcgcaacggcctccacgagaagctcgcggcccacggcgtgccagtgctcgatgcgcgtcccagcgaactcgggccggagctgatcagccgctacctgggctggaagcgcgccggcgtgctttga

SEQ ID NO: 364558 - DNA, 1008 bp, Pseudomonas aeruginosa
atgagcgaacagacgcccgaacaaccgagcaccgcgcccaacccggcgctccagcgccagcgcgccagccagctggcccaggccctgcgcaccgaactgcagaaagccctgatcggccagggcgcagtgatcgacgacgtgctcaccgcgttgctcgccggcggccacgtgctggtggaaggcgtgccggggctcggcaagaccctgctggtacgcgccctggcgcgctgcttcgacggcggcttcgcgcgcatccagttcacccccgacctgatgcccagcgacgtcaccggccacgccgtatacgacctcgccagcgagcagttcaagctgcgcaaggggccggtgttcacccacctgctgctggcggacgagatcaaccgcgcgccggccaagacccaggccgccctcctggaagtgatgcaggagcgccaggtcaccctggaaggacgcgccctgccggtgccgcagccgttcatggtgctggcgacgcagaacccgatcgagcaggaaggcacctatccgctgccggaagccgaactcgaccgcttcatgctcaagctgcgcatcgattacccggccgaagccgaggaacagaccctggtgcgccaggtgacccgctccgcgcgcagcgacatgctcgacgtggccaacctgcggccgctgctgaaggacaaagacgttctcgccctgcagcggatcgccagcgacctgccgatcgacgaccaggtcctcgactatgccgtgcgcctggcccgcaccacccgcaactggccgggcctggccctcggcgccggacctcgcgcgtcgatcgccctggtccgttgcggccgggcgcgggcgctgctgcgcggcggcgagttcgtggtgccggacgacatcaagggttgtgccctggcggtcctgcgccatcgggtccggctgtctccggagctggacatcgaggggctgtcggtggaccaggtcctgcaacagttgctcgaccaggtaccggccccccgcgtatga

SEQ ID NO: 364559 - DNA, 1266 bp, Pseudomonas aeruginosa
atgatgagccggcgcgcgcgcttcctgctgctggccgtgctcctgctgctggccgggctgctggcgatcttcctggccagccgcctgcaaccctatacggagacgatcgacctcggcccatcgccggaggcccggcgcaatccctacctggccgccgaactgttcctgcgcaagcagggggtcacggtgagccgcgccgatggccttgaggtcctcaaggagctgccgccctccgggcataccctgctcctgctcggcagccgctccggcatgactcccggccaggctcgccgcctgctgcaatggagcgagcagggcgggcacctggtgctgatcgccgaacgcctgtgggacgaggacgagaagaagagcggcgacctgctgctcgacagcctggatatccgccagtacctgaccgaggacttcgacgacagccaggaccgggccagcgaggaaaccgccgacgccgacgaaggtagcgtcgacgaccatgcgaccgaagcgccgccggaggaagccgccggcgaggaagaagagcccgccgacagcgtgccggactattccgcactgacccgcctgtacctggaaaacgagcgctcgccggcctacatcggcttcgatcccgactaccacctctacgatccgcagaaccacgcctacgcctgggccaacagcggcgacgccacccacctgttgcagatgcagcacggcaagggcctggtcacggtgctcaccgacgcctggatctggcagaaccgcaacatcgagcagtacgacaacgcctggctgctctggtacctgacccaggacaaccaggtgaccctgctctaccgcgccgaacgcgacagcctcgccaccctgctcgcccgccacttccccgaggccctggcggcagcgctgctgctgttgctcgccggcctgtggcgcgcagggctgcgccagggtcccttgcagccggtggccagccgttcgcgccggcaactggaggaacacctgcgcgccggcgccgacttcctcctccgccagcgcggccacgtcgccttgctgcacggtctgcaacgcgacatcctgcgcagggcgcggcgtcgccaccccggtttcgaacagctcggcgtcgccgagcaatggcagatcctcgggcgcatgacccgcctgccacccagcgccatcagccaggccatgcgcccatatccggcgcagcgcctttccgctgccgacttcacccgccaggtcgcccacctgcaaagcctcaggaatgccctatga

SEQ ID NO: 364560 - DNA, 1572 bp, Pseudomonas aeruginosa
atgcgcctgactgacgccagcgtggcgatccgcccgcgcagcgcctgggaagcgctcgacctcggcatcctcctggcgcatcgccatgcgcgcctgctgatgggcagttgggcgttgctgaccctgccgctgttcgccgtgctcagcctcctgctgtggcagcatccgaccctggcgatcctgatcttctggtggctcaagccggccttcgaacgactgccgctgtatattctctcgcacgccctgttcggcgatacgccaaccctgaggcaggccctgcgcgcctatcccgccctgctgaggaagcagttgccggccagcctgctgtggcgccgcttcagtccgacgcgcagcttcgacctgccggtcctgcaactggaaggactcgccggggagccccgcagccagcgcctgatcgtattgtcccagcgcaacgccggcggcgcgacctggctgaccgtggtcggcgtgcacctggaaatggcgctctgggccggcttcgccatgcttctctacctgctgatcccggcgcagaacgagatcgactggaactggcagagcctgctcgacccggaagccggcgagtggctctggctggagcacctgtcgaacctgctctacgtcctggtgctggtagtctgggagccgatctacgtggcctgcggcttcaccctctacctgaaccggcgcaccgaactggaggcctgggacatcgagctggtgttccgccgcctgcgccagcgtctggtcggcagcgcctatgtcctgctgctcggcctgaccgcttcgctggcctggctgcccgccccttccgcctatgccgagccggcggccgccaccagcgccggcgaagccgagctgccgcccgagcaggcccgcctgctgcggcagaaactcaacagcgaacaggccggcaagcagatccgggcgatcgtcgacggcgcgccgttcaagaacagcgagaccgttacgggctggcgcttcggcgacaagaccgagaaaaaagacagccgcaaggaggacgaagagcggctcaaggcattcttcgaggccctggccaactgggtgccgttccgtcacgcggcgcaggtcatcgaagtgctgctctgggcgctgctgttcagcgcggtgttcctgctggtctggcgctaccgtgaatggctgcgcctgttcgtcggcaacctgggcttgccgcaacgggcccgccgcgaagcgccgacggtgatgttcggcctcgatctcagtccggaaagcctgcccgacgacatcgccggcaacgccgaacggctctggaacgagaaaccacgggaagccctcggcctgctctaccgcgggctgctcagccgactgctgcatgactaccgcctgccgttgaagggctcccataccgagggcgaggtcctgcgtctggtcgaaggactggagcaacaacggccgctgctgcactacagccaactgctgaccgcccaatggcaggcgctcgcctacggccaccggctgccggccgacgacgctcgccagcgcctctgcgacggctggcgcagccttttcgccgcgggagccaagccatga

SEQ ID NO: 364561 - DNA, 981 bp, Pseudomonas aeruginosa
atgaaacagagcctcttcgaacagcgccaccaggccgcctggcaacgcttcgacaaacgcctcgccttcctcgagaaaggcaagaagctggaaggctccagcgacgacttcgccgccgattaccggcgcctctgccagcaactggcgctggcccaggagcgcggctacagcagtcacctgatcgaccagttgcagcaactggcgatgcgcggccatcagcagttctaccggcaccgcagccacctcggcagccgcatcctcggcttcctgcttgccggcctgccgcgcctggtccgcgaggagtggcgcagcatcgccgtggccagcctgctgttctacggcagcgccctgctcatggggctgctggtctatcactttcccgacctgatctacagcgtggtcagcccggacaaggtcagcgagatggagtctatgtacgccccggaaaccacccgcctgggtccgttgggggcacgcgacaccagcgacgactgggaaatgttcggcttctacatcatgaacaacatcggcatcgcctttcagaccttcgccagcggcgtgctgctgggactcggcagcctgttcttcctgctgttcaatggcctgatgatcggttcggtggccggccacctgacgcagatcggctacgtgcagaccttctggccgttcgtcatcggccacggcgcgttcgaactgaccgccatcaccttcgccggcgccgccggcctcaagctcggctgggcgctgctcgcgccaggtcgcctgacccgcggcgaagccctgcggctggccgcccggcgcagcgtgcaactgatcgccggggtgatcgtgctgttgctgctggcggccttcaccgaggcctattggtcttccatcagtcatttcgagccgcgggtgaagtacgtggtcggcgcggtcctctggctgctggtcggcagctacttcctgttcgccggacggagccgccatgcgcctgactga

SEQ ID NO: 364562 - DNA, 750 bp, Pseudomonas aeruginosa; identical to SEQ ID NO: 322568

SEQ ID NO: 364563 - DNA, 738 bp, Pseudomonas aeruginosa
atgaacgacaccagcaatccctacgccacccccgccagcgccctgcaaccgacccaggcggtgccgccggtcatcggcgactacgacttccgcatcggcgacgtgatcagcgaagcctgggccaagatcaagggcgtcaaaggcatcctgatcggcgccttcgtggtctacagcgtggtgatccagaccatcaccttcatcctcaccctgctcttcggcggtatcggcctgatgagcgaggccgatcccatcgccttcgcggtcggccagatgatcgccagcctggtcgccacggcggtgggctacccgttcttcaccggcctgaccatgatcggcatccgccgcgccgccgaccagccggcgaccttcaacgaaatgttcaactacttcggcatgctggtgccgctgctgctcaccggcctgctgatgatgctgatggtctacgtcggcttcttcctgctgatcatccccggtctctacctgagcgtcgcctacatgctcgccctgccgctggtggccgagcgcggcctgacgccctggcaggccctggaaacctcgcgcaaggccatcagccgccactggttcaaggtgttcggcctgctgctggtgctgagcctgctgatgctggtgagcatgatcccgctgttcatcggcctgatctggaccggcccgctgttcgtcgtctccatgggtattctctaccgcaccatcttcggcgttcgcccactgggcaactga

SEQ ID NO: 364564 - DNA, 1443 bp, Pseudomonas aeruginosa
atgaccgtgaacgcgagtattttttggtacgactacgaaaccaccggcatcgaccctcgccgcgaccggccgttgcagatcgccgggatccgcacggacgaggcgctgaacgagatcggcgagccgatgaacctgtattgccgtcccagcgacgatatcctgccccaccctatggcttgcctgatcaccggcatcactccccagcggctggccgagcgggggctgtccgaggccgacttcatgacccgggtacacgcccagctggcgcagccggcgacctgcgtggccggctacaactccctgcgcttcgacgacgaagtgacgcgctacagcctgtaccgcaacttcttcgatccctacgcccgcgagtggcaaggcggcaatagccgctgggacctgatcgacatggtccgtaccgcctatgccctgcgcccggagggcatccagtggccgcagctggacggccggctgtcgctgaagctggaaatgctcaccgcggcgaacggcctggagcatgggcaggcccacgacgcgctttccgatgtccgcgccaccattgccctggcccgcctgatccgtcagcgccagccgcgcctgtacgattacctctaccagttgcgcagcaagcacaaggtgctcgaccaggtacgcctgctgcagccgctggtgcatgtctccggacgcttttccgcggagcgccatttcctctcggtggccctgccgctggcctggcacccgcgcaaccgcaatgctctgatcgtctgcgacctctgcgccgatcccgcgccgctgctggagttgtcggccgaggacttgcgcaggcgcctgtatacccgtcgcgacgaactggccgagggcgagttgccggtgccgctgaagcagatccaggtcaaccgttgcccggtggtggcgccgctgtcggtattgcgcgccgaggatcgccagcgaaccggcatcgaactcgatgagtgccagcaaaaagccgagctgttgcgccagcatcaaaccgtctgggcggacaaactgacagcgctatatggcgaagaaagtttctccgccagcgacgaccccgagcaacagttgtatgacggatttattggcgatcgggatcgacgcctttgtgaacagctgcgccttgccgaaccggagcaattggccaaagaacaatggcccttcgacgatgcccgtttgcaggagttgttcttccgctatcgtgcgcgaaatttcccggaaactttaaatgtggccgagcgccaacaatgggaaagcttctgccgcaatcgtttgtcccatgaagaatacggcgcaccgaatactttgccggccttcgaggcggcgctggaggcttgtcggcaagagcagggcggcacattgccggcggtacttgcggcctggcgcgattacgccgcggaactgcgtcaacgctattcgctggagacttga

SEQ ID NO: 364565 - DNA, 375 bp, Pseudomonas aeruginosa; identical to SEQ ID NO: 324760

SEQ ID NO: 364566 - DNA, 381 bp, Pseudomonas aeruginosa
atgaaaactgccacggcagtgcttgccatcgctattaccagctcttcctccgcaagtgcggccttctacacgcaagaacctgatccggcctacgagaaagcgagcattgcccttttctgcatgaaccacttctacaaccgcacaaaagggcatctaggcacgcaggcgggaatggcagcacagacggatctggctagacgattaccttccttgccagatggcgagaagctagcagagaacctgcggctagctctggactcgattacgaaggatgaagggagtaaggcagtttcgcccttctgttggcaatacatcccacaggaccacggcttgacgactgagcagatcgaatacttcctgaaacacagcaccctagattga

SEQ ID NO: 364567 - DNA, 126 bp, Pseudomonas aeruginosa
atgcctagcaaagtcctccatattcacggcaggagacaattggaccaagcggccatctcgcagttcgtcttcaaccagagctgccggcagaagtcctgcaccctggccagcaaggatcgcctttag

SEQ ID NO: 364568 - DNA, 489 bp, Pseudomonas aeruginosa
atgcacaccggtgccggcatgtatggggcattcatcgtcgatccgaaggagggctggtcgcctgcgcaggaattgatcctggtacagagcgatttcaccctggccgatggtgcaaatggtgtgaaagtgccagacatgaaccgaatgatcggcgccagggatgtggattacgtggtattcaatggccatgccacccaatacgtcgatgagccgattcaagtgaaggtcggcgaaccgattcgcattttcgtggtcaatgctgggccaaatgtgtggtcgagcttccatgtggtgggcgcgatattcgatcgcgtccttgtcaacgcgagcccgaaaaaccagctattcgacctgcagtcggtctcaatcggacccggagaatcgacttgcgtggagttcacgctcgatgaaccaggtgtgtactcggccgtgaatcatgccttcggccacgccgcgctaggtgccgttgccctaatcgaagcgacgtag

SEQ ID NO: 364569 - DNA, 756 bp, Pseudomonas aeruginosa
gtgcaacatactatcgcccgttgggttgatcgccttcgcgaggagtacgccgatgccgtcgcgattctgctgaagggcagttacgcccggggcgatgctgcgacgtggagcgatatcgatttcgatgtattggtaagcacgcaggatgtggaggattaccgcacctggatagagccggtcggcgatcggctggtgcatatctcggcggcggtcgagtgggtcaccggttgggagcgcgataccgtcgatccatccagttggagttacggcctgccaacgcaggaaaccacccgacttatgtgggcgattaatgacgagactcggcggcgcctggatcgtccttacaaaacgcatccggccgccgaaccggaggtggaggataccgttgaggcgctaggcaaaattcgcaatgccattgctcgcggcgatgacctgggcgtgtatcaatccgcacagaccgtggcaaagttagtgccgacattgttgatccccatcaatccaccggtgaccgtgtcgcacgcacggcaggcgatcgaggcgattctcgcgtttccccgcgtgcccgtggggtttgcagcagattggctcacctgcctcggattggtggaagagcgaagtgcgcgctcgaccgccgcagcggccgagcgcatggttcgtggcgtgctcgaaatgctccctaccgatcccgacctcctaggcgaggatatcgcccgattgatgaacgccgggttgctcgagaaatacgtgcagcagtga

SEQ ID NO: 364570 - DNA, 717 bp, Pseudomonas aeruginosa
atgccagaacgaattcttacattgcgcgaattgaatcgaacccacttgcggcgacagcatctgcttgagcgcactcccataagtacaggggatatgttgcgtgcgatcgtcgggttgcaggcacaggaagtgaaagatccgtatctcgcactctggagccgaatcgagggtttgcagcacgattacctggccgacatgctactcaaccgctcggcggtacgagcctcgctcatgcgcggcacgattcatctcgtgaccgcggaggattaccttctgctctttcccatcacctacgccctacaccttagggcagtgaaatcagttgccagcgcccggctcgtgccgtctgaacatcaccagaagatcacggagttcagccgcgaactgctcaccggaacatcgttaacggcggcgaagctcggtgaagctctcgccgaacattggccgcaatacgatccgcgctcactcagtcaggtggtgaggtttttgctgccgctggtacaaactccaccccggggcgtgtggggcagcggcatttcgagtcggccctcctggacaatgccgcacgactggttgaataccgacgtgcaagaagccgcgggcccggcacacgagatgattcgtcgctacctgcgcgcatttgggccggccagcttaccagatatcacagcgtggagtggcgttaccaacctcaagcagcttcgccagcaagcctga

SEQ ID NO: 364571 - DNA, 801 bp, Pseudomonas aeruginosa; identical to SEQ ID NO: 360631

SEQ ID NO: 364572 - DNA, 3084 bp, Pseudomonas aeruginosa
atgggtagcaaagctttcgcaaaagccctgacggcgaccggctatctcctacccgatggtgggccagcaccgggactggcacgcgccggggaagatggaggagcacggctgcgtgccattctgtcagacaaccgcgttgggctacaggccgatgcggtcttttcagcacagagtgtaccaactgcgattttcaaggatgctggcgacgaagccccctcagagcgacagattgcccaatggcatgaagcagcctggaacgttggcgtagccccattgctatggatcatcacacctactgacatacgcctgtacgattgctatgcgtctcctgccaagaaaaacccacagcagattgcaactgagcccctggatgtattttccttacaagccgaagaccgactgcaatccttggatgccatgtgtgggcgctatgcgaccgaaactggggcgttctggtccagcgccatcggaaagaggattgatcgccgacaccgagtggaccgccaactgcttgatgaaatcagtgctcttgaagatctgttgactgcccttcccccagccaatggcgtgccacatccggatgaaaaagaggaggcacaggcttcacgcgacttcgctcagcgtctgattggccgctgtattttcacgtcatacctggttgatcgcggtatagctcaaccgtttctaccgcaggagctttccgccgacgtggcggacatgtttgccacagtcaactcggccttcaggctgtttcagtggctgcgcaacaccttcaatggtgacctcttcccgatggacgatccgggcgccgagcaccaacgcttaagcggtgctcatctggaactactgcgcgacttcgttcaaggacgtagtctgctatccgggcaaggtcgattgttccgtttccgttttgacgcgattccaatcgatctcgtcagttcaatctaccagcagttcgctcgatcaagcgcggcggacgacgcgcacacgcagggactgcactacacacctgtggagcttgttcacttaactttagatccggtattcgaggcgctgccagcagacgcacgcgtaatcgacccaacatgcggatctggcgcttttcttgttgaagcattccggcgactagtctggaagcatacgcaaggcaaaaccgctagccgcaccgtggttcgggaggtgctctacaatcaactctatggaattgacatcaataagtcagcgttgggtatcgctgcattcagtttgtacctggccgcattagagctcgatgaggagcaagtccgggacattcaagatttgaaattccatcgactgatcggcgtgacgctttttgaggccgatacggtaaacgacgaactaccggatctgattacacagcgaccgtttgatgcagtcgtgggcaatcccccatggacctttgtaaagaaggccacagcttcacgcaagcgcaagctcaacgaccctcaatccagccgcccccgacgcagtcccgatcaagaatttttgtggatagcttcacgcttggcaggagaggccgggcgggtagggatgatcatgaaagcatctccattcttctcgaaggatgcccatgcaatccaatcccgcgaagccctgctgagcaccctccatcccgcagcgctggtgaatctatcagcgttgcgcaaggaagaccttttcccggatgcaacggggcccgcgctgatgttctttggccgctgtgcactcattgatcgacaagatcgtatgctggtaggttcaatcccgtggacacctgattttcgacgcaacggggtgtttcacgtcggcccaggcgaattgaagagcgtgccgttatcacgcgtattgcagacgccagcaatgctcaaggcaaccgcctttggaaccgcacgtgatggctggttaatagagaaacttgaacgtacctttccgacactggagcaagtgctcgactcctatgggctgagtgcgcgcgggcaaggagtcaagatcaaggggaatggggttgagcgcccccctcagcactattatcagctggattttgtcacaacctccgcttattcgccgcttcgattggtacctcaagcgctcacgaagttcactcatgaatggttacatcgttcaaggaagcaaaggtcagaaatctttgagggtcctttgttgctatgtcctaaagggaatcaagctgatgcgatcgagctgggtcgatatagcgcaaccgtagtcgagcaaagtgtagttttcaacgagagcttttttggcatttcatttgccggcaaagaactgtctgcagcacgcgtactctctgccattctgaattcgagcctcacctctttccaacttgctttgggtggtggtgcgtgggggctggagcgtcctaccgtcgagccgcatgaccttctttcgttgcgtgtgccgaatctaagcgaagtcggcacggacttgcttgaggctgtactgtctgccgaagctaacgttgcgaatgcgcccgacgatatagaattgatcgcggccctggatcattcagtctgcgaactctatgggctggatcgcaacgaggctattcttgcgagcgacggtgttcggcatgcccgcgctttattatttgagagcagagcgcagcgtatggccttggtcaagcccccctcctccgctgacctgaccgcttatgcgagcgaagtaattcgaacagtcaatgcctatcttcgagcacgaggcactcggcatctagaggctgttatctatccgcgacacatcgtctctggaaatgcttttgatggaacgccaggggtagatgtcgtcagattttccatggctgcaggtgcgccctccgttgtgccacgcatacatcaaggaagtgatgcagaggtcgcaccactcgccgctcttgtgcgcgggcgagttaacccagacgttcccccataccttaacgaacgtcggcaaatccgagtttacgatcaagacgcacttttcattttgaagccctctgaggtgcgctattggacacggacggcaggcctcaatgacggcgatgcagtcctagcagaccattggatcaagggattgcatgcgtctatcacctga

SEQ ID NO: 364573 - DNA, 156 bp, Pseudomonas aeruginosa
atgacccacgcgtttacattcgatgcccagataagcctcttcatccccgaactgatgcagaaagcgaagaataatgtcgatccgaccaagtacttcggcatcgttattactcaaatccagcacttcaaattcgcctgtgatttcaagattggatag

SEQ ID NO: 364574 - DNA, 324 bp, Pseudomonas aeruginosa
atgcgatacgtcctggtgctttcggttgcactgctggcgggctgcggtcagcagtccagtgaagacctggccgcagaccctgtacggctcaaggtgctgcgcgcccagtgcgccgcggattggaggggcgtgggcgagggcgtctgtaggggtgccgccgaggcgtatcgacgccgcttcttcgctggccacggcggcccggaagagtacgtggctctggaggagctgccgccgattccaccgacttttgacagccccgtcgacgatgaggctgagaccgggcgcgatgcgccggctgcttttgcctcggaggccacacaatga

SEQ ID NO: 364575 - DNA, 264 bp, Pseudomonas aeruginosa
atgaagaaggtcatgccgtttctatgtgtcctggcccttgcggcctgcggccagcccgacgtaccggtgccgtcggcgttggccacggttgatgaactcacggccgatccagtgcggctgaaggagctgcgcgagcagtgcaagctggatcgcgccaagctgggtgacgggttgtgcaatcgcgtcgccgaggctacgcgcaaacggttctatggcgatggaacagtgccctacacaccgccgaaagagccgcccaagttctga

SEQ ID NO: 364576 - DNA, 1803 bp, Pseudomonas aeruginosa
atgaataccaatcgtctatgcgccggaaagctttcctctgcactttttctgtctgtgcttataagcgcgcagacgtatgcagtgacttttaacatcggagaaatcgaggggcagctagactcatcgctctcaataggtgccattatgtccgcgcgtggggcggatcctgacttgattggtagctcgaatggtggcactggatttacacagagcggcgacgacggtcgattgaattttaagaagggcgaaacgacatctaagatttttaaaggaatccacgatctagagctaaaatatggagatacaggttttttcatgcgaggcaagtattggtacgacttcgagttgaaggacgaaagccgtacttggaaggaaatcagtgatcatggccgtaaacaggctgcacagtcatcaggtgcccaggtgctcgatgcgttcatctatcacaattattccttcggagatatattcggaacactccgattaggcaagcaggtggtgaactggggggagagcacgtttattcagaatggaatcaattctattaatccgatcgatgtagcggcgttccgccggccgggagctgagattaaggagggactgatacctgttaacatgttttatgcctcacagaatctgactgatcaattgacagccgaagccttctaccagttggaatgggatcaaacagtgttagataactgtggtacatttttttcaggctccgatatcgctgctgaagggtgtgacgaaaattttcatatatttgatgccgaagcagtcggcgctctaatgggggtacagcagcagctgtctgcattaggagttgacttagaaccggagggccttattgttccacgcggcggtgatcgcgatgctcgggacagcggccagttcggcactgctctgcgctggatgggtggagaagcagagtatgcggcctatttcatcaactatcacagccgcaccccctatctaagcgtacaaaatgcctccgctacagatataatagctgcgaccaccattcttggcggagcactagcggcacccattcttgtcgggcgaggtaattacttccttgaatatccagaagatattcaactgtacggcttgagtttttctacaactttgccaacaggtacagcctggactggtgagattagttacagacctaatcagccgctacagattaatggaactgaccaaattgccaagctggtgaccagcgttgcagcggggttggcctcaggaggcattgatgggggactggagcgcgctggtgatatccagcaaggctacgtacgaaaggaggtgactcaggcgcaaacaaccctggttcattttctggatcaatttatgggtgcggatcgtttgaccctaattggtgagttcggcgtaactcacatcggtggcttagaaagccaaagcgaaattcgttatggtcgagacagtatttatggctcaccctatggagatgacgcttccaatgttgcggcccaagcagcatatggcgtccacggattttacaccaacacttcttggggttatcgtgctcgcgctgtatgggattacaacaatgtaattgccggtatcaatcttaagcctaacctttcgtggtctcatgatgttgatggctatggcccagtttttaatgaaggggccaaagcgatcagtgtcggcttagatgcagattatggaaatacttacagcgcgagcctttcatacacggacttcttcggtggagacttcaacccgactattgaccgtgacttcgtcgctgtaagcttcggtatttcattctga

SEQ ID NO: 364577 - DNA, 1359 bp, Pseudomonas aeruginosa
atgaatataataaaatattttttttgtgtttcactgctttgtattgtggccagtgcaagtgccgctgtatccgaagaagaggcgagtcgcctagggaaagatcttactcccacaggggctgagatggctggtaatgccgctggtaccattcctccgtggactggtgggttatccaaagatagtggtaaaagcgataacgattttcttgaagacccgtttgctaacgaaaagccgctatttattatcacgtcgcagaatctagagaaatataagtctaatctgtctgaggggcaggtggcgctattcaagcgttaccctgaaacatatcggatgcttgtttatccaagtcaccgcaccacagctttgcctgacaggatttacaaagcgatcaagatcagcgcgttgaaaacggagacacttgagggtggaagcggtttaaagggcttttcggaaagccgatactacgcgtttcccatcccccaaagcggacttgaagccatatggaatcacattacccgatatcgagggggtacgttacgtcgcagcgttgtccaagtcactccgcaggcatcgggcgattacacggttattcgttttgaagataaagtcggatttccagacggcttgaaagatatgggaggtgactcctcgaacgtgttgttatattacactcaacgagtaacttcgccatcacggttggctggaaatgtgcttctggttcatgagtcaatcgaccaaatcactgagccgcgcgcagcgtggcaatacaatgctggtcagcgtcgagttcgtcgcgcaccgcaagtagcatatgacgggcctggcacggcggccgatggcctagcaacgactgataactttgatatgtataatggtgcgccaaatcgctatgagtggcgcttgataggcaagcgagagctatatataccttataacaactataagctagcttctaatggcttaaaatatagcgatatagttaagcctgggcataccaatcaagatctggcgcgttatgaattgcaccgggtttgggaggtggaagcgagtctgaagcagggagagcgccacatctatgcgaaacggcgcttctttcttgatgaagatagctggcaaattgcactttcggagcagtacgacgcccgaggtcaactatggcgagttggtcaggccatgctgatccagcagtacaaagcacaagtgcccatgtatgcattcgaaacgcttaatgacttgatcgctggtcgctaccttgccataggcatgaacaatgaagaaaagcacggggttgagtacggtattggcttgtcttcgtctgagtttacaccagcggcattaagaaattcaggcgttcgttaa

SEQ ID NO: 364578 - DNA, 801 bp, Pseudomonas aeruginosa
atgagcaatcataatattcttcttatccatggaacatggtgcaatgggggcaattggggaaattttgccactgaattgaaagaccgaggcttcactgtatataccccatcacttcgacaccacggtgcaccaagcgaagatacttggatgaatgcccaaaaagtcgccaaggtggggttgttggattatgtagaagatatattggaacttgttgatgctatggatagccctccgatcatagttggtcactcattgggcggactcattgctcagcttgtcgctgagcgccggcttaacaaaggtctaattcttctaggtacagcgcctacagccggtatgtttaacctctataccacctcaattcttgtttggttacgttaccttccgcaatggttgatgcgtaagcccatgtatccctgctcctgggacctctggaaaaaaaggatatgtaacagtcagtcggaagagatacagaagctttattacggcactctctgtgctgagtccggaactacgtactttgaaatggcgctttggtatttggatcgcaagagatctgcgcgagtgaattttgacgcaataacctccccggtcttggtggtgtctggtctagaggacaagtgcgttgcccccagaattgcacgagttactgcgcagcgttacagctatctaagtacccttgaagaaatttctggctcggatcacatgatgatttttggtggctacatgcacgaaacactggcaagaattgacttgtggctaaaaaaacacaatttagcaccagtaacatcaactaaataa

SEQ ID NO: 364579 - DNA, 1041 bp, Pseudomonas aeruginosa
atggacaaaagcttaacctttcgagacatgagcacagtccgcgctgctggcattcaagggtataaggggttgatggagacaatgggagtgcttgcacctccgttgctgcttcgccatggtcttgaccctaccgctttagatgacccagaggcgttgctgtctctccaatcagtagttaacctgttggaggaaagtgcggaggttacacggtgtccagactttggacttcgattagcgggcggctatgactcgggaatactgggagttgttgccctagtcattcaaaacgcccctactgttagacaagccattgccgatctatcaaagtatcttcgcttccatagccctgggttcgaagttacgcttgatgaaagaagcttgaagttctctgactgtgtagcgttgcgcttcgaagtatgcttgccggtgtttgtcgctcagcgccaaaccgtcgatgcttgcgtcgcctacatgtttaagtttctacgcacaattctcggcgatttatttcgggttcgcggggtttctctcccgcactcacctgcttcattggaaagcagctaccgtagcttcttccatacgtacatcttctttgaggagtcgtacgcggctctgcacatccctagagacatacttgacagaagcctaaagtctattaatccggcagtgcgtaagctagcccttgatcatcttgggaaaagcttaccccctgaatcatcaccactatcccaaagagttaggcaggctcttatccacacgctaggggttaatcgaggcactaaagcagagatagcaaagctgctaggcatacatccgagaactttgcaaagacgcttagatcatgagggtgtttcgttcgagctcatccgagatgaggtttacaaaaacgccacattgcgttatttgcgagagactcaagttccgctaaaacaattagctggtgctttgggcttttcagagcaatcagccctcactcgttcttgcaaacgctggtttgggattccaccttcggagattcgcgctcgactaacaccaccttag

SEQ ID NO: 364580 - DNA, 279 bp, Pseudomonas aeruginosa
atgatggggcagttaccgggaggacagcagcggctgttctactcgttcaatctggaagaacacgtcccgccccaacacctcctgcgcagcatcgaccagtgcctggatctcagtgacctgcacgcccatctggcggatttctatagcccgatcgggcacccctcgaagaagccagatatccggggacctggtggactacatggccccagccttcgccagtttccttcgctcaacatcaggctcttggactctaaatcccaacgcctcgcgaccgactga

SEQ ID NO: 364581 - DNA, 1977 bp, Pseudomonas aeruginosa
atgaccgaacgacgcggtgacgatttccgcgtgcgccccagcgcgccgaaaaaccgcgacaagtgcttcgtgtccaaggtgctcaagcaggtcggcaaggccggcggcaagtcggctgtgcggcgcccagcactagccggtggcaagggacagcacgccggccagcggcccggctcgcggctgggacgagggcacacggtagcgcgtttctcgggtgcctcgctcacgccattatcgcgccgggtggccatcaagaccctgctggtcaaccagcgccaggccagcccacggtcgctggccaagcacctgcgctacatcgagcgtgacggtgccggccgagatggcgaaccgggacgggcctacgggccgcaggcgaacgatgccgacctcggtacattcagggaacgctgccaggacgaccggcaccatttccgcttcatcgtttcaccggaggacggtgccgagctggacgacctgcgtacctacacccggcacctgatggggcgcatggaggccgacctgggcacgcggctggactgggtggcggtggatcactggaacaccgacaacccgcacacccacatcgtcgtgcgcggacgcgatgacaccggcaaggacctaatcatcgccggcgactacatcgcccacggtttccgccaccgggccgccgagctcgccaccgaatggctagggccgcataccgagttggagatccagcaaaccttgcagcgtgaggtggagcaggagcgctggacgagcctggatcgcacgctgcaacgcgaggctggcgacgatagccaagtgcatgtcgaacgcctcaacgaaccccggctgcaacgccagcgcctgctgctgatcggccgcctgcagcgcttgcagcgcatgggcctggccgacgagattcggcccggcatctggatcctccaggccgacgctgagaagactctacgcaccttgggcgagcggggcgacatcatccgcaccctccagcgcgccatgagcggccagccacgtgagctggcggtgttcgagccgagggcggaggggcgcgccgtgatcgggcgcgtggccgccaagggactggccgacgagttgcgcgaccgaggctatctggtcatcgacggcatcgacggtagggcccattacgttgcgctcaacgcccgcgacgaactggcgaactaccccgctggatcggtggtggaggtgcgcggctcggccgagatacgcgcggccgaccgcaccatcgccacgctggcgagcgatggcctgtaccgcacagatcatcacctggcgattgcccaagggcagaagaacggacgtgatccgcgcgaggtcgtcgcggcccacctccgccggctggaagctctgcgccgggccggcatcgtggagcgcgtagccgaagggctatggaaggtgcctgacgatctaccggagcgaggccggcaatacgacgcgcagcgcctgggcggcgtggtggtggagctgaaatcgcacctgccgattgaacggcaggcccgcgtgatcggcgccacctggctcgaccagcaactgatcggcggtgggcgagggctgggtgacctcggatttgctggtgaggtgaagcaggtcatgccgcagcgcgccgatttcctggtcgagcaggggctggccgagaggcaaggccagcgtgtgatcctgacgcgcaacctgctggcaacgctacgcaatcgggaactcgctcaggctgcgaaggacattgcagcagaaacaggactggagtatcgacctgtggttgacgggcagcgtatggcaggtgtttatcgccgcagcattgtgcttgccagtggacgctacgctgtgctcgatgatggcatgaggttcagcttggtgccgtggaaacccatcatcgaacaacgactcgggcagcagattgccgcgaccctgcgtgatagcggagtgtcctgggagatcagtcggtcgcgaggcgttgggatttag

SEQ ID NO: 364582 - DNA, 555 bp, Pseudomonas aeruginosa
atgagcgccccacgtcctcgctcgcgccggcgtgctcgcctcgttctggcggggctgtccgcctgcggccttggtgcgctcgccttggcgtccttcgtgcagcccgatgctcgagttatctacaacgcttcggacagcgtcccggtcggatggtatcgcgttgatccagcagggcagcggatcgactcgtcgctggttggcagcatcgtactgatccggctaccggacgccgtcgccgtacttgccgcgcagcgcggctacctgccgatagacgtcccactgctcaagcgcgtaggcgcggtgtcgccgcaagtggtgtgcgtcgctgacgggggggtgcgcatcgacggcgtgccggtggccgccgcacttcgtaccgaccggctggggcggtcattgaaggtctggtcggactgtcgccggcttcgtcctggggagctgttcctgctgagcacgaccaattcggcgtcattcgacagtcgctatttcggcccggttggcgcatccgccgtgctcggcgttgcgcatccgatctggctggaggcaagccgctga

SEQ ID NO: 364583 - DNA, 534 bp, Pseudomonas aeruginosa
atgaatacccagccttcggtagtcatgcctgcgccgctgtcgtcgcacatggtgctccctggccagaccgatgccgcgcaactgacccgtgtctcgctcgcctacgtggagcagcgcatcaagctctacctgcgcttcggcgagccggcgcggatcacccgcctggaccattggcgacgtgtcgcgatgttcctgccgggtgccgtcttctgtcgcatctgctggcaggccaacgactacggcacgatccgctggcagctcatggtgatgcaggcttgcacgccgctggacgcggcacagcgcatccccggcgtgctgccgggtgcgcgactgctgctgcacgccgagggcaagcccgccgtgcgcgccgtgctttcccagatcgatgccatcgaagccctggacatcgcgccggccgtcgtctcgcccgcgtactggcgcacgttgggcaaccggctcgccgcgcgcctaccgctgccagcgtacacggccgagcggcatgcagcctggctgacggggagggtactgccatga

SEQ ID NO: 364584 - DNA, 792 bp, Pseudomonas aeruginosa
atggtcgatcacgagcagtggtatcccgctgcggcctacctctatgttttgcacctggacgatctagccctggcctgggagtacctgcggcgcaatcctgagtaccgtcgcgactggcataaccggcaacgtcgccccgaggcggcgcaacactgggggctacgtctgctggaggatcctgacctggatgcgcgcgatgcgcagccggcctggttcccggatcccccggagctgattcacctctatcccgatgtcgatcccatgcccgactccgcggcattcgacttctggcgcatctctggcagcaaaggcctgatccatgatggccggcgcctgctgctgatggcgcgttggccgtgttgctgcctgcggctagccgttgcgcccgacctggagcagggcatggcctatgtccacgccgtgcgggcctgcgccaggccctgcacacattactgcgttctcgcggccgagctggacaagctggctgtagccgctgatgccgcaccgtttgcggcgaccctgtgccgccccagcccagccgtgctgctggagctgcatacccttcaagcgcttgatgccaccctggcgggggcgtccttgcgcgaggtggctgtggggctgtttggggcagccatggtcaccggcggctggcacgccgacggtggcctgcgctcgaaggtgcgtcgtctggtgcgccgcggtcggacgctgatgctcggcggctatcgccgtctggcacaactcgacgagtgcggggagggccgttcggcgcagtccgcaaaacgaccctga

SEQ ID NO: 364585 - DNA, 351 bp, Pseudomonas aeruginosa
atgacccggctgctcatcaccgacacggagcgcgagcaactgctagtgaacggccgcgctcgggttgcaggccatgccatcgaccagcgcccggtggtgcgcctgttcacccccgatgcacacgcgacctggctgctggccgcgctcgaccctgccgatgaggacacggcctatggtctgtgcgacgtgggtatcgggatgccggcgctgggcttcgtgaaactgtccgagctggcgtccatcgttgggccgctcaagcgcccggtcatgcgcgacctgcacttccaggcgacgcgtacgctggctcaatacacccagctggcgcagcgaaacggctcaatcatcgactga

SEQ ID NO: 364586 - DNA, 657 bp, Pseudomonas aeruginosa
atgagcaaaattccccgcgctgctcgtgcagatggcgaagtcacccgcacgcggatactggaagcggctggggcactgtttggtacggcagggtttgccgaaaccaccagcaaggccattgcggctctggctgaagtggatctggcctccatcaattaccactttggcgggcgtgacggcctctaccaggccgtgctggtggaagcgcaccgccgcctgctggacgtcactgcgctgcagcaaatcgcagagagcgatctaccggtagcgggaaaactcagaagcctgcttgaacaattggtgcccaaatcaactgatggtgctgacagctggcacctcaccgtgctggccgcagaaatcctcgcgccctcttctcacctccaggtgctgatgcaatcggaagttccgataaaggtgtccctggcaatgaccatcgtcgcggaaatcaccggcattcccatgggcgccccggccttgctgcgctgcctgctcagcgtagttgcaccctgcctgatgctgctgatcggtcgacgcggtatacccggcccgattcaggaaattagcaagatgccccgtgaggaaattgttgatcacctgtaccacttcgccctggcggggcttgatgcagctggtcgtcggtatgcttctggtaaatag

SEQ ID NO: 364587 - DNA, 1002 bp, Pseudomonas aeruginosa
atgaagaaactgcccatcatcctcgtgaccctagccaccgtggcgctcgcattctgggcagggctgcagttcagctccggaaaaaaggacgacacgttggtgctgcatggcaacgtcgatatccgccagatttcgctggccttcgatggcaacggccgtatcgccacgctcaaagttgatgagggcgagagtgtgcatcagggcgatgtgttggccgttctcgacacgcgcacgcttgagctgcaagccgagcaagcgcaggcgaaaattgaggtgcaacaacaaaatctgaagttgctgcgcagcggttcacggccgcaggaaatcgcccaggcgcgcagtcgcacggccgctgcacaagccgatgcaacacgcgctgcgcaagacctggcacgcctgcaaggcatcgccgacaccaccaaaggccgcggcgtcagtacacaagacttggaccgagccaagagcagcgtacaggtggccagggccaccgtagctgaacgccaagaagcccagcgcttgaccgagataggcccccgccaggaagaattggccggtgccgaggctcagctcaaggcatcgcaagcgcaactcgcgctgttgcaacaccaagtcgaccaaggccaactcatggcgcccgccgatgccgtggtgcgttcgcggttgctggagccgggcgacatggccaccccgcaacgtcccgtcctggcgttggcattaactcagcccaagtgggtgcgcgtgtacgttaatgagccggacctgggtcgcgtcaaacctggcatgagcgcaaacgtatttaccgatgccgcccccgaccgggccattgccggcaccgtgggctatatctcctccgtggccgagttcacccccaaggcagtccagaccgaagagctgcgtaccagcctggtgtatgaagtgcgcgtgctggttaaagaccctgacaattcgctgcgcctgggccaaccggcgacggtgcagttggcagccggcgccgcgcaatga

SEQ ID NO: 364588 - DNA, 1794 bp, Pseudomonas aeruginosa
atgaccgacgcagtcatcaccgttgcggccgagggcttacgcaaaaccttcgaggcgccgggcggcggccccctgcatgccgtcaatgagattgccatgaccgtgcgcgccggtgagctgacggccttagtcgggcccgatggtgcgggcaaaaccaccctgctacgcatgatggcggggctgttaaaacccgatgccggcagcctacaagtgcttggcatcgatgtgacggcgcagccacaagccgcgcaagaccgcattagctacatgccccagcgttttggcctgtatgaagatttgagcgtgcaggaaaacctcaacctgtacgccgatttgcatggcgtgccgcaggaggttcgccgcgagcgtttcgcccgcatgctggcaatgaccgacctcacgcggtttaccgatcgcccggctggcaaactgtctggcggcatgaagcaaaagctcggcctggcctgcaccttggtgcgctcacccgatctgctgttactggacgagccgagcgtgggcgtcgaccccttgtcgcgccgcgacctgtggaaaatcgtgcagcaactggtggatgacgagaacctcagcgtaattgtcagtaccgcgtacatggatgaggccgaacgctgcgccaatgtatttgtgatgcaccaaggcaggctgctggccgagggtacgccggcggctctgacgcaaaaggcccatggcttgacctacgtggcgacaccaccgccgaacgcgccggctcgggacctgcaggcgcggttgatcgatgcccgtgagctaattatcgatgccgtgcccaagggcggcgccgtacgttttattcgccagccagacgtcgacagccccgcgctggaaacactgctcgaaggcattgaataccagccgcgcgaagccgaactcgaagacacgttcatgatgatgctgcgcaagcatcacgaggatgagcaggccgcaccggcacctgaagctgcgagcgtggatgaaagcgctggggtaaacaatgccctcgaaggaaccgacggcaaacccgccatcgaggtgcacgacctggtgcgcaaatttggcgacttcacagcggttgccagcacgtcgtttgaagtggcacgcggcgagatatttggtttgctgggccccaatggcgcaggcaaaaccactacctttcgcatgctctgcggcctccttcccgccaccagcggccaactagaagtggccgggttgaacctgcgcaacgcccgagcccaagcccgtgcgcgcatcggctacgtgtcacaaaaattcgcgctgtacggcaaccttacggtgctggaaaaccttgagttttttggtggcgcgtacggcctgcgcggccaggcgctggagcggcgtatagcggccacaattgagcaattcgggctgaaacccaaagccgtcagtgagctgctgccgggcggttacaagcagcgtctggccatggccaccggcctgctacatgagccggaaatcctctttctcgacgagcctaccagcggcatcgaccccctcgcccggcgtgcgatctggcgcaccatcaccgcgcttgcccagagcggcgtcaccatcattatcaccactcactttatggaagaggccgagtactgcgaccgcatcgccattcaggatgccggcaagatgctcgcgctcggcaccccaagcgaagtgcgcgagcaggccggggacgctgccggcgccgacatgaacagcgcgtttatcgccatcgttgaacaaggccgtgctgccagccgccccgcaaccgagggagccggcgcatga

SEQ ID NO: 364589 - DNA, 1137 bp, Pseudomonas aeruginosa
atgagcaaacgcgcattgggtttcagcagtcgtttcacggcgctgttacgcaaagaagtgcggcaactgctgcgcgataaaagcaatctggcggtggggttgctgttgccgttagcgctgattctgctgttcggttacggcctgtcgttcaacgtggaaaacgcgccggtcgcgctggtgctggaagaccactcggtaacggcccgtgatgtggtggccgggatggaaggctcgaactacctagagccggtgtgggtggccaacatgcccgaggctgagcggttgctgcaggccggtgaagtagacggcattgtgcgcatccccctggatttttccaggcgtttggcggccggcgatgcacgcattcaactgatgctgaatggcgtcgactccacgtccgcgtcgatcatcgaaggctacgtcagcggcgccattggcggttgggcacaacagcaggccgaccgcagcggcaacaaaccggcggccggcggcagcgtggaagtggtgcagcgcatgtggtttaacgagaccggcgaaagccgctggtacttggtgcctggtttgatcgtgctggtgttgacgctgattggtgcattcttgacctcgttgttgatcgcccgcgaatgggagcgcggcaccttggagtcgctgttcgttacccctgtgcggccgctggagttagtgctatccaagctggcgccgtacctggtgattggcgctatcgatctggtgatgtgtttgctggcctcgtcctttctgttcgaggtgccgatgcgaggctcgctactcattatcgtgctggcgtcgatgttgtacttggcggtttcgctgctgctgggcttgtacatttccggcgccacgcgcaaccagtttcaggccagccagatggcactgctaaccagctttatgccggccatgatgctgtccggctttgttttcgacctgcgcaacgtgccggtggtgattcaagtgattagccaactgctgcccgcgacgcactttatggccttgatcaaaaccttgtttctggctggtgaccactttcccaccattatgcgcagcagcgccgttctctgcctgtacgcggtggtgctgacgtgggccaccacccgcaccttgcgcaaaacgctggagtga

SEQ ID NO: 364590 - DNA, 1116 bp, Pseudomonas aeruginosa
atgacttcgtttttagccagcctggcgcagatcggcgccctagtgcgcaaggagctccttgcgctgatcaaggaacctgtcagccgcgtggtgctgatcgggcccgcgctgattcaggcgttgctgttcggctacggcgccacatacgacctcaacagcgcgccatatgcggtgctcgatcaaagtcatgggcaggcctccagggagttgttggcgcggttggacggcaccggcgtgttcaaacgtgcggccacgctgaccaccccggcgcagatcgccacggtgatagacgacggcaaggcgctgatggtgctgagcattccgtccgacttccagcagcgcttggcgaatcagcaacgcgcgccgctgcaggtgattctggacggtcgcaactcgtcttccgccggcctggccggcggctatgtcggctccatcgtggctgattacaacgcctcactgggcgggggcgcgcagggaattcgtatcgagcgccgcgcttggttcaaccccaacctggagtcccgctggaacctgatgccggcgctgatagcttcgttgagcatgttgcagacgctgctgctggccgcgctgtcggtggcccgtgagcgcgagcagggcaccttcgaccagttgctggtcaccccgctaacgccgatgcagatcctgattggcaaggcggtgccagccgtggggatcgggttgctgcaatcgacgattatttttctggtcatccgcttctggtttgacgtgcccatgaccggctccgtggccttgctctacctggggctgttcacctttaccgtggctgccgtgggtgtgggactgtcgatttcggcggtgtcgctgactatgcagcaggccatgctctacacctttttgctgatcatgccactgatgctgctgtctggcctgctcacttcggtgaaaaacatgccgcaggcgctgcaaatcgccacctacgtcaatccgctgcgttttggcaccagcatcgtgcggcgggtttacctcgaaggcgcggggttagccgatgtagggctcgacttcattcccttgctgataatgggcgccatcacgctgccgctggcagcctggctgttccgcaaccgactttcctga

SEQ ID NO: 364591 - DNA, 1530 bp, Pseudomonas aeruginosa
atgtccaactctcagctgtttcgctttcgccccgcacgcctggcggtagtggtctgcaccgttgcactgagtgcctgtgccgtcggccccgacgtggtcaaacccacgcccgcggcgccggacgactggaccacgtggagcagtgccgccccgtcgttgcgcgcttccgtcaacctcacgcaagcgccgcgtgccacctggtggcaagcattttccgacccggtgctggagcgtttgcaggtgcaagccattcaagccagccccgacctgaagaccgcatcgttacgctttgctcaatcccgtgtgcagcgcagtaccgtcgccgcccaacgtgcgccggaggtcggcctcagtggttcggcaacccgccaacgccagagcgaaactggcgccggtacacggttgatcgacgcgataggcgccggcagcaacgccgacgacctgaaaaaattgctcgccgaacctttcaccctctaccaagccggcttcgacgcctcctgggagctggacctgtggggccgcgtgagtcgctccatcgaagctgctgatgccgacatcgcgcagcaggccgccttgcttgcgctggcccgccagagcctggccaacgatgtggcgcgcaactacttcgaactgcgcaccacccagcgccagatccgcctggcacgcgaagacatcgccgccttggatgaacaggtggagattctcgccgcacgggtgcagggcggtatcctcgaccatctcgaccttgagcgccagcgcgccgagcaggcctcgctcaaagcccagtttccggcattgttggcccaagaaggcgccagcgccaaccagctcacgctgctgctcggcgaacgccccggcgcgttgcgcgaccaactggcgccactcgctgacaaccgtcaaactcccttgcccgacctggcattgggcctgccctcggaggtggccttgcagcgccccgacattcgcgcggccgaggctgccctggccagcgccacggccgatattggcgtggcacaggcacagctctatccgagcattcacctgggcacgaagtttggctatgagtcgtacctgagcggtgaattcaccgactggggcagccgaacctggtcgattgggcccagcctggacctgccgctgtttgaccacggccggcgtaaaagcgtggtgcaactgcgcgagctgcaacagcaggaagccgcggtgacctaccagcgcaccgtgctcaaagcctggcaggaaatcgacgacgccctcagtgcctacagcgccgagcagcaacaggcgcagcaactcgacctgcaagtgaaaagcgccggcgaagcctactcattggcgcaagcgcgctaccaaggcggtacggtggacttcatctccgtactcgacagccagcgcagctacctgcaatcacgccgcagcctggtcgccagccagggccgcctgcgcacacgcttcgtgacgatcaagaaagcagtgggtgctccaatacacgtggtcagccctgggagcaatgacgggacgaagcactag

SEQ ID NO: 364592 - DNA, 1881 bp, Pseudomonas aeruginosa
atgaacgcgatcatccccaccgaagctgtcagcgtgtccgccctgcaagtggccgacccgaccaagaacctgctgttgctgccgctcgcgcagttgctgccgcgtcgctccaaacgcaatgcgcgcaccacgccgcgcctgtccatcgacgagctggccgcgagcatttcccgtattggcctgctgcaaaacctcgtcgtcatcctcgccgccgatggcgagcatttcgaggtggtggccggtgatcgccgcctgaccgccttgaaattgctggcgaagaagaaatgcctggccgccgatttcgaggtgccgtgcctgctggtgcctgacgcctcggcccgtaccgtcagcctcgccgagaacctgctgcgcgagcagatgcaccccgccgaccagttcgaggcattcgccgcgctggtcaaggaaggccgccccatcgaagacatcgccgccgacttcggcgtgactccgctggtggtgcaacgccgcttgaagctggcgaacgtctcgccgcgcctgatggcggattaccgggccggaaccgtcaccctggagcaactgatggccctgaccatcaccgacgaccacgcctcacaggaggccgcgttctacggcgcgccggaatggcaacgcaacgcatccgccctgcgggcgcgcctgacggagcgcgaaatcgacgtaagccatccgctggtgggcttcgtcgggctggacgcttacacggaggcgggcggtggcatccgtcgtgacctgttcgccgacgacaacagcggcacctatctcaccgatgccgcgttgctggaaacgctggtgcgcgggaagctggaggcgttggccgaggacgtgcgcgccgagggctgggcctgggtggaggccgtgccacagttcagctatgcggatcggcaggccttccagaatgcgccgcgcacccgtcgcgaaccgaccactcgcgaagcgcgccgcattgcctcgctgcaatcccggctggagaaggtcgatgccgagctggaggacgcctacgacgtcgaggacgaagacagggtgccggccctggagcggcggcgcgagcagatggccgctgagctgcacgcgctgggtgagtccttgcaggactacaccccggaagtgctcagtgtggccggcgtcgtggttaccatcgaccgcagcggtgaggctgtgacccatcgcgggctgctgcgcgaggccgaggccaacgcgctgcgcacgctggagcggctgcgccaggggcagggcggcagcgagcgcacgaacgacgatgtcggcgatgtcgccgaaccgcccaaggctgcgagtctgtccgaccggttggcgcagcgcttgagcgcccaccgcactgcggcgctgcagattgaggtggcccggcacccgcaggcggcactggtgcatggtatggtgcaaactgtcctgcagatcggacatcacggcgacagcatgccgctcggcatccgccagaccgtgtgtgatcggctcgacagtctggccccggactggccggagtcgcccgccgccgtggcgctgcatgagctgctccaggcttggggtgagcagctgccgcaggacggcgccgagctgtttgccgcgctgttggcgatgccccaggacgaactggtgaggctgctcgcggtgtgcgtggcggcgagcgtcgacgtgatcacgctccgtgccgctcagctccagcccggagccgagctggcccaggccgtgggactggacatggccgcgtggtggaggccgaccgccgagagctatttttcagcacatcaccaaggcggcgatcctcgaggccgtgggagagtttgcaccgaagcacgtcaaccagttggccaagctcaagaagaccgacatcgccagcgaggctga

SEQ ID NO: 364593 - DNA, 810 bp, Pseudomonas aeruginosa
atgcgcaccgtacagaccaccagcccgcagcaagcctgcgaaaacatcctgatcgacgaaaagcgctacaacaccgagcgcgacatcctgcgtagcgagaatgccgtcatcgatcgcctgctcgctcgcagcctcgagatgaaacaggcctacggcgaactgcacgaaaagttgtccccgcagccaccggcactcagggtatttctaggccttttgctgagtaccgcagctttttggagcccggaaaggatcgccaagtcccgcacccaacgggacgaactagtcgaaaccaaccgtcagatcgcgcgaaaagccgaagacttggcgcagctactggaacagcgctcccgactgcatgaaacctccggtttcagcagccacacccactatcacgtctgcgatgtgatcgaggcggcagccgggaaccactctctgttcaatgcctacgtgaaagaacgcctggacaccctctgcggccagttcgacctgaaatactggccctcgctggatcagcttgtccgcgcggtgtcgacggacgcagaaaatgccactctggaagccacagatccgctgaccctggctgcgacggccgcgacgcgtccctctcgggccgacttcttcaagacactgttcgccgccatcgaggagaacagcgcgcaccaccatggacagcttcccgaaggcttccggctcaccgatggtacgttggcctcattggcgaactgcgcgttggacctggtgccggacgagctggcggacagcgcctatgtgaaacggcttcgccagcgcgagcgcaatggcgacatgtga

SEQ ID NO: 364594 - DNA, 162 bp, Pseudomonas aeruginosa
atgccgggaaagccgcgtaacagaagctttcccaaggagagatttaccgtcaaagaccggtttggtctcgatagtaaacgggagggtcttaatccgacctccggttcctaccgtcaccgctaccgccaaaccattctgctgcctggcgatagtcaccgatag

SEQ ID NO: 364595 - DNA, 231 bp, Pseudomonas aeruginosa
atgtttgatgaggcctttggaatgactgcgatgtgtactggaaaatttcgcgagggagtgcgtgatacgttcggcgcatccattgttgccgatgtacttgatccgattctcaaggaagtcgattcactccgcattctcaatgctactttcaagcagcaagcgttcgccattgatcgaaccttgaatgatgcgcgcgagctgcagttcaaagacagtgggtggaatcaatga

SEQ ID NO: 364596 - DNA, 1659 bp, Pseudomonas aeruginosa
atgagtggttggctagcccgtttctcaataaaaacccgtctcatcggcttgctcgtgcttctagcatctatggctgtcggcttgccaatggctggtcttaatggaatgcgcaccagcaatgcagtgattgatcggctgtacaacaacatgttgctaccgatcgacaagcttggcgacatcaataaccacatgcacaacgcgcgtgctcagcttttgcttgcccttcagcatgagcccggaagtgccttcgagaaggcgcatgatcatccatcgagtatgcatttcgatagagtggataaaagcgtaagcatcatccgtgagcgcctttctgactaccagcgtataccaatgagcaaagaacagcagcgccttagcactgagctgcagaacaaattgtctgattacttggataatggtgttctgccgacgctcaatgcgatgcgccaaggcgactatgcgggagggaaccaaatcctgctaacccgccttgatcctgcttttatgactacctatgccagcttgcgcactcttattgagtcggaggcgtcggcagctgaattaagctttcaaaacgcggataagcaattcgagcgtcttgtggcgatgataggactggcgctggtagtggctctgtctctggtcacagtcacggctctggccactgtgccaagtatcaccaaaggcgttcgggagcttcaagtcggcggtcagcagctcgctgatggcaatttgggctatcgagttacctatcaggggcgtgatgagctgggcgaaatatctagcgcattcaatgaaatggcttcgcgttttcaccacacctttcaagagttggcaggtgccgtggagcaactggcagctgcagctgagcagacggcccaggcaagtagtcaaaccagtgacggtatccgccgccagcagctggagacagacctgatagctactgcgatgaacgaaatgtccgctactgttcaggacgtagcggggaacgctgccagtgcggcacgggcggcacaggaggccgatcagcagtctgaaagcggcatgcgcgtggttcatcaaacaatcgcttctattgacagcctcgccagtgaagttgaacacgctgccactgtgattcatgagcttgaggcagacagtgctggtattagctctgtagtggatgtcattcgaagcattaccgaacaaaccaacctgcttgcccttaacgcggctattgaagctgcacatgctggtgagcacggacgaggctttgctgttgtcgcggatgaggtgcgctcgcttgcttcgcgcacgcaacagtcagccaacgaaattcaggccatgattgaaaagctgcagagcggcgcaaatcgtgctgttgctgtcatggaaagcagttgcagcaaagcacaagctggtaagcagcaggttgccagtgcaggccatatgctggagcaaatcagtaatgctgtggcgaccattaatgacatgaatgccatgattgcttctgcagctgaggagcaaagctctgtcgcggaggagatcagccgtaacgttaccaacgtaagccagattgccgaaaaaactagcgaagcctcacgtcagaatgttgccaccagtacgcaattggcttctctggcaagccaacttcagcgtctgatgcacatgttccgtctttag

SEQ ID NO: 364597 - DNA, 744 bp, Pseudomonas aeruginosa
ttgaaacaaacgaactggacggttattggtgtggcccgctggtacgactggaagttgggcaagctttccgaccgggacctggccagggtggtcggaactaccgagggcagcatacggcgccgacgtgttcagttcgggatcgaggtctattcggtcgcagtagctcttgcccctttccatcacctgctgggcctggagtcggacaggtctgtctctgcaaaaagcggggtgtcggtgaagagtatccaggcttaccgcaagtcccagggcatcccaccccgttccaaggtcacacgccgtattcagcgcttgccgctcgatcatcccgtgaggccgtacaagagcgcgttgggcctggtgcccgatgaagacatagccaaggcgtcgggtgtggccgtagaagtcgtgcaggcgctgcgcgaggcgttcggcctggatgctgctgtggcgccctcccctgacctggccaagtcggcgccggtcgaggactaccacggccccggactcggttacgaatcgctcctgggcaccatgtctgccgccaaactgagtcgcaccgtaggcgtggcctatgcggtcgtagaggcgcgccgggagttcctgggcatcgcaccgtacaagcgcgtatcgcgtgctgatcggtatgtacacctgttcggcgtggtgccaaatagcgtgctggccaagctcgcaggtgtgtctcatgagcggatcgctcaaatgcgcatggccaaggggctttaa

SEQ ID NO: 364598 - DNA, 1512 bp, Pseudomonas aeruginosa; identical to SEQ ID NO: 248605

SEQ ID NO: 364599 - DNA, 3015 bp, Pseudomonas aeruginosa
atggcatccctcgaacgtactgcctatccagttctgtcgcgctcgtattcaagggccgagctgcagcgcgaattcacattttccgaggaagaagttacctggatcaaaagtcgcgccaatgctgcattccgactgaaccttgctgttttgttcaagaccttccaggtactccgatactttccagaaatcgctgaggtacctgatccagtcgttgatttcatccgtactcaaataggcctgcgcagtaaggtcgccctatcgccctacaaatggatgcagctttaccgtcatatgaacgcagtgcgagagcggctcggggtgcagccgttctatggctctgatggtcagggcatggcaatcgcgcatgcgcagttgatggctcctctcctcgaacagcgtgcggacattatcaatgcggtgatcgacgaactactgcgtcaaaactatgagctgcccgcctactcgaccctgaacgacctggcggagcacgcgcgggcagacgcccaggacaaaatattcaacctggtggtaaccagaaccccaatcgaggtgatctacaagctgaaagaactgctcgacactgacttcggccgacgccaaagcgacttcaatgccctgaagcaggcgcccaagaagccgtcccgcaagcacttggaagtactgatcgatcacctggcctggctggaaagcttcgggaatctcgacgctatatttgagagcatcgtcgatactaagatccgccacttcgctgcccaggcagcagcatcggacgtctccgagctgaaggactgctcgctaccgaaacgctacacgctgatgctggctttgatctatcgcatgcgcgtgcggacacgagatcacctggccgagatgttcatccgacggatttcgacgattcataaacgcgccaaggaggagttggagcaaatccaggctaggcaacgccagaagctggagcagttggcggcgaccctggacggcgtggtgcagattctggttcaagaaccggatgatcaggaggccggcagcctgattcgcgaatacctctcccccgatggcaatctggatcggttgcgcgagacttgcgccgaagttcaggctaccggtggtaacaactacctgccgctgatctggaagcacttcagatcccatcgatcgctgttgttccgcctcagccaccttcttcaactggagcccacgactcaggatcggtcgctgattcaggcacttcaattgatccaggacagcgagaacctacaccgagagtggatcgacgagcacgttgacttgtcgtttgcgtcggatcgctgggtcaaggtcgttcgccgtccttccagtgagggaccaccgaccaaccggcgctatctggaagtttgcgttttctcttacatggccagcgagctgcgatccggcgacatgtgcgtgcaagggtcggaatccttcgccgactatcgcaagcagttgctgccctgggaagaatgtctccagcgactaccggcctactgcgaaaaaatggggctgcctggtacagcgaaggagtttgttgcctctctcaaggcccagcttgaggaaacagcgcagcaactagacgagaaattcccatcatgccgaggggacgtatcgatcaacgaaaccggcgagccggttctccgccgagtgaccgctcgagatatcccgccctcggctatctcgctacagactgcgctcatgcagcgcatgccggccaggcatgtgctcgacatcatggccaacatcgagcattggattcagttcactcggcatttcgggccgatgtccggtaacgagccgaagctcaaagagcctgccgagcgctacctgatgacgatcttcgccatgggctgcaacctaggccctaaccaggccgcgcggcatctgaccggtaatgtaacgccacacatgctgtcctacacgaatcgccgtcacctctcgctggagaagctggacaaggccaaccgcgagttggtggaactctacctacagcttgacctgcccaaactctggggcgatggcaaggcagtggccgcggacggtacgcagttcgacttctatgacgacaatctgctggccggctaccacttccgctaccgcaaaatgggtgctgtggcctaccggcatgtggccaacaactacatcgccgtgttccagcacttcatcccgccgggtatctgggaggcgatctatgtgatcgaggggctactcaaaatagacctcagcgtcgaacccgatacggtgtactcggacacccaagggcagtcggccacggtgtttgccttcacccatctgctgggcatcaacctgatgccgcgtatccgcaactggcgcgacctagtgatgtgccggccggatcgcggcgtatcatacaagcacatcaaccgcctgttcaccgacactgccgactggcacctgatcgaaacccactggcaggatctgatgcaggtcgcgctatcaatccaggccggcaaaatttcctcgcctatgctgctgcgaaaactcggttcctacagcaggcgcaacaagctctaccacgcggcacaggcgctcggcagcgtgatccgcacgatattcctgctcaactggatcggtagccgcgagctgcgccaggaagtcacggcaaacaccaacaagatcgagtcctacaacggattctccaagtggttgtccttcggcggcgatgtgattgctgagaacgatccggacgagcaacagaagcgactgcgctacaacgacatggtggcctcgtcggtgatcctgcagaacactgtggacatgatgcgtatcctgcagaaactggcacgcgagggctggcagtttactgaagaggacgtgtcgttcctaagtccctacctgaccagcaacgtcaaacgcttcggcgagttcaacctcaagctcaatcggccaccggagccttggatcaaggattcggtgtttcaacaagccgccggctcgctgcgtgtcagcacgccccgccaggccgataccgagttggccccatga

SEQ ID NO: 364600 - DNA, 561 bp, Pseudomonas aeruginosa
atgaaccggatactcgacattctgattccccgcttcatcaccgagcgggtggcgctgatcgacgcaaacggccaactcgaaatcgcctgcgccctctccaacgtgcggccaaacgagcggttcgacgggatcgccaccatacgatccttcaacctggcgggcctcgccttgtttccgaagatggtggacggcccccacgcatggccagtgcaactccacccgagcaacaaggactcggcggatgcaatcaatctcccgccctgcccctggtgcgagggtcctccagtcgtgctggttgctcgcacgttctcacccttcggaacggtccgggaaatgacgacctacgggtgcgagggcctggacgtcgacgcctatgtgttctgccacgagtgcggctgcgaaggcccgaagtgcgaagacgtgatcttcaacgccgaggacttccgccgcgtggaacgcgaaggcgcccgcctctggtctgagcggaccagcaggaaccggcacctatacgactcgaacgcggccgatggccactgcgtctacccgaggagcgcccaatga

SEQ ID NO: 364601 - DNA, 1569 bp, Pseudomonas aeruginosa
atgcgccctataaatacagcaacgataaaactaattaggcgagcagagaacaatcaattaaatttaatggagtcatttgtagatattggctcggttttgccaacacttcagacagccgagagtcaagtgctatttggtcggcgaggcacaggtaagacgcacgttctatcttatttaaagcaatctgtctccgagtctggtgtttgctcagtgatgttggatatgcgccttataggctcaacaggtggcatatattccgatcctactcttacgttggctgaaagagcgacgaggcttttgtctgatacattaggttccatacatgatcaaatattaagctcggtaattgaggatgaagggggcatttatgatctttcaataattggaccgttactggatagatttatcgaagcatccacggaggttattgttgagggtgatgttgctcaagaagtctcgagtgaacgtcaggaaagcaatgataggtcaagtagtataaaatttagtttagcagcagagtcatctataagtgccaataccagctccagcaatggagagagcagaacccaaagctataggagttcagtaagtggaagtgccaggctccgcatccactttggagcgctagcacgggccgcgaggaatttagtcgataggcttccgaaagctgagctatggattattcttgacgagtggagtgaagttccactagatctgcaaccatttctggcggacatgttacggagaacgctgtttccaatacccggtgtagctgtgaagattgcagctatagcgcaaaggagtaacttcagattaatcaatgagacctctggaaatataggaatagagatcggtgctgatgctgccttgggaataaatctagatgagtttcttgtttttgataatgatgcagaggcagcaaaaaatttctttaaggaattgatatttagacatttaagggctgttggattgaatgattttaaagaaaactatccaacatcagatagacttgtgaatgatttgtttactcagagcaatgctttcgaagagttcgtaagatcatcagaaggcgttccaagggatgcaataaacattcttgccatgtctgcgcaacgtgcaaatgctggaaaaatctcagttcccgatgttcgagtggctgccaaaaattggtatgtgagaggcaagcagcaggcagtaacagcaaagtcacaagctatgaatttactaaattggataattgatgaggttattcagcatcgacaggctagagcatttctagtccccagtgacttaaaagatgagcttttagactttttatatgacgcaagagttcttcatataattaaggagggagtttctgcgcaagatattccaggcaagaggtttaatgtatttacaattgattacgggtgttatgtagatttaataaacaccaataaagtgccgagagggctttttgaggttcaagaagaagaagcggagcagtttgttgaagttccacaaacagactataggtcaatacgtcgagccattcttaacattcaggaattctatgataaggatgaataa

SEQ ID NO: 364602 - DNA, 225 bp, Pseudomonas aeruginosa
atggacgatgcactgaggcgtagattgcgtgcggagctgttggaggtggggttcctcaaccagtgctgcctagacctgatggacagcatggaggccgagttcagcctcaccgatgaccagcgcgaatgcatcgaacagctcagccgattcctgcgggaaggaatcggcaagcttacagctctgtctgagcgtgtggccgatggcgatatcgtggtcttgtgctga

SEQ ID NO: 364603 - DNA, 1527 bp, Pseudomonas aeruginosa
  misc_feature (1446)..(1455): n is a, c, g, or t
atgtctggaagcaatggatcaaagagaagcaaaccaaccacacgcaagaaagaaaacacatcaagcgctatagagccagatgaaaaaaccctcccactggccatcggaaaattattcgagctaaatgactacaatattgagtacagcaagaaaatccacggcgcagaagttgacatagtcgccactccaaaaaacaatccatttggctcaactatctatatagaagccaccattcaatatgtagacaataccaaatatggaaaggatctaactaaattcactcttgtcagagcatcagaaccagagtgcacgtgcatatgcatttcaacatcgggcttcaccattgacgtcaaagagagagccggacactctagaatcctaactcacacgtacgatgagctattttcaaaattcgaaagattctcgccctatgtcgaaagcatattacaaaatgatcatctaattaaattagcaaattcatacgagcaaccactattcaaagataaaaagggcgaacactctgccaccatatggctgaaaaactggaagacagagcagaccccagaatctaattggcttgttatcttaggagaatatggcacaggcaagacagctctgactcaaaatctacaatacgagtggacaaatgagtacaaactagaccccagccagccaatccctatccgaattgagcttagaaatttcagcagacaatttgactcacgctctttaatccaccatttcttagacaccaatagactgggacatgttccaatagaacacttcttctatttattgcgcaacaaaagaattgtcctaatcttagacggctatgatgaaatggcccaattcttaaatcctcgagagcggcggtcttgcctagccgcactcgcggagttagcagcggaaggcgctaagggcatactaacaagcaggcccaactactttaccgaatccgaagagctaaacgtattcgaagccctatacacaactctcgagcagaaaagataccatctcagcgaaactgataagatatatatagctgaagagaagtcgattgatgaacttctccaaaactacttgatcaacaggaatgacagataccttagagacttaacccccgagcaaacaaaatcactagtaagaagaaatctcgcgaatgacgaagtaggacaaagcatagtcattaccttactggaaaaagtatttcgagaggaaaccacagggcaacgccaatcgctctcaggaaagccggttatcatttcctatttactagaaatacttgaagaccttcgtagctcaaccacaacgcacgagcaggcagatcttagcgaatggcaaatttacaagttaattgtagacaagctcatgcttagagattttcaccgctcgcctggactggcgcaactaccccgacacgctgaccgcgataacagaacgcctgcnnnnnnnnnnagatcaacgacgcgattcgctacagctcttagcggtaaacctttcacgaagagattcaactactgccactga

SEQ ID NO: 364604 - DNA, 297 bp, Pseudomonas aeruginosa
atgacgaacgaaaccaagacagaccgccagcgccgcctggcgcgggaacgccaacgggcgaagcgcgagcgcgatgccctgcgccgcgctgcgctgggcggtcgccgcttcaacatggacatgtaccagggaacggcggatgcactcgatctgatctgcgcggccggtggcttcgccgagccggccgaggcggtcaccttgctcctacacaacgttgccgaaattgctgagcgtgacgcgtcacgttttgccgaattgatccaaaagagaaaccatccagggaggaccaagcgatga

SEQ ID NO: 364605 - DNA, 597 bp, Pseudomonas aeruginosa
atgcctcatccgctcacccttttgcagatcagcggacgcggctacccgccagccccccttcggcagagcaccttgctgatcatcgatgcccaggaagagtaccgcagcggcgccctgcgcctgccaggcctcgacgccgccgccgcggagatcggcgtgctggtgcaggcggcccgcgccagcggtacgcccatcgtgcatgtacgccacctgggtatccagggcggcctgttcgatccgcaagggccgcgcggccagttcctcccggaactgcaaccggaagccggggaaaaagtcgtggagaaacgcctgcccaatgccttctccggcaccgagctgcacgacctgctgcagaaccacggccgtctcgacctgatcgtctgcggcttcatgacccattccagcgtcagcaccaccgtgcgcgcggccaaggactacggctaccgctgcaccctcgccgatagcgcctgcgccacccgcgacatacccaccctgaacggcggggtcctgagcgccgcggacctgcaacgcgccgagatcgccgccctcggcgacaacttcgcggcgatcgtcgcccaggcccgggaactgctctga

SEQ ID NO: 364606 - DNA, 291 bp, Pseudomonas aeruginosa
ttgactgccgcgcccgccatcaagattctgccctttcaatgctacggactctggacggcgcaaagcccggccaatagcacgagcgtgagtttccttaatctgattaattgctgttttagcagccaaagcagtcagcttgtcaatatgaattgcattaccaagcctatactgctcctgattataataacggccaccgccgctatcgaagatagcgacaccagaatcaatttcttttaccacaactacatgcagcctaggctcaaagaaaagcttatttgcaaaaaactttga

SEQ ID NO: 364607 - DNA, 408 bp, Pseudomonas aeruginosa; identical to SEQ ID NO: 328918

SEQ ID NO: 364608 - DNA, 1272 bp, Pseudomonas aeruginosa
atgccacgcaagaccaaacccaccgctttggcggaccaggcggcacagccgcaatttcacatcccggccgagctgcttgaccagctggtgaccgggcccatgacgccgggccaagtccaagggctgttcgatcagttcaagaagtcaattcttgagcgggcgctgggcgccgagatgagtcatcacctaggctatgcgcccggccaagccaagcccacaggcggatcagccaaccaccgcaacggcaagagcaccaagaccgtactgaccgatgtgggggcgctgcgcatcgatgtcccacgcgatcgcgaaggcagcttcgagccgcagctcattggcaagcacgagcggcgctttacgggtttcgacgacaagatcatcgccatgtacgcacgcggcatgacggtgcgcgagatccagggtttcctggctgagatgtactcggtggacgtctcgcccgagctcatcagccgtgtcaccgatgaggtgatgggcgaggtcacggcctggcagacacggccgctggaggcgatgtacccggtggtgttcttcgatgcgctgcgggtcaagattcgcgaggatgcggtggtgcgctccaaggccgtctacctggcgctgggcgtactgcctgacggctcgcgcgacatcctgggaatctggatcgagaacaccgagggggcgaagttctggatgaaggtcttcaacgatctgaagacgcgcggggtgcaggacatcctgattgccgtcaccgacggcctcaagggcatgccagaggcgctgggcgcagtgttcccggcgacgacgctgcagacctgcatcgtgcacctgatccggggtggcctggactttgcgtcatggaaagaccgcaaggcgctggccgcagccatcaaacccatctacaccgcggtgagcgccgaggcggccgaggccgagttggatgcgtttgcggccggcccctgggggcagcggttcccgaccgtggtcagcgcctggcgccgggcctgggacaaggtcatcccgttcttcgccttcccgcccgaggtgcggcgcgtgatctacaccaccaacgccatcgagagcgtgaacgcacggctgcgcaagatcatcaaaacgcgcggccacttccccagcgacgaggcggccaccaagctgatctggctggcgctgcgcaacatcaccgcggactgggggcgggcggccaaccactggaaatcagcgatgaaccaatttgcgatcctctacgaggaccgatttaccagatcgcgccagtaa

SEQ ID NO: 364609 - DNA, 366 bp, Pseudomonas aeruginosa
gtgatcaaggccctggacatggcctacgaacagcgcggcaggccacagcaggtgctgttccattcagaccagggcagccagtacgccagccgcctgtttcggcaacggctctggcgctatcggatgcagcagagcatgagccgccgagggaattgctgggataactcgccgatggagcgcctgttccgcagtctgaagtcggagtgggtcccgtcaacgggttacctgacggcgcaggaggcccaacgggacatcagtcattacctgatgcaccgctacaactggatcaggccgcatcaattcaacgacgggttaccacctgcggtggccgaagaaaaactcaacccactgtccgggatgggttga

SEQ ID NO: 364610 - DNA, 2208 bp, Pseudomonas aeruginosa
atgggcgctaaaccgaaggcacagacggtcgggttcgagtacttttttgacatccatttcgccctgggtaagaagatcgacgaggtctgtgcaatccgggcaagcggcaagaccgcatggaagggctcgatcaccagtaacggccaggttcgcatcaatgcgccggacctcttcggcgggaagaagggcgaaggcgggctcgacggaacgcttgacgtgctgtttggcgaggaggaccagggcgtcctgccgcgcctggcggcgatgctcggcggcctggtaccggcgttccggggcgtcaccacgtgcttctattccggcctggtcaccgccatgaacccctacccgaagacctgggagattctgcgccgaggcggcaaccgcctgtgggacggcaacccctggtatcccgaaaagcaatttatctggctcgcggacggtcagatcaaggcgatgaatccggcgcatatcctctatctcgtctacaccggccgggacttccgggggctggcccgcacgcggatggacgaggcgagctggcgggccgctgccgacaagctgtatgccgagggtttcgggctgtgctttgaatggaccaggtccgacacgttctcaaacttctgcgagacggtgaaatcgcatatcggcgccgaggtttacccgaaccgacagaccggacaaatcagcatccgcctcctgcgggacgactacagcgttgcagacttgccgctgttcgacgaggacagcggcctcctggagatcacccaggagaagaccggctcgacctcgctcgcgccgagccagcttatcgtcaagtacatcgaccagaccgacggcgcgcagcgccaggtcatcgtcaacaacaacgcggtcgccgcttcgcaggggcggcggtcgtccgaggaagtcgagttcctgggcgtgccgactggcgagctggccgggcgagtcggggagcgggaaatgcgtctgaagacaaccggtctgaagcgctataaaggcgtattcgaccgccgcgcccgtagcctgaaccctggccagccgttccgcatccgttcgacccggcgcggcatccctgaaaccgtcgtccgggtcggccggatcgaggacaacttcctcggcgacggcaagatcaccctgaccgtcgtccaggaccagtttaatctgccggcgacaaccggcgtggcgccaccgccaccgggctggattccgcccgaccggacgcctcgggcgatcactgtgcgccgactgatcgaggcgccatatcgcgaactggccggcgtgatcgatccggcgaatctccagctcctggacgtgtccgcatcctacctcgctgcgctggccgaggcgccgacaagcttgtcgcagagctacaccttgaccgaccgcgtcggcagttctggcgcgttcgtggatcgcggaaccggcgactggtgcccgaccgggctactcgccgccgagctgccgctggcggccgggccgaacgaggtcacgctgaccaacgccacccggctggaggacgtcactgtcggccaggccgctgtggtggacgacgagatagtccgggtcgatgcggtcaactatgccagtggcaccgtcaccctggcgcgcggctgcgccgataccgttccggccaagcacttggccggggctcgggtctggttctacgacacgttcgaagcggtggacgagacggtctacagccagggcgtgacgcttcaggcccggctgctgaccaacaccagcgagggccagttggccccggcgctggccgctaccgacagcctgacgctgaccgggcgccaaggtaagccatacccgccaggccagtttcgcatcaacggcagcgcgtacccggccaaggtctacggggcgctgtcggtgagctgggcgaagcgcgaccggatcggccaggccgaccagttgatcgataccacggtcggcaacatcgggcccgaagatggggcgacggtgacgctccaggtctacagcggcacgacgctaaagcgcacctatgccggcctcacatccagtaactggtcctatccggtggccgaagacgtcgctgacggcccgctccaggacgtgcgcctggtcctgcgcagcgtccgcgacggcatccaatcctggcagcaacacgacatcaccatcgaacgacacggcctgggcttccgcctcggcgaggaactaggaggcgtttccgcatga

SEQ ID NO: 364611 - DNA, 999 bp, Pseudomonas aeruginosa
atgaggccattcgataaaccggccctcacagtagaagagcaactggatctgcttaagcaccgcggcctcaccgtagccaatgacgagcgcgccactcgattccttgaggtcgtaacgctctttcggctcagtccttacatgcgccctttccaagagcctggtgcagaccataggttcaaggaaggcagctccctgcgagagatcgttgagatttaccgcttcgatgccaagctacgccatcaggtaatggctgccatcgaaaaggtagaggtcgctatgcgcgcctgcctaagtaatcacatgtctccgaactatggcgccgactggttttgcgacaagaacaattttctgcgtgactttcgccatgcagagctacttcggccgctccatgacaaaatccggaacgagaaagaaaagctcgagagggaggccaatcgcatcaacgctggcccccaaacgaatgatcaaaagcgcgcacgaatcgaaagccgaatgcgcgacaactatttccgattctacggtcacacgtacaacgccccggatctgcccccatcttgggcgataaccgaagagctcagtttgggcaccatttcgaccctgtatggctctctggcacgtgccccggataagaaagccattgcgaaaagattcggcgtcgcgcacgaagtactggcctcatggctccatacgctcacattcatcagaaactgctgtgcacatcacgcaaggctctggaatcgggagttaggtgttcgacccaagcttccgaacagctgggccataccgatggtgccggtgggtaggcctcgtccaaaggatcgggtttacatcgtactgacggtattggcctatctgacggatatagtgagcccggatagcagatggaaagcaggcctcattgctgtcttggagacctgcagagaggatgcgttacagcagatgggcttccccgacgattggcgcaatcaacccaactggctgacctcaccgcccctctaa

SEQ ID NO: 364612 - DNA, 1239 bp, Pseudomonas aeruginosa
atgagtaagtggtctgtcacctcgcttcacggaaagcttcacatcaagcatggatatcccttcaagagcaaccatttttctgacgctggaaagcatatcgtcctgaccccgggaaatttttatgaaaagggtggtttcaagaggcaggtaggcaaagagaaattctacttgggcgacgtcccgaaggattacttgcataacaaaggcgaccttattgttgcaatgacagagcaatccgcaggcttactcggtagctgcgcttttgttcctgataacgatacatacctccacaatcagcgtttgggtttgattacgaccgatcccgaacagctggatagagcttttgtttactatctgtttcagaccaaatcagtgcgtgagcaaatccgcctaacttcaactgggtcgaaggttaagcacacctcccctgatagaatctactccgttaatgccgcacttcccaacgttgaggagcagaagaaaattgccgccgccctcgccgctcttgatgccaaagtagactgcaacaaccgcatcaacgccgagttggaggcgatggccaagacgctgtacgactactggttcgtacagttcgacttccctgatgccaacggcaaaccttataagtcctctggcggcaagatggattacaacgcctcgctgaaacgggaaattccggctggatgggaggataagcaattaaaccagattgctaatataaccatggggcagtctcccgctggagagtccttgaatgattccggagacggggtggagttttttcaagggtctactgattttggctggcggttcccgactgtgcgccagtacacgactcaacccgcacgtatggcgaaatgcggtgacatcctgctcagcgtccgggctccggttggagacttgaatgttgcacaccttgattgttgcatcgggcgtggattggctgcgctgaatagcagggatggatttgatggcttcctgttttatgtcatgcaatatttcaagaccgtcttcgacagacgaaacagtgagggaaccacgtttggctccattaccaaagatgatctgcattcactaccactagcctatccgccgactgagctactcacggaatatgacaaggtggtgtcgagatataaccagatgatctttacgcggagcatggaaaaccaacatctcacccaactccgcgactggctgctgcccatgctgatgaacggccaggtcactgtggcgtaa

SEQ ID NO: 364613 - DNA, 645 bp, Pseudomonas aeruginosa
atgctcaaaagaacactactcagcgccgctgtagcttcggcactgtttgctggagtcgcgaacgctgccggagtggttgctattgccacaagccccactctggaggcgaactcgcctggtgcaaccgagcagtacgggccaggacaggccaactatgtcgtcggcaagagtgtggaaaatggtgccaacctcgacagcaaggcggccaacatcaccctggctcaggagattttcggcaacaagtccgaagaaactacctttgacctacccagcgttacctacaccatcgatccagtgaaggctggaaatgccgctgcgggccacaccatcaagctgacccttggtcgtaccgtcgtgcgcttcgccaaggccgtgaccgccaaccagatcaagatcggcgccctggctgcgggtagcggcttcgtcatcaccagcggcactggcgccaccgacaacacgcttgagctgcgcctcgaccaggcgggtgccgacatgatcaagcagaccgcgaccggcggcaacgtggtgttcttcaacttccgcgagccgagcagccaggacagccagcctgccaaggtcaccaacatgcgcgctccgcttcagggcgatgccaccttcgtggctggatcctggatccgaaagtga

SEQ ID NO: 364614 - DNA, 1164 bp, Pseudomonas aeruginosa
gtgagcctgcagaacgacccgctgaacgaattgcgtttccaggtcacggtttccgcacagttcgataccaccactggcgccgatgccggcaaccctgcgaataacgattctgcaccgcccctgaccattttcacttcgctgcccgcggtttactgggacgttctcaacaccaaccagtatgggcagaatcgcgtcctgcatccgttgaacctgaacaatcaggatcgctccttcgataccacggtgtccgtcggtggcgataacaccgattattatggtgccaactatgcgcgtctgggcgccgtacggctcggcatcaatacggatgtgctcaacgaggcgggtcgaaccgtgtttggtttcgccggtggcgacaaggtgaccagcaccctgtcgggtaacttcaacgggatcagcgacatcggcctgaccaccgggaactgctccgcctttgccgccaatccggggtctgccgccaagctctggaattctgccgccatcgaaggtgtagtggatgcgcagggcaacggtactttgccggtatcgttcgacaactcgaatatcaaccagacctacaacgtctgcgtgaaggcttccggcaccgtgccgatgcaggcgctgcaacgttttgacgtgggtgatctgaaggtcgacttcgagaacgtacgctatgtcgatcgtaccattgcaggtaaccgtctcgacgagttctggaagaacagttgcgtcgccagtctgttcaatctgcctggctccaatgtttccgaccagttcttcattcgtctgaccaacaccagcgacgatggtcgggacggcaaggtacgcggggtactgttcgaccagaacggtaagcgttatccggcgactggcagcacctacctgaccgactcgagcgggaagactgctctgaaagcgcacgaaaccggtgtgtacaccgtaaccgaagtagccaaggccttcggtatcgacggtaccaactggaacggtgccaacgggcgcgcacgtctggtcctggaaggcgagttcccaacctgcgaggcgctcggcctgatccgctctgccaatggcaccatcaccaacatgacctccaccacccaaggcaacttcaacgaagatggctcgtccacctcggagaaccacaaggctggtaacaaccgcaactaa

SEQ ID NO: 364615 - DNA, 246 bp, Pseudomonas aeruginosa
atgagtaccgcccgaaaactccgcctcggcccgttgccgtccagcggtagcacgaagctgacgttcacctgcccggccagcctgaaagccgacctcgaccgttacgccgcgctgcacgcacaggcgtatggcgaggcggtcgatgcggtgacgctgatcccgcacatgctggaggcgttcatggcgggggatcggggattcaggaagggaagtgggaacaaggccgcaccgccgaagccgggttga

SEQ ID NO: 364616 - DNA, 300 bp, Pseudomonas aeruginosa
atgaagtacgcgcctgtcgtgttcgctctcgcgttcctgctgtccggctgctttcagccgctgtcggtggcttcactggccaccgatccatcccggttgcacacgctgcgcgcgcagtgccgcgcgggcgcgcacgaaggcgcgttttgcgcgcaggtggcccaggccgacctgcggcgctttctctccggccaggccgggccgggcgagtaccagacgctggccgacctgccgccgattccgcccagcttcgatgaacccgccgatgccaaagaacctgggcaggaggactcgccatga

SEQ ID NO: 364617 - DNA, 939 bp, Pseudomonas aeruginosa
atggccggggattggttgaccatcgcattgcgcctggcgctgtacctggacttggcggcggcttttggcgtcgccttgttcgctctgtacgcgctgggccgcgacgagcgatcctcggcggttgcacatcgcttcaggaccttggtcggtgctgccgcggctctcggaatcgtgctctcggtttgggcgctgaccgtcctggccaaggcgatgtcgggtgcccagagctatgcggagctgacgacgcacgtcttcgaaatgctcatcacggggacgcacatggggatctcatggtgcgtgcgcatcatggcgctgctgctgtgcgtgctgttggccgtgctaaggctcaatccgacgctgcgcttcgtgggcttggcagcctcgagcggtacggccctggcaacgctcgcctgggtggggcacggggccatggatgacgggctgcgcggatactttcacctcggcaatgacatcgcgcatctgtggactgccggagcctgggtcggcgccatcgtagcgttcctgctgctggcgacgttgaggagcgaccgagcactcgatgcaccacaaagcatgctgcgactgctgagtcgcacgtccaacggctttgcccgcatcggcacgctgatcgtgatcgtgcttacggcgagcggaatcctcaactacctactgatcgttgggccctcgatcgggccactgttctcgacgctctacgggcggttgctgttgctgaagttggcgctggtcgggggtatgctcgcgctggcagcggcgaatcgatacaggttgagtcccggcctccaggcctcgcttgaatcaggcaatacaggcacggctgtcgccaagctgaggcgaagtttgtctgcggaagcaactcttgcggtgcttgtcatggcaagcgtcgcctggcttggcattctgtctccgacgcaggtgtga

SEQ ID NO: 364618 - DNA, 300 bp, Pseudomonas aeruginosa
atgcaccatgcgcacacgcagacacccagcggccgcccccaattctggcggtcgcgctacggcctggctttcctgatcttggtgccaatcgcggccgtcgctgcgtacttcctgctgaaggggcacttgacgcatatcgcaggctatctgccattcctgctgcttgcggcatgtccgctgatgcacctcttcatgcaccgaggccacggtcaccgcgccgacgacaacaacaccgagccgtcgcgggaaggcaaggaagcgtcgaacgcggtcccggcttccggcggcgagcagcgatga

SEQ ID NO: 364619 - DNA, 489 bp, Pseudomonas aeruginosa
atgaacacgacaacacagcacacgcagcgtccggtcgaagcgaagcgccgagccgccatcgcgggcgtccttgccttgctgctggcgggccccgtcctggcccaggagcggctgacggccaaggtctggaaggacccgagctgcggctgctgcaaggactggatcacgcacatggagcaggctgggttcgaggtgcaggttttcgatagcggcaacaacgccgcgcgagcgcgcctgggcatcgcgcagaagttcggctcctgtcacacggcgcagatcgggcgatacgccatcgagggccatgtcccggccgcagacatccgtcgtctactgcgggaagcaccgcgggccatcggcctggccgcaccaggcatgccggtcggctcgcccggcatggacggtcccgtgtacggtgaccgcaaggacgcctacgacgtgttgctgttgacggcggacggcaagagcacggtcttccagtcgcatcgctga

SEQ ID NO: 364620 - DNA, 1461 bp, Pseudomonas aeruginosa
atgacggcctctaaacctgagacgtcggccattggccacgccaagcaggtcaggccgacccggcggcgcagtcccgcttcgctcgccctgcgcgtgacggcattgatcggcgcggccatcaccttggtgttcctctgtttccagtgggccatcgtccgatcgttggagcatcactttgcgcaacaggacgcgcatgaactggacgcggtcatctcggccctggccgagcccttgcgtcagggcgacgacatggaccgcgacgcgctggggcagcaacttgccaatgcggtggcggggcaccacgggatgagctacgccgtctacgaccagacaggcaacaccatctacgccacggcgggtcctgacctgtccaagatgaacctggcccccaagcctctggcgcagatcgacgccgaggagttggcggtgtggcaggatcgtcagcggtcctaccggggcgttgcgttcgaatttgcagcaggccctacttcggatgcgccacgctaccgcatcctcgctgccatggacatcggcttccacctggaattcctcggggagttccagcgcatgctgcgttgggtgaccttcatggtcctgtgcattgcgctgctggccgcttggctggcggtccactgggggcatctgccgatccgcaaggtcaacgagaaaatccgtgccatccgttcgtccaaactggacgtgcgactcgacccacgcgacgtgccgatcgagctgtcagagttggtgttcgccttcaacgacatgctggcgcgcatcgaggaaggctttgcccgcttgtcgcacttctctgccgacattgcgcatgagctgcgcaccccggtgaccaacctcgtgacacagacccatgtggtgttggggcagccccgtagcgccgaagagtaccgggagatcctgtactcccatctggaggagttcgatcgcatgagtcgcatgatcgcggacatgctgtttctcgcgcagaccgagaacgatccacgcaacatccgcatgagccaggtcgacctgagtgcgctggtccggggcttgttcgactactacgaggccctcgccgacgatcgacacatcacgctcagcctcaagggcgcggtcgagccggtcctggcggatcgcgagatgttgtcgcgggccatcggcaaccttctttccaatgccattcgctacacgccgcgcgaggctcggatcatcgtcacgctcaaacaggacgaccagggaacggtcattcgcgtcgagaacccgggtgagcggatatcggacgccgatctgcccaagctcttcgatcgcttctaccgcgccgaccctgcccgccagcgcaagtccgcgggggccggcctcggactggcgatcgtcaaatcaattgccgaagctcatggtggacatgtgcaggcaacgtccaacgatacagcgactaaatttgatctaacgctgcctcgcatcgcttag

SEQ ID NO: 364621 - DNA, 306 bp, Pseudomonas aeruginosa
atgggacgactttttgtcgatagcttgactctggggcgctggcgggagctcgatgccttgttgatgctggagaagctggagagctacgtaaaggccgacgacacgtttgagccactgagcacgcacggcacccagcgctatcacatcaatgttgaagggcgggatttcgaattgctgctgcgcggccccaagttcttcgatacccggctccagcgctgcggtgggggcgccatggatatggtcatgcatgcgcgccacatcgatttcaaaggcgcaactgacctgttgcgcaccttggctgtctag

SEQ ID NO: 364622 - DNA, 1401 bp, Pseudomonas aeruginosa
atgttcgtgaccgtcaaagcccgtgtccatactgatgccaccggggcctacgccgagttgcctgcgttactgaccccggcgggggtgctggagcccttgctggactattgcctgtaccgcagccacgaccgcagcttggcctggatgtcgaaagtgacccgctcggtgcggatgttcctcgaatacctgcaatccaaccctggcgagcgcgacacctaccgtctgttccagaacttcgcccagcggctgtacaccggcaccttcgaccgtgcgaccggtctggaccccagtggcctttgctgggcgccgcgctcgccgcaggatgcttcgcacatcgtcacccacctgaccgacttctttgactggctcggcgagatgcgtcccgaggcggcccaggtgaacccgcgctacgcgggcggcgccttcgaccgccagaccgatgaagccgcctaccagtaccggcgcagcaaggccttcctcgggcacgcctgggcggctaacgcttcccccgccgagaccgggcaccgtgtccggggccaacgcctgccgagagttgagaagggtgaaccgccagccttcccggaagagcgtttcgaggaactgcttgccaagggattccatgcagctggacgccaggactaccgtggcatgctcatcacgttgctgctgcacggggccggtttccgagagtcggagcctttccacctctacatctccgatgtattcccggacccagccaacccgagtcaggccagggtgctcatccatcacccgagccatggcggagcacccgccgattggcgcgatgaaagaggcaagtcacgcaagggcaaccgggcggaataccttgcccagcaattcggccttgtgcctcgcaatgagttgatggacaggcgccatgccggctggaaaggcggtacgcatgacgcggcctactacaagcaggcgtactggttcttgccagaatatggcaagtggttcctgcaactctggcaccgttacctggagcaggtcgcgcgtatcgaccgtggccacccgtttgcctttatcaacctcagtcgagagccagtgggcggggtgtacacgctcaaccagtacaacaaggcgcatgccgccgcctgtgaacgtatcggtcttacggtcggcaaggcactgggcacgacaccccatggccaccgtcacgcctatggtcggcggctgcgcaacgccgatgtcgataagtcgctcatccgtcgctttatgcatcacgcatccgaggagagccagcaggtctacacgcaagcgaccacccacgaggccatcgcagcacttgaaaccgccgcgcagcgactgcgggctcagcacgccggccctccgactgtgctgggccggccacagccgggtatcgagctagatgaatag

SEQ ID NO: 364623 - DNA, 2415 bp, Pseudomonas aeruginosa
ttggcggccttcttcgaacgctacctcgtccagcaggggctgccgcttgacccctcggtgttcctggcccgcagcacggtcctgccggacttctaccgcacgacctgcccggattcagcgaatggcatccagtacaacaataacatccacgccttcctgcacttcgtgctgctgcgggagttcagcgaagccgacgacaatggccaaccggtggtctcaccagccttccgcaaccctgtgctccggatgtccaagagtggcctgcccaggcgggatgagagcgtccactcgccactgccctatgggtacattgacgagttgcggcaaatgctggcagcaggcccaaacttctgcgactggccgtgggcgcagagcgctctgggtgtggaaattggccagcgcgggcaaggtgcacctgattggtttgaagtgaccgagggccagattgaccggaacgaccccgactgcgtgtggcgagtccgcaaggtgagtccgaaatatcgcggtggccaggtgctggagatgtggagcccggtgcgttgggttgccctgctcgtgaagctcatcctgccgctgcgaaccttccaggtgcgcatgctcgactcgggcgaagcggatacctggcgctattcagcgggtgagtggactttgaatacgaaccgacttgcacggggcagcgaacgacgccccctccagcaaggggtgtttcgccgcagcaacccgctctccgatggtaaagatgcatcaaccgtgcttcacatcaacaccaacaagactgcggacatcgccaaatccggtacagagaaaggctacgtgttgccctggtccttaggtggaccggtacatcaggacgtcttttactggctagagaagctgcgcaattggcaggagaagtacaaccccgtctcacggcgcgcagcttggacggaactggatggccgccacatcaaggcgaagagcgaggtgcagctcgctggctatcctgacgcttgcttcctcttcaggttcccggaggcccgagacgacgagcggcatctggcgatggtggatggttccatggatagggcgtggttcgttctgctggaagcgctcgaactgcgactcgccgacctgggtgaaacccaccgtaacggaaacccgattcgcttcctcccgccgccagaggagcagaacaatgggcggacaaccctcttcccgctgcacagcctgcgcgtctccctcatcaccgcactggctctggaagggcaggtaccgtttccgatactgcaaaaactcgtcggccacagccggctgctgatgacgctctactacaccaagcccggcgcaacccacatacgagatgtgctgcatggtgctgcggagcggctggaggcgcgcaaggaatcaagcatccagaacttcctactggataccgcacacgacgaactgctgcaaaaggccatctgcaacagcgtgcccagccttgccgctgccatcccgcagcatcccgctgcgcgcaacccggtaggctggatgccgatgcaccatggtctgtgtctggtcggtggcaacacgagtgagactgaggataacggcgttgtgggcggctgctataacggcgggccaaacctaggctcaccttccgctccgaagtacggagcggttccgggcggcagtcgcaattgcgtgcgttgccgctggttcgtgaccgaaccacaccacctgcctgcgctggcagcccacttcaacacactggcctatcacttcgacgaggcacgcaacgcctgccttgcgcgcgaacaggagcttcagggcctgaaaaagcagaaggctgacgcggaggacgctggacatccgtttgcttgccaggacgcttaccggcaggccgagcgggtgtgggaaagcgcgatgaagcgcttcagcgacttggccgaagacttggtggcctgctggcgtcttattgagcgctgcaaggctgcgctgaatgccgcagaaggcgacggcacgcaactggtcacggtcggcgaggtggccgacgtgcaggttgcctttgaggagacggactccgaactgctccagttgagcggtgtctgcgacagcgtcgaggtctaccccgacctggagccgggaaaggcggtcttccgccgcagccaactcctcgatggtgtgctctatcgtgacgacctgccacccgtgttcatgcttctgggcgagcaggagcaactgctcgcgggcaacgccttcatgcgaagactggcccagcagatgaacgctgcgaatcccgtgcttggccagcgggaggtgattcgcctgatggacgcaggcgtacgcctcagccagcacttcaacatggacctcgcttcgctgctgcacgccgaccgcccggttcagtcgttcccctccggcccccgacccttgaccggagacgcagcatga

SEQ ID NO: 364624 - DNA, 681 bp, Pseudomonas aeruginosa
atgagcggcatgacggacatccacccggacgccgtgcttgcgtcgctgctcgacaagggcggacgctccaatcgacaggccaacctggccaaaatgcacgagctttgccgccggcagcacgcagccggctcgcgcgacttctccctgccggccatcggccgcctagctgaagccgaaggcatcctgaaaggccgagcgctctacaacgcccagtccgccgactatcgggtgctcattaaagcgtggtccgcctatgccggacccgctgagcccaagctacccaaaaccttggcgagccatgactacctgatgcgcatcgaagaccctgccatccgctccatcatgcaggccgtcatcgctgagcgcgacaagctcaaagcgcaactcaacgtgctgaaggcccacacgctggtaaccgtggatcgacgtcccttaggggcgaccatctctgctgctccggggacactgccggtggctgtcctcgccctgtctgcgcagttgacgtcgtcggagcgtgaagccttgcagaaagcggtttcggcaagctaccttgaagagcgcggcttgaaggaaggcagccacggcgaaatcgtcaacgagcgcggacggacggtgttcgaggtgggctttgctcgtgccgttcgcaaggtgctgggcgaatccacgcccaaaattccatga

SEQ ID NO: 364625 - DNA, 342 bp, Pseudomonas aeruginosa
atggcacgccagaactctgcggccaagaccaccgccaaatccaagaccgatccggcgaccgagaagcccaaggacgaaactctgccgggctctacggacgacgcttcgtccaccgcacccgagacgcccgccaccaagccagctagcacctcggacgaggtcgagggcgtctttgttcgggccaccgtcgagcgccgttgccgagcgggcttctgcttcgacaaggaaggccaaggcttcgctgacggcgtgctgagcgacgagcagctggaggctctggagtcggacccgctgctcaaggtcgagcgctgcaccttttccggcaaccaggagggcgagtga

SEQ ID NO: 364626 - DNA, 168 bp, Pseudomonas aeruginosa; identical to SEQ ID NO: 325059

SEQ ID NO: 364627 - DNA, 192 bp, Pseudomonas aeruginosa; identical to SEQ ID NO: 356066

SEQ ID NO: 364628 - DNA, 1512 bp, Pseudomonas aeruginosa
gtgaaccgtttgaaaattaaaatcaataacgttaaaaatattagaacagctgatattgaacttccaatcgagggcggtttatacagcctcgtaggggggaatgggtgtggtaaaagtacactcatgttgattatgtcagtgttgttgagttctaaaagatttaatatgcttcagcatgaggattatgatgaagactccacgattgatattggcgttgtcaccgatgaaagcgaagatttcagtaattggtatgttaaaaagagatttgataatgaaggagtgatgtggtggtgcggaagtacgccgcctcattataagggagtatatgaaggcagccttttttatggggcgaggtttcgagattctaccattgtagataagcttctacgcagtaatgcgattgctagtgatcagattgtggaagcttttgattacgtgaaggataatctgagtttcattcttcatggagattatgatcactatagaagtatgaagaagattcggaataagaagacttccgaggagtttgagttgtcaaatcttccttattttatgagtacccctaaaggggcgctgctaagccagtatcggatgagttcgggtgagtgtcttcttatatctctgctgaactatatatatcatgcacttataaaccagggtatgggcaataaagtcgccgacaagacattttttattctgatcgacgagattgaactcgcccttcatcctattgcaatttctcgcttaattacttatctgaatgggcttctgactacctaccctaaactttgtgtttatctgacgtctcactctccggaggtgattcgttctcttaagccccagaatatgttccttataaacaatgttgatggtgatcttaaactcgtaaatccatgcttccctagctacgcaatcagggagatttatcgtcatgacggctttgactacctaatattggcagaggattctctagcaactttagttattgacggtgttttgtcggatgcgggtttgaaagagagcaagctaattcatatatctcctgtgggtggttggcagaacgtattgaatcttcatatggatttattgcgtaataatgtagttggtgttaataaaaaaatcatcagtattcttgatggtgatgtggcttctgaagtcgccaagaaagaaatttataaaaatatagctaaagcttttctgccgatacagagtatagagaagtttatgtatgaggttgtcttcggtagggctagcttgagacttaggaagctcattaatgataagtattttcctataaaatccttggatgatttgatgggggagcatatggcgaagtacgattcaaaggctaagtcgcctgacaaacttttctactttcgcatcaagaaagatcttgagtcgcgaaatatcgatgagtcctatttcgttagaaatttgagtgaggacataaaacgtgaggttgatttcagctcctttactgcttcgctgtctcgcttgttgagtgcggcatga

SEQ ID NO: 364629 - DNA, 2766 bp, Pseudomonas aeruginosa
atgaatgcagtagaaattgagtccgccatttcggacctggccctagagccctttgacgcggcggagttcccgttcaccttcctggccgcattcggcaacaaggaaaccgcgctcaagcgcctgcgcgctggcaacaacaacgcctcggatgtacctggcggcgtactactgcgcagcaacattcatatcgccgcatgcgagcctggcaccgtgggcgaaacgctcaaggccttgcgcgccagcccggccaccataaaagctaaagccaagttcatcctcgccaccgacgggcaaacgctggaggccgaagaactgatcacgggtgaaaccatcacctgcgactaccctgactttcccaaccacttcggcttcctgctgccgctggccggcatctccaccatcaaggagatcaaagacaaccccatcgacgtgcgtgccaccagccgcctgaacaagctgtacgtcgaactgctgaacgagaatccggactgggccaaagccgaacgccgtcatgacatgaaccactttatggcacggctgattttctgcttctttgccgaagacaccgacatcttcaatggcgatggcctgtttaccaagacggttgagcagttcagcgagcgcgacggctccaacaccgatcaggtgttgtctgaaattttccgcgccatgaacatcaagctggccgagcgcgccaccgctcaaccgcgcctgcccagctgggccaacaccttcccctatgtaaatggcggcttgttctctggcagcacagaagtgccgcgctttacgcggatggcgcgcacctacctgctgcacgctggcaacctgaactggcaaaaaatcaacccagacatcttcggcagcatgatccaggccgtagccgatgatgaagagcgcggcgcactgggcatgcactacaccagcgtgcccaatatcctgaaggtgttgaacccactgttccttgatgatctgcgcgaacaactggaggcggctggcgacaacagggccaagctgcttaatctgcgcaagcgtatggcacgcatccgcgtattcgacccagcgtgcggctccggcaacttcctggtcatcgcctacaagcagatgcgcgagatcgaggcggagatcaatcgccgccgaggcgaggccaacaataaatcggaaattccgctgaccaatttccgcggcgtagagctacgcgactttccggcagagattgcccgcctggcactgatcatcgccgagttccagtgtgacgtactgtatcgcggacagcaggatgcactggcggagtttctgccgctgaatgcacagaactggattgtctgtggcaatgctctgcgactggattggctgagcatctgcccgccaaccggtacaggggtgaaggtactggctgatgatttattcggtacgccgctggatcaggcggaaattgatttcgagaacgaaggtggcgagacatatgtctgcggaaacccaccatatatcggaggaaaaaaacaaactgccgaacaaaagaacgacatggctcgcgtctttggacgcggcgggcagcacaaaaaccttgactacatatgcgcctttatcctcaacgcatgtcgcttcttggaatatgccaccaaggcggcattagtcactaccaattcagtggtgcagggaacacatgtcccagtgctttggccattgatctatcaaaatggctgcgagcttgagttcgcatatgaaacattcaagtggtcgaacaatgcacaacgcaaggctggcgtgtcatgcacgatcctaggtctgacgaagaatcttgtcggatttaaatacatctatggggacatcgcgcgacggcaagtcaccaacatcaacccatacttggtagagggccccaatatcatcgtcgccagtcagtcgcggaatgccaatgcgctttccagcatgattacgggtaatgctgcatatgacggcggacacctattccttagcgtccaagaggcgcgccagttaacgggcgaccatcccaaaatagagaaaaagctgcggaaggtgtcagggaccagcgagtacgtggacggtattacgcgctactgcttatggcttgatgacgaagatttgccactagcgaaaagcatcccagccgtcgcttcacgaatagaagatgtaactaaatatcgccagagcggaggcgaagtggccgcgacgcttatcaagaagccacatcagtttcgatatcggaacgcctgcaaaacgtcacaattgcttgttcctcaagtgtcatcagaacggcgagagtaccttcctattggattgctcggcccagacatcgtgattacgcatctcgctcatgcaatttacgacggaacactagtcgacttttcggtgcttgcttctcgcttgcatctgacctgggtcactacgatttgcggcaagctggaaacacgtatccggtactcgagcaacctcggctggaacacctttcccgtgccgatgctcaccgagcagaacagggcagacctgacccgctgtgccgaggccattctgctggcccgagaagcccacttcccggccaccatcgccgacctgtacgacccggacactatgccggacaacctgcgccgcgcccacgagcgcaacgatgaagtgctggagcgtatctacatcggccgccgcttcaagaacgacaccgagcgactggaaaagctgtttgacctctacaccaagatggcagcagacacagcgaagaccacgccgaaaaagccacgagggaaaaaggcatga

SEQ ID NO: 364630 - DNA, 450 bp, Pseudomonas aeruginosa
atgcccttgaacttgactaacctggcccgtggcctggcgctggccctcgccgtcgcggtgcttggcggctgcgccaccagcaaggaaaagctgctgacccacggtgaccgcacgatgatggatatctggcagcaggaggccggcgacggcggtggcgcagccggacggaacgccggccgccagctgctcgatgcgcgccagagcctgcgtcggcccctgaccgacgccgacgtgcaggccgcacctgtcgagcagatgcgctacacgcgcaccgcgcgcaatgaggtccaccgccagttccagcgcctgcccaatcccgatctcgtgatgtacgtgtacccgcacctggccggcaccgatcctgtgccggtgcccggctacacgaccgtcttcccgctctaccagcgcatccagtacgcgatgccgggcgagcgcgtggaggactactga

SEQ ID NO: 364631 - DNA, 399 bp, Pseudomonas aeruginosa; identical to SEQ ID NO: 338988

SEQ ID NO: 364632 - DNA, 690 bp, Pseudomonas aeruginosa
atgagccgcttcaagaacgagatcacccacctgcaggcgcacatcaagacgcttcgcctgggggctggcgccctggtcatcgtcgccctggtcatgggcggcggctggtggagcgctccgcgcgatctgaccatccacgttccgcctgacctgcgctccggcagtaccaggaagtggtgggaagtgccgcccgaatcggtctatgcgttcacgttctacgtgttccagacgctcaaccgctggccgacgaatggcgaagaggactacgcgcgcaacctccacacgctctcgccgtatctcaccccgtcctgccaggccttccttcgcgcggactacgactaccgccgcagcacgggcgagctgcgccagcgcgtgcgcgggatttatgaaatccccggccgcggctacggcgacgaccctacggcgcgcgtgcgcgtggtctccgaccgcgactgggtggtgacgctggacatcaccgccgacgagtactacggcgccgagcaagtcaagcgcgctctggtgcgctatccagtgaaggtcacgcgggtggacgtcgatcctgcccgcaacccgttcggcctggcgctcgactgctatgagggcgcgccccagcgcatcagcacgccggagccaacgcgcccggcgtctggcggcctgtctccgcaagcgccccaaggagaaaccccatga

SEQ ID NO: 364633 - DNA, 927 bp, Pseudomonas aeruginosa; identical to SEQ ID NO: 338987

SEQ ID NO: 364634 - DNA, 1422 bp, Pseudomonas aeruginosa
gtggacggcgaccttcgcgccgggctggacatagacagcggcgaacgcctggccgtacagcttgttcacccagtcggccatgtcgcgcacgccaccggccaggatgcggcccacggcttcattgcccgagataccgacgctgccgatggagccgtcggcgccgacgtaggacatctggccgctgtcgctgtcgatcagcgaggcgacgccggcaccggcggcggtaatcagggcttgcgagccaaggtactgctgggcgttgctgcgccgctccccgctgacgcagggaatgccgtatgggtcgctgatccagcccaggcctccactttgagagttctgctgctggttgttttgctggttgccgtcgcggtcttcggggatggtgcggatcgtgccgtcgtggaagacgaaggtgatgctgcgtacctggccgcgcacgcacgagagcgtccagtcgcccgatgcggtgccgctgaacacggcaccggccacgtcgggaatgtcgatgccattggcggtcaggttgtccgatccgaccaacaccttgaaggggtacggatcgttgacggttccgtcgatcggcacgcggccgatcagcgccgtcatcgccaccgaccccatcagcgtcgaattggtcggtacggtatagaccgccttggcgctcttcacgcctgcggcgcgtgcgcccgcgttcgccacggtttccgccgtggtttccaacgtgctctgcgcggggccgaagctcgtcgggaagctcatgccgctacccgtgccacgactgctgttgcgcccctcggctttcctcgcatcgtcgggttcgacccagcgcacgccgccttccatgccggcctcgtcgccgtcacgcagccccagacccaccggcaggtcggcatggccgccgccacgtccgccgatactgtccaggcgccgttgcaggtcggccagcagcccttcggtctgctgacgcgcgctggctgcctgctcttggtcgcgacgcaggttggtgcgctcggagtcgagggccgaattgatgcgctggtcaatggagttctcgcgctggcgcagtcgctggttttcttcgcgctgggatttgttgtccgagagcgcggtctgaagctcggtgcgcaactgcttcacttgggcaacgagcgtcgccacggtgtcgcgcggggtatcgccctcgatgcccagcgccttcatttccgctggcgtgagcttggcgccggcatccgcggtcggtggtgccgaagtgctgcctcccgagaacagccggatggcgacgaacagcaccagcacggcaaccgggatcatcagccacttcaggagtccattactgcgcatggcggacctccttgcggtcggtgccatcctgggaaccggcttccggttgcgggagatgcacggccgggtcgaagcggttga

SEQ ID NO: 364635 - DNA, 399 bp, Pseudomonas aeruginosa
atgtccgagcagcagcacgtccgtgcggacgggacggtcacgttccttccgcaccggctcaaccgccatcccgttgtcgtgcgcggcctcaccgccgacgagctgtggatctgctgcggcctgtccggcgccgccggcctgctggtcggcgcgccgctttcgtgggtgttccgcacgatcgccatcgcaccgacgttcgttgtcctgggcgtggccttgggcgtgttcatcggcggcggcatcctgcgccgcctcaagcgtgggcgccccgacacctggctttatcggcagttgcagtggcgcatcgcaacgcgccatccgctgatggccggctgggtgggcggccacgtgctgatctcgcgctcgggcttctggtccacccgcaggagcatgcgatga

SEQ ID NO: 364636 - DNA, 1146 bp, Pseudomonas aeruginosa
gtggggatcgctgatccagcccaagccgtcgcgctgttggttgttctgctggttgccctcgcggtcttcggggatcgtgcgaatcgtcccgtcgtggaagacgaacgtgatgctgcgcacctgaccgcgcacgcacgacagcgtccagtcgcccgaggcggtgccgctgaacacggcgccggccacgtcgggaatgtcgatgccattggcggtcaggttgtccggcccgaccaggactttgaacggatagggatcattgaccgtgccgtcgatcggcacgcggccgatcagcgcggtcatggcgaccgaacccatgagcgtggagttggtcggcacggtatagaccggcttggcactcttgaccccggcggcgcgggcgcccgcgttggccacggtttccgcggtggtttcgagcgtgctctgcgccgggccgaagctcgtggggaagctcatgccgccgctcgcgccacgccccccgttgcgcccctcggcgggctttgcgtcgtccggctcgacccaccgcacgccgccctccatgccggcctcgtcgccgccctgcagccccaagcccacgggcaggtccgcatggccgccgccgcgcccgccgatgctgtccaggcgccgctgcaggtcggcgagcagcccttcggtctgctggcgcgcgctggccgcctgctcctggtcgcggcgcaggttggaccgctcggattcgagcgccgagttgatgcgctggtcgatggaattctcgcgctggcgcagccgctggttctcttcgcgctgggacttgttgtccgagagcgcggtctgaagttcggtgcgcaactgcttgacctgcgcaaccagcgtcgccacggtgtcgcgcggggtgtcgccttcgatgcccagcgccttcatttcctcgggcgtgagctgggcgccgttgtccgccgcgggtggcgccgtgctgcctccacccgagaacagccggataccgacgaacagcaccaggatggcgacagggatcatcagccacttgagcaggccgttactgcgcatggcgggcctccttggcgttctcgtcgccgtccggctgcggcagatgcacggcagggtcgaagcggtgaatcgccggcagcagcgactgcgcgaggccgcggccgcccgtga

SEQ ID NO: 364637 - DNA, 354 bp, Pseudomonas aeruginosa; identical to SEQ ID NO: 339005

SEQ ID NO: 364638 - DNA, 156 bp, Pseudomonas aeruginosa; identical to SEQ ID NO: 338804

SEQ ID NO: 364639 - DNA, 342 bp, Pseudomonas aeruginosa
gtgagcacgctgccgccctgtccccaatgcaactccgaatacacctacgaggatggtacgctgctggtctgcccggagtgcgcccatgaatggtcgccgaacgaggccgctacggcgtccgataatggcaaggtgatcaaggattcggtgggcaacgttctccaggacggcgataccatcaccgtgatcaaggacctgaaagtgaaaggctcctcgctggtggtgaaggtcggcaccaaggtgaagaacatccgcctggtggacggcgaccacgacatcgattgcaagatcgacggcattggcgcgatgaagctgaaatcggaattcgtcaggaaggtctga

SEQ ID NO: 364640 - DNA, 1110 bp, Pseudomonas aeruginosa
atgtcggcagtcagaggtttgctaggttcggtttggaatggtgtatcgcttccgctgtacatcgtctgggccgttgttgtccgcatcgcgagttcggtacgtgatttcttctggcctcgtggttacaagccctgcaatgagcttgcagatacgtttgtagaagagtgtgcaaatcaccctgctgggcaggctgtacgcctgccgtgggtcgatagcgcggcggtgagctcgatgctgatgaacaatactggccgcttgctttcctacgtggccatcgccagtggctggttcggcgtagccgtaaaggagactggcaagggctatgcagtgaagcgctcgtaccgctactactaccgccgcagcctgaccgggaattggtttgctgaaatctggtcggtgccaaagtctggccttgtctctgctgcgctggccatccccttcgtggatatggctcgtgatgtgatgaaggggcatgcacatggtcatgaggggctgttgctgctggtctccggcctgctgctggtgacctgcttcatgcctcgtgcgatcctgggccgtggtactcatttcgctgcgatggctccgatcaatggcggcgcattaggtggctacggctgtgcccaggtcatcaactggggggctgcccttggtgggttgtcctacctatggttggcggtgggcgctgagtggaatcttgccgctgtagtcattcatttctctgacctgctggcgaagtttgctgctcgttttgacactacgattgcggataaaggcctgctgctgaccgctgttttgatacctcttcactacattgccattgctctcttcggcatggcttggacagtgattccggctgcggctttctggtatgtctcgctgcgtttcatggcggcccgcaaagcgaaggctcaactcgaaaccctgccattcaacgagaaccaggctgcgatgtatgacggcagtgattttgagaaggttgctgagctgcgtgccccacaggtactgcttggtttcctggtctacatcggggttttgctgggcgtggctctgtacccgatcaccagttccattgctcgtgtagtggtcaacccatcccggacagtgggttga

SEQ ID NO: 364641 - DNA, 390 bp, Pseudomonas aeruginosa
atggcactcaactcggcaatgcacgagatctacttgtcgatgccggtagacgcctatctgatgccggagctccagggcttaccgttctgggccaggacagcacacgaaatgctgttggcgctgaacccgaccaagctcgcggagctcgctaagagcaaccagctggatgggtacctggtgcagcagcaggcagagctatcggggcaggtacgtaagctggaaacgcagtggaaacagctgaacccactaagcatgcaggcctgcttcttcgagcgagccatctggcagaaccacagcaagcagtacgctcgggaggttctgattgactcgatgaccaggtgcttggtggacgaggtaggctcgatcccccaaaccaacgatttctcgtga

SEQ ID NO: 364642 - DNA, 633 bp, Pseudomonas aeruginosa
atggagcgcgcaggacaggtgatgggagtgatgaggcggggcgggtatgtggtattcgcgctcgcctcgattgttgctgcctttgtcatggtttgggcgcagcaggctctcggtctaccaggtgttattggcgcgggaggaatggccttggccagcctgggtttgatccaggtctgccaaattctccgccccgatcaacgcatgtgggggcggtttcagattcgccacttcgcggtgttcttgctggcgatagttgccgtccagttcgtttgcttcaaggtgcgagtggccttgggcgattacgatgcgggcgcgcagatagctcgcgagatgctcaaggtgaatgcactcggcgttctagtagcagcgcctctgttcgaggaagtgatatttcgcgggctgatctggcgtgcagtggagttcggaaaaggacgactcgcaacagcggtgactgtcatcgtgactgctgctgcgtttgcgctctttcatagccaatcgaatattgcccagctggcactcatgggggcggtgggcacccttcttggcgttgcaagggccgtgtctggtggcgttgcactgccgatcacgctccatatcgcgatgaacacctacgtcgctctgggggcgctctga

SEQ ID NO: 364643 - DNA, 216 bp, Pseudomonas aeruginosa
atggttgttgctgagtacaagctggatgccggaattgtcgtgtctagcgagctgccggttttggatgaaggcgagtcgatcaaaatcagtcgctgctcttacaaggggcaggcctcgctgctgatcgagattctgagtaatgaccgcgttgcggacgcggtggttttccctggcctggttgctgggcaggttccggtcgagctgatccaggcatag

SEQ ID NO: 364644 - DNA, 645 bp, Pseudomonas aeruginosa
atgattgttctgctagggggcgagaagggcggttctggcaagagctgcttggcgcagaaccttgctgtgtggcttcagcgagctgggcgagatgtcctggttctggatgcagaccctcaggggacaacagctgattgggccaaggaaagggttcaggtaggagttctaccgccactccccgttgtccaggaccatggaaatatccggcagaccctcctcgatctccaaaagcgctacgaagacatcatcgttgatgcgggcggtgctgactcagaggcgcttcgctctgctatgacggttgcaacgcacatgctgattccgtttcgtccgaaacgacgagacctgaaaacgctgccaaaagttgaagcattggtgcgcttggcgaaagcctcgaactctcaactgatcgtgcgagcagtgatcacccaggctcctgcattgccaagtcaggggcagcgcattctcgactcgaaggaagcatgtacgtctttcgggatacaggctctccaagcgttcactacggcgaggaatgtctatgacgacgcggatgaagatggcagctcggtactggagacagggacggacagtaaagccatcgaggagatcgacctgattgctaaagaactattcgcggaggctgtgtga

SEQ ID NO: 364645 - DNA, 717 bp, Pseudomonas aeruginosa
atgggcagtcaacgaaacggacattgcgcccggtcgctctcccgcactcgacctggtgaaatgggtagccttagtggccatgaccctggatcacctgcgttttgtctggccggtattggagccaatgaccctagcagggcgcttcgcgttcccagctttcgctgcgactatggctatgcacgccatacgccagggcacgcctgggcgcagcacatggagacaactggctctcttagtaggagctgctgtcatcagccagtggccctaccatgcgctcactggctacgatcagggcaacatcatggccacactggcctgtgcactgtccgtgctggccggtgtacgtatgccgggatggaagggcacggcactcgccacggcgggaattgcactgccgatctgggtgcccctggagtacggcctgctcggcgttttgctgccttccgcgttcctgtttgcgttaaccggtacctggcggcgctggatgctgccggttttgatcgccaccctagtgaacgccagtacacctgcgaaggcagcaatgggggcagcagcagcagtggcttgttgcatcttcctctcggcaaaactcacactcaaagctccctccgtgcatcgctgggcctatgcgtattatcctgcgcatatggcgattcttgctctgcttatcccctgagcgacagctcatccggcgccacgcgccgcccttgtggctga

SEQ ID NO: 364646 - DNA, 516 bp, Pseudomonas aeruginosa
atggccaaaaacaatgacaagcagagcgatttagccctcgcggatgccttcaaagagctgatacatgttgtggtaagtatgagggacgctggggtaccactttcgcaggtacagcacgcgcctattttctcttacctgatgacccccaagcagtttgatcggatcaagaagatctgcatgcaaaaggggtgggaggtccctaatcagcgcggcatcctgatcgacctggaggcagtggctcatccgttggatgcacgtgaatcgaaggataactgcaccgtcgacgaggctcttgcgatcctggttgcagcctattcggcctatagccagatcggcctgaacaaaccgaagcactcccaagccatcgttttcaacactggccgccaggtgcaggttgcacggaacaagtactacgcggtggcggtcgtggaggtgcgtgtagaggggcgtaaaaagtacttggccccggtaactgcgtatcacgcaaccgaggccaagattcggaacattagttga

SEQ ID NO: 364647 - DNA, 300 bp, Pseudomonas aeruginosa
atgatcagtcgccaccctggcgggatcatccgtcgccgctacctggagccgctgaagctgactatgaccgacctggccgaagccatgggcgtcagcctgtccagcgtgagccgtgttgtgaacgagaaagctgaactgaccagcgagatggccctgcgtctcagccacgtgattggcgggacgccggagatgtggatggggcttcagaccgcttacagcctggagaaggctaagtcgcaattcacccccgaggggctcaaacgcctgaaccctgcgattgcccaggaagctgccgcttag

SEQ ID NO: 364648 - DNA, 288 bp, Pseudomonas aeruginosa
atgctgggaaagatcaaatctaaggcgctgaagcgcctcaacaacggcgatgtatccaaggttcaccccgaccatgtagaggtgatccaggacatcttggcaatcatgaaggccagctccaccttgcaggacgtagacctgccagggatgcggctccacccctggaacggcgggggtaagaaggccaagacctggtcgctcgatgtgagcgggaacttccggcttctcttcaagcatgagaaggaaaccgggcagttttacgacctggattacgacgatcctcactga

SEQ ID NO: 364649 - DNA, 834 bp, Pseudomonas aeruginosa
atgacgaagacaaagaagaagagcgaatgggccaaacttccgctgcgctggattcacgagggcgggctcgtgaccttcaccgatatgaagctgaagaagacgcgagtgccggcggatcagcgctggatgggacgggaatggactgaggcctggctgcacgacaaggaagcccggaacacctgcatcgctgcgctccgtctgtatctggtcctgtgctgccgtgctgactacaagagtggcgaagccgccgtgacgtacccggagctgatgaagctcgcgcatatgtcgcgtcccatcgtcgccagatcaatcacgaggctcgtcacggcgggcctgattcggaaaaaggaacaaccccgaaaagagggttcggtgatcatcatcgagcgctggaacgaggcctacgggtggggaaagatcccaaagctcaagctgtatgacggaaatgaagctggccagatgctgttgctggctcagttcaatttcagcaaagccagtttccacgcgctcaaggtctacgtggcactgatggctttccgcgaccgatcggccgaaggattggctgtcgtcagctacgacaagatcgcccaggtcacgggcatagcgcgcagctatgtcgcggaagccgttaatcagctgtatgccatggacctgatttcgtaccggcctgggcacttcaactccggaagcggggacgacaagaccaaccaatacatcatcaagggattaacggcacgctggcctagtccgaaccaggccgaatggtcagggccagaccttgccggcgagccggcacgtccgccgaaagccgccctgccggcacaggtgacgtaa

SEQ ID NO: 364650 - DNA, 732 bp, Pseudomonas aeruginosa
atgggtagcgtggtccgtcgcaacgtcacgaagtcgaacgacctggttatcgcagcgtacaagctcactctcaacgagcagcggttgcttctggctgctattgcccagattgacccccgcaagcccttgccgcgccccatcacgatctccgcccatgacttcgctgatcagtaccagatccccgttaagcaggcctacgaggctctcaaggaagcgagcaacgcactctacgagcgagacattaaaaccttcgatggtcgctacaaaagccgcttcaggtgggtagatcgggttgattacctagacggcggcggggaaacaaagctcttcttcaccgtgcacgtgcagccttacctggtgcatctgaataagcgctttaccacctacgacctaaaaagggtggcggacctttcctcaactcactcgatccgaatcttcgagctattgcagcaatttcgggtaaccgggctctatatcgtctcggtggctgacttccgtgagtatctggagctcggcccctcgtacgagcgctattcaaacctcaaaggcaaagtcatcgaccccgccctcaaagagcttcgtgagaagtccgggctggagatcgagttggagacacagcgcaaaggccgcgctatcgataggctaattttcaagttcaaagaccaggagcaaatgcggctggatttcagcgcaaccccagagctagagcttgctctagctgaaactgactaa

SEQ ID NO: 364651 - DNA, 348 bp, Pseudomonas aeruginosa
atgtcggagctgctgcgcctcaccgccaacctcgaagctagcggcgtcggcctagagagcctcaaggaacaaatcgacaccaacagcgctgccggtcggttggtgttccatgtgttcgccgccatggccgagtttgagcggaacctgattcgtgaacgcaccttcgccggcctggatgctgctcgtgcccgaggccggcaaggtggtcggcctggagtgtcgccggagacgattgccgcaatccaagccctggccggggatcaaagccgctcacccgccgagatttgcaaggctctgaatatcagccgcagcaccctctacaagtaccgccaaggcagcaagtcatga

SEQ ID NO: 364652 - DNA, 270 bp, Pseudomonas aeruginosa
atgatcgaaacacaactcgaagtgttctacctggccgcactgctgctcttggtcgattgcatctgctgcctgatcgctgcctaccggaaaaacccaatgctgggggcaatcgcggggggagggactgccggcgcgctcgcacttgttctgctcaccacgatggtgccgtttcccatggcagcattcgccagcatcgccattggtgggactattggctggatgaaagcaaaggccctttctcccagcgatagcaggatggctcatggataa

SEQ ID NO: 364653 - DNA, 252 bp, Pseudomonas aeruginosa
atgtcacaactgattgaggcgctgcgcgcaaccgccacgaagtggcgagcagccaaccaggagcaccgtggcggcgtcgtgctgctatgggagggcgaggtgtacggctggaagaatgaactgcgtgatccggcaagcgaaagcccaggcgcctacgccgtggacaagaccgggctggtcttcaaggccgagggcggcgacgcctacaacggtgcgaaagcgtgggtcgctgttgaccctgatgcgcaatag

SEQ ID NO: 364654 - DNA, 309 bp, Pseudomonas aeruginosa
atgagccgatgctgggtgtactgggaggaccgggccgcatggttctgcggctggttcgacggctggccggtatggggtccgaagcgtggccgggaagccgtcacgatggagcaggcccaccagttggccgatgccacaggtggagccttccggttctacccggtcgagcgcatcaccatcgactggccggacgagccgaaacggccagagccggaaccgctttcgcccgaggtggccgaggcggtggaatcgttctggcggtcgctggccgaacgagacgcacagcagggttgcgacagcaacccgtaa

SEQ ID NO: 364655 - DNA, 828 bp, Pseudomonas aeruginosa
atgtgcggtgagcgcgatcaccggcaccgggctgacttcccgctcggcctcccagcggcggatcgcctcggtggcctggcggccgtccatgccgggcatctgcacgtccatgaagaccaggtcgaagcgctcgcgctgcaccacctcgagggccgcgtagccgctgtccaccgcggtgacctgggcgccgaggtcgctgagcagggtctgcaccagcagcaggttggccgggttgtcgtcgacgcagagcagccgtggcggccgtccggaaaccatggcgtggggcttgtcgctgcgcgtcgggcggacctgcagcaactcctgcagcttgcgttgcagcttgcgggtgcaggcgggcttggcctcgacctgttcgtcgggcagggtcgcgtggtattgcgcctgctcggtggtcgggcagagcaccagggtcttgcagccgagccgttcgaattcccagaacgactggctcagctcttccggcggatggatcgcggccgagacgccgagcaccgccaggctgatcggcaactggtcgggcggcgggttgcgcaggctttcctggaggctgtcgaggtcggcgaattcgctcacttccaggccgaagtcggtgagctggtggtgcagcgagcggcgcgtcagctcctgcggttcgagcagcgccacgcgctggcccgcggcccaggaggcgcctggctcctcgttgtcgtcgcgacttttcggcagactcaggctgatccagaattcggcaccttccccaggcgtactgtcgacgccgatctcgccgcccatctgctcgatcaggcgcttggagatcaccaggcctag

SEQ ID NO: 364656 - DNA, 597 bp, Pseudomonas aeruginosa; identical to SEQ ID NO: 341575

SEQ ID NO: 364657 - DNA, 1218 bp, Pseudomonas aeruginosa
atggctcgaaagcctttgggtatgcccaccggggtggaagtcatcggcaactctatccgtatccgcttcatgtggaacggaacaaggaagtgcgaaacactcccctatcccgcgacgcaaaaagggattaagactgcatccggtcttagagatcaggtagtccaggcaatcaagatgggcatcatggatgaagccaagtatgcagaattcttccccgggtctgcgattgcggaatcggtcagcagccaaatccctctgttcggtgagcatgctcaactctggctagacagccgagagattgtgcttgggacacggaagaactacaagagcatcctcaatcagtactggatgccgcatctagcagtagcccggcttgatcagatcacccctactctcttgcgccgaatcatcagcagcatcgagtggacgtcgccaggcgtgaagcgaaacgcgatgttcaagctgtcgacgatcctagattccgctgtgaaggacggtctgatcaagaagaacccgatggcgccccttgagaagccccgggtgtctaagaagctggtagatccattcacccgggacgaggcagaacgcatcatccagcacctgtacgcgacccttgggaagtactcaaggatctacgccgcactgtacgaattcctgttcttcactgggctgcggccaggagaggcattcgcccttcgatgggatgaggtagacgaagaggcccgacgtatccatgtgtgccggatcgtcatagatcgcgggatcgaggagcgagtaaagaccaagcatgagcgcgacgtgctgctcaatgatcgggcattgaatgccctggcagaggccaagcggattgcgcgcctgaagcgcgtcgcatccgtctcggagttcgcggtcagcccattcgtattcccgcccagcaaaggcgggctgtggatcaaggagccaagtgttaccataaagcacttccacgccgcgcttgatgctctatccatccgaaggcgccggcagtacgacacccgccacacatacgcgaccatgtgcctgatggctggcatgaaccctgcgtttatcgctgggcagctaggccacagcgtgcagatgctgctatcgacctatgccaagtggctgaactccgcctctgactggagcgagctggagaagctacagaccagggttaaaactggtacggaattggtacaggaagcagaggaaggcgcgtaa

SEQ ID NO: 364658 - DNA, 354 bp, Pseudomonas aeruginosa
atgaccgacttcaacaggctgaaggtgttggcagagcgggctcttgattgcacatttgatagttacgcagcgctattagcatcagcaaaaccacaagaaattctcggtctgattgacgaggtggagcaactgcgctccaggctggagatagacgaacgcatccctcatgacgggatctcctgccgggacgaaacgatcaaggcgctggacgagaagtgcgacaagctcaaggcagaaaacgatgcgctgcggggagcgttacaggccgtagtggatgatccaacctggcgcagtaacgacaacaccctgtggccgaagatcatcaaggcaatggacaaaggagccaccaaatga

SEQ ID NO: 364659 - DNA, 291 bp, Pseudomonas aeruginosa
gtggtgctggaccagcaccagtacatggtcgtcttcggccagttgcaacaggttcacccgcagcaacggcccccgttccaggtcgaatggctgcacaacgatggcctgtatccgttcgatcaggccttcttcaccgaactgttcccgctcgatggaaacgctaaccgcaggttgtacctgctggtacgaacgccctccctccagccggaagcgggtacgcaaggtttcatgccgcgcgaccaggctgtcgaagctgcgttgcaaggcatccacgtccagccgcccgcgtag

SEQ ID NO: 364660 - DNA, 408 bp, Pseudomonas aeruginosa
atgagcctacgcgccgtcaacctcgcaaaaatccacatcgccaaggcccagctgggcatggacgatgacacctatcgcgcattgctcgctcgcgtcgcgggcgtgcgctcggccaaggacttagggccgcgccagattgaccaggtactggtcgaattccagcgtctgggatggaaaccgaagagcaaccgacaaggccgggcgacgccaaaagtgccgcaaaaccggcaaaccgtgctgcgcaaaatcaccgcgctcctggccagcgcccatcgcccctggagctacgccgaccatatggcccggcgcatgttccaggtcgagcgggtcgagtggctggacgacagccagctctaccggctgatgcaggcgcttatcatcgacaggagccgccatgagcaggtctga

SEQ ID NO: 364661 - DNA, 456 bp, Pseudomonas aeruginosa; identical to SEQ ID NO: 339352

SEQ ID NO: 364662 - DNA, 180 bp, Pseudomonas aeruginosa
atgcagacaagacgcctgatcgggattggcctgattcttctcgcgattctcatcgccgtgatgttcccgctccctcctgcagaccccgcacttggccggcccatcactgacttctggtacttgatcctggccatttttggttttgcgcttctgatatggccagccgctcgaaaaaaataa

SEQ ID NO: 364663 - DNA, 381 bp, Pseudomonas aeruginosa; identical to SEQ ID NO: 332928

SEQ ID NO: 364664 - DNA, 729 bp, Pseudomonas aeruginosa
atgaagaagcgtcttctcgccgccgccatcgcggccatgctttgcaccgcgaccaccgtccatgcgcaatgggtcgtggtcgatcccacgaacctcgtgcagaacgcactgaccgcgatccgcacgttggagcagatcaacaaccagatccagcaactccagaacgaggcgcagatgctgatgaaccaggcgcgcaacctggccagcctgccgtcaagcgtggtgggccagttgcgcgccaacctggcgacgaccgagcggctgatcgcccaggccaggggtttggcctacgacgtgacgaacctggatcgggagttccagcgcctgtatcccgagcaatacgccgccaccgtcagcggcgaccagatgtaccgcgacgcgcaggagcgttggaagaacacgctcaatggcctgcagaccaccatgcggatgcaggcccaggtgtcgcagaacctgggcgaagacgaaagcgtgctggccgacctcgtgggcaagagccagtcagccgaaggtgcgctgcaagcgatgcaggccatgaaccagttgctggccttgcaggccaagcagtcgatccagtcgcagcggctccagatcacacaagaccgagcggcctcgctggagctggcgcggcaggcagcggcgaccgagcgcgcccgcgaagtacggcggcgcttcctgggcgaaggcacgccgtacacgccgcagtccgtgaacttctacggcaactga

SEQ ID NO: 364665 - DNA, 1431 bp, Pseudomonas aeruginosa; identical to SEQ ID NO: 332934

SEQ ID NO: 364666 - DNA, 507 bp, Pseudomonas aeruginosa
gtgccgcccgaatcggtctatgcgttcacgttctacgtgtttcagaccctcaaccgctggccgacgaatggcgaagaggactatgcgcgtaatctccacacgctctcgccgtacctcaccccatcctgccaggccttcctgcgggcggactacgactatcgccgctccacgggcgagctgcgtcagcgcgtgcgcggcatctacgaaatccccggtcgcggctacggtgacgaccccacggcgcgcgtgcgcgtggtgtccgaccgcgactgggtggtgacgctggacatcaccgcagacgagtactacggggcggaacaagtcaagcgggctttggtgcgctaccccgtgaaagtcacgcgggtggacatcgatcccgctcgcaatccgtttggcctggcgctcgactgctacgagggtgcgccccagcgcatcagcacaccggagccgtcgcgcccggcacctggcggcctgtctccgcaagcgcctcaaggagaaaccccatga

SEQ ID NO: 364667 - DNA, 747 bp, Pseudomonas aeruginosa
gtggaaacggaaatcacatttaccccctcgccagtaggcagattttttacagcatcgccccgttggaaactgcgcgtgagcgggcacaaagtcagtcttgagattgacggaaaagcagtcggggcaccttccaacaatgcatcgccgatcagcgtgcgcctcgggctattctgggctagtgtggagcgcgctgatggccgcctgggcgggctttccaagtccgatgcaggtcaccttaaccacctcataaaatcagcagctgagaaacgccgagtgcagctcgctgagcgtgctccgacctacgcgttagcgatcaagcacatcaacaactgggttgagtccattgaagccgccttagcgaaggcaaaggcagaccgccgctggttcacgcgtgaacagcagggcgaactgctcgcacgccgaccaatcctctcggtgtccaatatcgagctaaacgaactggcctcgaatacagagctccgggcactggcgaaactcagtcttcaggatacggagtccactctagaaaattggcgcagggactggatttcaacgtgggctgaagtcaaccaaacccatacccaaaacgaactggaggctagcgctcccctcctctcgaaggtcgaaagccgaccactcaccgaagagcaggccaaagccgtaatctgcttcgacaatcgagtacaggtcgtcgcctccggcgattttcaaggtagttgtcgcgtgagcgtgtcacgctgcctttga

SEQ ID NO: 364668 - DNA, 411 bp, Pseudomonas aeruginosa; identical to SEQ ID NO: 332931

SEQ ID NO: 364669 - DNA, 672 bp, Pseudomonas aeruginosa; identical to SEQ ID NO: 322164

SEQ ID NO: 364670 - DNA, 123 bp, Pseudomonas aeruginosa
atggccaactcacgcaagcatctgatctacctggtctacgggcgacagacctaccaccaggaagccctgttcagcatcgccagcgccttcgcccacctccgcgacggggcgcgcatggcctga

SEQ ID NO: 364671 - DNA, 171 bp, Pseudomonas aeruginosa
atgcgcgggccctccaatggcccgctgacgcactgtagcgaccgcccaaataccgacatcttccttcagaatggtctgctccacgatccgatagacgattatcgccaactcggcgtcggtgaggataactgcctaatggctgcaatcactcagcgtgtagtggtctactga

SEQ ID NO: 364672 - DNA, 330 bp, Pseudomonas aeruginosa
atgttcgcgcccagcaatcaacgggaccccatcgcgcaagttgccggacacccttcgccaaactactcgcgtataacggccagccccacaccgagccccctgtcatcggcgatccagtcggcctgtcacgcgctgctggcgggaagtgtgttgttctcgagcctcggacacgccgaaacagccccctcctccccccggaccgaggaggccctgcccctgcccgccgagaccgtcaccggcggccgcccccaggacgacacgcccctgccctatgccggcggccaggtcgccgagggagcgaggctcggagcgcttggcaaccagacgtaa

SEQ ID NO: 364673 - DNA, 567 bp, Pseudomonas aeruginosa
atgtccaagcaatccacctgcttcgaaatcggctttgccctcggcagggttgtgcgtgagtttcgcagagcgctcagtttccctccggtcgctgtacaagcaccgccgccggttgcgttgagcgtccggcgtatcgagcccgccttgctggctggcccgaccgcaaaggagctggaacacatcagcgacgttccggccatcgtccggctgaagaaggtcaacctgaatgactggtatctagccaacacgcgcgaggtgcaaaagcccaagcgcacgcgcaaacccaagccggtccaggagccccccagggccgaaacaccggtcaggaaggagctcaagctgggttccctcgaccatttgattgcacccaactccgaaagcgaaatggggaggccccctctccagttagagtccctgaacgatcatgagatagctcttttgccagcacctccaggtagcgcagtctcttgggaactccatcggcgtactcaggagcaatacaaccaacgctggcaggactacttgtccaccatgacggatgagcaagtagctgctctcggtcgctaa

SEQ ID NO: 364674 - DNA, 1182 bp, Pseudomonas aeruginosa
atgctttccctcgctgtacctgacgatgcttcggcgtcccgtggcggcctgtccattgccatcctggctgtggcggctttcgtcatcgtcaccaccgaatacctcatcgtcgggctgctgcccgccctggcccgtgatctgggcatttccatttccgctgccggacagctcgtgactttgtttgctttcacggtgatgctgttcggcccagtattgacggcgctgttgtcgcacattgagcgcaagcgactgtttgtcgccattctgctgatctttgccgcgtccaatgcgcttgcggcgctcgcgccgaatgtctggattctggcgctggcgcgattcatccccgctctggtgctaccggtattctggggtacggcgagcgaaaccgcggggcatctggtcgggccgcagcgggcaggccgcgccgtgtcgcaggtgtacctcggcatttccgctgccttgctgtttggcattccgctaggcacgctggcagctgatgccttcggctggcgcggcacgttctggatgctcgccgggttgtcgctggtgatggccttggcgctgtcggtattcatgccgactgtggcaaggcctcagcggctgcgcttgggcgagcagacgcgcatcctcaaggacacgcgctttgtcgccaatgtgctgctgtccgtggtggtgtttaccgcgatgttcaccgcctacacctatctggccgacttgctggagcgcatcgtcggtgtggcaccggcgcatgttggctggtggttgatgggcttcggtgcaattggcctggcgggaaactggctgggtggctgcttcgttgatcgcaatccgctgggggcaaccaccgcattctcgctgctgctgggcttggggatggcggccacggttccgctggctggcatccccatcctgcttgcatttgccctggcattttggggcattgcctataccgcgttgtttcccatttgtcaggtgcgggtgatgaagtctgcttcccatgcgcaggcgctggcggggacattgaacgtgtcggcggcgaatgcgggcacggggctgggcgcgatcatcggcgggctggtgattccgcagtggggattagggagcatcggctatgtggccgcaggcatcgcagcgattgccctcttgatggcggtttggattgcatgcctgcgtcagcaatga

SEQ ID NO: 364675 - DNA, 909 bp, Pseudomonas aeruginosa
atgactccatcggaacggctcaagggcatagaaactttcgtggcaactgcggacgcgggtagtttcacggcggcagcggaacaactgcatctgaccagttccgccgtcagcaagagcgtggcacggctggaaaaccgcctcggcacacgcctgttcgaacgcaccacccgcagacttgcgctgacggacgccggggccgcgttctaccgcacctgtgtgcgtgttctggccgatctggaagaagccgaggcggtgcttgccgcgcagcgcagcgagccggtgggtcgcttgcgcctggacgttccggccacgttcggccgactgcgggtctggccgctgatgctgcggctcatacaacagcaccctcacctgcgcccccacgtttcgttcaccgaccgttttgtggatctgctggatgaaggtattgacctggcggtacgcatcggcggaccggatcactggcctgccaccatcggacaccgttacctgggcagcgaacgcctgatcttctgcgcctcgcctgactatctagcccgacgtggcacacccgcatcgcccgatgatctgtcgcggcatgatgccgtgctttatggcaaggctgacggcagcaccagcccgtggctgatcgcgcacgatgccagaacggtggaacggcggacgatggaaggccgcatcatcgccgggaatgctgaagcgcaggttgcttccgtcaaggcaggctgcggcatcgcccaattggcgacttggctggtacgcgaggaaatcgctcagggtgaactggtgcaagtcctgtcggactgggccaccgacgggctgccgctcaacctcgtatggcccgtggggcgccaattactgcccaaggtggatgccgttctggaacgctttgccactgacttaaagatcgcctga

SEQ ID NO: 364676 - DNA, 309 bp, Pseudomonas aeruginosa
atgaccaaacaacgccgttccttttctgctgaattcaaacgcgaggctgccgacctcgtgctcaagcaaaactacagctacatcgaagccagccgttcactcggcgtcggcgagtcagccctgcgccgctgggttgatcaggttcagcaggaacgccaaggcgtcactccgcagagcaaagcattgaccccggaacagcagaaaattcaggagctggaagcccggattgcccgccttgaacgggaaaaatcgatattaaaaaaggctaccgcgctcttgatgtcggaagatcacgagcgtacgcgctga

SEQ ID NO: 364677 - DNA, 231 bp, Pseudomonas aeruginosa
atgcgaatcatgcgattgaaagaggtaatcgatacaactggcctgtctcggtcgaccctgtacaagtacatcggggaaggcaggttcgtttccccggtctcgctaggcgatagatcaattggatttgtcgaaagcgaggtctttgattggattctggccaggatcgaagagcgtgacctggcggaggaggctgcaatgcgttccaccagccgcctaagtgtagccaagtag

SEQ ID NO: 364678 - DNA, 282 bp, Pseudomonas aeruginosa
atgggccaggacgtggcggtcgagcgactcaccgagctgggcaccgagcgcacagccaccgacgcctccggcaagaccgccgagaatggcaccggataccgagcccagggttataccgacagggccggcaattacgccgagcgctgcgccggccttgccgccagccagagcagcgctaacgccacgtgcgatgccaccgaccgcgccgatagcagcgccggccttcatggcgtgatggaaagaagcgactttgggggagtgacagcgagggcactgcaatga

SEQ ID NO: 364679 - DNA, 1386 bp, Pseudomonas aeruginosa
atgagccaaaaactcgattcgttgttcgaacaagaccgtgcgcacttcatgcacccgtcaacccatgcccatgaccacgccagcggcacgctcaagggacgcatcatcaagagcgcgtcaggcattcgtatccgcgaccacgaaggccgcgacttcatcgacgcctttgccgggctgtactgcgtgaacatcggctacgggcgcaccgaagtcgccgatgcgatctacaagcaggcaaaggagctggcctattaccacacctatgtcgggcactcaaccgaagcgatcatcgagctgtcgagccgcatcatcgactgggcgccggagggcatgaagaaggtctactacggcctgtccggttccgacgccaacgaaacccagatcaaactagtgcgttactacaacaacgtattgggtcgcccgcagaagaagaaaatcatctcccgtgatcgcggttatcacggttcaggcatcatgaccggcagcctgaccggcctaccgactttccaccagcatttcgacctcccggccgaaggcgttaaacataccatttgtccgcactggtaccgcaaggcaccggcaggtatggatgaagccactttcgtgcgctattgcgccgacgagctggagaaaatgatcctggccgaagggccggacaccgtcgccgcgttcatcggcgaaccgctgatgggcaccggcggcatcatcgttccgccggccggctattgggccgccatacaagcggtgttgaacaaatacgacgtgttgttgatcgccgacgaagtggtctgcgccttcggtcgcctgggttcgaagatgggcagtcggcgctatggcatgcgtcctgacctgatcaccacggccaaaggcctgaccagtgcctatgcgcctttgtcagcagtgattgtcggtgaaaaagtctgggacgtgatcgaaaaagcctccgaatctcaaggtgccatgggacatggctggacgtactccgggcatccgatctgcgcggcggcggccctggccaacctcgacatcctggagcgggaaaacctgacggccaacgcagagaatgttggcagctatctgaatcgtcgattgcgggaagtattggaaggtcatccactggtgggcgaagtgcgcggcgacggcatgcttgccgcggtcgagttcatggccgatcgtgagcaacgcacaccattcgatgctgcgttgaaggtcggtccgaaagtatcggcagcctgtcttgaacgcggaatgattgcccgagcgatgccccatggcgacattctcggttttgcaccaccgttgatcttgaccgaggaggaggccgacctgattgtcgacatcaccaaaagtgcggtcgatcacgtggccagcgagatactgggctaa

SEQ ID NO: 364680 - DNA, 1473 bp, Pseudomonas aeruginosa
atgacatacaaacatccgctgttgttcaaagcactttgctacgtagacggccattgggtccacagtgacagcggccatagcgtcgccgtgcacaatccggccgatcagaagttaatcggtcatgtgccgatgctcgatcagcctcagatcatcgccgccgtagatgccgcacaccgggcgttttcagcctggcgtgaacaaagcctcgatgaccgcggaacgattctgcggcgctgggcggcgttgatccttgagcatcaggaagacctggcgcggattctcagccaggaacaaggcaagcccctggccgagtcccgcggcgaaatcgcctacgccgccagtttcattccatggtttgccgaagaggcgcggcgcctttacgggcagaacatccccagccatatccccggcgcgcatctgggcacgatcaaggaaccggttggcgtctgtgcactgctgacgccgtggaattttccttcggcgatgatcacccgcaaagccgccgccgcattggccgccggttgcactgtggtcatcaaaccggcccacgaaacgccttactcggcgttcgcgttggcgcaattggcggaagaagcaggcttccccgccggcgtgttcaacgtggtgctgggcgaaccgcaaatgaccatgcaaaccctggtgcaggacgctcgcgtgcgttcggtcagcttcaccggctcgacccgggtcggcaagttggtcctgcaagcggcagcccaggatgtgaagaaggtatcgctggaattgggcggcaatgcgccgttcattgtctgcgccgatgccgatctggagctggcggtgaaagtcgcggtagaggccaagttccagacctccggccaggattgctgcgcggccaatcggattatggtcgaacgctcgatttatccggcgttcctcagccgctttgcctctgcggtgcgcgaactgcgggtcggccccgcgctggtgggtgatcaagagcaaagcgtcgacatcggcccgctgatgcatcaggccgccttcgatgtgaccgtcgagcgtgtggctgatgcgctgaagctgggcgcgcaacgtctggtgggcggcgaagcgcatgccctcggcggattgttctatcagccgacggtgctggccgacgttacgccgcagatgcgtatctaccgcgaagaaaatttcgcgccgattgctggcgtcatgcctttcgccaccctcgagcaagccatcgaaatggccaacgacaccgaatacggtctggctgcctacatttgttccaaccgcttggacctaatctaccccctgattcgccgcctcgaccacgccatggtcgcggtcaatggcgtcaagttcaccggccatccgatcccgttcggtggcatgaaagcctcggggctgggccgcgagggcggtaccgagggcttcgaagcctttgtcgaaaccaaatacttttgcctgcaccatcaaggccagttctaa

SEQ ID NO: 364681 - DNA, 480 bp, Pseudomonas aeruginosa
atgcacaagctcgatcgctatgacctgaaaatcctgcgaatcctcgccgaagatggtcggatcaccaagtcgagcctggccgaggcgatcaatctctcggtgaccccggcgtgggagcgggttcgcaagttggagtcgctagggcttatcaagggctaccgggcacagatcgactggaacgcggtgttcaaaggccagcaggtgctggtggaaatcaccctggcccgacacaccgcccaggacatgcggcggttcgagcaacgcatgaacgaggccgccgaagtggcattctgttacgccaccggtggcggtgttgattacatggcgatgatccaggcgccggacattgaccattaccagcggtttatcgaccagttgttgctcgatgacctgggcattgagcgctacttcacctacatcgtcactaaaaccatcaagaccgcgggtgccttgccggccgaggtggcgcaagaaccataa

SEQ ID NO: 364682 - DNA, 1002 bp, Pseudomonas aeruginosa
atgagcgatttacctgacaatccgatcaatgccacggtggactttgcccgcgaaggcgtgcagcacggattcctcaaattgccgtattcccgggacgattcggcctggggcgcggtgatgattccggtaacggtgattcagcgcggccagggtccgactgcgctgcttaccggcggtaaccacggtgacgaatacgaaggcccggtggcgctgagcaagctggcgcagggcctgacggccgccgaggtaacggggcgggtgattatcgtcccgttcatgaacaccccggcgttccatgctggtcggcgcacgtcgccgatcgacaagggcaatctcaatcgcagtttccccggtaagccggacggcaccgtgaccgagaaaattgccgattacttcaatcggactctgttgcccttggccgatatcgtgctggacatccattccggtggccgcaccctggatttcctgccttttgcagcctgtcatgtgctgcccgacaaaaaacagcaggctcaatgcgaagccggcatgcgcgctttcaatgcgccttacagcatgcgcatgctggagctcgatgcagggtcgatgtacgacaccgccgccgagcgtcagggcaaagtctttgtcacgaccgaactgggtggcggtggttcgtccacggcgcgcagtgtggcgattgccgagcgcggggtgcgcaatctgctagtgcatgcagggattcttgaaggtgagatccagcccgcggagtcaatcatgttaggcatgcccgatgccacttgcttcatcgatagcgaacacgatggcttgctggaaatgtgccgcgatctgggcgacaacgtgagcaagggagaagtgattgcccgcgtttacgacgctacccgtagcggcgtcgctccggtggaatatcgcgcggcccgcagcgggctgctggcggcgcgccactttccaggaatggtgcagtgcggcgatatcattgcagtcatcgccgatgtattgacctga

SEQ ID NO: 364683 - DNA, 1191 bp, Pseudomonas aeruginosa
atgtctcagatagtcatcaatctcccgttcgaacgggaggaatacgcccagcgtctggccaaggttcgagcggccatgcagattcagggcatcgagctgttgctggtcaccgatccgtcgaacatggcctggctgaccggctatgacggttggtcgttttacgttcaccaatgcgtgttgttggcgctcgacggcgagccagtctggttcggtcgcgggcaagacgccaacggcgccaagcgcacggtgttcatgcagcacgagaacatcgtcggttacccggacatctacgtgcagtcccgggaacgccatccgatggattacctgtcgcgggaagtcatcagtgcccggggttgggacgcgctgaccatcggcgtggaaatggataactattatttcagcgccgccgcgtatttgtcgctgcagaaaaacctgccgcaggccaagctgatcgacgcggtcgggttggtgaactggcagcgggcgatcaagtcgccccaggaaatcgcttacatgcgcatcgctgcgcgcatcgtcgaaaacatgcacgggcggatcctcgaacgaatcgagccgggcatgcgcaaaaatgaactggtggctgaaatctacagcagcgggatcctcggcgctgacggtcatggcggcgattacccggccatcgtgccgctattgcccacgggtgccgacgccagcgcgccgcacctgacctgggacgattcgccgttcgaaaaaggcgccgggaccttctttgaaatcgccggttgctacaagcgttatcactgtccgctgtcgcgcacgatctatttgggcaaacctccacagcacttcctcgacggcgaaaaagcggtggtcgaaggcatcgccgcgggactggaagcagccaaaccgggcaacaccaccggcgacatcgctgtggcgtttttcaaagtgttggagaaattcggcatccacaaggacagccgttgcggctacccgatcgggatcagctatccgccagactggggcgaacgcaccatgagcctgcgtcccggcgacaccagtgtgttgcaaccgggcatgacgttccacttcatgccgggcctgtggatggacgattggggactggagatcaccgaaagcattttgatcactgagaccggtgtcgagacactgtgcaatgtgccacgccaactgttcgtgaaggattga

SEQ ID NO: 364684 - DNA, 993 bp, Pseudomonas aeruginosa
atgagtgacatcaccttattgagcgaagcggatctgcgtgcctgcgtagcactagacctgccgagcatcgaagccatcgaacaagcctttgtgctgctggccacagcagcggtggcaatgccgccgatcctgcgtctggacatccccgagcacaatggcgaagtggacgtgaagactgcgtacctgccgggcctggagcgttttgcgatcaaggtcagtccgggttttttcgacaatccgaaactcggcctaccgagcctcaacggcatgatgatgttgctgtcggcgcgcaccggtttgctcgacgccttgctgctggacaacggttatctgaccgccgtacgcacagccgcggcgggcgccgtggcggctcgcgccctgtcgcgggtcgacagtcgcagcgtggcgctgatcggtgccggcgagcaggccgcgttacagcttcaggcattgcgcctggtgcgaccgattgaatccgttcaagtctgggcacgtgatagcgccaaggctcaagacttcagcgctgaactggcgcgcgacagcggcctgacggtcacgccttgcgcgagcatcgacgaggccatgaccggcgtggacattgcgatcacctgcaccccgagccgcgaacccttgatcgaagcgcgccatctgcaccccggcttgcatatcacagccatgggctcggacgccgaacacaaaaacgaaatttccccccaggcgcaggcgcaggtcgaccgctacgtggcggatcgcttgagccagacgcgaatcctcggcgagttgcatcacgctctggcggccggcgctattaccgacgaatcgggcttggccgaattggggcaagtgctcgcaggccagcgcccaggtcggaccagcgaggcgcaagtcaccttgtgcgacctcaccggcaccggcgcccaggacaccgccatggccaatctggccttcgagcgcgcgcgctcggccggcaagggttttcagttcggcagctaa

SEQ ID NO: 364685 - DNA, 972 bp, Pseudomonas aeruginosa
atgtcaacgttgcagctacatgatgtttacctcgctcgccagcgcatcgaatcgcttgtccggcgtacccccttggaatactcgcccagcctttcgcaacgattgggcgtggcggtgtacctcaaactcgaatcccagcaaatcaccggcagtttcaaattgcgcggcgcgagcaatgccgtggcgcagctcagcgccgaggagaaagcgcgtggcgtggtggcggcgtcgaccggtaatcacggtcgtgctctggcgtatgccgcttcccggcaaggcgtgaaggcgacgatttgcctgtcgcatctggtgccggcgaacaaggttcaagccattcgtgatctgggcgccgaggtatgcatcgtcggccagtctcaggacgacgcccagcgtgaagccgaacggatcgccaacgagcaaggcgcgacattgctgccgccgttcgatcacccgaccatcatcgccgggcagggcacgctggggctggaaatcctcgaacagcaaccggacgtggtgcaaattctcgtgccgttgtccggcggcggtttgtttgccggggttgcgctggcgatcaaaagcgtcagcgcgaacatcatcacccacggcatcagcatgcaacgcggtgcagccatgcacgccagcctcgcagccgggcatccggtggaagtcgaagagctgccgaccctggccgactcgctcggcggtggcatcggcctgaacaaccgttacaccttcaacatgactcgcgatctgtgtgaccacctgcatttgctcagcgagacttccatcgccaatgccctacgccatgcctatcgcgaagagcgtctggtgctggaaggcgcggccgtggtcgggattgccgcgttgcttgatggattgattgagccgcgcgggccgatcgtggtggtggtcagcggccgtaacgtcgacatcgatcagcacctgcgcgtcctcgcgggcgcagatgcgtga

SEQ ID NO: 364686 - DNA, 1434 bp, Pseudomonas aeruginosa
atgctgtcccgacgagcacagacccgagttttagcgctgatggacaaatggaaagcggcactggatatcgcccgcagtggcgagtcaaagtacaagattctggtgcaggcgattgccgatgatatcgagcagggtgtcttggccaatgatcagcgcctgccaccgcagcggcatgttgccgataccatgggcatcagcgtgcagacggtcaccaacgcctataaagagctggagcgtcaggggctggtgcgttgcgaagtcgggcgcggcagttttgtgtcgcggcgcatgagcgatcgagtggctacctatattctcgatagccccgaacgggccctggtggatttttccatcgcgcggatcctgcacacccgcgagcacgaccagttctggcgtgacacctgtctcgaactcagcacggaagaggatcagccgtggatacacgcatttcgtccgattgcgggtttcgagtcgcaccgcgaagaggccacgcactggatcggacggcaaggactgcgggtcgagcgtgatgacatcctgattaccaacggcgccgctcacggcatcttccttgcgctggcgtctctggccggtcccgatgatgtcgtgctctgcgaagggatcaccgatcacggggtaatcggcaactctcaggtattgggattcaccctcaaaggcctggaaatggaccgctatggcatagacccggaacacttcgaagacatgtgcagcaatgagcgcatcaccgcgctggtgtgcacgcccaacctgaacaacccgaccaccagcctgatgcccgacagtcgtcggcgggagattgccgatatcgcccggcgtttcggtgtgcacatcattgaagacgatgtatacgggccgttgctggatgagcatcgcgcgccgccaatcagccattacctgccggagttatcgttctattgcactagcatgaccaagtcagtgctgaccggtttgcgcatcggctatttggtagtgcccaagcgactggcgttgcgcaccgaaagtatcttgcgggtcaacagctggatggccacgcccatggtctccgaaatcgctgcgcgctggattcgtgacggtcgcgccgacacgctcgtgcgattgcagcgcaaactgttggccggcaggcaggcgatagtcagcaaatacctgggcgagcacctgctcggccagcatcctcatgcactgaacgcgtgggttggcattccaatacactgggaggtcgacagcctggtgcgggccttgcgtcaccggcacatcgctgtcgcatcgcctgatccgttcaccgtgcgtggaacgccgcgagctcgagcggtgagggtgtgtgtcggcgccgaatgcagcgacgaagaaatgcgtgatgcattgataagcatgcgcgagatattcgggcagtacccgcaaatccatgatttttga

SEQ ID NO: 364687 - DNA, 858 bp, Pseudomonas aeruginosa
atgagcaatttcccttcccgcagcacccatgcattgcgtcacctgttcatagcttgcgcgatgttcggcctagccgccggcgcccaagccgctacgacactggaaaccgtcaaacagaacagcagcatccgtatcggttatgccaacgaaaccccattcgcctttaccgaaaccgacggcagggtcaccggtgaatcaccggaaatcgccaaagccatctttgccaaaatgggcatcaaacaggttgacggcgtgttgaccgaatggggctcgttgatcccgggtctgcgcgccgggcgcttcgacgtgattgccgccggcatgtacatcacgccggctcgctgcaagcaggtgctgtttaccgatccgcagtatcaactgccagacgcgctgcttacggccaaaggcaacccgaaggggctgcacagttacgaagacatcgccaagaatcccgaggtgaagctggcaatcatggccggcacggtgaacctgggctatgcccgcgactcgggtgtaaaggatgagcaaatcctccaagtaccggacaccaccgcccagttgcaagccgtgcgcgccggtcgtgccgatgcggcagtgggtactcaactgaccatgaaaggtttggccgccaagggtggtgaaaaagttgaagcagtcaccgagttcaaggatgacccgtcacacattggatacggtgctctcgccttccgtccggaagacaaagacctgcgcgatgcggtcaacgccgagttgaaaaaatggttgggttccgaagagcacctcaaggcagttgcccctttcgggtttgacaaatccaacgtgacaagcaaaacggctgccgagctctgcgctcaatag

SEQ ID NO: 364688 - DNA, 660 bp, Pseudomonas aeruginosa
atgggtgaattacttccgctattgatacaaggcgcttgggtgacgctccaggtgacgatcttcggttcgctgctggcgattgtcgcggcgattctcgcggccctggggcgcatgtcgccctggcggccattgcgctggttttccattgcttacattgaagtgtttcgcggcacgtcgttactggtgcaattgttctggctgttttttgtgctgccgctgccgcccttcaaccttgaactgagcccctacagcgtggccatcgtcggcctaggcttgcacattggtgcttacggcgccgaggtgatgcgcggtgcgatcagctccgtcgccaagggtcaatacgaagcgtccacggcactcaacttcagcggctacaaacgctttcgccgcatcattcttccgcaggcgttgctggccgctataccgccgggtaccaacctgctgatcgaattgcttaaaaatacttcgctggtgtcgttgatcaccctgtcagacctgagcttcagggctcgtcaactggatcaggccactttccagaccctggaaatcttcagtctggcgctggtgatgtatttcatcctggcgcaagccatcaacatcggcatgcgccgcattgagcagcatctggctcgcgggcggttgcgtggaggtctgtcatga

SEQ ID NO: 364689 - DNA, 657 bp, Pseudomonas aeruginosa
atgacactgttcgactggacctatgcctggcatatccttcccgatttgctgcgcgcctcgctcaacaccgtgggcattaccctgatcggtttcctgatcgccattgtgctgggactgttcctggctatcggccgacggagccgcagagtctggctgtcgtggccgaccaccgctgtgatcgagttcattcgcagtacgccactgctgatccaggtgtatttcctttactacgtgctgcccaattacggcgtcagcatgaccgccatgcaagtgggcattctgggtatcggcctgcattacgcctgttacatcgccgaggtgtatcgcggcggcctcgatgcggtgccgcgcgcacaatgggaagcagtcacggcgctgaacatcgccccgtacagcgcatatcgcaacataatcctgccgcaggccctgcggccgatcctgccgccattgggtaactatctggtggcaatgctcaaggatacgccggtgctgtcggcgattaccgtggtggaaatcatgcaacaggccaagaacatcggctccgagaacttccgctatctggagccgatcaccatggtcggtctgtttttcctcgccctaagcatcgctttggcttatctggtacggcgccttgaagtgcgcctggagctacgctaa

SEQ ID NO: 364690 - DNA, 795 bp, Pseudomonas aeruginosa
atgcagaaaaccaaaccggtaaagccgatcgtcagcttccaggacgttaccaagagctacggcaactttaccgtgctcgatcatttgaacctagacgtcacgccgggtgaaaaagtcgcgatcatcggccccagcggctccggaaaatccacactgctgcgggtactgatgacactcgaaggcatcgatgacggactgattcgcattgaggatgacttgctgacccacatgcccaatcgcaacggtgtattggtgcccgccaatgaccggcacatccgccgagtgcgtggcaagatcggcatggtgttccagagttttaacctgttccctcacatgacagcgttgcaaaacgttatcgaggcgccggtgcaggtgctcggcatgaaaccgaccgaggcccgtgaacgtgcagcagacttgctggaactggtgggtctgggcagcaagctcgggcattacccatcgcagttgtccggtggtcaacaacaacgggtggcgatcgcccgggcactcgccatgcgcccgaaagtcatgctgttcgacgaagtgacctccgccctcgacccggaactgtgcggtgaagtgctcaacgtgatccgcaagctcggcaccgaacacaacctgaccatgctgatggtgacgcatcaaatgggtttcgcccgtgagttcgctgatcgtgtgtgctttttctacaaagggcagattcacgagcagggcaccccggcgcaaatcttcgaacacccgcagcaggaacgcacgtgcgcgtttctcagtgcggtgaaagaagcaaactag

SEQ ID NO: 364691 - DNA, 651 bp, Pseudomonas aeruginosa
gtggtgggggacctttcggtgggttgctttgcaacgttgggcgcgcgacatgtccccaccatggtcgagcgcttcaagcagcgctttcctgaggtacgagtcgccattgtcgaaggtgacaccgaggaactgattgaacgggtggagcgcggcacccttgatttagcgctgatctatgacatgaacctggctcgtaaggtcaagctacaggcggtgggactgcaatcaccttatgtgctgctgcccgaagggcatcatctggcagcaaaagccagcttgtgtattcaggatttgcaaaccgagccctttatccttctagacctacctcacagtcgcgactatttcctgtcactgttccgctcgggcggtgtagagcccaatgtcattatggagttgcgctcggtggaaatggtgcgctcactcgtggcacatgggcacggagtgtcgattctcgtcactcgacccgctggagacttgagctacgacgggcgacccatcgtgtgtcgcccatttgacgctagcatcccaccgcaacgagtcgtgatcgcctcgtcgcaaacccagaacccatcccgcccggctgaagcgttcgtggtggtgatgcgcgaactgttcaatgaagccgatacgcttgaaacctcgacaatctga

SEQ ID NO: 364692 - DNA, 1425 bp, Pseudomonas aeruginosa
atggctagttcaactgcgcctgttgcaccgaggtcggtaattgaaacccgctccatcgattacataccggaaaacgagcgccatggcagcgccttcggtcagttcacactgtggctgggtgtgaacctgaacatcacggccatcgtcaccggggctttggcggtggtgctgggaggcgatgtattctggtcgttgattggccttctgataggccaagtacttggcagcatcgtcatgggcctgcaagctgcccaggggccggcgattggcctgccacagatgatccgcagtcgcgtgcagttcggtgtctatggtgcggtcattccgcttgtactggtgagtttgttgtacgtggggttctcggcgggcggcacgttgctggccggtcaatcggtggcgaaagtgctatcgatcgcggactggcagggcatcattctgttcggcctggtaaccctgttgttggcgacccttgggtatcgcaccatccactccatcgccaaagtagccagcgtggtgggcgtcattgcctttatctacatgttcggtgcgttgctggcccggcacgatatccatgcgctgctcgacaatcgtcacttcgtcgctgccaacttcgtgttttcgatctcgttggcagccgcctggcagatttcgtatgggccatatgtagcggactactcccgatatttgcccagtcagacgtccaagttgaagatctttctggctgcatcgctgggcacagtactgggatcacaggccgccatgaccttcggtgtgtttgccgcagccctcgccggaaccgccttctcgggccatgaggtagagtttgtcgtcagcctgggctcgacgggtgtgttggccatgatcctgtatctggtggtcggcttcggcaagatcaccatgatgaccctcaacgcttacagcagctacatgtccagcgcgaccattgtcagcgcgttctgcggcgtcagcagagtgtctctggcccatcgcttcatctatgtgctgggaatggtgtccgttgcagtgctgattgccctggccggttcccacagctttatcagtgcgttttcttccttcctcatttttctcctggcgttcatcaccccctggagcgcgatcagcctggccgacgtgttcttcgtcaacggcacgcgctatgacctggcagctctcaatgatcccgctggccgctatggccgttggaactggccggttattgccacctactgctgtggggtactgatggagttgccgttcatttccagcggtttctacaccggaccggtcgcccgtgcgctgaactatgcagatgtttcctgggtggtcggcctgctgggtaccggaatgctttattgcctggtcagtcggcgaatggccgccagggtgccaccgtccctgacgcctgctctcgacagcaaagcctaa

SEQ ID NO: 364693 - DNA, 1614 bp, Pseudomonas aeruginosa
atgacatcggataaatcccgcttcgcacgcgaaaacttgcccggcgacccatacgcaatgctgttgcactgcgcgaaccgctggccggacaaggaggcgctcgtatttgactccacacctcagcggctgaccttcagccaatggttgcttgcttcccagacactggcctgtgccttgcggcggcgcgggattcaacccggcagctcggtggcattgtgggcggaaaacagaatcgaatggccaatcgcgcaggtcgccatcgctgccattggtgcggtgctggtgccggttaatacgcactttcgcgaggacgacctcctgcatgtgctggatcacagtcagtcggtggcgatcttgctttccgcgcgctttcgctccagtgactatctgtccatgacactggacactcgtaaccggttaccccttctgcgcgacgtgatttgtttcgacggacctgggcttcacgctgagaattgctggagttacgcagcactgatgagcgaaggaccgcagctgccatttcaggcgtggccctggtcgcctcgcgagctggccagcatccagtacacctccggcaccacagggcggccaaagggcgctgaactgtgcttcgaaggcatgttgatgaatgcacgaggaaccgtcgcgcgtctggcggttaccgccgaggatcgctggacttccatcattccgctattccactgcgcgggctgcattatgaatgtgctctcagcgctggccgcaggggctacgtatgtgggggtcagtgccttcgaagccgagcgaatgttgcacctcgtggaggccgagcgctgtacgctgctgacgggcgttcccacctcttatctggccatgctggagcacccgcgacgaacacagtacgaccttggctcgttgcgggcgggcacttgcggtggcgccgattgcgacccggctttgctcgaacgctgcgcgtctgcgttcccgattccaggcctggtacaggtgtacggccagactgaagccagcacccttatcgctttggacagttgcgagagtgcgcagcgattcaccaccgccggcatgccattgccaggcatgcaggtgcgcgtgtgtgatccggacaacggccaggtgctggcctgcggtgagaccgggcaggttcaggtgcgcgggcccatggtgatgctcggttatcatcgtgacccgctggagactactcgttgtatcgacctcgatggctggatgcagacgggggatctcggacgcgttaccgccgatggccgagtggaacttgtgggaggacggttacgcgacatgatcatccgcggtggcgagaacatctacccggtggaggtggagaacctgctacgcggccacccggcgatcaccgaaatcgctgtatttgccatgccggatcctttctacggcgaagtggtcgccgcggcggtcgagttgggtggggcgctctccgctgcgcaggtgaagcaagcgtgtgccggaaaaatcgctgggttcaagcatccatccagggtgttcaaggtcagccaatggcccatgacgtccagtggaaaaatactcaagcgcgagctgaaagcccaagccatggcgatgcagttggaggaattgccatga

SEQ ID NO: 364694 - DNA, 309 bp, Pseudomonas aeruginosa; identical to SEQ ID NO: 364676

SEQ ID NO: 364695 - DNA, 666 bp, Pseudomonas aeruginosa
atgttcgactacaccttccactggcgctcggcgttcaacgccctgccggagatgctcgccggcagcctggtgacgctccaggtcaccgcgctgtcgatgctcttcggcatcctcatcgccctgctcctggccttcgcccggctcggcggcaaccgcccgctgcgcgccgccgccggagcctggatctccatcgcgcggaataccccggcgctattccagatctacatcctctacttcggcctgggctccttcggcctgcacgtcagttcctggttcgccctgctcgccggggtcaccttcaacaacgccggctacctcgccgagaccttccgcggcggcctccaggcggtgcccgagacccagctgcgggcggcccgctcgctgggcatgagcgcgccgcaggcctatcgcctggtggtgatcccgcaactgctgcgggtggtgttctacccgctgaccaaccagttggtctgggccatgctgatgacctccctcggcgtggtggtgggcctgaccgacgacctcaccggcgtcacccaggcgctcaacgtcaagaccttccgcaccttcgaatacttcgccctggccgccgtcctctacttcgccatggccaagctgctggtgctggccgcccgcctgctgggctggcgcctgttccgttactga

SEQ ID NO: 364696 - DNA, 1653 bp, Pseudomonas aeruginosa; identical to SEQ ID NO: 325132

SEQ ID NO: 364697 - DNA, 495 bp, Pseudomonas aeruginosa
atgccgtcattgctcaagggcatgcgcgccgcgttgctgaacctcgccacgctgctgttgctgctcgacctggtcctgctcatctacggcgtgttcgcccgctacctgctcggcagctcgccgatctggatggacgaactggcccgctacctcatcatcggcgcagtaatgctggcgctcggcgcggtatggatggaaggcgggcacatgcgcgtcaatctgctggaacaacgcctgccgccgcgcctggcgcaggtcctcaggctctaccagtggctgctggcgctggccttcttcgccttcgctgcctgggtcagcacccgctacgcgctgaacgccgggcgcttccgcagcctcggcctgggcgtcagccgcacctggccgttgctcagcctgccgctcggcttcggcctgctgaccctcatgctgttgctccaggggccctggccgcggcagccggccagcaccaccgtcgagggagggacgcaggcatga

SEQ ID NO: 364698 - DNA, 354 bp, Pseudomonas aeruginosa
atgtcgttgaccatccgcatcatgtcccgcgccgaaccggcggcggtgcgctggtactcggcgagttcgacgtccatcggcaccgtctgcatcagctccagcgaaccgatcaccccgctcatcggggtgcgcagttcgtgggtgacggtggcgaggaactcgtccttcaggcgattgctgttggccagttcctggttcagcgcttccagcttgcggctggactcctggaggattcgcgcgcgctcctccttcatcgcgttgatccggtcggccagcgccagcgacagcaagcccacctccagcgccgaaccgatctggctggcatacatagtgaggaacatgttcggcaggtag

SEQ ID NO: 364699 - DNA, 219 bp, Pseudomonas aeruginosa
atgactgatgaaatcgacaagatcgttgcgacgatcaacgcgcagaaaggcgaactgatgggtatcaacgccttccttatggcaatggcacgctcgctaacacctgcggaactcgggagggttctcgacgggttcgataacgaaattgcgcacatgcgatcgttcttgcgtactcgcaactgccggacgaagtcattgggggtctcgagggttatgtga

SEQ ID NO: 364700 - DNA, 2415 bp, Pseudomonas aeruginosa
atgcccgtacgcacgcttcgcccccgttcgctgtccctggccatccacgccgccgccatgaccctcgccctcgccggagcggcccccgccctgcttgccgccgaggcgcccgccgccagctcggcgcgcagctatgacatcgcccccggcccgctcggtcgcaccctgtcggccttcgccagcgacaacggggtatccctggcgttcgacccggcgctcaccgagggtcgccgcagcgccgccctgcgcggccgctacgcgccggtcgaggcgctgcaccgcctgctgctgggcagcggcctggagttgcagcagcgcagcgacggcagctacaccctggtgccggcaaccaccgatggcgcgctggaactgcaatcctcgctgatcaccgcccaggccgccggtgccgagaccctgcccgccgagtacgccggcggccaggtggcccgtggcgcgcgcctgggcatgttgggcaacgccgacgtgatggacgcgccattcagcatcaccagctacaccgccaggaccatcgagcagcagcaggcgcgcagcgtcgccgacctgctacaggccaacgatccgtcggtgcgggtggtcggcgggcgcggcgacctggtggacagctacacgattcgcggcttcagcgtgcagaacgccgacgtcgccttcaacggcctctatggcctgctgccgttctggcgggtaccgatcgaattcgccgagcgcgtggaagtgctcaagggaccgaacgccctgctcggcgggatttcccccggcggcagcgtcggcggcaccatcaacctggtgcccaagcgcgccgacgaccagccgctgacccgcgtcagcgtcgactggacccagcgcggccagctcggcactcacctcgacatcggccgacgctttggcgagaacaacgccttcggcgtgcgcttcaacggcgtctaccgcaacggcgataccgccgtcgaccatcagagccgcgagtttcccatgctctccctgggcctggacttccgtggcgagcgcctgcgcctgtccagcgacctgctgtaccagaaggaaagcctggaaggcgtggtgcgcccgctgctgaccggcccgggaaccacccacatcccccacgccccggactcgaagacacgcttcggcctgcgcgattcctacctggaccaggaggactactccatggtcaaccgcggcgagtacgacctcgccgacaacctgacggcgttcgccagcatcggcggccgccagagcaactacgaaaccatcgccgccaacagcatcctcatcggcaaccagggcgatatcgtcaacagcctggcacgccagcgcggcgaccgccgcacctattccgccgaggtcggcctgcgcggcaacttcgacaccggcccgctccgccacgactggacgctcagcgccaaccgcctgcacgaacggctgggcatggtctatgccttcaccgggatgcagccgggcaacctctaccagacctcgccgcatacgccgctgccggacttctccagcctcgacgggagcattccgaagaccaatgaaaccgacctcggcggcgtggcgctggccgacaggctgtcgttcctcgaggatcgcgtgcaggtcaccctgggcgtgcgccgccagcagatcgagtcgcgcaactacgaccagaccagcggcgcgcgcaccagccacgacaagcggcacgtgtggacgccgatggccagcgtgctggtcaagccgctgcaggacctgtcgctgtacgccaactacatccagggcctcagccagggcgaggcggcgccgatgaccgcggccaacgccggccaggtgctggcaccgtacaaggccgagcaatacgagatcggcgccaagtacgacctgggcggcttcaccaccaccctggcgctgttcgagatcaggaaaccgaacgcctataccgacgccagcaacgtcttccgcgccgacggcgagcaacgcaaccgcggcgtggagctgagcctctatggcgaaccgctggacggcgtgcgggtgatggccggcgccacctacatcaagcccgagcagaacaagaccggcgaccctgccagcgaaggcaaggacgcgcccggcgtggcccgccgccaggccaacctgggggtcagttgggacaccccattcgtcgacggactgaccctcgacagccgctggatctacaccggctcggcctacgtggacagcgccaacgccctcgccgtgccgcactggaaccgcgtcgacctcggcgccgcctacgccttccaggtcgccggcaagccgctggtggcgcgcgccaacctggagaacgcgctgggcaaggactactggaccgcagccaacggctacctgtcgatcagctcgccgcgcaccctttccctttccctcacggcggacttctga

SEQ ID NO: 364701 - DNA, 150 bp, Pseudomonas aeruginosa
atgaaacctatgattcaggcccacctggtcgagcgcgatcagttcggcttctggacccatccgaactatccggacctggccgacctgctcgtcgccggctcctcccaagctaagcccagcaccgacgacgggcagggaggcaggccatga

SEQ ID NO: 364702 - DNA, 282 bp, Pseudomonas aeruginosa
atgaactacaccaaactggcccagcacctgctgcgcggtggcgaccgccacagcagcatctacgtcgaggggctctgcgccgcgctcaagctgcgcatcgagggtgagcccaccaccgtcaactacccgcagggcagcctggagttcgatgcctactactacggctgccgccgtggcgccgacgagttccgcaatgccctgatcgaagccaacggcaaccgtgtcgaggccatcgagagcctgcgcgcaatggccggcgacgccgagcggagggctgcctga

SEQ ID NO: 364703 - DNA, 957 bp, Pseudomonas aeruginosa
atggcccgtaccgcaacgccaaaggctgagccgctgcaggatgcgccggtcaacgaagaagccgtcaacgtcatccagaacctgggcgccattgcccaggacatggccgaggagcgtgacctggtcaaccaactgctcggccaggctcagatggcaggagcgtttgaagatttttcccgcacggtgcggacttccaaactcgcccatgtcaaggaaaacaagctctaccgctcgctagcaggcatgaaaaatccgcacggtgcggaaaacctacgaggcacatgggaggagttctgcaatctgctgcgccgctctgtggaccaggtagaccgggacatcgccaatcttcgcgccttcggagaagaggccctcgaatccatgacccgcatgggcatcggctaccgcgaactgcgtcaatggcgccgcctgcccgatgacgcaaggtccgccctgatcgaggcatccaaacagggcaacctcgaagccgtgcagtacctggccgaagagctgatccacgcccacaccaaggaaaaggacgagctacagaagaagctcgccgacacccaggccgactacgaagcccagggcgaagtgctgagcaagaagaacgccgagctggatcgcaccaagcaggatctggccaaggccaagcgccgcatcgagaccatgagcgccgacgaagccgccaaggagctgcgccaggaggtagtcggcatcgccttcgaggccgaggcggacatcaccggcaagctgcgcgcggccttcgccagcctggagcagcacggcagcgagaccggcagcgaccaccgcaacttccaggcccagctgatcgcccacctgctgcgcctgctcggcgagcttaaggccgagttccagttgcccgaggtgggcgaagaggaggacttctcctggatgcacgaggaaggcgtcaagtccatcacggatgccgaggcctaa

SEQ ID NO: 364704 - DNA, 1776 bp, Pseudomonas aeruginosa
atgagcgccgtcattacccaacgcctggtcgacctggaccgctcgctgcaacgcgcagcgcgcggccagcgtaccgccctgtgccgggctgcggcgcaggagctgggcctgagcctggcaaccctataccgcaaactggaggaagtgaccgtggccgctgctccccgtaaacgccgcgctgatgccggccagagcgcgctcacccgcgaggaggcgctgaccatcagcgccaccttgatcgagtccgcccgccgcaacgaaaagcgcctctattccctgggtgatgccgtcgaggcgctgcgcgccagcggcatgatccgcgccgaagccatcgacaaggtcagcggcgagatccgcccgatgtcgctcagcgccatcagccgcgccctgtatgcctacaagctgcacccggaccaactgctggccccggcgccggtcaccgagctgcagagcctgcaccccaaccacatctggcaggtggacgcctcgctgtgcgttctctactacctcaagcccaccgccgagaagaacgccaacggcctgcgcgtgatggaggccgaccagttctacaagaacaagcccaagaacctcgcgcgcatcgccgccgaccgggtctggtcgtatgagatcaccgaccacgccagcggctggatctacctccagtacgtgatgggcgccgagagcggcgagaacctcaacagcgtgctgatcaacgccatgcaggagcgtggcggcgccgacgtcatgcacggccggcccttcggtctgatgatggacccaggctcagccaacacagccggcatgaccaagaacctctgccgcagcctgggcattcagatgatcgtccacgcacctggtgctgctcgcgtcaccggccaggtggagaacgcgcggaacatcatcgagcgcaagttcgaggccggcctgcgcttccagccggtggctgacctggacgaactgaacgccctggcagccaagtggcgcatgcacttcaacgccacggccaagcacagccgccacggcaagtcgcgcaccgacgtgtggctgaccatccgccaggaacagctgatcaaggtgcccagcgtcgacgtctgccgccagctggccgtggccgaacccgagagccgcaaggtcaacaccaagatgcgcgtcagcttccaaggccgcgagttcgacgtatcggtggtgccggatgtcatggtcggcgacaagatcatggtcacccgcaacccctggaacgatcaggccgcccaggtggtgaccgtcgatgcccacggccacgaggtgtactacctggtgcctgccatcgagcgcaacgagctgggcttcgacgtcaccgccccggtgatcggcgaagccttcaagcgcatggccgacaccccggcccaggtggcacgcaaggaggccgccaagctggccatgggcgccgacaccgaggaagacgtggcagcggcccgcaaggccaaggccatcccgttcggtggccagctgcagccctacaagcacatcgacgatgcacagttgccgaccttcatgccgcgccgtggcactgagcacgaactggccgcgcctaccgtcgtcgcgccgccgatcagcatcttcgccgctgccaagcgcctgcaggggcgcttcaccgactggagcccggagcactacgcctggctgagccagcaccacccggccggcatccaggaagaagccctcgatagcgtcgaggccagcctgcgcgccgccttcacccgccgaccaaccctttccgtcgtaggaggtgcgtga

SEQ ID NO: 364705 - DNA, 1200 bp, Pseudomonas aeruginosa
atgctcaagctcaaagcactgctgcgctaccacaacctgggccaggccgacctggcccgcgagttgggccttagccgcccgaccatttcccagctgatcaaccacagcatgtggcccaagaccatcgaccaggccgacctgcgtagccgcatcgtcgcctggctggagagcttcaacgtcactggcatgcagctggtgggcattttcgaagaggaggagaaccaggagcagaacaccaaggtggccgctgggcgctgcaacgcccaacggcctgagcaccgcaatcccaagaagccaatcgaggagcccgacacaatgctactacgcgcaaccaaactgacacagcaggcacgccagcacttcggcatgttcggcgacccgttcgcagacccgcgcaccagcgctgatctgttcgtctcgccggatatccgctacgtgcgcgaaagcctctaccaggtcacgcgctacggcgtattcctggcgatcctgggcgagtccggctcgggcaagtccaccatccgcaaggatctgcacgaacgcctgcgcactgaagacaagccggtgatcgtcatcgagccctacgtcatcggcatggaagacgacgacttcaagggcaagaccctcaaggccatgcacatctgcgaggccatcctggccaccgtaagccctggcagcaagatgccgcgcggcctggatgcccggtaccgcgccgtgcacaacgtgctgcgcgagtcgcaccgcatgggcaaccgccacgtcctggtgatcgaggaggcgcacgccatcccggtaccgaccctcaagcacctcaagcgcttcttcgagctggaggacggtttcgagaagctgctcagcatcgtgctgatcggccagagcgagctggccaacaagctcagcgagaagcgcgccgacgtgcgcgaggtggtgcagcgctgcgaggtggtgaagctcaacccgctcgaccagcacctgggcgactacctcaagcaccgcttcaagctggtcaacaagccgctggaagaggtgatggacgaaccggccatcgaagccctgcgcagcaagctcaccggtaccggctcgaaggaaaacggctcggtgctgtacccgctggccgtgcacaacatgctggccgctgccttcaaccaggccgcccttgtcggcgccacccgcctgtcggcggacatcattgcggaggtgtga

SEQ ID NO: 364706 - DNA, 426 bp, Pseudomonas aeruginosa
atggccatcaccatcgaacaaatcatggagcaggcccaggtttacgcctcggcctggagcctggtcggcgggccgttcgacaatggcaacctgctggagcaggccgagctggagaagcaagtgctgctggagctgctgatcgccttcgaagacgaaacccataccgctggggcccaggaagcgcagctcgacctggctaatccgctgatccagtggcatcagagcaaggttaaggacatcagaaccatgctgcaggccaaggaaggtacccagctttgcctgggtgccgaagaccccaaccccatcgagcttaaagggcaatacctaaaaggcttccgggctgcgttgctcattgtcgaagaccagatcgagcaattccccctgaagctggtgcagaacgctccaaccagcgacgaggaggaatga

SEQ ID NO: 364707 - DNA, 351 bp, Pseudomonas aeruginosa
atggcagccccaaacatcatcccgctcaacgccgatatcgccgccgatatcgcccgccagcacgcgctgcccatgtgcaccgtgctgacccctgaactggccgacaagctccgcgccctcaacgacatgactcgccgcctgcgcgcggcgggcgtgcgtatcgaggccgcatccccgctcgacggcaagatcttcatctacgccgaagactccgaccagctcgcagcatcgtttaagcacgagtggcgcagcccggtctggagcaccaaaggcgtccacaccatcaacagcgtccgcctcggcggctgctacgtctgctggctgacgccggcgaaggggctgccgtcatga

SEQ ID NO: 364708 - DNA, 255 bp, Pseudomonas aeruginosa
atgagccaggccgaacaactgcagcaggagctgacagagatgcgggagtccatgcagcgcatggacgatcgctacaaccagctctcgctcgcgctgcaccacctcacccaggccagcaatctgctctgcgctcagatcgctgtgatgtgcgaggcccacatggccggcgataacgcgctggtcatgcgccaggtcgagcagttcacccaggcctaccgcgccaacctcaagcccgctgacgggagggtgcattga

SEQ ID NO: 364709 - DNA, 213 bp, Pseudomonas aeruginosa
atgaacagcatgaccaagtccgccgtacagctaaccgtcgaacgccgcctgcgcgaagccctggagctgctcaaacgcagcgccggctacgcctcggcctatccgaccatcggtggccacaagctcaacgacgagatctgccgcttccgcgaggcggtacaggccgaactcgaaatcaatacccaacaagccgaggaagaaacccatggctga

SEQ ID NO: 364710 - DNA, 366 bp, Pseudomonas aeruginosa
atggctgataccgcgatgaactatgacccgaacctggtgctgtgcgggcgcagagcagtacagaccgttcggctcacatttggagtatgggattaccgggcagtcatagaggtcgaggtcggcggcaactgcaccggcctgaccgtaatcgactgcgctgtcggcatcgcttacgaccagttggaacagcgcggcatctacggcagcgatgacacctatgccgtcattaccttggccaaagctggtgaagccgaggccgacatggagtgcgaagacgacgagggacattgcgaggaatggctcaaggacatgctgatcgccgctgaaatcaccgctattcgcccgaaggaggcatcccatggctga

SEQ ID NO: 364711 - DNA, 621 bp, Pseudomonas aeruginosa
atggctgagcaaatcgacatccccgccggcttcgtcaagaacgccgccggccacctggtgccggagcaccaggtgcgcgaacacgacaagttgcgcgaccaggtcgccggcgatctggccaagcaggccgtggccatcagcgagtccctggccgccttcaaggccaaggccctgggcgatatcgccgacctgatcgccatctcggccgagaagtaccaggtcaagctcggcggcaagaagggcaacgtctcgatcgtcacctacgacggccgctacaagatcgagcgcgccatggccgagcgcatcaccttcaccgaggagatcctcgcggccaaggagctgatcgaccagtgcatccgcaaatggagcgaaggcgccgaccagcacctgcgcatcctggtcgaccgcgccttccgcgccaaccgccagggccagatcaagaccggcgacgtgctcagcctgctgcgcgtcgagatcgaagaccccgactggcagcgcgcgatggaggccctgaaggactccatccaggtcaacggcaccgccgtatacatccgcgtctaccagcgcgtcggcaacaccgaccgatacgacccgatcaacctgaacatcgcggcggtgtga

SEQ ID NO: 364712 - DNA, 246 bp, Pseudomonas aeruginosa
atggcactttctatcgaagaacgcacgcgcctgattgatcgactggatcgcagcttccaggccatgccccgctgggcaagaaccgcgaccaagcatgcgatgggggctccctcacaccatcccgaaaccggcaagcagttcgagagcttccgcgaggtcatcgaggctgcagccgacgagacactgctgatcctcaaggaggacttcgaggacaacgacgatctggtaccggaggttctgcaatga

SEQ ID NO: 364713 - DNA, 225 bp, Pseudomonas aeruginosa
atgaagatcctcgaatgcaccgtgaagtactacatgggcgcctaccagaccaacaccgtgcgcagccagcgcgctagctgcagccactccgaggacgaggccgtgcgccacctgggcgtgaagctgttcggcgagcagctcgaccacgtcgagcgcatcgatctcaaacccagcgatcagccgggcatgagccgctggctgatcgttggtcgggaggtgcagtga

SEQ ID NO: 364714 - DNA, 396 bp, Pseudomonas aeruginosa
atgggccatccaattttccaagacgccccctcaagggacatgaccaaggctcaggagcgccaggccgagctagatgcgcaggtcgaagccttcctggccaagggcggcgagatcaaggccttcgacaacttccgccgtcctatcgagagtgggccctggcgctcgaagtcgatcaaccccgagcagcagaagccagtccaggctgcgcccatcaaggcgaaaccggccaagcccgccgctcctgtgaaggcaaagccggtaccggaggtgccagccgaaccggtggtggtagctaccatcgacctcagtgccgagctgcgcgccttgcgcaagcagactgcagccatcaaccgccgcctgaatcgcctgagctgctctatgggtggccgcacatga

SEQ ID NO: 364715 - DNA, 567 bp, Pseudomonas aeruginosa
atgagcatctcgaaaggcgtactcagcaagatccacatcgccaagggccaactgggcatggatgacgacagctatcgcgcgctgctgcgccgcgttgctggcgtcgagtcctcgaaagacctcaactcgcgccaggccgggcggttgatggtcgagctggagcggctcgggttcaaaccaaagcccagcagcaaggcagcaggcaagccgcacaacgcccagcagctcgggccgcgcatcgacaagatcgaggcccagctcgctgacatggggctgccgtgggcctatgccgacgccatggcgttgcagatgttcaaggttcagcgcgtcgcctggctgaaaaaggccgagcatctcgacgccctgatcgctgcactgcacgtcgagcaggagaagcgccagctgctcaaccaggttgaagacctctgcaagcgcctcggggtggacactccagaacgcatggagggtttggaagagctgcccgaagggtggcgcaggcagcgtccaatcctcaaggccctggtggatgccctgaatgcggcggtcaacgcgcaggagggcgactga

SEQ ID NO: 364716 - DNA, 336 bp, Pseudomonas aeruginosa
atggatttcgactacctgctgcgcctcggccagttcctgttcaccgtggtggtgggcctgttttcgctgatggccgcacgccgggcgtcatcgaaagtcgaggccgaggccctggcccagcgcctggctgggcaggacaaccggctgacggtgctggagcagcagatgaagcacctgcccaccggtgaccagttcaccgagctggccggcgagctggccgagctggctggagacatgaaggcgatcaaggtcgagatcgcgggggtaaccaaagcgctcgaccctttggtccgcgccgttgagcgcatgaatgaatacctgttgaacaacaagtga

SEQ ID NO: 364717 - DNA, 297 bp, Pseudomonas aeruginosa
atgagcactcaatacgctgactatctccgccaggatcagcgcctggtgattctgcgcatcctctctgagctgccgcagtaccgcgccaactcttcggtgatcaccagcctcttgggcgagttcgggcaccacccgagccgagaccaggtcaagggcgaactgacctggctgggcgaacagggtctggtgaaggtggaagatatcggctccgtcctggtcgtcaccctgaccgagcgcggcgccgacgtggctgctggccgcgcttcggtaccgggcgtcaagaagccggggccctga

SEQ ID NO: 364718 - DNA, 549 bp, Pseudomonas aeruginosa
atggcacgcaagagcagcgtcgacaaggcgcgcgatgaggttcgcgacctcatccaccgcatgctgcgggacaaccggctgacgctcgaccagatgcgggacgtgctcgaggagcagttccccggcgaagaggtgccgagccgcactgcactgcaccgctaccgcaagggcttcgacgagatcatgcgccaccaccgcgagatccaggtggcgagtgacgccctggtggccgagctgggcgagaacttcgacgacaagtcgggtgcgctgctggcccaggccgtgacgacgctggccactcgcgcctctcattccgcgcttgagaaggaagagatcgatatcggcgacgtgctggatctgacccgagcggccaagtacgcccaggagtcccgtgccctaagcaggaaggagcgcgacgccgtggccaaagaagcccgcgcccagcagctcaaggagcaagaagagcgcctggaagaactgcgcggtaccgatggcatgagcgaagagttcgaagaccgcatccgccgcgtactgatgggtaaagcctga

SEQ ID NO: 364719 - DNA, 168 bp, Pseudomonas aeruginosa
atgaaactgctggcgattatcggtttgctctggatcggctggctgctgggctggcgtcatgcccatttcaccgtggccgctgagtgcgagcgccttggcgccttctacgtcggtaaaaccgtttaccgctgcaccgccatcgagccgaaggaagagcccagtgagtga

SEQ ID NO: 364720 - DNA, 1659 bp, Pseudomonas aeruginosa
gtgagtgagccagaagccaaagcgctaaaggcgctgaccaagccccgcaagatcgatctcgccgccgagctggaactgcatggcgtagtcgtgccccaggacatggccgatgcggtacctgaggccgagggcgtgttcctgccgtaccagcagcggtggttcgacgacaccagccagatcatgatcgccgagaagtcgcgccgtaccggcctgacctgggccgaggctggccgcaacgtgatcaacgccgccaagcctcggcgccgtggcgggtgcaataccttctacgtgggcagcaagcaggagatggcgctggagtacatcgccgcctgtgcgctgttcgcccgcgccttcaacgagatggcccaggccgacgtctacgagcaaaccttctgggatgacgggcgccgcgaggagatcctggcgtacatgatccgcttcccgaagagcggcttcaaaatccaggcgctcagctcgcgcccaagcaacctgcgcggcctgcagggcgacgtggtgatcgacgaggcggcgttccatgaatccctggaagagctgctcaaggccgccctggcgttgaccatgtggggcaacaaggtacgcttgatcagcacccacaacggcgtggataacgccttcaacagttacatccaggacgcacgcgaaggccgcaaggattattcgatccatcgcatcaccctggacgacgccctcgcccaggggctctacaagcgcatctgctacgtgaccaaccaggaatggtcgcccgaagccgagaagcaatggcgcgacaagctgtacaagaacgcccccaacgtcgagtcggccgaggaagagtacggctgcgtaccgaagaaatcgggcggtacctacctcagtcgggtactgatcgagcaggccatggtcaatgaccactcgatccgtatctaccgctatgaggcgcccgaaggcttcgagcagtggacgcctgagatgcgcgaggccgagatccgcgcctggtgcgaggagaaccttgcgcccgagctagcgcgcctgaacgcgcgcaaccgccacaccttcggtgaggacttcgcccgccgtggcgacctcactgtattcacgccgctgcagatcgacccgttgctgcgcaagcgcgtgcccttcgaggtcgagctgcgcaacctcacctacgaggcgcagcgccagatcatgttcttcatctgcgatcgcctgccacgcctgagtggcctggcgttcgatgccaccggcaacggcggctacctggctgagcaggcggcgctgcgatacggcgcaggcctggtcgaccaggtgcaactcagcctggcctggtatgcgctgtggatgcccaagctcaaaggtgaactggaggccttcaacctgcagatcgcccgccaccagacccgcctcgacgatctgttgtcgatcaaggtggacaagggcgtgccggttatcgagaagggccgcaccaaggatctgcaggcgcaggacagcaaagccaagcgccacggcgacagtgctgtatcgctggccatggcggtgcgggccagctttatggaaggcggcgccatcgagttcaccgcactgccgcgccacagtcgtggcttcgataacgtcgacgacaacgacactgacctcactctcccggaaccttcagcatggtga

SEQ ID NO: 364721 - DNA, 1572 bp, Pseudomonas aeruginosa
atggtgaccacatcccgcatcctgggccccgatggccagccgatccaactggccgagatccgcgagccgcagaccgcccacatcaccagcctgcaccacgaagtgggtaaccacccttcgcgcgggctgacgccgagcaagctggcgcagatcctcgatcaggccgagcaaggtgacgtgatcgcccaatacgagctgttcgaggacatcgaggagaaggacggccacgtgttcgccgagatggacaagcgccgccgtgccctcacccagctcgaatggcagatcgtgccgccggacaaccccacggccaaggagaaggacgccgccgctgccctgcagtcgctgttggccgggctggatgacttcgagctgatgctgttcgacgtgaccgacgccatcggcaaaggctttgcctgccttgagttcgacggctggcaccgcgtagacggtgactggctgccgcgcgcgatcgatcaccggccgcagacctggttccagctcacccgtggcgagcgccgccaggagatccgcctacgtggctcgatgggcggtgagcccctgcagccattcggctggatcacccacgtgcataagtccaagagcggctacctggagcgcagcgcactgttccgcgtgctggtgtggccgtacctgttcaagaactacagcgtgggcgacctggctgagttcctggagatctacggcatcccgatgcgcgtgggcaaatacccaggcggcgccaccgagaaggagaagctgaccttgctgcgtgcgctggcccagctcggccacagcgcggcaggcatcatcccgatcggcatggagatggacttcctcaacgccgccgagggtgacccagctgcgttcaagctgatgatcgactggtgcgagcgcactcagtccaaggccatcttgggcggcacgctcaccagcggtaccggcgatggcaccaacaccaacgctttgggcaacgtgcacaacgaggtgcgcctcgacctgcgcgactccgatgccaagcaactggccgccaccatcagccgtgacctggtgtaccccatcgccgtgctcaacggcctggccgacagctggaagcgctgcccgcgcctggtgttccccaccgacgaacccgaggatctcaagtcctacgccgattcgctgccgcagctggtcaagctgggcttcaagattccgcgccagtgggcccaggagaaagtgggcatccccgagccatccgagcaagaggacgtgctgcagctgcaggccgaggcatcggcgccgacagagcccgaggcgcctgcaggcgttgcggtggccaccgcgcagcagaagccagccaccactgccgcgcagcgcctggacgatgacctgcagcccatcaccggccaatggatcacgcgcatccgccagctggttgaacaggccgagagcctggagcagatccgcgatggcctggccgagctgctgccggacatgaccctggagcagtacgccgaggccatggcgcaggcgctggctgctgccgccctgcaggggcgactagacgttatccaggaggccgccaatggccgttag

SEQ ID NO: 364722 - DNA, 1230 bp, Pseudomonas aeruginosa
atggccgttagcgccacatcgctgccgtttcgcgagcagaacgagttcctgcgccgcaaggtgcccttgcctactaatggctggactgacacatacggccgcgagcatgaccatgccttcaccgtggccggcgccaaccgcaacgacctggtggctgacttccaccaggcggtgcagcgctttatcaacgaaggcagaaccagggagcaattcctacaggacttcgaccgcatcgtggccaagtacggctggagctacaacggcggccgcaactggcgctcgcgagtgatctacgaaaccaacatgcgcagcagctacatggccggccgctatgagcagctgctggccgtgcgcgaggagcgcccttactggcagtacctgcacagcgacgcggtcgagtacccgcgcgaggagcacgaagcctggaacggcatggtgctgcgctgggatgacccgtggtggcagtaccacttcccgatcaacgcctggggctgccaatgcagcgtgcgggcgctgagctatgacgacctggtgcggatgggcaagaccgggccggacacagcgccgccgatcgtcttcgagcaacgcaccatcggccagcgcagcccgcaaggcccgcgcaccgtcgaggtgccggtgggcatcgaccccggcttcgagcacattcccggccagtcgcggctggaaagccatgtgccggtaccgcgcctgggtgaggagctgatcccgtccgccgcgcctggcctgcccaatcgcccggcgccggatgcgctgccggcaccgcgcgtgatcgaccccgagaccttgccgcctgcaggcatgagcgatgccgagtacgcccgccgcgcgctcgatgccttcggcgcgcagctcgatgccgccgagctgctcaccgacgtcctgggcgagcgcattgctgtcggcccgagcatgttccaggagcccagcggcgcaccggccgtgcagggccagggcgagctgctgccactgctggcggaaacgctgttacagccagacgaaatctggacgcggctggagtactccgaaccgctgcgcaaatcgcaggtgctgcgccgctacctcggccgcttcaacctgggccagcagctgacgcagctggtggtcatcgagctggccggcaacgcctggagctgggatatcgaggcagaccgcgaaggcctggccgagctgctgcgccagggcgtgcgcctgtaccggcgcgaggactga

SEQ ID NO: 364723 - DNA, 564 bp, Pseudomonas aeruginosa
atggccggcgttacgcttgagttcgatgcggttgccgcgctggcggtggtcaatgaggccgccgccgcgctggccgacccggcgccgatgctgcgcgatatcggcgagtacctgatgatcgcccatgaccagcgcttcgccagccaggcctcgccggacggtacgccctggcaggcgctgtcgcctgcctacctcaagcgcaagaagaagaaccgcgacaagatcctggtgctcgatggcttcctgaagaacaccctgcggtaccaggtgaacaacaacgagctgctgttcggtaccaaccgcatctatggcgcgatgatgcacttcggcggcagcatcgatgtcgccgcccgcagccagcaggcctacttccgccaggacggcaaaaccggcgacgtgggcaaccagttcgtcagcaagcgcaagagcaacttcgcccagtgggtcaccatcggtgcctacaccatccagatcccggcgcgcccttggctgggtatcagcgacgacgacaactacgcgatagccggcattgccacccgttacctgatgccaaattccgcataa

SEQ ID NO: 364724 - DNA, 2829 bp, Pseudomonas aeruginosa
atgcgtcagctgccgatgcagatcaccgacatcaccaccagcctggccagcggcatgccggtctggctggtggccgtgcagcaaggtggccagatccgcgacagcttcggcgggtgggccaacgctggtcgtgccctggtaagcaccatcaatccgctgacgctggccatcgccagtgtcacggcggcgattggtgcgacggtgatcgcggccgttcagggcgcggccgagacttacgagtatgaaaaggccattgccctgacgggaaattcggcaggcgtgacgtcggatcaacttgcgggcatggcgcgtgagatcagcggaatttccggcactcagcgccaggctgctgctgccctcgctgaaatcaccgcctcgggtaagttcaccgccgaccagatcaagttgatcggcaccactgccgtcttgatgcagaacaacgtcgggcaggcaatcagcgccaccgtcgaagatttcaagaagctggccgaggagccagccgaggcatccgccaagctcaacgtccagtacaactacctgacccttgctgtctacgagcagatcgccgcactggaggcccagggcgatcaggccggcgccacacagttggcgatggaagctctggccgaggcgatgcaaggtcgctctatcgagattgcgaacaacctcggcctgatcgagtcggcgtggcagggtatcaagaacgtcgccgccgctgcctgggatgcgatgctggatgtaggtcgcgccgatacccttgaggatcagttggcggccattcagcggcaacgccagactgctcagtttggggttcgtggcgatcgtgttggcggcgctattgaccccgcgcttgaggctcgcttggccgccgaggaggaaggcattcggcgccgtatggagctagaggctcagagcgcaaagcaaacagcagacgagaaagccgctacccgcgaagcgatcgaggcatcaaaagagcgcaccaaggccggtgatgcattcgtcaagagtgccgaggcccaactgcagagcctgcagaacctgaccagcgtagagcgcgcacagcgggtgatgcaggaacagaacatcgaggccaccagcgaactgggcaagcgcatgctggaggcggctgaagccaccgataagcagcgtgaggccaaccaggccgaagccgatgccaaacgtgcagccactgaagagcagcgcaaggccactgccgccctgcgcgagcaagaacgcgccgcccaggccgcgctgcgtgcaaccgagcagagcgttcgccagcagctgagttacgtgcagggcctggaggatcaggccgccaagatcggcctgaccgctgccgaagtgcgccagtacgagctggccgagaaaggcctggccggggccatgcgtgcgcgggccgatgctgcgctggctctgatcgatgccgccgaggcacagcgccaagccgacgccaacgcccgcaccaatgtcggccttgaggctgagttcctgcgcgctgcagggcgcgagaccgatgctgcgttgctggagatccgcaccaagttcgccggcatgcgtaccgagttcgagaaggcgggcaacgaagccggcctggcctggctcgacaagctgatcccggtagccgaagccaaggtgcgcgtcgacgacgtgcagcgcgagatggatcgcatcctggccgagcagcagcgccaggagcagtcggtcaacgtgcaacaggatgccggtctgatcaccgagctgcaggcgcgcgagcgcatccttgggatccaccgcgagacttacgcccagctcgaacagatccgcccggtgctggccgagctggctgcgcaacctggtgctgtcggcgaggcagctgcccaggcgctttacgccctggactcccaggcccagcgcctgatggccaccaccacgctcctgcaggagacgttgcgtgatggcctgaccaccggcctgaccgaagcactcacaggcctggcacgcggcaccatgaccctgcgcgaggccgtcagcgccctcggccagagcgtgctcgatgcgctcacccgcatggccgccgagaaccttgcccagtccatcaccggtggcgtgatggggctgtttggcggcggtggtcaggatggcgctggcctcaccactggcgctgcggcagtgacgacatcagccggcgcgctcagcgctgccggcgccaccctcatgaccggcgcagcagccattcagaccgctgccgccagcctagcggcagccaatggcgtcagcggtgccactggctcgggatcctcgggcggttctggttggttggggctccttgcttcggcggacagtgcgtacttcggtggcggtgctggtagtgcggcaggagccagcacctataccggcgcgtttggcttcgccgagggcggcaaggtcaaggggcccggcacgcccacaagtgactcaatcctggccgcactctcgactgaggaagtcgtcatccgcgccgcctcggccatgcaaccaggtgcgaccgacttcctcctggacttcaacgcgcgcggcatgcaggcgctgcatgactgggccttccagtccgcctaccaccacaacaccggtggccttgccggcgtgccggcaccggccttgccgtcgcctgggctggcaaacacccgcctggccgagccggcgaaggagtcgagtaccacgctcaagaacagccagaacttctatctgatcgacgatccgcagcggatcggcgacgtgatgtccggcccggtcggcaatgaggcgatcgctgtggcgatctctcgcgagcccggcaagttccgccaaatcctaggactgaccaactga

SEQ ID NO: 364725 - DNA, 858 bp, Pseudomonas aeruginosa
atgccccatcaaatcggcttcgtcgacaactcgggcggcgtgctcgcccattacaagatgctggagaccatccgcgacttcgcctcggccaacggctggacggtgctgcgctacgacaccgccccggccaaccgcgagttgatcctcaagggtgtgggctacaccggcgccgaggagatcttcgtcggctttcgcacgtaccaggactccagtgcggactactacaacctgctggcgggtgtgttcactggctacgtgccgggcaacaccttcgatagccaaccaggtgctcgccttagcggtgtgccggcgcacaacaatcgcatcgactactggctgaccctcaacccgcagcgcattgcgctggcgatgaaggtcggcaccccggtgtacgagagctgctatgtcggcaagtgcttgccctacggcaggccgagccagtacccgtacccggttgtgtgtggggggatgctctcgggggcatctgccacgcggttcagcgataccgcgcactccggttatttcaagggcaacacggcggccatggccctgcgcagtaacgacaactggctgcagccgcgatgctatccctggggcaacacctacatcgctggcaccggcggctccgtctcccaaaccaacctgcgcgacaccggcggcaactaccagctgctgccagtcgaactgcatgacaacaccgccaacctctggggcgcgctggacggcatttactacatatcagggttcgacaacgccgtggaaaataccctgaacatcggcggcgtggattacgtggtgatccaggacgtttggcgcacagggcataccgattactacgcactgaggatggataactga

SEQ ID NO: 364726 - DNA, 882 bp, Pseudomonas aeruginosa
atggcctactacagcggttcggcaaatgacatggcagaggtacgcgccgcgttggtggcggcgtgcgtggccgagggctgggcgtggaatagctcaactgaagtgctgagcaaggccccggtatttttacggttgcgggtggtcagtggctatctaacgctgctggggcgtaccggtgtagcggagggcgatgctcctggggttgtacgcatgggcaccgttaaggtcgatacgcctattacataccccgtgagctatgagttattcctgtttgagacggaggtttactgcgtactgagattcaacgtcgatttctatctgtggtgtgcgtttgggaagtctagtgttgaaggtttgcccgggaccggcacctggtgtggggcctcggccatggaggccccagtcaatgggatagacatcggattaaatggcggttccggtgccgtatcgtcattggtaggttgcgcattattcgggcgtacgctggcctctaataactcgacgcacgattactgggtccattcaaatttagatggtggcggatggttgtcaggagcctcggccagcgacaccttgcagggctggaaacccatggctccactgatggcaatcctgccgaacagttggaacagcgagtcggtgttgctgccaatccgcgcatataagaaccgcgcctccaacaagctcagtttgactgttgacctcgaaaacgctcgaaacacgcgaatagataattacacccctggagaggtcatatcgattggcggcgagcggtggaaaatatttccgtggtacaggaaaaacgtcgctgctcggaacggtggtgtatcgataaatcataccggtacatttggctgggcgatccgttacgaggggccgtag

SEQ ID NO: 364727 - DNA, 1716 bp, Pseudomonas aeruginosa
atgccagtgctcagcgggcaggtcgcgcggcgtacgctgggcggtctagacgacaaccccaatctgacggccgaccactgggcgtttgcctgggtcaaccagttcgccccatcgccgtacgtcagtggtacccaacgcgctggacaggctaccttgacaccttactggccggtcgaggccaacggccgcgcgatcgccggacagcgcctgcgcgcccatgtggatgactggtaccaccggatccatatcagcccgcggcagcttgacctaggtaatgtcgtttcctcccaaaccaccccggtgttcctgtggaacgcatttctcgtaccacgcacgctctcggccatcgccgggttggatgagggagtcgaggtgagcggccagccggcaccacccatgttattccccgcgctgaaagaactgacctggcagttgaccgttacccctgacggccagccggtgctcgacgccataatcgaatggcagttcgatggcggcatcagcacaggcctgcgcatcaccgccaaccgcatcatcgcctggaccttcgtgccggactggggcgacggtatcgtcgaggggctcacggccgccactgatatcctgcagagcgagtccggggtcagccagcggcgcaagctgcgcggctcgccacgccgagagttcaacggttcgatgtatgtcgagggtcgggagcggcagctgctcgatctcgcgttgttcggctggagcgatcgcatctggtcgatcccgatctggcctgatatccaactgctcgatgccggcattgccgccgacgtcgacttcatcccctgcagcactgagtggctagactttcgcgatggtgggctagccatgctgcgtggcgaggatgcgttcaccagcgagacagtcgagatcctcgaagtactccccaacggcctgcagctcaagcgcaacacgcagctggcctggccagccggctcgcgcctgtatcccgctcgctcggctcagctgctcgaggagccatcgctcaacaagctgaccgatcgcctgttcgaggccgaggtgcgcttcctggtagtcgaggtctgcgactggccgaagtggttgcctgccaccttatatagagggcgcccggtatgggatcgccggccggacgatagcgagaacctcacccatgctgcgcagcgcctgcgctcgacgctggacagcggctttgcccagccgttgatcaccgataccgccaggcgcgccctgcaggtgctcggccagcgccaccttgacctcggccgggaggctcgcgccctagtgcgctcgttcatctacggcatggacggccggcaaaaggtggtgtgggtaccgacccatatggatgacctgacgctgctcactcctgccacggcggtggccaccaccatcgacgtcgccaacatcggttacacccgcttcagcaacggcaagccagggcgccgcgacatccgcatcgagcgctggaatggcacggtgctgatgcgccggatcatcggcgccaccgagctggatggccagaccgagcgcctggcgctggatgctgcgctgggcagcgatctgcagcctgcagacgtcgctcgaatcagctggatgaacctgatgcgcttcgagagtgatacccagaatatcgagcacatgacagacagcgaaggcgttgccgcctgggcaacggcttttcgcgaggagcgtgacgatgagttttga

SEQ ID NO: 364728 - DNA, 573 bp, Pseudomonas aeruginosa
ttggttcagcatggcgccggccagttgtcgcatggcgtcggcaccattgttcgccccggttatcagccctgtcagagcgttcgtaccggcctgctgcacttgatcaagggttgccatgatcatctcattgccggcagcctggcggcggaatcgctcctcctccagttgcttcatcgtggcatcgtgctgttgctctgcctgcgccttgagttccaggtagcgctggtcctcgagcaatttggcctcgttcagcttcttcaggttctccagttcggcctggtagcgctgatcttcgccggcgatcgggtccatctgacccagcaactgcttgttggcttcgacctgttgcgcttcatacagtgccgcggcgagcgcgcggacctgggcgacctgctccggcgtggcgaatggattaaggcgagattgcgccccagcttctgccagttcctttcccttcagtccagcctgtgccagttgctgggaaaggtctccgatagtcttctcattgtccaaggcagcgcgacgctgatcctccatcgactttttgaccgtagaggcggtatcagaggctga

SEQ ID NO: 364729 - DNA, 228 bp, Pseudomonas aeruginosa
atgaacgccatagagctggctcaggtgatggacatgcacgaagccctggagccgttcgccggcttcaccgactggtggtgcggctcgcgccagaagctgttcgcagagcgcgccatggcgctgggcaagcccctgcgcgacctcaccgttggagagctgcaggccatcgcagccgaggtcagtgccgagatgaaaccgttctacacctccaccggagcccaagcatga

SEQ ID NO: 364730 - DNA, 480 bp, Pseudomonas aeruginosa
atgaagaagcgcaactggaagaacgcccagcccagcagcatccgccaagccatggagtggtcgctggagttcgccaaggagcggcacaacctcagtgtcgagcgcattgctgagcgcatgggccaggccaaccactgggccctttacaagtggatcagcgaaggccgcatgcctgcggtgctgatccctgccttcgagcatgcctgcggcatcgccctggtcagccgctggctggcctccaccagcggcaagctgctgatcgacatcccgtccggccgcacttgcagcgctcaggacgtgaacgagctgcaaggcgtactcaccgcgaccacgggcgccctgatcgccttctaccagggccaggtcgatgccgacgctgcccaggccgcgctgcaggccggcctcaccagcctggcctggcaccgcgccaacgtgcagcagcacgccaacccgcaactggatctaggagagcaggcatga

SEQ ID NO: 364731 - DNA, 441 bp, Pseudomonas aeruginosa
atgtccgaccagccgcaagttgcgctcgaagagatcgagctgattccccaccccatggacgcctggcgcgccgcgctcaacgcgttgatcgcctgcgcacctggtgatgggccggccatcgccgctcacctggccgaagcccgccagcaggccctggtgttcgtcgatcgcaccccggccagcgccggtaccgcaaagctgatcgatcgcctgatgctgatcggtgcaggtcgcctggtcagcgacaagctgctcgccaccggcaacgcgacagagcagctcgatggccttggccggcgccagcgcctggcgagggccatgggtacttctacccagtccgtttaccgccatgtcctctccctggctgaagccttgggcatcaatgaaacccaggcgctcaagcatctggagactcggcatctgcatggtgctgatcaatga

SEQ ID NO: 364732 - DNA, 213 bp, Pseudomonas aeruginosa
atggcaacccagcaaaaacccaagaccgtcgaacaggtgaaagcccagttccgcgccaaaggcctaaccgtcaatcaatgggcgaaagaccacggcttcccgcccaccgccgtttaccaagtgctcaacggcttctccaagggtaactacggccagtcgcacgtcattgccgtcgccctcggcctcaaagacggcgaagccgtcgccgcttaa

SEQ ID NO: 364733 - DNA, 570 bp, Pseudomonas aeruginosa
gtgagcgggatcgagctggatggcgatcggaatcgagtagctggaagggactacgtcgagatcaacctggccacaccggagcgtgagcccctggcccaggcgcagcgggcgcggttgaacgaggaagtggccaggctcgccgatgagctgagcctggacccgcgaatgctctggcgcagcgtgcatgagagtgcgggcgtcaagacgatcggtgaggtgaagaaggaccaattccaggacgccatggccgccctgcaggcggtgcgcgaacgacacctggagaaggcccgcgccgagctgctgatcaaggagcttgagcaagccgcccttgagcgcagcatggccaagcagctggcacgttactgcctgcgcgagttcggtgagcagtcgttggccgggctgagcatcaagcagctgactcaggcgctacgctacgtcgacgagtaccagccaccggcgccgttggtggcgccaatgtccgtggcgggctttcggatgcttgccgtgcggcacccatggcacttcactgcggtgtttgcggtgggtgcgttgcttggaaaggtcctctag

SEQ ID NO: 364734 - DNA, 300 bp, Pseudomonas aeruginosa
atgagcaaatcctgcacgcccagccagcgcctgccgcgcatgtggctgtggagcatcgtcagcctcggcctgctgctggccctgtacttcatccgccccgagcagctccaggtggtgctgtacaaggccgccctggtgacgctggccgccacgctggcctactggatcgaccgctcgctgttcccctacgcccaggcccgcccgcaccagtgcatcagcttcgtccagatcgttggcgcgtggatccggcgcgcgctgatcgtgctggcctgtgtgctcggcatgacgctggggctttag

SEQ ID NO: 364735 - DNA, 2796 bp, Pseudomonas aeruginosa
atgggcagtaagaaggccgtcaaggttggctatcgctatttgttcggcatccacatgggtatcggcaaggcgatcgacgaactggttgcgatcgaggtgggtggcaagcgtgcctggaccggcagcgttaccagtaaccagcgcatcagcatcaacgcgcccgagctgtttggcggtgacgatggtgaaggcggcatcagtggctccctcgacgtgatgatgggcgcagcggatcagccggttaacgcctcattggctgcgatgcttggcgggctggtaccggctttccggggcgtttgtacgctgttctatgacggcctggtcaccagcatgaacccgtacccgaaggcctggaagatgcgcgttcggcgtgcattgaagggctgggacggcgctgtctggtaccccgagcgctgcgtcatcagtatggcgtccggcgcaatcaaggcgatgaacccggcgcacatcatctatgagtgcctgacgaaccgtgactggggcggcgccatggatcgcagccgcctcaatgatgcgtcgtttcgtgcggccgccgacgtgctgcatgctgaaggcttcggcctgtgcctgcgctgggtgcggcaggatagcctctcgacattcgtcagccacgtgctcgatcacatcggtggcaacctgttcgtcagccgccagaccggcgagttcgagctgacacttgtgcgtgacgactacgatcccgagtcgctgcctctgttcgacgaggacagcggcctgctttcgattaccgaagacgacaactcggccacggtcggcgccgccaacgaagtcatcatcaagtggcgtaatccgatcgacaactccaaccggcagaagcgtgagcgcagccttgctgcgatccaggccgctggccagcagctgtctgtcaccatcgagtatcccggtattcccactgctgagctggctggccgggtggcggtgcgcgatctccgagcgcgttctatcggcctgaagcgcttcaaggtccagctggacaggcgcgggcgcaacatcaagcccggtgcgccattccggatccgcagcctgagccggggcatcgaggtgatggtggtcagggctgggcgcttcgaagatggcaccctggcggatggcaagatcactatcacggccgtgcaggacgtgttcggcctgccagccaccagcatgaccccgccgcagcctggtggctgggtaccgccggatacagccccggcgccggttgccattcgcaggctgacagaggtcacctggcgtgacctggtgcagaccatcgacgcggccaacctcaacctggtcgaccctaccacagcctttatcgctgccctggccatcaagccaacatccctgtcgctggggtttgcggtcgagtcgcgcgtgggctcagccgcgtatgtgcgcgtgggcccaggcgacttttgcccaaccgggctgctggtcgccggcatctcctctggggccggccctaccatcatccagctcagtgcccctgacaacctggacctcgttgaagtgggcagcgcggcattgatcgacaatgaggtagtgcgggtcgatgcgatcaatctcgaaacgctcagcgtgactatcgcccgtggctgtgtggataccgtgccggccgcccacagtgctggggcgcgggtatggttctttgaggactacgtgggtgaagaccccaccgagtactcctccggggtgagcgtccaggtccggctacgcacggtcaccagctcgggcacgttggctcccgagttggccggtaccgacacgctggccctggttggccgccaggccttgccatatccgcccggcaatcttcgcctgaacggtgcgagctacccgaccgaggtaaccggcgaggtgaccgtcagcgtttctcaccgtgaccgcctcctgcaggccgatcagctgatcgacacgctgcagggcgatatcggccccgagtctggcactgagtaccggttccgcttctacagtggcactacgctgcgccgcacagttcagcaggccggcacttcgtacacctatctgctgggtactgagatcagtgacggtggccccttcaacccgctgcgcgtggtcgttgattcggtgcggggtggggtgtacagccttcaagcgcacgacattactgtcgcgcgcctcgggctggtcactgcaccgcctatccgcctcagcgtcacgccaaccgcctttggtgctgacacgaccgcgcacctggttgcgatgccggcagtggtagaacctggcgacctgctgctgatgcacttcgtcaacgatggcaacgcaacagtggccacgcctgcaggctggacgctgctcaacaccacgctcagcggcacccaggtgcgctctagctggtactggaagttggcagccggcaccgaggatggaaccaccgtcgacctggtcaccagtcctgcagagcacgctgcggcccaggttcatcgctttcaggccggtaccttcgatgctgcagtcgcacccgcgatcgctgtggccactggcaccagcgtttccccgaacccgccaaacctggcgccgagctggggaatggctgacacatactggatcgctgcctatggcgcggatgacgatgatgcgaccactgggtggccatggactgaagggcagacctacacgccgagcggtaccggcacgaccacgtgctcggctgcttcgtgtgttctggcattgagggtggcgaacatcgatccggcgacattcaccatggcggcgagtgaggagtgggtggcggcgaccattgcgatcaagccagcgtga

SEQ ID NO: 364736 - DNA, 240 bp, Pseudomonas aeruginosa
gtgattagcgacgatgagctgtttgtgacgctcgagcacatgcacagcgtaccgggtttcggcagccggccaggtttctgtcataagggcgggcgagccctggcggccaagtacggcttggactgggcgcagattgtgcgtgatggcggtgttgcagccagcaagttgttggccaccaaggatgccatggcattacacctggtcgagttcgcgcggcaggaggtgggtgatgggcagtaa

SEQ ID NO: 364737 - DNA, 243 bp, Pseudomonas aeruginosa
atggacccgtatacctgggcgtatatcgccatcatggccatcagtgcctacgtctcgtacaagaaccgccccaagaccacagcacccaagccggtggcgttcgaggacttcagcttcccgcagttcgaagagggcacgtcgcagtgcgtgttcttcggcgacaactggacagaggattggatggtgctgggcgttggcaactaccgcacccagccgatcaagaccaagggtggcaagaagtga

SEQ ID NO: 364738 - DNA, 207 bp, Pseudomonas aeruginosa
atgcgcagcatcgagcggcacagcggcagcaacctggtactgctgggcggcacagccggcctgcagcctggccagacgctgcgggtttaccccggttgcgaccagaccatccagatctgcaacagcagatacagcaatcaccccaaccacggcggcttcccgcacctgcccggccgttcgccgttcgatggcgacccggtcttctag

SEQ ID NO: 364739 - DNA, 354 bp, Pseudomonas aeruginosa
gtgccgctctcggtcgtcgacgggctgaaagccgagatggccgccctgaccgcccgcctgggtgagcgcgacgagaaggatctcgacagccagatccagggcgccctggaggatggtcgcctgcacaagaccatggaggaatgggcgcgcgacctcggcaagaacaaccgcgcagcgctgactgcctacctggacaaggctcagcccatcgcggccatcaccggtagccagaccggaggcaaaccgccggtggcggacgagaaaactggcctgacccaggacgagctggctgtttgctcggccatgggcctgaccaccgagcaattcaaggccgccaaggcagaggagcaataa

SEQ ID NO: 364740 - DNA, 408 bp, Pseudomonas aeruginosa
atgaccgcgctagccaaagaccgcaacaccaagcgccgtgatggcgtgcagtactccgacccggtagccgccagcaccaaggttttcgctggtgctctggtgtgcatcaacgcctcgggttttgccgtaccgggcagcacctccgccaccctgagagcccgtggggttgcacaggagtacgtcgacaactccgccggtgccgccggtgatctgcgcgtggaaacccgccgtggcgtgttcccgttcgtcaacagcgcctcggccgacgagatcactcgtgccgatatcggcgccacggcctacatcgtcgacgaccagacggtcgccaagacctccgccaccaacacccgctcggttgccggcgttatccgcgatgtggatagcgatggcgtctgggtcgagatctaa

SEQ ID NO: 364741 - DNA, 894 bp, Pseudomonas aeruginosa
atgatcatcaacaagcaaaacctctccatcctgcataccggctataaggcgtcgttccagggcgcatttcagggcgcagtgatcgactatgaccagatcgtgatggaagtgcagtccggcaccgccatcgaaacctacggctggctgggcgctaccacccgcttccgtgagtggctgggcgaccgcgtgatccagaacctggcgctgcatgactacagcatcaagaacaagaccttcgagaacaccgtgggcgtgccccgcgaggcgatcgaggacgatcagtacggcacctacaacaccctgatggcgcaactgggccaggacgccaaggagcacccggccgagctggtttatgcccatctgaaaaacggtttcaccggcaagtgctacgacggccagttcttcttcgataccgaccacccggtgatcggcgccaacggccaggaaacgtcggtgagcaacttccagggtggtagcggcacgccgtggttcctgctggacgtcactcgcatgatgcggccgatcatcctgcagaagcgcaagaactatcagttcgtttccaagaccggcgagaccgactccaacgtgttcgaccgcaaggagttcgtgtggggtgtggatgcccgcctgaacgtcggttacggcctgtggcagctggcctacgcctccaaggaagcgctgactgccgacagcttcaacgcggcctatgccgccatgcaggaactcaagggcgacaacgcacgcccgctgggtatccgtccgaagctgctggtagtgccgccaagcatgcgtgctactgccctggaagtggtcaaggccgagcgcaacgcggccggcgccaccaacatcaaccgcgacgtggtcgacgtgctcgtcaccccgtggctggcctga

SEQ ID NO: 364742 - DNA, 393 bp, Pseudomonas aeruginosa
atggggcaggacgccccgaccgataccgccccggccgcacctgatacggcggccgccaccagccaaccggcatctgcctcgccccaggcgtctgtgggcgatgccgttgtgaatcaaccaggtgcggaggcgcaggcagcagcatcgcctgcaggtggcaatgccactgatgctgttgatggcctggacgatgacggcgatatcgaaggtctgtgggtggtggcgattcccgagcagggcttccgccgctgcggctaccgcttcacccgcgagggcttcggcatcgccctggacgcactgacggccgagcagatcgagcagctggagaacgagcccaacatcaaggttgagcgcggcatcttctccggccgtgtcggcgagcgcgtgtactga

SEQ ID NO: 364743 - DNA, 450 bp, Pseudomonas aeruginosa
atgtccagtaatatcgaaaagttcgaccgactggccggcaagatcttcgccgacctgtatgagagcttccctatacctctgccgatgtttccaacggactacatatcagtagtgctgaaaggagaaatctatgagtcggtagaagatagtgggcccgacgcagtagatgcgtttggcttctttgtggcgacttatgagtggttggagaaggccggttttattgatgtccagacgaagatgctggatggcaccattgaggcagtgctgaccaataaggcgctggaagctctcaaggtgttgcccgaatccctatccagcaaggaaagccttggtgaccgcttggcgcaggccacccgtgatggcgtgacagaccaagttcgctctctcacggggcaggttctcggtgctggccttcgtttcggtatgaacgcttggcaaagcactttctag

SEQ ID NO: 364744 - DNA, 177 bp, Pseudomonas aeruginosa
atgaaacaggccattgccgagctgcagcgcactgccgagatcgccgagaacaacctgcccatcagtgaagccgcaggcgatgccggccaggcggagctgcagcgcaccacctcggtggagtgccgtgaggcgatcgagcagttgaagggaagcgaacagtcgcctgctggcgactga

SEQ ID NO: 364745 - DNA, 390 bp, Pseudomonas aeruginosa
gtgcgcgagtacggcttcgtggagggcctgcaggttcgccagcagctcaagccgttcctggaggggctgtacgagctgatcaaggccgactcggtgccgcccctggagcagatcatggagctggtcgttgcgcacctgggcgacgtcctgcaggcggtggccacctcggccgacatcgaggtcgaggagctgcgcacgctgaagaaccaggacgaaggcgatgccctgctttacaagtggtggacggccaacggcccttttttctatcggcgcgccctaagccggattctggccgagcgttaccgcgcggccgaggcggaaaagcagcgcgctgggcagacgtctacgcctgcctcatccgcgccggctatggcgacgtcgaacgaatag

SEQ ID NO: 364746 - DNA, 456 bp, Pseudomonas aeruginosa
gtggccaccaaggaaggcgtgcgcgcggtggccaccgatctgatggaggccaccctgcgcggcgctgaccgcagcgcctgggcggctgacctggtcgccgttgcggatgatgccctgcagcgcatccaggacgccgccaccgaggctgaaagcctgattgacggctacctggccaagcgcagctacccgctgccgctcagcccggtaccgaagctggtcaccggctgggcgcgcgatatcgcccgctacctgctgcacaaggatcgcggcggcaaagaggattctgacccgatcgtgcgcaactacaaggatgcgctgaagttcctgggcctggtcgccgagggcaagttcagcctgggcgccgaggatccaatcaccagcaacccgaaccagctcgacgtgcgtttcgagtccgcgccgagcgtgttcgatcgcacaagcaggcgggcgtactga

SEQ ID NO: 364747 - DNA, 441 bp, Pseudomonas aeruginosa
atgaacttcgcgcccctggataccacgctcgtcgagaaccgcctgcgcgaccaggtgccggacttcggcgaggtcaacggcgctgctgcgtatcacacgctcaagggcctgcaggacttccgcaccggcgattgctgggtggtgctggctgcagagaccaaccctgcagctgatggcccgcaacccaagcgcaaggcagcatccgcagctgtgttcggcgtggtgatctgcgccaggaactaccgtgacctgcatgcggacgcggccaaggatgaagtgatgacttatgtcggtaaggcccgagaggcacttatcggctgggccccacccggctggaaggattgcatctggctcaagggccaggtgctcgacagcgacagcgaccgagtgctttggatcgatatttacaccaccacccacgtactagggggcaacccgtga

SEQ ID NO: 364748 - DNA, 210 bp, Pseudomonas aeruginosa
gtgagcaagcaacccgaaaccgcagccaagcaggccgccaagcccgagctgcacaaggtgaaactggccaagccgcacaagcatgccggccaggatcaccccaaaggcgcgaccatcaacgtgaccgcacccgagcgtgacttcctgatccgcactggtgtggttgccgcccctgaaactaccgacgccgccgctccggctgccgaataa

SEQ ID NO: 364749 - DNA, 219 bp, Pseudomonas aeruginosa
atggcccagcgcaagaagaagcaaggcatcatcaccgcgcccgaggccggcttgctggaatccagcagcgtggtgaaggtgaccggcgagctggccagctggttgccgctggtgatgagcgagagctgctgcagcaggccggcactggtcttgtacagttcgaccaggatcggtgcaccgttctcggccaggttgatgcccttgtacttcagcgcgtag

SEQ ID NO: 364750 - DNA, 717 bp, Pseudomonas aeruginosa
gtggttggcgtggtagccatgacggacttctgccgactttcgcgcacagcaggcttcgaagaagtcatcgaagataccgactcgctcctgacctgcttcgccaccgatacgcacttcgtaacgaaggcgctgccctcgaattggcagaacaccaaatatcctgatggttttgttccgatagagccgcttgttccgcatgttttcctgcctggagaccaggcgcaggttgcatatgcggttatccaggccatcgccgttgatatggtcaatgaaccaaccatcctggacgtgctggccagtggaaatgaaccacgccacgtggtgtgcctgaaggtgcttacgctggtattggattttcagatagcggcacacgccgctctccagaacgcttcctgctggcttcccgacaaggaaggtcgagtggcgcttccacgccgattgagtcgagaacatctcccgcggtgcatcgcagtagcgaagctcgccggtttcgccatcgtaagaaaggagccgggcgacctcttcgatcagctgcgccttggagacggagttgctgcgactcaggcgggcagccaggcgagcccttatagcttccttgttacgctccgcgtagcgcttacgggcagccctgccgccctctccgttgttccaggcgtgtacggccttcgggtctctgtagcgttgctctttcattggcccgctcctttgctgccatag

SEQ ID NO: 364751 - DNA, 495 bp, Pseudomonas aeruginosa
atggcgcgccgtcacaagatgcgctatggactcgacatgctgatggtcgactacctgcaactcatggacggggagggggagaaccgcgtcaacgtcatcagctcaatcagccgcggcttcaagctcctggcaaacgaacttggcgttcctgtgattctcctaagccagctttcccgaaagtgtgaggagcgccctaacaagcgcccgatccagtccgacctccgcgaatccggcgccattgagcaggacgcagacatcatcctcttcgtctaccgggacgaggtctacaacgagcataccgagttcaaaggggtggccgagatcatcgtcgcaaaggggcgcgacgttgaaacggggacggtacgtgctgcgttcttgggtcagtacaaccgctttgaaaacctatccgctgaatggcggcctgctgaggccgataggccgcagaaagtaactcggctgtctgaccgctatggcagcaaaggagcgggccaatga

SEQ ID NO: 364752 - DNA, 609 bp, Pseudomonas aeruginosa
atgaaccgatcactcgtagtgccaatcgcggcctcactgctgttcgccggcttcgtatggctcattcagaacggcgcctaccaacgcggccacagcgccgcgcaggccaagggcgacaaggccctggccgatctgcgcgaggagcaccagaagctgcgcgccgatgccgccgaacagaacctggtgctttaccgccagcaggtagagcgcgccaaccaggccgagctggtgttcctggatgcccaggacgagatcggccggctcaagcagcaactcacacaggagcgcatcaaccgtgtctcgactcaatacaccccggcgcgcggcgctgcccctgtggctgctcctcgcttcgttgtcacttgtggctggctgcgcgacttcaacgcagcgcttggagccaccgccccagctccacccagctgccgagcctacgccagcgctcaagaagcggcctggcccgcccccggctctgacgccgaactactggaaagcggcgttaccgcagcggacatcctggcccatgcgcgtgactacggcgcttgggcgctcgccaaccttgcgcagctgaacgcgctgatcgacctacacaacaaggacaagccctaa

SEQ ID NO: 364753 - DNA, 459 bp, Pseudomonas aeruginosa
atggtggcgttcgaccgctggctctacgaacgaaaccaggccgtgagcgagtgtgaccgctgggccttcgtgctggccggctacaacggcggcaatggctgggtgaatcgtgaccgcaggctggcttcggctaagggcgccgatccgctggcctggttcgattccgtcgagcggcacaacgctggccgctcggctgccaatttccgcgagaaccgccattacccgcgcgccatcctgctgcgctgggagcccatgtatgcggctgccggctggggccctggcgtgtgcgccgagaggtatagccgccatgaagatcccgacgctgtttctgctcgtcacgttgaccaccagttcgcctgccgcctgctcccggaactggctggctgccgccgagctgttcgcctcgccaccaccccgcgagcgccacgcgccgcggctgccgcgcaagttcaggcgtaa

SEQ ID NO: 364754 - DNA, 369 bp, Pseudomonas aeruginosa
atgagcaccaagcccacagcgatggcggagaagcgccacgaactactcagcgatatcgccgaccacgttgcggctgtggtttcggagcacggtgtcgacgcgaagatcgccgagcaggccggcgcggcggtggtcgagcatctgtccaatacctgggcgggaagctgcgtcacgttcccgaaggacttccgctggcgtatcactcagcgggatctggagatcctgggcaaattcaacggccgcaaccaccacgcgctggccgttgagtacgacatgacagagaatgcgatctacaagctactcaagagaacgcaggacaggaagttcgaccgcgaccagcataaaatcgacttcggcgacggcctgtaa

SEQ ID NO: 364755 - DNA, 399 bp, Pseudomonas aeruginosa
ttgctgtgcttccaacttctcgcgctccgccttctcggcagcgagtcgcagttccagttcccggcgctcggcggcagcctttgcctcggtttcgcggcgagcggcggcttcgcgttcttcctgggcgcgtcgttccgctgcaaggcgctcggcctcggctgcttcgcgggcaatgcgttcctcgcgctctttctgctcgcgagcagcagcttcggcgcgcagtcgctccagttcggcctgctcggcttcatacttctcgcgtgcaacgagggcttcgcgcagcgcggccagggccttgtccttggtacgggcggcctcggtttcgaactctccccagtcctcgccaatcaagagaccttccagccattcaatgttggctttcaactcggtcgaatctag

SEQ ID NO: 364756 - DNA, 177 bp, Pseudomonas aeruginosa
gtggtggcgattcccgagcagggcttccgccgctgcggctaccgcttcacccgcgagggcttcggcatcgccctggacgcactgacggccgagcagatcgagcagctggagaacgagcccaacatcaaggttgagcgcggcatcttctccggccgtgtcggcgagcgcgtgtactga

SEQ ID NO: 364757 - DNA, 1266 bp, Pseudomonas aeruginosa; identical to SEQ ID NO: 51513

SEQ ID NO: 364758 - DNA, 927 bp, Pseudomonas aeruginosa; identical to SEQ ID NO: 51514

SEQ ID NO: 364759 - DNA, 1272 bp, Pseudomonas aeruginosa; identical to SEQ ID NO: 51516

SEQ ID NO: 364760 - DNA, 843 bp, Pseudomonas aeruginosa
atgcaaccgaaccgtagagtccctaacagtataaaaaggttattacttgaagaggcaggtgggaaatgtgccaatccaggctgcgccaactcaagagtagaatatcatcatataaaagaatgggctgtatttaagagccacaaccagaaagatatgattgctatatgcccagtatgtcacgacgccgcgcattacggcaaccttaaaataaccgaaaaaactctatatgaatggaaaaatattgtacgctcaccgggcccaatacgatccaacttctacatagaaccaggagttgaatcaaaagttattttaggaagcatatcattttcacagaactctcccaggcaaacaaccatatttagtctttcggatgagcaatatttaaaattcgaggtgaaggatgagttccttaacatctcaactcaaataataggaagagacgcccagcctctaataagaataaccaacaacaacatcactgctaacgctagcaatcaggttaaagtcgagcgcccgcaccctggaagatttagagtaacagcaccagccaacataactgcacttccagcatatgcaatatttaaaatgagaaaagttgacaaggaattcttaaaaagtggcatagccactctccttgatatagctgtcatcaaacccggtgtcgtaaagcttgaaggattctggataaaaaagaatacaaccatcatttcgtcaggaaactgcttatccattgtagatctttatcgagaagcccctatctcttttttcggggaaggagagaaaacagtattagtatatactggaccaatagatcaagcaattctcgattttggccagtcttaa

SEQ ID NO: 364761 - DNA, 912 bp, Pseudomonas aeruginosa
gtgaagaccttcgccgctatagacctcagcctgttgccggcgcccagcgtcgtggagccgctcgactacgagcagattttcgccgagcgcaaggcctacgccgtctccctgtggcccgctaaccagcaagccgaggtagccgccaccctggaactggagtcagagcccctcaccaagctcctgcaggagaatgcgtaccgtgaaacgatctggcggcagcgcgtgaacgaggccgcgctcgcgaccatgctggccagcgccaagggcgcggacctggaccaggtagcagcgaactacaacgtccagcgcctggttgtcacccctggcgacccatcagccgtgccaccggtcgccgaggtgctggaagacgacgacagcctgcgcgagcgcgcgcagatggcatgggaaggcctcagcaccgcggggccgcgtaacagctacatcttccacgcccgcgccgccgacggccgcgtcggcgatgcctcggccgtcagcccatcgcctgccgttgtcgtggtgacggtgcaggccgcccagggcaacggcagcgccccggcggacctgctggccatcgtcgacgcctacctcaacgacgccgaccgtcgccccgtcgcggaccgcctgactgtccagtccgcccaggtgctcgaataccgtgtcgacgcaacgctctacctggccacgatcggcccggaatccgagccgatactcgatgccgcccgggctcgcttgacggcatacgtccatcagcgtcgacgcctgggcatggaggtatccgaatcggcggtgcatgcggctctgcatgtggaaggcgtgagtaaagtcacgctcagcaactggtcggacatcgcagccacaccggcccaagcgccatactgcgttggcattacgctgacactgggagacgagtga

SEQ ID NO: 364762 - DNA, 2172 bp, Pseudomonas aeruginosa
atgacgactcccaagtacggcggcctgctcaccgacatcggcgcggccgcgctgatcgcggcgagcgaggccgggaagaagtggcagcccacccatatgctcatcggtgacgccggcggcgcgcccggcgaaacggctgaccccatcccctcgaccgctcagaccaagctgatccgccagcgctaccgcgctcaactgaaccgcctgttcgtctccgagcagagcgcaaacgtgctggtcgccgagctggtactgccgatggccatcggtggattctggatacgggagatcggcctcgaggacgccgacgggaagttcgtggcggtcgccaactgcccgcccagcttcaaggccagcgtcgagagcgggagcgcgcgcacccagactatccgcgtgcagatcatcctatccggcatggagcatgtcgaactgatcatcgacgacggcatcgtctacgccacccaggactgggtgacggcgaaggttgccgcggacttcaaggggcgcaaggtgctggccggcaacggcctggtcggcggtggcgacctgtccgccgaccgcaccatcgccctgccagcctccggcgtggccgcaggcacctaccgcgcggtcaccgtcaacgccaacggtatcgtcacagccggcagcaacccgacaacgctggccggctacggcatcaccgatgcctacaccaaggccgccaccgatggcctgctggcacagaaggcgaacaaggccaccacgctggggggctatggcatcaccgatgcctataccaagacggctaccgacgcgctgctcgccccgaaagcagataaggccaccactctggcgggctatggcatcactgatgcacttcacgtcagcgaggcggtcaccgtggcgaccgcaagcaagctgctcagattgaacgctgcgggccagttaccggcctcgatcaccggcaacgccaccacggccaatcgattggctgccgcaatcacgctaagcacgacaggtgacgcgacctggtccgcgcgcttcgacggctcgaccagcgtgagcggtcccctgatcctcgccaacactggagtctccccaggaacctacccgaaggtgacagtgagtgcgaaggggctggtcacggctggctccgcactggcggcaacggatataccggctctggacgcatcgaagattgctaccgggcggcttgagcttgagcgcttgccactcgtctctcagggcttggccacggcagtgcatacaagtgtggacccaaactccgtggtccttccgcttgtactgacgaaccatgcgaatgggccggggacgggacggtactactacatccagacgatgttttatccgaccgtcgagggcaacgctgttcaaattgcgactggctatgcgaacgttgccgatatgtatgtgcgatacgcctattcgccgaccgcaccgacagatccgaacaaacgggagtggtcagcatgggtgcgctgcgatctgggcggggcattcgctcatgcgccggatggcgtcctgggtggcggcatcaacttggattcaatgattgcctcgggctggtggcatcaacccttcagtttgaatgctcagaatggtgcaaattaccccgttggcgaagcggggattttgaccgtccacgctccaacagcgtcgctgatctatcagacatatcgtggctatgccgctggcggactgtactggcgctgcagatataacggcacctgggggggatggttccgtgcatgggactcggggaacttcaacccgtcaaactacgtggcgaaatccgaatactcatgggcttcactgcctgggaaaccatcgaccttcccgcccagcgcgcatgttcactctgcagcgagcaggggcgtgagcggctggtataagaacaacgatacaggggtaatattccagtgggtaaatctggccattggcgaccatccggggaccgtactcgatagagtcgttaccttccccattgccttcccgaatgcctgtctacatgtcgttccaactgttagagagaatggccgtcccgctattcccgcctcaactgtgacggttgcggaaaaagccagaacggcgaccaactgcaccatcgtttccagcgagtacattgggaatgtgcagaacttcggcatcaatgttttcgcgatcggctattga

SEQ ID NO: 364763 - DNA, 447 bp, Pseudomonas aeruginosa
atgttcttctattgcccgaaaacaggcggcttctattcgccggatattcacggcgaacaaatgccagaaccatcggaactttggccactcacggatgaggagtatgaggaactgctcgacgctcagagccagggcttgctgatcgttgccagtgaggatggtaagccactcgcctcggccccacctcccctagagggcgaggctctggcaacgctcgagcgaaactggcgcgaccgccagttggacactaccgacgccttggtcgcacgtcatcgcgatgagcttgaggttggcagcacgacgctcagcgcagtgcaataccaggcgctgcaggcgtaccgccgacagttgcgcgattggccggaaaccggcgagtttccactcgcagaacaccggccggtcgtaccggactggctcgacgccctcttcgccgacggcgtcttgtag

SEQ ID NO: 364764 - DNA, 672 bp, Pseudomonas aeruginosa
atgatggagaacgaggcgatttcctgggcacaggttgctttgaaaatggtggataagaccgactggactactgtcctggtcggtttggtatccggtatcgcgggattcttgggtaactactggttgacctggaaacagggtaggggcgaagtagcctcaatccgcgcggccttggtggctgaggtcgcggctcttgtagaaatcgaggaggtacgagagtacgaactccatatgcgccaaatgtcctatttcctgcgcatgcatgctgacgtgctgcatgattatgagccggaaacattccaattccgcatctctatcgccgaacactacaaccgtgtctatcagcagcatgtcgccacgctcggacgactgagccccattgaatcgcgggagttcgtccgcttttatcagttcgtcgatagcttccgcgctgatgtttcagaaaacggggttttgtacgagggctcacgagatcatcaggtatggggcgaaaccgcaaagattcttgccagtgcgctcgatgtcggccgtcgccttgctagcacgcaatccccgtggtggaagcgacttttacaacatcgtaaggtgattgatgctaacaaggtgcgagttgactcgccgccaggtcacgcccgatcagcccgcagaagggacgacgagcggtcggcttag

SEQ ID NO: 364765 - DNA, 543 bp, Pseudomonas aeruginosa
atgcgtagagtctctcccctcgaacgtatccggctgttcggccgcgccggcctggacgtggtcgccgcgctcggccgctcgaccctgttcctcggccacgccctgctcggccggcgcacgccaggcaccggtttgcacctgctggtgaagcaactctactcggtaggcgtgctgtcgctggcgatcatcgtcgtctcgggcctgttcattggcatggtgctggccctgcagggctacaacatcctgatttcctatggttccgagcaggcggtcgggcagatggtggccctgaccctgctgcgcgaactggggccggtggtgaccggcctgctgttcgccggccgtgccggctctgcgcttaccgcggaaatcggcaacatgaaggccaccgaacagctttccagcctggaaatgatcggtgtcgacccgctcaagtacatcgtcgcgccgcgcctgtgggccggtttcatctccatgccgctgctcgccgcgatcttcagcgtggtcggcatctggggtggggcgatggtcgcggtcgactag

SEQ ID NO: 364766 - DNA, 222 bp, Pseudomonas aeruginosa
atgcagaacagcgtgcagttcaccgaggatgtgctcaacggcgtgatcaaaagtatcgtattcgccttcgtggtgacctggatcgcggtctaccaaggctacgactgcgagccgacctcggaaggaatcagccgggcgacgacccggaccgtggtctatgcctccctggcggtgctggggctcgacttcattctgactgctttgatgtttggagatttctga

SEQ ID NO: 364767 - DNA, 1317 bp, Pseudomonas aeruginosa
atgcgtgcactcttgttgatcctgtgtcttgtctctttcggtgctgttgctgaggattattattggcctcgtggctcccaaaaatacggaagttatacggaagttgtcgaagaggctcgaaaggctgcgattgctaacagtcctggctattcgcgtgtcgaggctgtgcgcattgtttatccggctaatggtcggcaggatatggcgacttatggccttgaattttattgccttagtcagggcgtggaaaggatgtgtagcacctcctataacaacccgatttacaggaaaggggatgggtgcaccgcgcctaagattcctgacgaaataaccggtacatgtaaagagcctccgcctcctccagaagattgcatcaaggggctgacggatttgtttagttctccgccgtctccggtttatcagttgaatggccgaaacattgtgaactccacgccgccgaccggctgtaagaacgggtgccaatatgttcctaccagttcgaaaacgggtggttgtttctttatgccgggctcgactaatgaggggttctgcaattactggcttgaaacgaatggcgactcttgtgcagccgacacgaataaccctggcatgactggcccgtcgctgaacgacacgccgccgaccaatcctgatgagccgccttctgacccgaacaatccggggtgtccggctggctatagctggtctggcacgacgtgcgtaaagacgcctactgatccgaccgatccgaccgatcccacggatccaactgaccccactgacccgggcagcggtggtggtgatggcggtacaggtggtggcggtacgggcggaggtggtgatggtggtactggcggcggtggcgatggcggtacaggtggtggcggcgatggtggtggtgatggcggcacgcctggaactggcggcggtggcgatggtggcggtacgggtggcggtggcgacggctcaggggagggcggtggaactggtggcggctcgggtcttacgggtggctgcaaagacgatagctgcgcgttcgtgaagaacaatcccttcggcacggacaaggtgcccggctttgatgagtcgctacaagcggcctggacgggtattcagaagtcaccgataggtcaggcgctggaccgcatcaattttcccagcgggggcgcttgcccgacggggagcatatcgatgttcggctccaacattacgttcgactcccactgtgatctgtcggcgcagatcgagccgatcttgcgggcagtgttcctggcgttctgggcgctgctgtcggtccgtgtgttcttgtcagcctga

SEQ ID NO: 364768 - DNA, 1317 bp, Pseudomonas aeruginosa; identical to SEQ ID NO: 364767

SEQ ID NO: 364769 - DNA, 360 bp, Pseudomonas aeruginosa
atggatggtattcttagtgcgattaaacagcttattcagacggcaaccgacttctttcagcgtgcacttaaggcaattgatgaattctttaagtgggtgcaagatgcgttcgattatttttgggagctgctccctgttttgccggagtatgtgttccatagggtgacttctgcggttgtgaagtttttcgagtggctgccggtgcctgacttcttcgttacagccggtaatgcgttccagggcattccgccatcggtcgtttatttcgccaatgcattccagattggtccaggcgtgaccatggtcctgggcgcgtatctactgcgctttattctccggcgcattccgattattggttga

SEQ ID NO: 364770 - DNA, 1275 bp, Pseudomonas aeruginosa
gtggtgcttctccatggtcgacgcgacgccgcgcatcatcaggatggccttgtgctcggacggctcgtccacctgcaccacctggaaacgccgggtcagcgccgggtccttctcgatgtgcttcttgtactcggcccaggtggtcgctgccacggtgcgcagggtgccgcgcgccagggccggcttgagcaggttggcggcgtcgccggtgccggccgcgccaccggcgccgaccagggtgtgggcttcgtcgatgaacaggatgatcggcttctcggaactctgcacgtcttcgatcacctggcgcaggcgctgctcgaactcgcccttcatgctcgccccggcctgcagcaggccgacgtcgagggcgcgcagttcgacgtccttcagcgccggcgggacgtcgccggcgacgatgcgcagggcgaagccttccaccaccgcggtcttgccgacgccggcctcgccggtgaggatcgggttgttctgccggcggcgcatgaggatgtccaccaactggcggatctcctcgtcacgcccgacgatggggtcgagcttgccgctacgggcctgctcggtgaggtccacggtaaagcgcttgagcgcctcctgcttgcccatcgcgctcggcgccagggcgccgctggcctcgcccggggcggcaccggcgttgaagccgtcgctggccgacaggccgttctccggcgaggcgccgacgtactcgtcgaagcgctcggtgagcgcctcgaccttgagcttggcgaattccgccgacagcccggtgagggcatggcgcaggctcggcgtcttgaggatgccgatcaccaggtagccggtgcgcacctggctctcgccgaacatcaggctgccgtagacccagccgcgctccaccgcttcctcgacatgggaggacaggtcggtgatcgaggtcgagccgcgcggcaggcggtcgagggcctcggtcaggtccttggccaggcgcgccgggtcgatcccggactggcggacgatctggtgcaggtccgagtccggcaactggaggatctggtggaaccagtgcaccagctcgacatagggattgccgcgcagcttgcagaataccgtggcggcctcgatggccttgtaggccaggctgttcagcttgccgaacagcgcaacgcgactgatctcactcatgttccttctccttgtgctcgtgcggccgcgcagtggcgtactggcgggccagcagtagatccctggcgtcctggccgggatcgcccagccaggtgttga

SEQ ID NO: 364771 - DNA, 126 bp, Pseudomonas aeruginosa
atgaaacctctgctgactgccctgctcctcgtcctgctcggtgcccccgcggccgtcgccccggcggcacgctggccgaaagccgccccgcgccgccgctggcggccgaggaaaacaaggacctga

SEQ ID NO: 364772 - DNA, 414 bp, Pseudomonas aeruginosa; identical to SEQ ID NO: 343727

SEQ ID NO: 364773 - DNA, 666 bp, Pseudomonas aeruginosa
gtgtatttcggtgatgagacatttacagtaagtaaagatcgcaccttggatatttgtagcgccctaaaaaataatggaagcataagatatgatattcaaacgcggctaaattgtttgaatgatgacgaagtgctgagggcgctgaaagaaagtggatgcagctgggttgaaattggaatagagactgtaaatcaagatagtcaaaatattcacaagcagaaaattaaactaaaagaactcgagaataccctgtccagggtacaggatgcaggccttgctacctgttctttccttgtgaatggttttcccgaccagactatcgatgatatgaagcgttctactgattatgcctgcggattaatcgatagaggcttgttgcaagcatcttatctttttggcctggtcccatatcctggtagcgaattattttcctctcctgagtcttttggcatggagttactgcataaggacttcaggctttatcatgaagagttggcccccgtatataaaacacatcacgcaggaccggatgagatctacgaggtttttctatctggtattacggcgttagctgaagcaatggggaagacttcgaatatattagattattctttctattcggattcattcgaatacggaaagttttggtctgagtctcatgtctaa

SEQ ID NO: 364774 - DNA, 219 bp, Pseudomonas aeruginosa; identical to SEQ ID NO: 246804

SEQ ID NO: 364775 - DNA, 639 bp, Pseudomonas aeruginosa
atggtccgtccggatagccagcgcggcaagcgcacctcttcgaaagctggtagggaagggcgtttcgtccttgccgccagcagtaccctcatgttcgccatcgccagcatcaacgcggccatggcggcacctaccggtgcccagttcaaccccaacgagatcaagatcagccagcagggcaagaccacgctgatcgaccagagcacccagcgcgcgatcatcaactggaagggcttcgacgtctccgccgacgaggcggtgcgcttcaaccagcccggtgtgacctcgtcgaccctgaaccgggtcaccgcaggccaggaaagcgtgatcgccgggcgcatctccgcgcccggccaggtgatcatctacaactccaacggcgtggtcttcagcggctcggccaaggtcgacgtgggctccctgatcaccaccacggcgaacatcagcgacgaacacttccgccagggcaagctgatcttcgaccagcccggaaaccccgacgcgcggatcgtcaacgacggcagcatcagcgtcgcggagaaaggcctggcggccttcgtcgcgccgtccgtggccaacaacggcgtgatcaacgcccgcctcggcaccgtggcgatggcctggtgtcgatcgccgtga

SEQ ID NO: 364776 - DNA, 864 bp, Pseudomonas aeruginosa
atggcaaagaacaagaagggcgccaaaggcgccaagcacaaggccgatgtggacggcaccggcactgcccacggctcagcgcgcgacgagacagcgacacgctcgatcggccgcgaggactacgaagcacagttgcacatgctgcagatcgaactggtgaaactgcagcggcatttcatcaaatgcaacgaccgtatcctgatcctcttggagggaagggacggcgcaggcaaggacggcagcatcaagcggctggtcgaacacctgagtcctcgggaaacacgggtcgtcgcgctaggaaagccctccgaccgggatcgcacgggctggtacttccagcgctacgtcccgcacctgccagttggcgaagagctcgtggtgttcaaccgcagttggtacaaccgtgcgggcgtggaaccggtgatgggcttctgtaccgccgaggagcacgaagaattcatgaactcagtgcccaagttcgaggagatgctggtcaactccggcatcaagctgctgaagtattacctcgacatcggcaagaaggagcagagccgccggctcggggaacgccgccgtgatcccctcaaacagtggaagtcgagcccggtggatgccgtcgcgctgaagcactgggacggctatacacgggcgcgcgacgagatgttcatgcgcacccatacggccgcggcgccctggtctgtcgtgcacgccgacaacaaacggttggcgaggctcaacctgatcagagacatcctctcccggctgcactacgccggcaagaagcacaaggtcatcgctcccgaccgggagatcgtcttcgagttctcgcaggactgcctggactcgggccgactcgctcgttga

SEQ ID NO: 364777 - DNA, 231 bp, Pseudomonas aeruginosa; identical to SEQ ID NO: 330976

SEQ ID NO: 364778 - DNA, 360 bp, Pseudomonas aeruginosa
atggccggtgtgcggcacgccgacatcgacctggtgatgctctacgacgcctttaccatcaacaccctgctgttcctcgaggacctgggtttctgcgccaagggcgagggcggcccattcgtccagggcggacgcatcgcgcccggcggcgagctggcggtgaacaccaacggtggcgggctgtcctgcgtgcatccggggatgtacgggatgttcctgatcatcgaggcggtgacccagctccgccgccaggccggcgagcggcagttggccaaggccgacgtggcgttgctgcacggcaacggcggcacgctgtccagccaggtaaccgcgttgctcggcaccggcgacacgctctag

SEQ ID NO: 364779 - DNA, 444 bp, Pseudomonas aeruginosa
atgaacggaaccctcgttgtattccacgacagcgggcaggacttcctggtctggaggctcgaccaggaaggcgtggttacccggagctggccgttccagaccgacgtttgggccggtaccaaagtgctgaacctggacaccctcaagcgcgatggcctggtgaaggccgagcgtaacggtcgcccctgggaatgctgtcacgctgtggtcgctatccatccgatcaagccgattgacgtatcggtgaaatgggacggaatcgcgggctacgtcaccagcaccgtgcgcggtcagcgggcgtcctgcacccatgacccggccgccccggtccagcgcctagccgagaaggttctgccctatctccaatgccgtatcgaacgcctggagtgccagccagccggcaagctccatagcgtctggcgaatcaccccggagaatctgtga

SEQ ID NO: 364780 - DNA, 1008 bp, Pseudomonas aeruginosa
atgactctccttgaggagatggcacccgccgtcgaggtgtacagcatcgacgaatgcttcgctgacctgaccggggtacctggtgacctggtgcgcgttgggcgcgagatgcgcgctcgggtactgcgctgcacgggcatccccgtaggcgtgggtatcggcacttcgaagacgcttgcgaagctggccaaccacggcgcgaagaaatggcaggctcagactgggggcgtgttggatattcgagatccggcgcgccgtgatcggttgctgcaggcctgcgaggttggcgatgtatggggcatcggccgacggatgaccgagcacctaagcacgatgggcatccgcacggcttgggatcttgcacaggccgacgcctggaccttgagaacgaaattcaacgtcgtcatcgagaagacggcgcgagagctgcgcggcactccctgcctggagctcgaggacgctgctccgccgaaacaggagatctgctgcagccggatgttcggcaagcggctgcatgacctcccgccgatccgtgaggcggtggccacctacgctgctcgggcctgcgagaagctgcgtgcccagggctccgtgtgcaaacgggtccaggtcagtatccgtactggcatgttcaatccagacgagcccaagttcgccaagggcgtcagcattgagctgccgtatccgaccgacgatacccgcatcattacccgagccgctgccgaaggcctggagcggatctaccagccgggctttgccttcagcaaagccgaggtcctattgcttgatctgcgacagcccggtgagtttaccggcgacctcttcgcccctgtacagccggagcgtgccaccaaaaccatggcagtgatggatgccatcaacgcaaagtggggcagggggacggttcggccaggcggtgttcctgcagaacctgactggggcatgcggcgtgagctgatgagccgaagctacaccacacggttggagcagctatggatggtgcggtaa

SEQ ID NO: 364781 - DNA, 330 bp, Pseudomonas aeruginosa
atgacaatcgccgcaaatctcaagaaagcacggaagacaatgggactgacgcaggagcaggttgccgaaaaaacagggatacccctagcgacaatcaagaaatacgaagcaggaaaacagccgcctccaggtgaccgcataggagccctggcaagagcactcgccgtatcggcagacgacatagtgttagaggaaagcgagcgtcagctttccgaagagctgcgggcaatattcctgcgcttcgaccacttgccggacgacatgaagcggcaggcgaagctagcagtacgcggaatcctgatgagctacgagcaagagctactcggctag

SEQ ID NO: 364782 - DNA, 309 bp, Pseudomonas aeruginosa; identical to SEQ ID NO: 342596

SEQ ID NO: 364783 - DNA, 177 bp, Pseudomonas aeruginosa
atgatccagatcccgcaggatggcccgccgattggcaaggccagtgagcgagtcggtcagggcaagcgtagccagttcagcgttagcggcttgaagctgacccaccaaaagctcgcgctcaagggagtatcccaaaagccccgacaacaaccccagcaatggctcgacactgggtga

SEQ ID NO: 364784 - DNA, 687 bp, Pseudomonas aeruginosa
atgaccagcttcctcaagtgggcgaaatggctgaaccaggacgaggtaaccgaggcagtcattcgccaggtgatctccccctccagccaggtcaagggcaacgtctataccgactatggtgggcaggtgggcggtacggtctggaacggcatcgcgagaaccgctggaaccttcggtgtggccctgggcagtctggcctacttcccggcgatggatatggtccgccaggcgctgccgatggtgatgtcgttcctcaagatggccatggtcatctgcattccgatggtcctggtcatcggcacctatcaactgaaggttgccatgacgatgacggtcgtcttctttgcgatgatgttcgtcgacttctggttgcagttagccagatacatcgacagcacgatccttgatgccttctatggttcggggtcaccgcatctttcgttcgacccagtcatggggctcaatacggcgactcaagatgcaatattgaacttcgtgatgggttctatgtttattgcgctacctgtgttttggatagcgtcgcttagttgggcaggcatcagtgctggcaaggtgctagaagggctaactagtggcacaagggcgatcgagaaggcaggcgagaaaggaggtcagtttactgaaggaggcattaagagcgtaggcagcaacattataaaaccgtaa

SEQ ID NO: 364785 - DNA, 198 bp, Pseudomonas aeruginosa
atgggctgggggcgccacaccttggagcctttggagcggcgtgcaagcctggatagccttgccgctctcacaattatgctccgtctccatcatgagcaaggaaacctgctggcagtgtcggattgtgctcaagtggtttttagagtgctgcttatgttgggtccgatgttcgaagaccgtgctatcgcagagctgtag

SEQ ID NO: 364786 - DNA, 1551 bp, Pseudomonas aeruginosa
atgcggaaaatccgcgatgctctggtgtactcaattgatcaacggctttcttcacgcaaagttagtcaaatcatcggcattcacccttcaacggtatgcagttacctgaaccgcttcagagcgtcaggactcgcttggccgttgccggaggagcttgacgatgcagcgttggagaagaagctcttccctggtgatttggttcaacgccaagccaacgacatcgattttgaatatgtccatgccgagatgcagaagcgtggctcttcgctggcggtacttcacgcggagtgggtggaaaatacctccatggagatccctatctcctactcgcagtactgcaggcgctacaacgaacatgtggcttcactacgcctctcgatgcgacgcacagagctctttggagagaactgctacgtcgactactccggcatgaccatcattatccataaccgggaaactggcgaaacgcgatcggcacaggtgtttgtcggtgtgctgggaggctccagctatacctactgcgaagtgacctggtcacagcgaattcgcgactggattagttcgcacgtccgcatgtttgagtatttcggcggcgtctcgcgcattctggttcctgacaatctcaaagctgccgtgactaaggctcaccgtcatgagccggaaattaacccaagctacgaggcactgtgccgccactacggcatcgctccgctccctgcacgatcaaaaaagcccaaagataaggcacgagccgaaggtgcagtgaatctgtcgcagcgctggattctattttctctgcgcaaacgtaccttctactcccttgaagaggcgaatcgagagattcgcgggttgcttaacaaactcaacaacaagccgtttcaaaagcgggttggcagtcggcatagccggtggttggagcatgaacttcctactcttcaaccacttccagctcagccctacgagttcgctgaatggggcaaggttcgtgcgggtactgattaccatgttcgcatcgatgggcacgcctacagcgtgccataccagctccgtgggaaagagttcgactaccgcctgacagacacggtggtggagctgatcttcaatggccaatcggaggctgttcatcctcgcagcttcgagaaggatcaagcgagcacccaatcttcgcatcagccacgcgaacatcgtgaaatgcaatgggatcgggatgaggctttggcttgggcatctgccatcgggccgaacactactgcggttctgcaggccaagctcgagggggttagcagtgtgctaatgggttatcgcgcaacgcagaccatgaaggcactgcttaaagcccacggccaagcgcgcctggaagaggtttgtgcctacgctgcagcacacggcataacgaagggcgcagacctgcgaaatgtgctggataagcgccttgatcgccttttcgcccaagatcctgcctccccacagacgcccgtgagtgaccaccaaaatattcgcggagcgcgctactacgacaacctgctttccaccgacgtggatgaggcctag

SEQ ID NO: 364787 - DNA, 432 bp, Pseudomonas aeruginosa
atgttcaccacccaccggcatgctgaaatcccgctcgcgccaatatttggggagccttaccagctgtggcgctttgttgagctcgagcagcatcgtccctggttttgcgtaaccctgaacatcggcaaggggcgagcaaactggagaacgatgtaccttgttgcgtccgaggccgagctggaacaaatgctggaagatacagctgccagcgccaaagtagaggacgtgcaagtcatcactcccgcacggctgaatggaaccggcgcatggcagatggaaccgcttgcagagctggttcgcatcttcgataccgatgacaaggtattgggctatgacctcaagaccgcgtcagggattatctactcggatagagatcacatcccctcagcagacgtgggacgcgctcaaatctaccgctccacggctgcctaa

SEQ ID NO: 364788 - DNA, 981 bp, Pseudomonas aeruginosa
atgatcgcggaccaccgctttcaacggcacttcctctgccagtgccttgcgttgctgcagctcggcgaataccggcgtctcgtgcagccagcggcgcagatagaccgagaacaggccgaacaccccgccgagcaggaagggtatccgccaggcgtagtcctgcacctctgtcgcgctatagaagctattgatcgcagtagccaccagcgagcccagcaggatgcccgccgtcaggccggaagtcagcgtcccgcaggcataaccgacatgccgtgccggtacatgctcggcgacgaagacccaggcccccggtacctccccgccaatcgcggcgccctggatcaccctcagcaggagcagcgccaggggcgcccagatgccgatctgcgcgtaggtcggaagcaggcccatgatcagggtcggcaccgccatcatgaagatgctcagggtgaacatgcgcttgcgcccgagcaggtcgccgaagtgggccatgatcacgccgcccagcggccgcgccaggtagccggcggcgaacaggccgaaggtttgcagctgacgcagccattccggcatgtccgccgggaagaacagcttgccgaccacggtggcgaagaacacgaagatgatgaagtcgtagaactccagcgctccacccagggcggagagggacagggtcttgtagtcgctgcgggtcaatggacgctgggccggcgcctcgggagcattcgcggatggcatgtcgggattgttctctttattcgttcagcaagcatgagcggggttcgaccggcaggcgtgtcgacctgcgacccggggacgcaggagcgaaaccatagcaaatcgacgaatgtccacacagtcggtcgaagagagaaccgggcggtcgtcggccgccctactcctctatataatgcccgggcgcctctgaaagctgtcccaagaccttgcaccggcaggcgttttgggagagttttcccctaa

SEQ ID NO: 364789 - DNA, 1188 bp, Pseudomonas aeruginosa; identical to SEQ ID NO: 332585

SEQ ID NO: 364790 - DNA, 420 bp, Pseudomonas aeruginosa; identical to SEQ ID NO: 325843

SEQ ID NO: 364791 - DNA, 207 bp, Pseudomonas aeruginosa; identical to SEQ ID NO: 324729

SEQ ID NO: 364792 - DNA, 1401 bp, Pseudomonas aeruginosa
atgcatccgatgctcgaccgaatccacatgttcatccgcttccgctcggagcacgtccagatgattggccggcccgagtccccgaccctggtcgttgacctggagtcgttgggggtgcgcatgcggtcttcgggcggcgtgctcaagcgcgaggacggggaggggtacgacgtggagggactttcccatgcttgggagtcgctgccgtcgagctacacgcccatggccttcaaggtgttccatcagtccctgggcaagcgccttgatcctggtgttgaactgaaagcgtctccggccaagctgctccaggggcacaacgtcttcgggccgacctcgatccgcatgggggctgaggtcatgttgaagtggctggccggcacctatccggacctgtattcgaagctcgatgtgctgtcgattgaggtctacgccttggactgcacattctcggcacgcatgccgaatgagcagaccgccctccaggttattcagttcatgcgcggggtcagcaatggccagacccgcaaccggggtgatgactacgagaccacggcctactggggttcgaaagaggggcgtctgcgcaagatcaaggcgtatctgaaagggccggagttccggcgtcagttggacgaaattctcaaggctgctcgcggtgccacggtcgatccggagccgcgtcaggacctggacaacgctcatgtccgcgcctggaagctgcacaagcgcgagcgccacatgcccatgtcgagcctttccgctgcgcggacgctgcgggtcatgcaggaccctcggctccaggagttcgcgcggcttcttcttcgccttgaggcgaccgttatgcatcgctggttggagcggcggaatctgccgacgaacctgtgggagctatgtgactaccaggaggcgcttcgcgaccaggagcgctgtttcattcaggagtgttggagagcggtaactgctgagctgttcgcggcctttgagggtatgaccatgaagcgaatcgacgatgacaaagtgctggccgcactgatcgagaagtacacgaaagtagggaagggcagatggaccaaggcccgtgccgacaaggcaacgggagcgatcatccctgcggtgttcgtgccgggcaagcccagcgatgcctacgcccggaacctgttccgtacctaccgcagcctcaaggactacgggtgggaagagaccatggcgtcgatgaatcgcgccagtttctacaaccacgtgcgtgacctacaggccgccggcatttccaaggcgatgctccagaacctgagcgagtacgacaacacccgcaacgtggtgccgatcctgcggttgctggaggtggatttctcggcgcagtaccccgactggtacgtcgagccgaccgtggaggccgcgtga

SEQ ID NO: 364793 - DNA, 345 bp, Pseudomonas aeruginosa
atgctcgctctcatcggtctgtgccagggctattactccgatactcgcaacgtcaataccgccaacggtccttcgcagattgttgaacactcggtgctcgtccaggttgagcaaaccaataagttcggcatgccggaaaccaaggttattcaagtccgcatttcgaagcggcacatggatggcgggcttaataatgtctggaagatggagaagggcaaaactgtgtccgtcccggtatttatccaggcctgggcgagtaagtccggtaacgccggattcgattattggctgtcgggcgacggcatgccgttgaaacttcaaaccgttcaggagaaagccgcttaa

SEQ ID NO: 364794 - DNA, 1443 bp, Pseudomonas aeruginosa
atgaggattaagaaatgtatatcagccctgaggatatcgctttttatggcgtgcttattgccctcgctattctttgctcagggcgctaggtctgaaaattattactggcaattaaatggcccgaccgcccctgataagtttggcagtcctggtgcggcttgtgaggtcgggctgggaatctataaggctcagtatcccgccgtcgaaatggtgataggttcgcgggaaatgaagaactcgaccaactatgtgtgcatggtgtttcgttatttcaatgggagtcgtattgagccaaattttacgatttccgttgttcgtagaggtacgacctgtcctgcgggggctacgtacaatgagcagaaggggacttgtgatgagccgccaccgtctgagtgcgaagaaggtctgccaaatttatttagaagttcgaactatccgattattgtcatcaatggaaaaaacacggttcctagctctccgccgtctggctgtttgaatgggtgcgcttatgaggctgatagttctcgaccaaattcttgttatcgcactccaggctctactactgaggggttctgtaactacacactcaagagcaacggtcagaattgcgcgacagattccggcaacctgggcggtactggtccttcactcaacgagccggatcagccgccagtcactgatccgccttcggacccgaatgacccgggctgtccgaaaggctatagctggtccggcactacgtgcgttaagacgccgaccgatcccacggacccgaccgatccgaaagaccctggtggtgatggcggtggaactggtggtggcgatggtggcggtacaggcggtggcggtgatggcggaaccggcggcggtgacggtggtaccggcggcggagacggaaacggtggaactggcggtggtgatggcgatggcggcggcacgggtggcggtggcgatggcgggggagacgggcagtgcgatccggccaaggacccgaacaaatgcggcagcggctcctcgatctccggcgacggtgactgcaaggtggcgattcagtgcaacggcgacgcgatccagtgcgccatcgttcgccaggaaaaggccgcccgctgcgcggacgaagagtttcgcacggtcgatgacaagaagattcaggacctgaaaaacacgctggccggcgagttctccgggcctgagtacgaacccatcaaggctaccggcgagaacacccacgacttatcgaagctgctcgacactagcgggcgtttctccaaggcctgcccggttattcctgacgtctcgtttccctggttcggcagcacgcagacggtgtcgctcagtagcgtgtcgtctgatctgtgcgcgttcttccagtggttcgggtatctcctggtcgcgttcgccatgcgcgccgcggctgaaatcattgcgcgagggttgaactga

SEQ ID NO: 364795 - DNA, 1281 bp, Pseudomonas aeruginosa; identical to SEQ ID NO: 337202

SEQ ID NO: 364796 - DNA, 453 bp, Pseudomonas aeruginosa; identical to SEQ ID NO: 322924

SEQ ID NO: 364797 - DNA, 780 bp, Pseudomonas aeruginosa
atgatccagcctcatcatgttgcgcactggtatcccactgccgcctacctctacatcctgtggctggatgcgctggcgctggcctgggagtacctgcgcaggcatcccgactaccggcttgactggctgcgccaccatcgccggccacaggccgcacagcaggcggcgcatcgctggggcttgcgcctgctggaagacccggcgctggatgcgcgcgacgcgcatccggcctggctgcccggccatacggccgtggtgcagctccatcccgatgccgatccaccgccggatgcggccgtcttcgcgttctggcgcatacccggacacaagcaactgctgcacgacggcaagggactgacgctgatcgcgcgcagccccggccattgcgcgcgcttcgcgctcgctccaagccttgaagacggcatggcggtcgcacatgcccatcgcggcggcgctgccgcgcctgcctgtggtcatgtgcccgtgctggatgccgccctggcccatgccatgcccaggccaccacccgctgcactgctggagctgcataccttgcaggcgctcgacgcgaccctggcgggcgcatccttgcgcgaggtcggcgaagggctgttcggtgccgacgccgtggccgattggtacagcgacggcggcctgcgctccaaggtgcgccgcctggtgcggcgcggcgatgcgttgatgcgcggcggctatcgccgcttagcacagctttcaccgcttgagaagggtcgttttgaaggcgacgcaaaacgaccctga

SEQ ID NO: 364798 - DNA, 348 bp, Pseudomonas aeruginosa
atgaaccgactcatcaccgaggacgagcgcaggcagttgctggcccacggccgggcccgtgccggtggcgaggccatcgacccgttacccgtcgtgcggctgttcacccccgacgcgcacgccatctggctgctgaccgcgctcgatcccgttgatgccgatacggccttcggcctgatcgacctggggatcggtatgcctgagctgggcaccgtgaagctgtccgatctggagtccatcgtcgggccgcgcaagcagcccgtgatgcgtgatcggtatttccaggcggcacgcccgctgtcggaatatctgcggctggcccaggagaacggttccgtcctcgattga

SEQ ID NO: 364799 - DNA, 1095 bp, Pseudomonas aeruginosa
atggatttctacatagacgagagtggcaataccggggatcttgcgcgaactagcgcagcgcttgatttcggtgggcaagctgttttcagtttggcagcagtgggaatttctaatgagagcagccttgtagcagagcttgccgccttaaggcagaagcacaaaattcaggccaacgaacttaaactcagcaaaattctgaggcgcaagcctgacttcgctcttgatgccatcaatctcttggtgaagagcgacttcccattcttcattgagattgtagacaaaaagtaccaactggctgtaagcattaccaacggcttcatctggcctccgtatttcaatactccagaatcacaagataccgtttggatgaaaaacatctttgccgattacatttattaccgagttcccagcgatgtggtttatgagttcgttcaatgcatgaacaatccatcaaatgaaaagattggcacctacttcgatcttctcaaagattgtgtaagccaacattcccatgaagttgcgcagggcatcgcctcgcaggtggaagaaagcaaagatgacttccgcatcatgattgagaaagagggagacaaagcccatagacggttcttgcctctcccggacatcggcaagcgcgaccaagagatttggctgcttccgaatttctcatctttcaccaacatttatgccagaatgaatctttacttgtctgggagtttggagggatgtcgaattttccatgatgagcaagcccacttcgatgaaatcatcgccgaagccaaattccaggctgagaacgctaaggtagaccccgcacaattcaaattgccttattcagactataactttcagcaaatggctgatttgttttttaaggcatcaccagaaagcacaggaattcaactctccgatatagtggcgggtctatcaatgcgctggtaccaagcacatttgcaagaagaaggtgatacacaggttcttgacgaggcggtcgatctacttttgcatcacagcgatagagatagggggataggaatcaacgtagtaggccctcataaaatggcacaccagctatttggggtggctgggtactga

SEQ ID NO: 364800 - DNA, 2061 bp, Pseudomonas aeruginosa
atgaacgccgttaccactaccgaagcccgcgccatccaagcccccgcgctggaagccgccgacccgaccaagaacctgattctggttccgctgtcgcggctggtgtcgcgccctacgggccgcaacgtgcgcaagaccccgcgcatgtccatccccgaactggccgcaagcatccagcgcgtgggtctgctgcaaaacctgatcgtgattgcatccgcccgacatggagaaggtagcgagcattacgaagtcgtggccggtggccgtcgcctcgcagcgttgaagctgctggcgaaaaagcaccgcatcagcaaggaatgggaggtgccttgcctgcaagtggccgatggcacggcccgcaccgccagcctcaccgagaacgtgcagcgcgaggcgatgcaccccgcagaccagttcgaggctttcgcggcgctggtggcagaaggccgaccaattgaggacattgcggcggatttctccgtcacgccgctggtggtgcagcgccgcttgaagctggcgaacgtctcgccgcgcctgatgggcgactatcgcgccgatgccgtcacgctcgatcagttgatggccttgtccatcactgacgaccacgccgcgcaggaaaacgccttctacgatgcaccgacatggcagcgccagccgtccgcgctgcgcgaccgtctcaccgagcgcgaaatcgacgcctaccggcatccactggtgcgtttcgtcgggctggacacctacgaggccgcaggcggcggcgtgcgccgtgacctgttcgcggagggggacgcgggcgtgtatctgaccgacgccgcgctgctggaacggctggcgcaagaccggctggcgggcatcgccgccacggttcgcgccgagggctgggcttgggtggatgccacgccgggcgtcacccatgccgacctgcacgccttccagcgtgcgccgagggaacggcgcgagccgaacaagcgcgaagcgcagcgcatcgaaaagctgcaagagaagatgcaagccatcggcgaagccgtggatgcggcgatggatgccgacgacgaggataaggccgacgccttgcaggaggaaggcgaagccctgggcgagcagttgcaggcgctggaagatggcttgcaaggctacggcccgaacgtgaaggccgcagccggtgccatcatcaccatcgaccgcaacggcgaggccgtgattcatcgcggcctgatgcgcgaggccgaggcgaaggcgctacggacgttggaacggctgcgccaaggtttcgacagcgaaggcgaagccgggagcgacgaagacgaggaagccgacgacgcacccaagaccgccgccatgtccgaccggttggcgcaacgcttgagcgcccaccgcaccgccgcgctgcaaatcgaagtcgcccggcatccgcaagccgcactggctgctgtggtgcatggcatggtgcagaccgtcttgcaggaacgttactacggccacgacttccccctgggcgtgagcctgaaagtgcaagaccggctggaaggcatggccccggactggccggaatcgcccgccgtcgtggcgctgcgcgaactgcaacaggtggcggacgaagccttgccgcaggacagcgccgaactgttcgccgcgctgctggcgaagccgcaagacgaactggtgcgactgctggccgtgtgcgtggcttccacggtggatgtggtgacgccccgcgccacgccgcagcaaccgggcgcagaactcgcgcaggccgtggggttggacatggccgcatggtggcagcccaccaatgacggttatttccggcatgtgccgaaggccgcgattctgcaagccgtgggcgagtacgcgcccgagcaggtttcccggctggcgaaattgaagaaggccgacattgccagcgaagccgaacggctggcggatggcacggggtggatgcctgcgatcttcaagatcgcaggcccacaagatgccgcgcaggaggaaggcccgcagcgggacgcaccggcggatgccgaagcaatggcggatgaacccgccgaggcgctggccgcttga

SEQ ID NO: 364801 - DNA, 2457 bp, Pseudomonas aeruginosa
atgcgaaaggctggcaaagccagtcccgccagggatgagcgactagcgaacctggagcagcgcgatccgcgaagcggagacgcaaaagaactcttcgtttattatttgttttgcaagcaaatgttgctaaagcaagaacacggagatatagagatgattgtctgcattaaccgtctcaagcagttcggcatcttcagcgacttcaatggaacgaagatccagaagttcggccggtacaaccttgtctatggctggaacggaacaggcaagtcaaccctatcgaatctattctcttgctttgagcttcgctcgatggttcctcgcttcagtgcgggccagttttcagtcgttttggaggacggctccacgatcacggaaaccacactcccttcatcccaattaaatatccatgtcttcaatcaacgctttgtgcatgagaacattgattgggacaaatccgtaaaaagcatccttctcattgcgaaagagaagattgacgacttgcagaaactggagaagctaaaaggcgagcttcaatcgaaaaagaaagctcacgacgaaaagcaaagtgacatcaagaagcagcgtgaagcattggataaatttctgaccaatgctgccaagaaaatgaagctaggacttcaggcgattgatacgagcgatagctactacttgaattatgatcgccgaaagctctctaatttcattcagagtaatggcgatgccattattaagcctgactcggttcttccagatgaaaaggtcatcgaccttacgaatgccgccaagccagatcagcttccaagcatcactttcgcctcaacggccattgagccggactactttaagaaggcggcaggtcgcatcagagacttgattggaactacagcagtcaatcaagctatccagcggctgactgataatccggacattcgtgactgggttcaaacaggcttggaaattcataagaaccatgattcgcaatcctgcgagttctgcggctctccattcacccagcttcgtgccgaggcacttgccgctcacttcagcaaagagttcacggattttcaaagccggcttcagagcgccgcgacttggattgaatctcaaggtgctccagccaatcagttgcccgcagcgacggagttttataaagagctatcggctgacgcagataagctccagaaagaatacacatctgctgctgagaagatcaaccagcaaatagacggatggcggcaagctctgaaagccaaaattacagaccccgcaaagacagacattcagatttcggatgtggttgaagaggatgtcacgaatttcaatgagatcctaaagtcgatcgttgcgctcgtcggaaagcacaacaataagacttcaaacttcaaatctgagacatccaaaagcaaggtggcactggaacttcactttgctgcggctgaggtgcaagaatttgactatgctggaagtgagaagaaatgcaatgaccttgaggctgaagcaaagaatgactacaaggaaattgaaaaacttggtcaagaggtcggagcaatagaggcgctgctctcaaatgagacggttggggcgaaggagttcaatgacatcctgcatcgtttcatcggtcgctctgagctttgcctgagctttaatcaaaagaaaaaaggctatgagatcatcagaaacggagtgggtgagcatgatgggaatttgagcgaaggtgagaagactgcgattgcattcgtctacttcatcacgaagctcaaagaaaacggaaacaacatcaaggacacgattgtggttgttgatgatcccgtctcaagctttgactcaaatcacttgtttcatgcctattcgttcctgagaactcaatgcactgaagccaagcaactttttgtgctgactcataatttcacctacttcaagctagtgagagactggttcactggaacgaacaggaacaggattgccaaaggaaaagctgagaattgtttcttctatcgactggatgcgcctcctggttcaccccgccattcgctgcttgttgatgccgatgattctctgaaaaattacggttctgagtatcactacatcttcaaaaagctctatgaatacagggcgcatacgatccttaatagagatgaagcctttttgactgcgaacctcgctcgcaagctcattgaatcgttctttaccttcaaatatcccaggcggagaagcgacatcagtcaactgatggatgttggtctgaaagactgcgccatcacaacgccggaactcaaggaaaaaatatatcgctttatcaacaaatactcgcatagcgatgtaattgaaataaccgaggaatcggcagaaaacttggctggcgaaagccatagcgtcatcggacacatctttcagtggtttgaagaagtggacaagaagcattacgacgaaatgattcaggttgtgacttcttga

SEQ ID NO: 364802 - DNA, 510 bp, Pseudomonas aeruginosa
atgtcgcaattttccttttcctcgttcgatgcctcgctgatggtgcgcgatgcgaagggtcactaccagccggcgacggccgaccagattctggacgctgcgcgccaggccatcgagcacaagatgcagcgcggtgcatcgttcacttcgccggcggcggtcaaggagtacctgtgcaccaagttgggtggcttcgagcatgaagtgttcgccgtgctgttcctcgatacacggcatcgcctgatcgagtatgccgagatgttccagggcaccatcgactcggccgaagtgcatccgcgcgaggtggtcaaggcagccctgcggcacaacgcggccgcggtcatcgtttcgcacaatcatccgagcggtaatcccgagccgagtgcggcagaccaagcgctgacccagcggctcagggaagcgctggggcttgtggacgtgcgcgtactcgatcacgtcatcgtcgccggcaacgcaacggcatcgttcgccgagcgtgggctgatctag

SEQ ID NO: 364803 - DNA, 1200 bp, Pseudomonas aeruginosa
atggcaaaactcaagctcaccaagtccgccgtcgatgcggcacaaccccaggcgcaggctgtcgaactccgggacacgatggtgcccggcttcctctgcaagatcaccccggcgggccgcaaggtgttcatgctgcaataccgcacgaatgccggagagcggcgcaagcccgccttgggcctgtatggggaactgaccgtcgagcaggcccgcgccttggcccaggagtggctggccgaggtgcgcaagggcggtgatcctggggcggccaaggccgccgcccgtgccgcgcctacggtcgcggaactgtgcggcaagttcatggaggactactccaagctgcgcaacaagcccagcacgcaacgcggctatcaggctgtcatagaccgctgcatcgttccgatgctgggccggatgaaggtgcaggacgtgaagcggcccgacgtggccacggtgatgaagaagatggcccacaagccggccgaggccaacaacgctttcagcgtgatgcgcaggatgttcaatctggccgaggtgtggggctaccggacggatggaaccaacccgtgccgccacgtcccgatgtaccccaacgggaaggccacgcacctcatcagcgacgaggacatggcgcggatcttccgccatctgggcaagctggaggcggaagggctggagccttacgtcattcccctggcgatccgcttgcaattcgagttcgctgcccgccgtggcgaaatcgtcacgctccaatgggattgggtggacttcgagaaccggcgcgtggtttggcctgacagcaagaccggcggcatgtccaagcccatgagtgaggaagcctaccgactgctttcgaccgcgccgaggcaggacggcattccccatgtgctgccgtccccaaaccatgagggccagcacttgaccacgggcgagtattacaacggctggtgccgtgcgctcaaggctgctggagcggcccacgtcggtacgcacggcatccggcatcgttcggctaccgacattgccaactcgggcatcccggtcaaggtcggcatggcgctgacggcgcacaagaccgtcgcgatgttcatgcgctacgtccacaccgaggatgacccggtgcgcaaggcggccgaactggtggcgaaccggcgcaagacaatcaccggggcgcagcgccccgtgaaggtgacgacatga

SEQ ID NO: 364804 - DNA, 708 bp, Pseudomonas aeruginosa
atgtgcaggcgtcttgcctcgaacgcgcccggcctatggccgtcgccgcgttcgccggcgcgctggctgctcacgcagcagcgccgccgggccgccgctgcccggagcgccagcgaggggcaaaggcggaaggcaagacaaaaggacgcggcaccgggccgcgcccaaagcctgtctgcacatgggggtggcgcggcacggagcggcttcgccaccgtgccgcgtggggcgcgaggcccgcgccaacgcaggcatgtccgcgtgctttgcacgacaggacacgccgtagcttgcggggagcgcatccatgaccgaccaccgcgacgacgatttccgcgtgcgtcccagcgccccgaagaaccggggcaagggccagggccagagcttcgtttccaaggtgctcaagcaggcgggcaaggccagcggcggcaagtcctcgatacgccattccgccgtgtccggcggccagcgcgcaggccagcggcccggctcgcgcctggggcgcggccacacggcggcgcgtttcgccggggcgaagctgacgcccatgtcgcggcgcgtgaccatcaagacgctgctggtcaatcaccaacgggccagcccgcagtcactcgccaagcacctgcgctacatcgagcgcgacggtgcgggccgcgatggcgagccgggtctggcctacggggcgcaggccgacgatgccgaccttga

SEQ ID NO: 364805 - DNA, 204 bp, Pseudomonas aeruginosa
atgccgcgtgtaggtgcgcaggtcgtccagttcggcgccatcctcgggcgagacgatgaagcggaaatggtgccggtcatcggcacagcgttccttcaaggcttcaaggtcggcatcgtcggcctgcgccccgtaggccagacccggctcgccatcgcggcccgcaccgtcgcgctcgatgtagcgcaggtgcttggcgagtga

SEQ ID NO: 364806 - DNA, 2832 bp, Pseudomonas aeruginosa
atgtccaaccgtgatatatcccggcgcgcctttctccagggcgggttgatcgccggcgtgggtgtcaccctggcgccgctcggcagccaggcgttcgctgccttgttcgagaaccaggtgaccgtttccgcccagcgctggatggcgggcaacggtcaggtccgtttccgtaacgacgccttgtccaaggtctgcggcaacaaggtgttcgcccgcgatatccgcgccagggacatgcccggctggccgcagcagcaaggccacgccatgttgctgaagaccgttcgcgccgaccgcatctacgaaggccacgacctttcctggctgggcgccgagttgcagccggaccgtatcgtcaccgccgccgacctggagaaggacggcatcgtcttccccgaggcgcattcgcccgatccgctcctgccgccgggcaaggtgccgatgttcatcggccatccggtggcgatcctgatctggaacgacttcgagcgcttccgccgggccaagctcaagctcaagttcaacgacaaggcgatccgctatggcgcccaggccccgctgtaccagggcgatccctacggcagctatcgcttcgtccgggtcggcggcaagacgccctacgaggacgacgagttctccagcctgaaggactcgatgctgttccccaccatcctcaaccgcaaaccggtatggacccgcgagccgaagctgcacggcgacctcaccgagcaggggctgttccatgccaagcgcatggccgagcaactggaaaacccgccgcaggactggctggtcttcgacgagcgctacaagaccccatcgatcgagccggcggcattggagccggacaacggcaacggctggtacgacgcggcgagcaagaccttgcacttcgtggtcgccacccagtgcccgttcgaagtcgcctacgaaagcgtgcacatgatcaagccgtcgcgcttcgccctggagaagctcaacatccatccgggctataccgtcggctacggctccaaggacaacaacatcttcgtcttctatgccgcgctcgccgcgctgtatggcgagggtgtgccggtgcgcctggccaacgaccgctacgagcagttccagagcggcatcaagcgccacccgttcgacatccgctaccaactggcggtagacaggaacgacctcggcttccgcatcttccgcgccgacatgagcgccgacggcggcgggcgcgccaactacagcgcctcggtggcggcggtgggcgccaccgccgcgcagtcgatctactacatgccgcagaacgacctggcggtcaccgcctatcattcgcgcggcgtggaggccggctcgatgcgcggctacggtaccctgcagaccatggccgcgaccgagatgatggtcgacgagatcgctggccggctgggcgtcgacgccatcgacctgcgtcgtcgcaacgccctgcgctcgggcatgaagaacacccagggcgcggtcccggccggtgccctgcgcctgcacgagatcctcgacaaggccgctgcccacgaggtctggaaggaccgcgacgcacgcaagaagcgcttcgacgcggaggacccggacaactggtatggggtcggcttcgccatttgccagaaggacttcggcaccggtgccgaggcgccgatggcgagcatcgagttcagcgccgacgggcgcatcagcctgcgccacatcggcaccgagatcggtaccgggatgtccacctcgcaggccttcgtggtcggcgacttcctcggccgtccggcggacgaggttaagaccgccgagaccgaatggcccgagctgcggctcaccaccaagggcaatccctacctgatgagccaggccgagcaggacgccgcgctacgcgatccgcgctgggtcggcaagctggcctcgccgtcgtcggcgaccaactcggcgttctatttcagccacgccacccgcgaagccgcgcgcgtgctgttcaaccacggcctgtggccggcggccctggagctgtggcgcagcggtccgttcggcggccaggccaatccctatgtggtgcgccgcgaaaacgcggtatgggtcgacggccagttgaccggcaacggcctggcgccgattcccttcaccgagctggcgaagaaggcccacgagatgggcctggtcaccggcgtcagcgtccacggcttcaaccgctggagctgggccgaggcggacttcgtcatcgatggcgtgcgcgagcgcctgccgctcgacgccatggcggtgaagtacggcgacggcgcgccgggagtgaagaaggcgatgatgaacagcgccggcttccacctgctcgaccggcagaatccggcttatccggcgacccagctgaacaacgcgatggtcacctactacagtccggtggcgaccctggtcgagctgaaggtgaacaagggcagcggcgaggtgcaggtgctcgaccaccattcctggatcgagtgcggccgggtgctggtgccggagctggtcaagggccagctggagggcggcatcgccatgggtatcggccatgcgctgctggaggaaatgccgctctacgagggcggccccgcggaaggggactggaacttcaaccgctaccggttgccgcgggcgaaggacgtggcggtgtggagccagacggcggagatcctcccgccgctgtcgctgaccgacccggccaagggcatcgccgaggtggtgatgatcccggtggtcggcgccatcgccaacgccgtggcgcacgccaccggcaagcgcgtccgcgacctgcccatcactcccgcccgcatcaaggaggccctccatggctaa

SEQ ID NO: 364807 - DNA, 540 bp, Pseudomonas aeruginosa; identical to SEQ ID NO: 320519

SEQ ID NO: 364808 - DNA, 1248 bp, Pseudomonas aeruginosa
atgaagcgcaccctttccggcctcgccctggcgctggccgcgctgtcgccgttcctggcctccgccgccggcgccgacgcggcgctgatcaagcgcggcgaatacctcgcccgcgccgccgactgcatggcctgccataccgccgagggcggcgcgccgttcgccggcgggctgccgatccagtcgccgttcggcaccatctacggaaccaacatcaccccggacaaggaacacggcatcggcgcctacagcgccgacgagttcttcgccgctcttaccgagggcaagcgcaaggacggcgcctacctctatccggcgatgccctacacctcctatcacctgatcgagcgcgaggatgccgacgccatctacgcctacctgatggcccaggagccgatcgcccggccggcgccgcagaccagcctgagcttcccgttcaacgtgcgcatgggcctggccggctggaacctgctctacggcaagagcgtgcgcttgcagccggaggaagggcgcagcgaggcctggaagcgcgggcagtacatggtcgaggtgctcggccactgcggcgagtgccataccccgcgcaacctggccggcgccctggagcaggacaagcgcctgagcggcggcctgctcaacggctacctggcgcccagcctgctgcccggtgaccttgccgcgcgcggttggacccagccggacctggcgagcttcctcaagcacggcatgagcgcccagggcagcatgttcaacgagatgttcccggtggtgcaccacagcacccagcacctcgacgacagcgacctggcagccatggccacctacctgctcggcgaccagccgccgccggccaaggtggtccaggcgctgcccgaggcgcagctgaacgacagcggcaagcgcggtcgccagcagtacctcaacgtctgcgccggctgccacggcggcgaaggcgagggcaagccgcatatcgcggtggcgatgaacggcaacactaccctgcgcctgcaagacccgcgtaatctgttgcgagtgatcgaagacggcatcgtcgaacagcagttcaccggcttcgaacgcatgcaaccgatgcccggtttcgccgggaaactcgacgacgagcaactcacggacctgctcaactacctgcgccagacctggggcggattgcccggtgacctcggtccccaacaggtcgcgcaattgaagatggagagcgcttcggcgcataccgtcaaggtgaagtga

SEQ ID NO: 364809 - DNA, 972 bp, Pseudomonas aeruginosa
gtgcaacacctcgatctacaggtggtccgcaaggcgctgaagtggtccgtgggcggcgaacgggtgtggttctgtaccgtgctcacgacctacggctcggcgccccgcgcgccgggatcgctgctggcggtgaacgccagcggtgaatggatcggctcgctgtccggcggctgcgtcgaggatgatttcctcgaacgggtcgccgccggcggtttccccgatcccgcggtgatcgtgcgctacggcgaggccgacgacccgaactcgaacatccgcctgccctgcggcggcatcctcgacgtactggtggaaaacctggcgccggactgcgatatccaggcccatctgcgcgagctggagtcggcgttgcttggtcagcgccgcctgctgcgcgaggtcgagctgggcagcggcgcgcgcagcctgcgcgacgattccagccacggccctcgggctgagcgcgacggcgagcgcgtgcgcctgcgcgtcggcgctgcccagcgcctgctgctggccggctattccagcgtcgcccatgcctgcgccgagttcggcaagggcctgggcttcgaggtgatcctctgcgacccgcgcgaagaagccttgcgcggcgtggtgctggagggcatcgagatccgtcgcgagctgccctcgctgttcatcgccgacggcggttgccacgccgatacggcggtggtggcgttgacccacgatccgaagatcgacgacctggcgatgctcgaggcggtgcgtaccgaagccttctatatcggcgtgatgggatcgcgggcgacctcggagaaacgcttcgagcgcctgcggcgcatcggcggcctgggcgatgccgaactggcgcggatccacgcgccgatcggcctcaacctgggtagcaagacgccggcggaaatcgccctggcggtgctggcggacattctccgcatccgcaacggcattccccgcgagcggctctga

SEQ ID NO: 364810 - DNA, 576 bp, Pseudomonas aeruginosa
atggtcgccgccgacgaggtgctgtgcctggtcctggcggccgggcaggggcgccgcttcggcagcgacaagcgcctggcgcgcctggctgatggcacgaccctgctggcggccagcgtggcgcgggcgcgcgaggcgttcgccgaggtgcgggtggtggtgcgtgccggagacaccccggcgagcctgggcctgccggcgcagcagcggcttgtccacagcctcgatgcatcgttgggcatgggccacagcctggccgccggcgtcgcggcggcgaggaacagcacggcccgggccatcgcggtcctgctcggcgacatgccctggatcgccgccgataccctcgagcgtctggccgcgatggccactcccgaagccatcgtgtttcccctgtacgacggtcagcgcggccatccggtgctgttcggccgcgctttctgggacgcgcttgcgcaactggacggcgaccagggcgcgcgccgtgtgctgcaggcccatcgtccggcctggtgcgaggtgccgtgcgacgatccgggcgtactccgcgacgtggacaccccggcggcgctcggctga

SEQ ID NO: 364811 - DNA, 1125 bp, Pseudomonas aeruginosa
atgcctctattcgccacccccttcgcccagctcgacctggtccgccagcccgagcaggacggcgagcccctccaggcgttcgacgccgccgacgaatacctgctcaaccagttgcacgaacggggcgtgacggcgcaatgccgggtgctggtcctcaacgacgccttcggcgccctcgccgcgagcctggcgccgcacgtccaggtcaccagcagcggcgattcgcacctgggcttcctcgccctgcgcaagaacctcgcgcgcaacggcctcgacctgggctcggtgcgcttcgtcccggccagcgaaaccgccgtggggcccttcgatcacgtactggtcaaggtgccgaagaccctcgcgttgctggaggagcaactgatccgcctgcacggccaactggcaccgggcgcgcaggtcgtcgccgcggggatggtcaagcacttgccgcgcgccgccggcgacctgctggaacgctacatcggcccgatgcacgcttcgctggcggtgaagaaggcccgcctgctgatcgccgaggcagcggagcgcccgcagccgcgctcgccctatccgacccgctatcgcctggagcagcccccgctgacgctgctcaaccacgccaacgtattctgccgggagggtctcgacatcggcacccgcgccttcctcccgcacctgccacgcagcctcggcgcgctacgcgccgccgacctgggctgcggcaacggggtgctcggcatcgcctacgcgctgctcaacccgcaggccgagctgaccctggtggatgagtcgtacatggccgtgcagtcggcgcgggaaaactggcgagcggcgctgggcgagcggccggcgacgttccgcgccgacgatggcctggccggccaggcgacgggctcgctggacctggtcctgtgcaacccgccgttccaccagcagcaggtggtcggcgacttcctcgcctggcgcatgtttctccaggctcgcgatgccctggcggcgggcggcgaactgtggatcgtcggcaaccgccacctgggctaccacgccaagctcaagcggctgttccgcggggtcgagcaggtcgcggcgaatccgaagttcgtgatcctgaaagcgggaaaatag

SEQ ID NO: 364812 - DNA, 999 bp, Pseudomonas aeruginosa
atgttcaagccgtttgtcggtgtggcgctcgccgcactgttcgccgtttccgccgtcgcccatgccgaggacgccggcccgatcgtgatcaagttctcccatgtggtctccgacgacacgcccaagggcaagggggcgctgttgttcaagaagcttgccgaggagcgtctgccgggcaaggtcaaggtcgaggtctaccccaactcgacgctgttcggcgacgccgacgagatcgaggccctgcgcgccaacaaggtgcagatgctggccacctcgctgtccaagttcgagccctataccaagcaactccaggtgttcgacctgccgttcctgttcgatgacctggaggccctgaagcgtttccagaagcgcgacaagagccgcgaactgctgcgctccatggccaagcacggtatctatggcctggcctactggaacaacggcatgaagcagctttccgccactcgcgagctgcaccggccggacgatgccaagggcctggtcttccgtatccagccgtcgtcggtgctggaagcgcagttcgccatgctcggcgccaccgccaagcagttgtcctacgccgagaccctcaaggccatgcaggccggcagcgtgcagggcaccgagaacacctggtcgaacctcgccggacagaagatcgacagcgtgcagccgtacatcaccgagaccaatcacggcgcgctcagctacatgctgatcaccagttcggcgttctggaccggcattccctaccagacccgcaccgaactggagagcatcgtcgacgaggtcaccctggtggtgaacaaggaagccgaagcgctcaaccagaaggagcgcgagcacctgctggcagccggcaagagccgcctggtcagcctcagcgtggaagagcacgaggcctggcgcaacgccatgaagccgctgtggaagaactacgaggcgcagatcggtagtgacgtgttgcgcgcggcccaggtggtcaaccgcaagcgctga

SEQ ID NO: 364813 - DNA, 777 bp, Pseudomonas aeruginosa
atgaccgccagcgaagagaaattcacccgccagacgctgctcgacgtgcagcctctgactcccaacctgttcaccctgcgtaccagccgcgacgcgggattccggttccgcgccgggcaattcgcccggctcggcgtgtacaagcccagcggcagtatcgtctggcgcgcctactcgatggtttcggcgcctcatgacgaattcctcgacttcttttccatcgtcgtcccggacggcgagttcaccagcgaactcagccgcctgcgcgagggcgaccagttgctggtcgatcgccaggccttcggcttcctcaccctcgaccgcttcgtggatggtcgtgacctttggctgctggccaccggtaccggtgtggcgccgttcgtctcgatcctgcaggacttcgaggtctgggagcgcttcgaaagcatcaagctggtctacagcgtgcgtgagagcaaggagctggcctactgcgagctgatcgccggcctcgccgagcgcgaatacctggccgagcatgcccacaagctgcagttcattccggtggtgacccgcgagcaggtacccggttgcctgaacggacgtatcaccacgctgatcgagaacggcgatctggagcgtgccgccgacctggaactgaccccggagcattcgcgggtgatgctctgcggcaacccgcagatgatcgaggacacccgcgccgtgctgaaggctcgcggcatgaacctcagtctgacgcggcgcccggggcaggtggcggtggagaactactggtag

SEQ ID NO: 364814 - DNA, 414 bp, Pseudomonas aeruginosa; identical to SEQ ID NO: 320512

SEQ ID NO: 364815 - DNA, 1542 bp, Pseudomonas aeruginosa
atgaacccttccctgaacgccttccgtcccggccgcctgctggtggcggcaagcctgaccgccagcctcctgtcgctgtccgtgcaggccgcgaccctgacccgtgacaacggtgcgccagtgggcgacaaccagaactcgcagaccgccgggcccaacggttcggtgctgctgcaggacgtgcaactgctgcagaagctgcaacgtttcgaccgcgagcgtattcccgaacgcgtggtgcatgcccgcggcaccggcgcccatggcgagttcgtcgccagtgccgatatcagcgacctgagcatggccaaggtcttccgcaagggcgagaagaccccggtattcgtgcgcttctccgcggtggtgcacggcaaccactccccggaaaccctgcgcgatccgcgcggtttcgccaccaagttctataccgcagacggcaattgggacctggtgggcaacaacttcccgaccttcttcatccgcgatgcgatcaagttcccggacatggtccatgccttcaagccggacccgcgcagtaacctcgacgacgactcgcgacgcttcgatttcttctcccacgtgccggaggcgacccgcaccctgaccctgctgtattccaacgagggcaccccggccagctaccgggaaatggacggcaacagcgtgcatgcctacaagctggtcaacgccaggggcgaagtgcactacgtgaagttccactggaagagcctgcagggccagaagaacctcgatccgaaacaggtggcggaagtccaggggcgcgactacagccacatgaccaatgacctggtgagcgcgatccggaagggcgacttcccgaaatgggacctgtacatccaggtgctcaagcccgaggacctggcgaaattcgacttcgacccgctggacgcgaccaagatctggccgggcattcccgagcgcaagatcggccagatggtgttgaaccgcaacgtcgacaacttcttccaggaaaccgaacaggtcgccatggcgccgtcgaacctggtgccgggcatcgagccctccgaggatcgcctgctccagggacggctgttcgcctacgccgatacccagatgtaccgggtcggcgccaacggcctgggcctgccggtcaaccgcccgcgcagcgaggtcaataccgtcaaccaggacggcgcgctgaacgccggacacagtaccagcggggtgaactaccagccgagccggctcgatccgcgcgaggagcaggccagcgcccgctacgtgcggaccccgctgagcggcaccacccagcaggcgaagatccagcgcgagcagaacttcaagcagaccggcgagctgttccgctcctacggcaagaaggaccaggccgacctgatcgccagtctcggcggggcgttggcgatcaccgacgacgagagcaagtacatcatgctttcctacttctacaaggctgacagcgactacggcacgggcctggccaaggtggccggggccgatctgcagcgcgtccggcaactggcggcgaagctccaggattga

SEQ ID NO: 364816 - DNA, 543 bp, Pseudomonas aeruginosa
atgcgaggttggattctggcaggcttgctgctcgcggcgctggccgcgcaagctggcgaggtgcatggggtcgaggtcgaagcgcggttacgcgactacttcttcgatgccgcccgacgcggtgaccaggccatgctgaaggagttcgtcgaggccggcttcgacctcgatgtgcaggatgccaagggctataccgcgctgatcctggccgcctaccacggccatggcggagcggtggaacaattgctggaggccggtgccgacccctgcgtccaggatgcgcgcggcaacaccgccctgatgggcgccatcttcaagggcgaggtccgcatcgcccggcgcctgatcggcgcgcaatgcagccccgaccagcgcaacggcgcagggcagaccgcggccatgtacgcggcgctgttcaagcgcgaggagctgctccaggcgctgtcggcgcgcggtgccgaccttggcgcccgcgatgcgttgggcaacagcgtggaaagcctgcgacgcggcgaactgaacggcactgcggcggcgaggtga

SEQ ID NO: 364817 - DNA, 255 bp, Pseudomonas aeruginosa; identical to SEQ ID NO: 320509

SEQ ID NO: 364818 - DNA, 435 bp, Pseudomonas aeruginosa
atgcgcacactgctgttcctgcacctgctgggtgccgcgatctgggtcggcggccacctggtcctggccctcggcatcctccccggcgccctgcgccgccgcgatccccaggcgatccgcgccttcgagcaggtctacgagcggatcggcatccccgccctgctgctgcaggtggtcagcggcctgtggctggccagcctgtggctgccgttcgaccactggttcggcgccacgccggtggcccgtgccctgcagctcaagctgctgctcctggcggcgaccgccgccctgggcgtgcatgcgcgcctgcgcctgatcccgaacctggacgccgagagcctgccgaagctgggctggcacatcgccgcgatcaccctggtgggcctgggtttcgtcgcggtcggacagagtttccgtttcggcggcgccttctga

SEQ ID NO: 364819 - DNA, 1362 bp, Pseudomonas aeruginosa
atggccaaggccaagcgcatgtacggctgcaccgagtgtggcgcgaccttcccgaaatgggctggccagtgcgcggactgcggggcctggaacaccctggtggagaccgtcgtcgaggccgcgccgagcggctccggccgcggcggctgggccggccagcaggccaacctgaagaccctggcggaggtcagcgtcgaggaaatgccgcgcttcacgaccggctccaccgaactggaccgggttctcggcggcggcctggtggacggttcggtggtgctgatcggcggcgatcccggcatcggcaagtcgaccattctcctgcagaccctttgcaacctggccagccgcgtcccggcgctgtacgtcaccggcgaggaatcccagcagcaggtggcgatgcgcgcgcggcgcctgtcgttgccggaagacaagctcaaggtgatgaccgagaccagcatcgaaaccatcatcgccaccgcgcgccaggagcagccgcgggtgatggtgatcgactcgatccagaccatcttcaccgagcagttgcaatcggcgccgggtggcgtcgcccaggtccgcgagagcgccgcgatgctggtgcgctatgccaagcagagcggcacggcgatctttctggtcggccacgtgaccaaggaaggcgccctggccggcccgcgggtgctcgaacacatggtcgacaccgtactgtatttcgagggcgaatcagacggccgcctgcgcctgctgcgggcggtgaagaaccgcttcggcgcggtcaacgaactgggagtgttcggcatgaccgacaaaggcctgaaggaagtgagcaacccttcggcgatcttcctcacgcgggcccaggaagcggtgcccggcagcgtggtgatggccacctgggaaggctcgcggccgatgctggtggaggtccaggcgctggtcgacaccagtcacctggcgaatccgcggcgggtgaccctgggcctcgaccagaaccgcctggcgatgctgctggcggtgctgcaccggcacggcggtatcccgacctacgaccaggacgtgttcctcaacgtggtgggtggggtcaaggtgctggaaaccgcctccgacctggcgttgatggcggcggtgatgtccagcctgcgcaaccgcccgctgccgcacgacctgctggtgttcggcgaggtcgggctgtccggcgaggtgcgtccggtgccgagcggccaggagcgcctgaaggaagccggcaagcatggtttcaagcgtgccatcgtacccctcggcaacgcgccgaaggaggcgccggcgggattgcaggtgatcgccgtgacgcgcctcgagcaggccctggacgccctcttcgagtga

SEQ ID NO: 364820 - DNA, 378 bp, Pseudomonas aeruginosa; identical to SEQ ID NO: 320506

SEQ ID NO: 364821 - DNA, 507 bp, Pseudomonas aeruginosa; identical to SEQ ID NO: 320505

SEQ ID NO: 364822 - DNA, 2067 bp, Pseudomonas aeruginosa
atgaacaataacaatagcctgctacgtcacctcgcctggctggtggtggcgatcgtgggcgccgcggccctgggcgtcgtcgccctgcgtcgtggcgaagcgatcaacgccttgtggatcgtggtggcggcggtggccatctacctggtcgcctaccgttactacagcctgttcatcgccagcaaggtgatgcaactggaccccaaccgcgccactcccgcggtactcaacaacgatggcctggactacgtcccgaccaacaagcacatcctcttcggccaccacttcgccgccatcgccggcgccggtccgctggtcggtccggtccttgccgcgcagatgggctacctgcccggcaccctctggctgatcgccggcgtagtcctcgccggcgcggtgcaggacttcatggtcctgttcatctccagccgccgcaacggccgctcgctgggtgagctggtgcgcgaggaaatgggccaggtggccgggaccatcgcgctgttcggcgccttcctgatcatgatcatcatcctcgcggtgctcgcgctgatcgtggtgaaggctctggccgacagcccctggggcatgttcaccgtcctcgcgaccattcccatcgcgctgttcatgggcgtctacatgcgcttcatccgccccggccggatcggcgagatctcgatcatcggggtgttcctcctgctcggttcgatctggctcggcgggcaggtcgcggccagtccggaatgggcgccgcatttcaccttcagtggaatccagatcacctggatgctgatcggctacggcgccgtcgcctcggtactgccggtgtggctgctgctggcgccgcgcgactacctgtcgaccttcctcaagatcggcaccatcatcggcctggcgatcggcatcctgatcgtcatgccggaactgaagatgccggccctgacccagttcaccgacggcaccggcccggtctggaaaggcagcctgttcccgttcctgttcatcaccatcgcctgcggcgcggtgtccggcttccacgcgctgatctcctcggggaccacgccgaagctgctcaaccgcgagcccgacgcccgctacatcggctacggcggcatgctgatggagtccttcgtggcgatcatggcgatggtcgccgcctcggtgatcgagccgggcatctacttcgccatgaacagcccgccggcggtggtcggcgccgacgtcaacgcggtggccgcgaccgtcagcagctggggcttcgccatcacgccggagcaactcacccagaccgcccaggacatcggcgagaccaccatcctggcccgtgccggcggcgcgccgaccctggcggtggggatcgcgcacatcctccaccaggtgctgccgggcgagaacaccatggccttctggtaccacttcgcgatcctcttcgaggccttgttcatcctcaccgcggtggacgccggcacccgtgccgggcgcttcatgctgcaggacctgctgggcaacttcgtgccggcgctgaagaagaccgagtcgtggaccgccaacatcatcggcaccggcggctgcgtggcgctgtggggctggctgctgtaccagggcgtggtcgacccgctgggcgggatcaataccctgtggccgctgttcggcatttccaaccagatgctcgccggcatcgcgctgatgctcgccaccgtggtcctgatcaagatgaagcgccagcagtatgtctgggtcaccatcctgccggcggcctggttgctgatctgcaccaccaccgcgggcctgatcaagatcttcgacagcaacccggcggtcggcttcgtcgctcttggcgagaagtacgccaccgcgctggatgccggccaggtgctggcgccggccaaggatatcggccagatgcagcacgtggtgctgaacgcctacatcaacgccggtctgaccgtgctgttcctgctggtggtgttcagcgtactgttctacgccatcaaggtcggcatcgcggcctggggcaagagcgagcggaccgacaaggaaaccccgttcgagcccatccccgacgcctga

SEQ ID NO: 364823 - DNA, 204 bp, Pseudomonas aeruginosa; identical to SEQ ID NO: 320503

SEQ ID NO: 364824 - DNA, 1005 bp, Pseudomonas aeruginosa
atgtccgaagtagccaacgacaaccacgccccgatccccgtcaccgtgctcaccggcttcctcggcgccggcaagaccaccctgctcaagtacctgctgcaggccgagcacggcatgaagatcgcggtgatcgagaacgagtacagcgagacgccgatcgacggccagttgctcggcgtcgagccggtgcaggtgatgacgctgtccaagggctgcgtctgctgctcgatcaacaccgacctggaaaaggccctgttcctcctgctggagcgccgcgacaacggcgagatcgacttcgaccgcctggtgatcgagtgcaccggcctggccgatccggcgccggtggcgcagaccttcttcgccgacgaggaactctgccagcgctacgtgctggacggcatcatcaccctggtggacgccgccaacgccgagcgtcacctgcaggaaaccatcgcccaggcccaggtcggcttcgccgaccgcatcctggtgagcaagaccgacctggtcgacgccgccaccttcgaggccctgggccagcgcctgcaacggatcaaccggagggcgctggtgcatgtggtcgagcacggccgcatcgacctggcgcacctgctcgacgtacgtggcttcaacctcaacgccgacctcggtcctggcatcggcctgcgcccgctgcgagcggtggcagccaaggacagccgcgatcgcatcggcaccctggtactgcgcagcgacacgccgctcgatctcgaaaggctgagcgagttcatggacgacctgttgcagtggcatggcaattccctgctgcgctacaagggcgtgctgaacatcgccgacgagccgcgtcgcctggtgttccagggcgtgctgcgactctacggcttcgactgggatagcgagtggcgggacgacgaggcgcgcgagagcgtgatcgtgttcatcggcgacaacctgccggaggacagtatccgcgagggcttcgaacgcatcgtcgaaggccgctga

SEQ ID NO: 364825 - DNA, 375 bp, Pseudomonas aeruginosa
atggacaggaacgcattgatcggcgcctggcgggactgcatccgtggcgcggacaaatcctgggtgctgttcgcccagggcacttgcgtgatcctcacgcagccggagccggacctcgcggcccaggcgcgggcattgctggccgagtggggagcggtacaggtcggcacgccggcgggcgacttcggtgtgatcaccctggacaacggccgcggctgggtggtgaccgggcatcacccggacatccttaccttcgtccctcgcgaggaactggaggaggacgccggcgagctgctcgtcggcatgcacggccgctcccggcggggcgaggatgccgaggccttggcggtgatccatgtcgaggaccggcgataa

SEQ ID NO: 364826 - DNA, 1254 bp, Pseudomonas aeruginosa
atgttcagccgtgatttgaccctcgcccgctacgatgccgaactctttgccgcgatggagcaggaagcccagcgccaggaagagcacatcgagctgatcgcctccgagaactacaccagcccggcggtgatggaagcccagggttcggtgctgaccaacaagtacgccgaaggttatccgcacaagcgctactacggcggctgcgagtacgtcgatatcgtcgagcaactggccatcgaccgcgccaagcaactgttcggcgccgattacgccaacgtccagccgcacgccggctcccaggccaacgccgcggtctacctggccctgctgtcggccggcgacaccatcctcggcatgagcctggcccatggcggccacctgacccacggcgccagcgtctcctcctccggcaagctgtacaacgccgtgcagtacggcatcgacgccaatggcctgatcgactacgacgaagtcgagcgcctggccgtggagcacaagccgaagatgatcgtcgccggcttctccgcctattcccaggtcctcgatttcgcccgcttccgcgccatcgccgacaaggtcggcgcgctgctgttcgtcgacatggcccacgtcgccgggctggtcgccgccggcctctacccgaatccgatccccttcgccgacgtggtcaccaccaccacccacaagaccctgcgcggcccgcgcggcggcctgatcctggcgcgcgccaacgaggagatcgagaagaagctcaactccgcggtattccccggcgcccagggcggtccgctggagcacgtgatcgcggccaaggcggtgtgcttcaaggaagccctgcagccggagttcaagacctaccaacagcaggtcctgaagaacgcccagagcatggcccaggtcttcctcgaccgcggtttcgacgtggtttccggcggcacccagaaccacctgttcctgctctccctgatcaagcaggacatcaccggcaaagacgccgacgccgccctcggccgcgcgttcatcaccgtgaacaagaactcggtcccgaacgacccgcgctcgccgttcgtcacctccggcctgcgcatcggtaccccggccgtgaccacccgcggcttcaaggaagccgagtgccgcgagctggccggctggatctgcgacatcctcgagaacatgggcgacgagtccgtggtcgacggcgtacgcgagaaggtcaaggcgatctgcgccaagttcccggtctacggcaactaa

SEQ ID NO: 364827 - DNA, 4248 bp, Pseudomonas aeruginosa
gtgtcgaccccctcgctaaccccgtcgccgcctcccgccggcgacccactgaccgtacccgaccgaccggcagccaaggctggcctgctgttgctggtcctgttgatgctcggcctgctgctctggcagatgagccaggagctgcgccagcaggaacgcttcgaacacgagcgagccgcggcccagctcgatcgtctcaacgaccgcctgtccctgaccctcgaactcaaggcgcgcaccgccctcgccctgctcccgggcgtgccccccagcgagcgtggcgagatacagggcaggctgttgccgcgcatcagcgatgcgctgccgcaggtgcgccagttgcaatgggtggacagcgccccgcagacggacagcccgtcgccggaaacgacgctgcccgagcagttgcgccagcacgccggctccggcctctaccactattgcctcgacccgcgcgacggcgaatccctctacctgaccctgcgcgaacccggcagccgccgcgacagtggcttctggctgttgcacctggccagcgacagcctcgcccagtggagtcccgacctgcccaccggcaacctgctctggcgcctggaagaccaatacgccgggcgggtgctctggcataccccggggagcacggcgctgctcgacgacatgcagaccctcggcgtggaaccgctgcgcaacagcgactggcagcttcgcgggctctacgacagcacgcgagtgcggctcggcctgctgccgggaatcggcggcgagctggcgatcttcctcctgctggtcggcgtcaccgtgtacatgctgctgcgcctgcaccgcgagcaacagggcctgcgcgccatgaccctggcctcgcagcgcagcctgcgccaggcggccacggcactggcggcaatcgacgagcgggtgctggtgacccgcgccgacggccgcctcagctacctcaatccccaggccgaacgcctcttcggcatcagttcggcccaggcccgccagcatcatctgctgggcctgctgccggacctcgagccaggctggctgacggacgccggtggcgacggcgagacccgtagcgagctgctgccgctgcgggtgcgcggcgagccgcggacgttcaccctcagccgccatccgctggccagctatccggcgctcgccgaccaggcctggaccctccgcgagcagatactccagggcgggcaggtctgggtgttgcgcgacgtcaccgaggaacagcacgccctcggcgtcctggaggaaacccggcggcgctaccaggacatcttcgaaggggtcggcgtggccctctgcgtgctcgacctctccgccctgcgccaggctctggtggagcaaggcctggacagctgcgccgcactgcgcgcctggctcgccggcgaacccgggcggcagcaggcgctgctggagcggatccgcatcaccgagatcaacgatgtcagtcgccgcctgctacagatcgattccaccgaacaggcctggcagcgcttgctcgaccacggcccgctacaaccggacagcctgcgcctgcaggtgatcgaggcgctcatcgaacgccggccggtactcgaactggaagccacgctgcgctgcggcaagagcacgccgcggcacctgtggttgcaactgcgcctgccggaaaaccccggcgaatggcatgcggtgaccctcagcctgtccgacgtcaccagtcgcaaggaagtcgaactgtcgctgatcgagcgcgagaagttctggtcggacgcggtccaggcggtgcccgataccctctacatccacgacctgcacgcgcgccgggtgatcttcagcaaccatcacctgggccagcaactgggctacaaccaggaagaactggcgcggatgggcgagaacttctgggaaaccctgctgcaccccgacgaccaggaatactactggcgcatccgcaacctgcagcacgtggtcggcgacggcctgctgctcgacagccagctgcgctggcgccaccgcgacggccgctggcactggttcgacatccgcgagcaggccttcagccgcgaccgcagcggtcgcgtggcgcgcctgatcggcgtggccaaggacatcaccttcaccgtcgaggcgaacaacgcgctgcgcgagaacggccgacgctaccgcatgctggcggaaaacatcagcgacgtgatcttctccaccgacgccgaactcaacgccagctacgtcagcccctcggtacagcacgtgttcggctacagcccggaatgggcgctgctcaacggcctccaccagaccgccaccaacccgcgccagctcggccgcctgaacggcctgctgcgccgcgtgcggcacgccatcggcgaccgccagaagctcgccgagctgcgggaaaaccctggccagcatctgttcgccctcgactgcctgcgcgccgacggacgcaagattcccatcgaactgcggatcgtcctgatgtgggacgagcacgaccgcttcgaaggcctgctcggcatcgcccgcgacatcagccagcagcgccgcgccgaacgcgagctgcggatggcggcgacggtattcgaacactccacggcggcgatcatggtcaccgacccggccggctacatcgtccaggtcaacgattccttctcgcgcctgaccggctacagcccggccgacgtgctcgaccagcagccgcgcctgctcaccgccgaccgccaggaagccaaccagctcaagcacgtgctcgccagcctgcagcacagcggcagctgggaaggcgagatcctgcagaagcgcaagaccggcgaactctatccgtcctgggtcggcatcaccgcggtgcgcgacgaggaaggcgacctggtcagcttcgtctgcttcttcagcgacatcagcgagcgcaaggccagcgagcggcgcatccaccgcctggcctactacgacgccctcacccacctgcccaaccgcacgctgttccaggaccgtctgcataccgccctgcagcaggccgagcgcaacggccagtgggtggtgctgatgttcctcgacctcgaccgcttcaagccgatcaacgactccctcggccacgccgccggcgaccgcatgctgcaggaagtggcgacccgcctgagcgcctgcgtcagccaggacgataccgtggcgcgcatgggcggcgacgaattcaccctgctgctgccttcccagggcgaccgcgagatcgccctgaaacgggcgatccaggtcgccgagctgatcctcggccgtctggcccggccgttcaccctggaaggccgtgaattcttcgtcaccgccagcatcggcgtggccttgtcgccccaggacggcgccgaactgagcctgctgatgaagaacgccgacacggcgatgtaccacgccaaggagatgggcaagaacaacttccagttctaccaggccgagatgaacgctcgcgccctggagcgcctggaactggaaagcgacctgcgccgcgcccttgaactgggcgagttcgtcctccactaccagccgcagttcaccggcgacggccgccgcctgactggcgccgaggccctgctgcgctggcagcatccgcgccgcggactggttccgccgagcgagttcattccggtgctggaggagatcggcctggtggcccaggtcggcgactggctgctggcggaagcctgcaagcagttgcgcagctggcacaaggccaaggtgcgggtgccgaaggtctcggtgaacctctcggcacggcagttcgccgatggccagttgggcgagcggatcgccgcgatcctctacgagacaggcatcccgccggcctgcctggagctggagctgaccgaaagcatcctgatgagtgacgtcgccgaggccatgcagatcctctccgggctcaagcgcctcggcctggccatcgcggtggacgacttcggcaccggctactcctcgctgaactacctcaagcagttccccatcgacatgttgaagatcgaccgcagcttcgtcgacggcctgccccacggcgaacaggacgcacagatcgcccgggcgatcattgccatggcccacagcctgaacctgatggtgatcgccgagggcgtggagagccaggcccagctggacttccttcgcgagcacggctgcgacgaggtgcaaggctacctgttcggccggccgatgcccgccgagcagttcggcatgctctacgccagcgacgtgctgttcatgttcaacgagggctga

SEQ ID NO: 364828 - DNA, 564 bp, Pseudomonas aeruginosa
atgaccctgatttcccatgacgagcgactcatcaaggcgctggcagtcgctatcgtcgaccgcccgcgagcgacgctgaaggaactggccgaggcggccggcgtaagcaaggccaccctgcaccgcttctgcggcacgcgggacaacctggtgcagatgctcgaggaccacggagagaccgtactgaaccagatcatccaggcctgcgacctggagcatgccgagcctctggaggcgttgcagcgcctgatcaaggaacacctcacccaccgcgagctgctggtattcctggtattccagtaccgcccggacttcctcgacccgcacggcgaaggcgcacgctggcagtcctacctggaagcgctggacgccttcttcctgcgcggacagcagaaaggcgtgtttcgcatcgacatcacggcggccgtgttcaccgaactgttcatcaccctggtctacggcatggtcgatgcggaacgtcgcggacgggcggccagctccaattccgcgcataccctggagcagatgttcctccatggcgcctccaatccggcgcgctcctga

SEQ ID NO: 364829 - DNA, 1440 bp, Pseudomonas aeruginosa
atgcgcaaacctgctttcggcgtatcggcgctgctgatcgccctgaccctcggcgcctgctccatggcgccgacctacgaacgtcccgccgcgccggtggccgacagctggagcggcgccgccgcccagcgccagggcgcggcgatcgacacgctggattggaagagtttcatcgtcgatgccgaactacgccgcctggtggacgtggccctggataacaaccgctcgttgcgccagaccctcctggatatcgaggcggcccgcgcgcagtatcgaatccagcgcgccgaccgggttccgggcctgaacgccgctgccaccggcaaccgccagcggcagccggccgacctgtccgccggcaatcgctcggaagtggccagcagctaccaggtcgggctggccctgccggagtacgaactggacctcttcggtcgggtcaagagcctgaccgacgcagccctgcaacagtacctggccagcgaggaggcagcgcgcgcggcacggatcgccctggtcgccgaggtcagccaggcctacctgagctatgacggcgccctgcggcgcctggcgctgacccgtcagaccctggtcagccgcgagtattccttcgccctgatcgaccagcgccgcgcggccggcgccgccaccgcgctggactaccaggaagcccttggcctggtggagcaggcgcgcgccgagcaggagcgcaacctgcggcagaaacagcaggcattcaacgcgctggtgttgctgctgggtagcgacgatgccgcgcaggcgattccgcggagtccggggcggcggccgaagctgctgcaggacatcgcacccggcacgccgtccgagctgatcgagcgacgcccggacatccttgccgccgaacatcgtttgcgggcgcgcaacgcggatatcggcgcggcgcgcgcggcgttcttcccgcgcatcagcctgaccggcagcttcggcacctccagcgcggaaatgtccggcctgttcgatggcggctcgcgctcctggagcttcctgccgacgctgacgctgccgatcttcgatggcgggcgcaaccgtgccaacctgagcctggccgaggcgcgcaaggattcggcggtggccgcctacgaggggaccatccagaccgctttccgcgaggtcgccgacgccctggcggccagcgataccctgcgtcgcgaagagaaggccctgcgcgccctggcgaacagcagcaacgaagccctgaagctggccaaggcacgctacgagagtggcgtcgacaaccacctgcgctacctcgatgcgcagcgcagcagcttcctcaacgagatcgccttcatcgacggcagcacccagcggcagatcgccctggtcgacctgttccgcgcgctcggcggaggctgggacgagggacggagcctggtggtacatcgaggcggcaggagttga

SEQ ID NO: 364830 - DNA, 636 bp, Pseudomonas aeruginosa
atgacactcgctcccagatccgcccagctacccgactccccgcacagggacagtctcgacccagcgccaaccccgtcgtctcaggaccagcgcctgctcaaggccctggccaccgcgatggtcaatcatccgcgcgccaccatgggagaactggcggaactggcaggagtgagcagggcaaccctgaaccgtcattgcggtacccgcgaaggtctcaagcggcgcctggaaagccatgccaggagtaccctcgaacgcctcacccacagcgccgccctacagcggctggagccgcgggaagcgctacgcgagctgatccgggaacacctcgcccagcgcgacctgctggcgctgctgatgttcgagcagaacccaggacgccaggccgggcatggggacgccagttggcagtcctatgtcgaagccctggacgccttcttcctgcgcggccagcagaagcgtgtgttccgtatcgatatcagcgcggcgaccttcagcgaactcttcatcgtcctgatctacggcatggtcgatgccgagcgccgcggtcgcgcggccagcgccgggttgtccgccacgctggaggagctgttcctgcgtggcgcgtcgaaccccgcacaacctgccagcccttga

SEQ ID NO: 364831 - DNA, 252 bp, Pseudomonas aeruginosa
atgacagaccgagagaaagctggccagccaccccggttttcgtggggcggggcgctttgccggcggatgttcgccgtccgattccaggccgttacggtgacgctgagcagcgtactggccgcccttactgtctccgctaccctcgtcctgtcaaaggcgttctgcctgagcgaggcggcgaccatcgccccgtgcgaggtctgggtgggcctggcactgctcgcggccatggtgctgccgctcaagacctga

SEQ ID NO: 364832 - DNA, 1665 bp, Pseudomonas aeruginosa
ttggctcagtacgtctacaccatgcatcgggtcggcaagatcgttccgcccaagcgtgaaatcctcaaggacatctccctgtcgttcttccccggcgccaagatcggcgtgctcggcctgaacggcgcgggcaagtccaccctgctgcggatcatggccggcgtcgacaccgagatcgaaggcgaggcccggccgatgccggggatcaacgtcggctacctgccgcaggagcccaagctggacccgcaggccaccgtgcgcgacatcgtcgaagaggccgtcggccagatcaagcaggcccaggcgcggctggacgaggtctatgccgcctatgccgagccggatgccgacttcgacgccctggccgccgagcaggccaagctggaggcgatcctccaggcatccgacggacacaacctggaacgccaactggaagtcgccgccgacgccctgcgcctgccgccgtgggatgccaaggtcgagcacctgtccggcggcgaaaagcgccgcgtagcgctgtgccgcctgctgctgtcggctcccgacatgctgctgctggacgaaccgaccaaccacctggacgccgactcggtggcctggctggagcatttcctgcacgacttccccggcactgtggtggcgatcacccacgaccgctacttcctcgacaacgtcgccggctggatcctcgaactcgaccgtggccatggcatcccgttcgaaggcaactactccggctggctggaatccaaggccgcccgcctggcccaggaagccaagcaggaagcctcccacgccaaggccatgaaggccgagctggagtgggtacgccagggcgccaagggccgccaggccaagtccaaggcgcgcctgcagcgcttcgaggaactgcagtcgcaggaattccagaagcgcagcgagaccaacgagatctacatcccggccggtccgcgcctgggcgacaaggtcatcgaactgcacaatgtgaccaagggctacggcgaccgcgtgctgatcgacaacctgtccctgagcattcccaagggcgccatcgtcggtgtgatcggcggcaacggcgcgggcaagtcgaccctgttccgcatgcttaccggcaaggagcagccggactccggcaccatcgagatcggcgagaccgtgcagatcgccagcgtcgaccagagccgtgacagcctggaaggcaacaagaccgtgtgggagcaggtttccgacggtttcgagcagatcaagatcggcaactacgaagtcccgtcgcgcagctatgtcggccgcttcaacttcaagggcgccgaccagcagaagttcgtcaaggacctctccggcggtgagcgtggccgtctgcacctggccctgaccctgaagcagggcggcaacgtgctgctgctcgacgaaccgtccaacgacctcgacgtggaaaccctgcgtgcgctggaagaggcgctgctggacttccccggctccgccatcgtgatctcccacgaccgctggttcctcgaccggatcgccacccacatcctctcctacgaggacgatggcaaggtgaccttcttcgaaggcaactacaccgagttcgaggcggaccgcaagaagcgcctgggcgacgccgcggcccagccgcaccgcgtgcgctacaagaaactggcgtaa

SEQ ID NO: 364833 - DNA, 714 bp, Pseudomonas aeruginosa
atgccaacaacaaacaagcacgaatcattgatctccctgcgggggatcggcaagggctacctcctgggggggcagccgctgcagatactgaaagacgtctgcctggacatctttcccggagaaagctgcgcgatcgtcggcgcgtcgggctcgggcaagagcaccctgctgaatatcctcggcctgctcgaccgcccggacagcggtgcctaccgcttcgccgagcacgacatcttcagcgtcgacggggaccgactggcggcgatccgcaaccgcctgatcggcttcgtcttccagagcttcaacctgttgccgcggctgaacgcgctggacaacgtcgcgctgcccctgagctatcgagggatgccgcgccgcgaggcactggagcgggccgaggcgatgctcgcccgggtcggcctggccgagcgcgccggccatcgtccggcggacctctccggcggccagcggcagcgcgtcgccatcgctcgcgcgctggtcggtgagccggcgctgatcctcgccgacgaaccaaccggcaacctcgacgcgagcaccgcgaaagaagtgctggagctgctcctcaccctcaaccgcgagcgccaggtgaccctggtggtggtcacccatgatcccagcctggccgcccgtctcgggcgccaactgacagtgcggcatggcgaggtgcacgaggacctggcggaggcctgccggtga

SEQ ID NO: 364834 - DNA, 1194 bp, Pseudomonas aeruginosa
gtgagcgccagcccgtcgccccggcaattgcttcacgaggccctcgccagtcttcgcgggctggggcgccgctcgctgctggcgttgctgggtatcgtcatgggctgttcatcggtgatcgcgatgctgaacatcggcagcaacgcgaccgacgaagcgatgagcatcttcaaggacatgggcaccgacaccctggtggtgcagttcccgttcgccccgcaggcgccgatgccgatgccggcgtcgctcgacaccgaaccgctgctccgcgacgtggccggtctggagcacctggcggcgctgggcctgtactcggcgccggtgacctttcacggacgcaccagcaacgccagtatcgtcggcgccagcgccgggctcgcggctgccgccaggctgcggctgcgcgaaggacgtttcctctcgcgcttcgacgatcacgacacctacgtggtggtgggcgcgacaatcgccgaggccctgggggcgcccggcgatccgctgcgcctcggcgagcaactgacggtcaacgactatctgtttcgcgtgatcggcattctccagccgcaggccagcgccgctctcttgccgttcgccgccaacgactcgctgttcgtgccggcgccgggcatgccgcgcctgcagccggccgccgaggtcagccatgtggtggcgcgggtctcgccgggagcggacgtctatagcgtcggcgcggccctgggcgcggccctgacggcgcggttgcccggccacgaggcgcaggtccaggtctcgcagcaggtgctcgatggactcaagcggcagacccggaccttcacctacctgctggccggactggggatcatctccctgctcggcggcggcgtcggagtgatgaacgtgatgctgatgagtgtcgccgaacgccgccgggaaatcggcgtgcgcatggcgctgggcgcgcgccagcgggatatccgcaacctgttcctgatcgaggcggtgaccctgaccgccgcgggcgcgctgtcgggcgcggtgctcggcgtggcggctgcgtatctctacgccaggttctccggctggaccttctccctggcctacgcggccctgccgctggggatgggcagtaccctgctggtggggctgttcttcgggctctatccggcggtctcggcggctcgcctgcaaccggtcgaggcgctgcgcgatgaatag

SEQ ID NO: 364835 - DNA, 1482 bp, Pseudomonas aeruginosa
atgaataggtggggcctgggcgtgctgtggctggtcgccgctcttccggtggcggccagcttcaacccggcgctgagtccggacgtaccgagcatggcccgcgagcagggcaggtcggtgctgctcagcgagcaggtgatcgacctcagcctgagcgacgcggtctatcttggcctgcgcaacaaccgtggaatccgtagcgcctacctgcaacggatcgcgcagaagttcgacctgcgcgtcgccgccgacgccttcaacccgaagctggtggtgcgcggcgactatcgcgccaaccgcgccaccgaagaccgcacgaggaccagcaatgtctcgcccaccgcgaccctgcttggcgaatatggcactcgcttcagcctggcctgggtcaagcagttccgcaccgccgacgaggccgggcgctaccgcagcgatggcctcgacctgaccgtcgtccagccgttgctgcgcgatgcgggctgggacgtcaccaccgcgccgctgcgcctggcacgtctctccgaagacgccaatcgcctgcaactcaaggccagcgtgtcgcagaccatcagccaggtcatcggcgcctaccgggagctgctgcgcgcccaggagcaggcgcgcatcgctcgcgaagccctggcgcggacccaggagctgctcgaggtcaaccgggcgatgatccgcgccgggcgaatggccgaattcgagatcgtgcagaccgaggccgacgtcgccagccaggagctcaacgtcgaggagtccaccaaccaggtcgacagcgcacgcctggccctgctgcaactgctggcgctggacctgtcgacgcaaatccgcgccagcgatgcgctggccgccacgccgatcgaggtcgaccgccagcaggcgatcaggaccgccctgcagcagcaaccggaatacctgcaacgcctgatcggcagtcgccaggccgacctcaacctggtgctggcgaagaaccagcgcctgtgggatgtctcgctggtgggcggcgccagccagatccgcgaccgctacagcgagggcggtggtgacaattcacgcagttgggacagctacgccggggtacaggtggaaattcccatcggcgacctcagccgccggcaggccgaggtgcgcgcccaggtcgacgtggagaaccagaagatcctgatcgaggatgcccggcagaccctggagcagaacgtcatcgatgcggtgcgcgacctcggcacgcgctggcgccagtaccagatcgcccagcgcgccaccgccttgtcgcggcgcaagctggagatcgaacgggaaaagctgcgcgtcgggcgttcgagcaacttccaggtgctgagcttcgagaccgacctgcgcaacgtcgagaacacccaattgaatgccctgatctcgtttctcaatgcgcagacgcagctcgacctgatcgtcggcatgaccctggatagctgggagatttcgctcaatgaccactga

SEQ ID NO: 364836 - DNA, 1278 bp, Pseudomonas aeruginosa
atgaccactgaccggttttccttcctgcgccggccggcattgtcgctcgccgccggcctggcggttgtcgcggcgctggcctggctggtcctcgccggcggcaccgcgaaacgcacggaaggggagcgctgggtcgccgtacgggcggccccgctggtgcatcagatcggcctggtcggacgcctggaaccggggcgcgtggtgaccctggcggcgcccttcgccggcaatgtcgaggcgctgctggtggagccgggacagcgggtcgcggaaggacaggagctgctgcgcatggacacccgcgagatcgccgtgcaggtgcgcgaggcacagtcggcgttgctcaaggcccgtcgcaccctgcaggacctgcgcgactgggagcgtggcgaggacatggcgcgggtccgtcgtgccctgcgcagcgcgcagctggcgcagagcagcaccgagcgcaagttgcgcgagacccgcgagctgttccagcgcgggatcgtcccgcgcaacgaactcgacgatctcgaacaacaggccagccagcagcgcatggacctggaggcggcccggcgggaagtggagtcgacccgcgccaaggggcagggcgagaatcgccagatcgccgaaatggacctggccaacgccagcgtgaaatacgagacgctgcaggcccagctggatggccgtacggtgcgcgcgccctttgccggtatcgtcgtcgcggcgcccggcctggctggcgagcagggcagccgcgaaccggtgcaggccggtagcaagctggggcagggccaggcgttgttcggcctggccagcgtcgagcggctgaaggtatctgcgaaggtttccgaactggatatcaaccagttgcgcgaagggcaggcggtggaaatcagtggcgacggcttcgagggcaccacgctggcgggcgtcatcgccgccctcggtggtcaggctctgcccggcatggcccagggaggcagcccgcagttcgaggtgacggtgtcggtagcgccgcttgatctccgccagttgcagaagattcgtctgggaatgagcgccaagctgacggtcaccacctatcgcaacgaacaggccatcgtcgtgccgccggaggcgatacgccacgagggtgaccggctgttcgtggacgttcgccaggctcccggcgccagcgtgatggcgcaacaggtcaagatcggacgctccacgccggagggcgtggaggtgttcgagttgcagccgggtctcgttcgcgtgccgtcatcgtccgaccgatag

SEQ ID NO: 364837 - DNA, 489 bp, Pseudomonas aeruginosa
atgaaatccatcaagtccctgccgtcctttgctgctcttgctctctgcctgagcgtttcgtccatggccagcgcggccaccatcaccccggtcaactcggccttcaccgcacctggcaccatcagcgtgagctcgccggcgtcgctcaatctgccagtgacctgcaacatcaccttcaagggcacgacagccgccgatggttcctatgcctcgatcgacagcgtcaccgtcagcggcagcaacaccctgtgcagcgtgccgcagatgaccggtctgccgtggaagctgaccgtctccagcaccaccgccggcaaggtcgatggcgtcggcttcaagattctctcctctacctgtggcccgagcaccgtcaacggttcctggagcaacgccaccaataccctcagcgccagcaatcagtcgctggctgggaactgcaagatcaacagcctgagtgtgcagccgaccccggccttcgtagtcaacccgtaa

SEQ ID NO: 364838 - DNA, 1437 bp, Pseudomonas aeruginosa
ttgaacaacaaaaacgatatttcctgcctgtttgccagaaaaccattgccattgctctgcgccctgatcgtcggcggactgttcggcacgtcccaggcacaagccggcggcttcatggtaccgaccaccaacacggcgggctggggccgtgcgatggcaggcggctcgctgtttcccaacgatccgagcgccgcgttcaacaacccggcggccatggcgttcatcgacaagcggatcgcccagttgacggtcaactacgccgatatcgacatcaagtacaacggcgatgcctacgactaccagggtaatcccatgaccggcggctaccaggacgggccgggcacccccgagctgggtaccaacgatggcggccaggccggattcggcgcgtggctgccgaccggcttcctggtcgtaccgatcaacgaccgcttcgccttcggtctgagccaggtcgttccgatgggaatgcgcagcacctgggacccgaactggaaaggccgcgatttcgcggtggacaccaagatcgagacgatcggcctgaccggctccctgtcgttcaaggtcaacgacaacttctccctgggcgccggggtgatcatccagcgcacctccggcttcgtcagccagaacctcgatctctatgcctcggccgccaactccccgggcatgggcgggattccgttcccggcctcgaactcgtccgcgctgatgcgggtcaaggtggacaacacctcgcccggcttcttcgccggcgcggtgtggaagccgaccgaccgcgacaccctgggcttcgcctaccacgcgaagatccgcaacaagctgaagggtcactacaacctctacgaccacgacggtgggctgaccgagggcgccatcgagggcggcaccccgggcctggcctatccgggcctggacctgcgcatgggcgcttccgcctcggcgcgcctggatatccccgcctacgcctcgctggactgggtacaccagttcaacgaccgtctgagcctgggcgccagcgccacctggaccgagtggtcgtcgttccaggacctgaccctcaagtcccacggcaacacgatcgtctccatcccctacacctaccggaacacctggaccctggcggtcggcggcgactacaaggtgaccgaccagtggaccatgcgcgccggggtcgcctacgaccagacgccgacccacaatgccacccgcgacccgcggattcccgacggcgatcgctacttcgcctccctgggcgccggctatcgcttccagtcgatgccggagttgtcgatcgacgcggcctactcgcggcagttcgtcaaggaggtgccgttgaagacggtcaaccaggatcgcctgggcggcggacgcctggatggcagggcaaccagcaagggacaggtgttcagcctgtccgcgacctacgacttctag

SEQ ID NO: 364839 - DNA, 1338 bp, Pseudomonas aeruginosa
atgacgcaatccgtcgacgctttcctcgagcgcctgaagcggcgcgatcccgatcagcccgaattccaccaggcggtggaagaggtgctgcgttccctctggccgttcctcgaggccaacccgcactacctggaagccggcatcatcgaacgcatcgtcgaacccgagcgggcgatcctgttccgcgtaccctgggtcgacgaccagggccgggtacgggtcaaccgtggctaccgggtgcagatgagcagcgccatcggcccctacaagggcggcctgcgcttacatccctcggtcaacctcggggtgctgaagttcctcgccttcgagcaggtcttcaagaactccctgaccactctgcccatgggcggcggcaagggcggctccgacttcgatccgaagggcaagagcgacgccgaggtgatgcgtttctgccagtcgttcatgagcgagctgtaccgccacgtcggcgccgacctggacgtgccggccggcgacatcggcgtcggcgcgcgtgagatcggctacctgttcggccagtacaagcgcctgtccaaccagttcacctcggtgctgaccggcaagggcctgagctatggcggcagcctgatccgcccggaggcgaccggcttcggctgcgtctacttcgcccaggaaatgctcaaggatcgtggccgcggcttcgacggccagcgggtggcgatctccggctcgggcaacgtcgcccagtacgcggcgcgcaaggtcatggaaatgggcggcaaggtgatctcgctgtccgattccgaaggcaccctgtatgccgaggcggggctctccgacgagcagtgggaatacctgatggagctgaagaacgtgcgccgcgggcgcatccgcgagatggcggagcagttttccctgcagtttctcgaagggcgccggccctggggcctggcctgcgatatcgcgctgccctgcgcgacccagaacgaactggatgccgaggatgcgcggcgcctgctggtcaacggctgcgtctgtgtcgccgaaggcgccaacatgccctcgaccctggaagccgtcgacctgttcctcgaggccggcatcctctacgcgccgggcaaggcgtcgaacgccggcggggtggcggtgagcggcctggagatgtcgcagaacgccatgcgcctgcgttggagcgagggcgaggtggataccaagctgcacggcatcatgcagtcgatccaccatgcctgcctgctgtacggcgaggagcaggggcgggtcaactacgtgaagggggcgaacatcgccggcttcgtcaaggtcgccgatgcgatgctggcgcagggcgtggtctga

SEQ ID NO: 364840 - DNA, 1041 bp, Pseudomonas aeruginosa
atgcagtcctcgcaactgctcccgcttggcagcctgttgctgtcgttcgccacgcccctcgcccaggccgatgccctgcacgaccaggccagcgcgctgttcaaacccatccccgagcaggtcaccgagctgcgcggccagcccatcagcgagcaacagcgcgaactcggcaagaaactgttcttcgacccgcgcctgtcacgcagccatgtgctcagctgcaacacctgccacaacgtcggcaccggcggcgccgacaacgtaccgacgtcggtcggtcacggctggcagaaggggccacgcaattcaccgacggtcttcaacgccgtgttcaatgccgcgcagttctgggatggccgcgccaaggacctgggggagcaggccaagggtccgatccagaacagcgtcgagatgcacagtaccccgcagttggtcgaacagaccctgggcagcatcccggaatacgtggacgccttccgcaaggccttccccaaggccggcaagccggtcagcttcgacaacatggcgctggccatcgaggcctacgaggcgaccctggtgactccggactcgcccttcgacctgtatctcaagggcgacgacaaggccctcgacgcacagcagaagaaaggcctcaaggcattcatggacagtggctgcagcgcctgccacaacggcatcaacctgggcggccaggcctacttcccgttcggcctggtgaagaagcccgacgccagcgtgctgcccagcggcgacaagggccgcttcgccgtgaccaagacccagagcgacgagtacgtattccgcgccgcgcccctgcgcaacgtcgccctcaccgcgccgtacttccacagcggccaggtctgggaactcaaggacgcggtggcgatcatgggcaacgcccagctcggcaagcagttggcgccggacgacgtggagaacatcgtcgccttcctgcacagcctgagcggcaagcagccgcgcgtcgaatatccgctgctgccggccagcacggagaccacgccgcgtcccgcggaataa

SEQ ID NO: 364841 - DNA, 378 bp, Pseudomonas aeruginosa
atgtcttcttcgcgtctcggcgtgcttgtcctcgccctgatcctgctcaccgccagcctgctcggcggctgcgaaagcacccaccagtacctgctcgccaagggctacccgcccgcctatgccgacggtttcgacgatggctgcggtagcggccgccaggcggccggctcgatcagcggcgaattccgcaaggacgtcccccgctacctgcgcgaggcgatctacgccagcggctggggcgacggcttcgagcaatgccggtcgatggcgcggagcgaagagcggcggcgtttcgaggagcgccagtgggacgaccgcgacgacgattggcagcgcgaccgcgaccgcgcgttggcccgggccttgcgcgagcgctga

SEQ ID NO: 364842 - DNA, 1026 bp, Pseudomonas aeruginosa; identical to SEQ ID NO: 320482

SEQ ID NO: 364843 - DNA, 813 bp, Pseudomonas aeruginosa
atgaacagggaagaacgccatccgctccccgccgccatgcgcgagcggatactggatgagctggaacggatcgaacgcgagcacgacgtagtcgtgctctacgcctgcgagtcgggcagccgggcctggggcttcgcttcgccggacagcgactacgacgtacgcttcgtctatgtgcatcagcccgagtggtatcagcgcgtcgaggaacctcgcgacgtgatagaacgtccgctgagcgacgagctggacatcagcggctgggaactgcgcaaggcgttgcgcctgatgcgcaaatccaacccggccctgctggagtggctcggctcgccgctggtgtatcgggaagagcctggcgtgcgcgaggaactgctctggctgggcagcgcctttcactccgtaccaggcagtcgccatcactacctgtcgatggcacgcaagaactaccggggctacctgaagggcgacagcgtccggctgaagaaatacctctacgtcctgcgtccgttgttcgcggtgcgttggctggatgcaggcctgggcttgccgccggtggcgttcgagaggctagtggaagccacgctggacgatccgtcgctgcgcgaagaactggatgccctgctgagcctcaagcgtcagcgcgacgaatcggcctacggccctccgcgcctggcgctgcaacgcttcatcgaagcggagttgctccaggccgaacgaggggccacccaaccaaccggcgcgcgccaggacagccgactgctggatcgctacctccacgacaagatatggcaatacacaagggaaacctcatga

SEQ ID NO: 364844 - DNA, 1215 bp, Pseudomonas aeruginosa
atgaaagacatgaatatcctcgaagtggccggcggcaagccgatcaagctctggacccagggcgtcccggtggaggaggaagcgcgccagcagttgctgaacacggcgaagatgcccttcatcttcaagcacctggcggtgatgcctgacgtacacctgggcaagggctcgaccatcggtagcgtgatccctaccctcggcgcgatcatcccggccgcggtgggcgtggatatcggctgcggaatgatcgccgcgcgcacctcgctggtcgccgccgacctgccggacaacctgcacggcctgcgcagcgccatcgagcaggcggtaccccacggcaagaccttcggccgccgcgaccgcggcgcctggcacgaggtaccggaggccgccgaccaggcctggaaggcgctcgccggtcgcttcaaggcgatcaccgacaagcacccgaggctggagaagaccaacaaccgccagcacctgggaaccctcggcaccggcaaccacttcatcgaggtctgcctggacgaggccgaccgcgtctggttcatgctgcacagcggttcgcgcggggtcggcaacgccatcggcaacctgttcatcgaactggccaaggcggacatgcgccagcacatcgccaacctgccggacaaggacctggcctacttcgaggaaggcagccggcacttcgacgactacgtggaagcggtcggctgggcccaggatttcgcccggcagaaccgcgcgctgatgatgcacgcggtgatcgaggcggcgcgccaggtgatccgcaagccgttcgaagccaacctggaggcggtcgattgccaccacaactacgtgcagaaggagcgccacttcggccaggaggtactggtcacccgcaaaggcgcggtgtccgcgcagaagggccagctcggcatcattcccggctcgatgggggcgaagagcttcatcgtccgcggcctcggcaaccaggaagcgttctgctcgtgcagccacggcgccgggcggaccatgagccggaccaaggcgaagaaggtcttcagcgtcgccgaccaggcgcgcgccaccgcccacgtcgaatgccgcaaggacgccgacgtgatcgacgagatcccgatggcctacaaggacatcgaccgggtcatggaagcccagcgcgagctggtggaagtgctgcacaccctgcgtcaggtggtgtgcgtgaaaggatga

SEQ ID NO: 364845 - DNA, 1146 bp, Pseudomonas aeruginosa
atgaaaatgctgaagcgctttatcgtgaagaagaacgaacgcggcctgctgtattccgaaggcgacttcctcgccgtgctcgaaccgggcacctaccgccgcttcgatccgtacgaccgcctgagcctggaaagcttcagcctgaacaccccgcagtttgaacaccgcctggccggctacctgcggcagagcgaaccgcaactggtggagcgctacttcacccggatggacctgggcgacaacgaggccggcctgcgctacgaggacggcgtgctggtggagttgctcgcaccgggcagccgccgactgtactggaaaggccagaccgagcagcgcctggagcgcatcgacctgacccaggactatcgattgtccgccgcgctggtcgcccagttgcaccagccgaacctgcgcgaccgcgccctggcgggcctggacgcagtgttgctggtccaggtgccggcgttccaggtcggcgtgctcaaggtcgacggcgcccttgccggcctgctgcaagctggacaatacggtttctggcgctacaaccggcaagtcagcgtggaactggtcgacacccgtatccaggcgctggaggtcagcggccaggagatcctcacccgcgacaaggtcagcctgcgcctgaacctcgccgccaattggcgctacagcgacgtgctcaccgccttctcgcggctgagcaaaccgctggagtatctgtaccgcgagctgcagttcggcctgcgggcggcagtgggcacccgtaccctcgacgaactgctggagaacaagcagtcgatcgacgaagcggtcagcgcccacctggccgccaagctggaagacagcggcctggaagtgagcggcctgggcgtacgcgacatcatcctcccgggcgaaatgaagaccctgctggcgcaggtggtggaggcggagaaggcggcccaggccaatgtgatccgccgccgcgaggaaacctcggcgacccgctcgctgctgaataccgcgaaggtcatggaggaaaacccgaccgcgctgcgtctgaaggaactggaaaccctggagcgggtggccgagcgcatcgaccggatttcggtattcggtggcctggaccaggtattgaacggactggtcacgctgaagcaggcctga

SEQ ID NO: 364846 - DNA, 1596 bp, Pseudomonas aeruginosa; identical to SEQ ID NO: 339411

SEQ ID NO: 364847 - DNA, 555 bp, Pseudomonas aeruginosa; identical to SEQ ID NO: 337502

SEQ ID NO: 364848 - DNA, 1857 bp, Pseudomonas aeruginosa
atgccgaaacgcctgttgccctggatggcgctgtgcgcctgctccccccttctggctgcgcccacggttcccgaggcccgcctccagcaactggccgccgatccctactggatcgccctcggccactacgaacgcggcaagctcggcggttggcgcagctacgtcgacgacgagcggttcttcctcgccgacaacggcgagagccacccggacgccgaactggcggccacgctaaaggcgctctatgcctcgcccagccttggcgacaagcacgctcagtgcgtctacccggcgcgcacccgctggctgcgccagcaactgcaactcgacgacctgccgcagccgcagtgcggcgaatacgacaactggtaccgcgacatcaacccgcacagcgcggtgctggtgttccccgcggcctacctgaacagcccgtcgtcgatgttcggccacaccctgctgcgcatcgaccaggccgacgtcaccagcaacaacactgccctgctcagctacgcgctgaacttcggcgcctacatcgaaggcatggacaacagcatcctctatgcctggaaaggcctgatgggcggctatcccggcctgttcgcgctggtcccgtaccgggagaagctggccgaatacagccgcctggagaaccgcgacctctgggaatacaagctgaacctgacgcccgaggagaccgggcgcatggtcgaacacgtctgggaactcaagcaggtccgcttcgactactacttcttcgacgagaactgttcgttccgcctgctcgaactgatggagatcgcccgcccgggcatcgagctgaccgagcagttcccgcttaccgcgatccccaccgacaccgtccgcgcggtgaagaacgccgggctgatcgagcgcatcgactaccggccgtcgcgcgagaaggaactgctcgcccgcgccgaaccgctcgaccatgccgagcgcgactgggccaagcgcctggcggacgacgacagcctgctcgacgctcccgacttcaaggccctgccgatgccgcgccaggcgctgatccaggacgccgccttccgcctggtgcgctaccgcgccaccggccaggcgcgtgacagcggcatcgcctcgcgcagctacaacctgttgcgagcgatcaaccgcaacccgccgccggacctccaggtcgagcgccccggccagccggaagacggccacgagtcacggacctggcagttcggcgtcggcagccgcgatgaccgcgccttcgccgagtacggcctgcgcatggcctaccatgacctcgccgataacgcctatggcttccccctcggcgcgcagatcgagatcggccagctcaagctgcgccagtacgaaggcaaccgctggcagttgcagaatctcgacctggtcaccatccgctcgctgaccccgcgcaaccagttgctcaagccgctgtcctggcaggtagccggcggcctggagcgggtgccgggcgaggacggcgacgaaaacctggtcagccacctgaacggcggcgccggcggcagctggatgttcggcgacgacttgctgctctacgccatgggcaccgcgcggatcgagaacaacagggacttcgccgccgccatcgccccggcggtgggcttcgacagcggcctgctgtggcgcaacccgctgggcaacctgaccctggaggccaagggcgactacttccacaacggtgaagtgcgccgcagcctgggcttcgtccagcaggtggagctgggccgcgacctcggcctgcgcctgggcgccgaacgcgagttcagccatgtcggcaagccgatcaacgaggtgaagctggagctgcgctggtactactactga

SEQ ID NO: 364849 - DNA, 489 bp, Pseudomonas aeruginosa; identical to SEQ ID NO: 320475

SEQ ID NO: 364850 - DNA, 327 bp, Pseudomonas aeruginosa; identical to SEQ ID NO: 320474

SEQ ID NO: 364851 - DNA, 342 bp, Pseudomonas aeruginosa
atgccgcgtaacctctgcctcatccgcccttgtctggggctgaccacgcgaatcgaatgcgtggtcaggccgctggccggagagaacggactctggaccctgctttgcgccgccggcatgtccggctcccagccttcggcgatcaaggcccagggccccttccacggaccgctggtggccgaaggggtgttgcaggcgattgccgactgcctggcccagcaaggctatatcgaagccgtcgacccgccgatctggcgcctgcacctgcagggcgaactgcgccgactcaatggcgaacgacggccgcatgtcggcgactacctgtttcgcccggaatcctga

SEQ ID NO: 364852 - DNA, 489 bp, Pseudomonas aeruginosa
atggaacgctttttcgaaaacgccatgtacgcctcgcgctggctgctggctcccatctacatgggcctgtcgctggcgctgctggcgttgaccatcaagttcttccaggaaatattccacgtcatcccgaacatcttcgcgatggccgaggccgacctgatcctggtcctgctctcactgatcgacatggctctggttggcggcctgttggtcatggtgatgatctccggctacgagaacttcgtttcgcaactggacatcgacgaaggcaaggaaaagctcagctggctgggcaagatggattccggctcgctgaagaacaaggtggccgcctccatcgtggcgatctcttcgatccacctgttgcgcatcttcatggacgcgaagaatgtgccggacaacaagctgatgtggtacgtgatcatccacatgaccttcgtgctctcggcgttcgccatgggctacctggataagcagacccgtcactga

SEQ ID NO: 364853 - DNA, 306 bp, Pseudomonas aeruginosa
atgaacatgcaggatctcgccggccgggtccaggccggacatatcgacgccttgcacctggtgtcgctggagggcggcatctatgtcctggaggcgcagatgggcgaccgcgcctatccggtggaggacgatctcggccagccggtcagcctgcgctccgtggagcatgcgcgccaggtactgcgcgggctggacagggttccggtggagttggtgtgcgccgatgtcgatgacgagatgtgtggactcctggccgagtcgggttcgtttatcggcgggctgccgctgtcgatccgccagggttga

SEQ ID NO: 364854 - DNA, 618 bp, Pseudomonas aeruginosa
atgagcgaactcaacctgaccactgacgaagcccgtgtcagctacggcatcggccgtcaactgggcgaccaactgcgcgagaatccggttccgggcatgaccctggacgcagtcctggccggcctgtccgatgcgttcgcaggtatcgacagccgggtttccggcgaggcgctgtcggccagcttccaggtgatccgcgagcgcatgcaggccgaagcccaggccaaggccgaagccgccgctggcgaaggccgcgcctacctggccgagaacgccaagcgcgaaggcgtgaccgtgctgccctcgggcctgcagttcgaagtgctgagcactggcgagggcgccaagccttcccgcgaggataccgtgcgcacccactaccacggcaccctgatcgacggcaccgtattcgacagctcctaccagcgtggccagccggccgagttcccggtgggcggcgtgatcgccggctgggtcgaagcgctgcaactgatgaacgccggctccaagtggcgcctgcacgtaccgagcgaactggcctatggcggccaggccgtcggcagcattcccccgcacagcgtgctggtgttcgacgtcgaactgctggaaatcctctga

SEQ ID NO: 364855 - DNA, 2028 bp, Pseudomonas aeruginosa
atgcctgcttctttcccgcgcctcggcttgctcggcgcactgtgctccatcgttcccctgctccatgccagcgaaccgaccacggacgctgcgctcatcgaaaaaggccgctacgtggcccagctcggcgactgcatcgcctgccataccggcccgcagggcgcgccgatggccggcggcctggagctgaagacgccaatgggtaccatctactcgaccaacatcactcccgaccgggagaccggcatcggccgctacagcttcgaagagttcgaccgcgccatgcgcaagggggtgaccgccgagggagtgaatctctatccggcgatgccctacccgtcctacgccaagatcagcgaagaagacatgcgtgcgctgtacgcctacctgatgcacggcgtgcaacccgtcacccaggcgaatacgccgagcgcgatgagctggccgttcaaccagcgctggggcctgtcgctgtggaactgggcgttcctcgacgacgcgccgttcaccccctccagcgacgcggacccggtgatcaaccgcggcgcctacctggtacaggggctcggccactgcggcgcctgccatactccgcgcggcatcgccttccaggaaaaagccatgagcgaagccggtcgttccgggcagttctacctcgccggagaaaccgtcgaacaatggcaagccctgagcctgcgcaacctgtggacggtggaggacaccgtgcagttgctgaagaccgggcagaaccgcttcgccacggtgtccggcagcatgaccgatgtcatccaccacagcacccagcacttcagcgacgacgatctgctggccatcgccagctacctgaagtccctgccggccggcaaggacgacctgcccatgcccgacagcgaacgcccactggcagcaccggtcgacctgtacagctcgcggggcggtctcggctacgcgcagttctgctccgactgccaccgcaaggacggcagcggcgtcccgggcatgttcccgccgctggccggcaaccccacggtcgcttcggccaacccgagcacgctactgcatatcacccttaccggttggaaaaccgcgcagaccgcaacccactcgcgggtctacaccatgcccggcttcgcccagctggaagaccgcgaaatcgccgagatcctcagcttcgtccgcagcagttggggcaaccagggttcgtcgatcgatgccggccaggtgaagaaactgcgccagcggatcgaggccggcaacggcccggccacgaccttcgtctctccacgcctggcggacatgctcgcggcgccgaacgccgaacaggtggtacgcggcatgcgcctgcacctggagacccgcgagctgctgccggcgaacgtcggcaaccagttgaactgcaccagttgccacctgaacgccggaaccgtagccgacggctcgcccttcgtcggcgtctcggcgttcttccccagctacgcgccccgggcgggcaaggtcatcggcctggaggaacgcatcaacggctgcttccggcgctcgatgaacggtaagcctctgccgccggactctgccgacatgcaggcgatggtggcctacttcgactggatgaagaacaacacccggccgcaggacaaggtcgccggccgcggcgtcggcaaggtcgacccggcgctgaagcccgacccggagaacggccgcaaggtctacgcccgacaatgcgcggtgtgtcatggcgagaatggcgaggggctgaggaacagtgccggcgagatgctcttcccaccgctgtggggcgacgagtcgttcaatatcggcgccggcatggcgcggaccttcaccgctgccgccttcgtcaagcacaacatgccgatcggcttccaggaacgcttcccgctcggccagggcggcctcagcgaccaggacgcagtggacgtcgcggagtacttttcgcaccagccgcgcccggacttcccggacaagatcaaggactggccgaaggacaagcgtccgctggatgcccgctactga

SEQ ID NO: 364856 - DNA, 225 bp, Pseudomonas aeruginosa; identical to SEQ ID NO: 320467

SEQ ID NO: 364857 - DNA, 969 bp, Pseudomonas aeruginosa
atgcaaccccaggccttctaccgcgtggtggcggaagatttcaccgccgtcgacgggatcatccgtcgccaactcacctcccgcgttcccctggtggaaaagatcggcgactacatcatctccgccggcggcaagcgcctgcgtccgctgctggtcctgctcgccggcaagaccctgggctacaagggcgacgacctctgcctgctggccgccaccatcgaattcctgcacacctccactctgctgcacgacgacgtcgtcgacgcctccggcctgcgccgcggccgctccaccgccaatgccctgtggggcaacgcgccgagcgtgctggtaggcgacttcctttatgcccgctccttcgaaatgatggtcgagctgggttccatgccggtcatgcgcatcatatcccaggccacccgggtgatcgccgagggcgaagtgctgcaattgtccaaggtacgcgacgccagcactaccgaagagacctacatggaagtgatccgcggcaagaccgcgatgcttttcgaggcctcgacccacagcgccgccgcgctgtgccaggccggcgaggaacagtccgaggcactgcgccgcttcggcgactacctgggaatcgccttccagctggtggacgacctgctcgactaccgcggcgacgccgcgaccctcggcaagaacgtcggcgacgacctcgccgaaggcaagcccaccctgccgctgatcgtcaccatgcgcgacggcaccgaggagcaggccgcgctggtacgcaaggccatccagcaaggtggcagccaggacctggagagcgtctgcgccgccgtcgaggctgccggcgccttggactataccgccaacctcgcccgcgactacgccgcccgcgccatcgcctgcctggatacgctgccggacaacgaataccgctccgccctggtcgaactcagcgaattcgctgtcgcccgtacccactga

SEQ ID NO: 364858 - DNA, 312 bp, Pseudomonas aeruginosa
atgtacgcagtgattgttaccggtggcaagcagcacaaagtcaccgaaggcgaattcctcaaggtcgagaaactcgacgtcgctaccggcgaagcgatcgatttcgaccgcgtcctgctggttgccaatggcgaagacgtgaaaatcggcctgccggtcgtcgaaggtgcgaaggttaccgctgaagtggtttcccacggccgtcacgacaaggtccgcatcatcaagttccgccgtcgtaagcaccacatgaagcgtcagggccaccgccagtggttcactgaaatcaagatcaccggcattcaggcctaa

SEQ ID NO: 364859 - DNA, 258 bp, Pseudomonas aeruginosa; identical to SEQ ID NO: 320464

SEQ ID NO: 364860 - DNA, 1221 bp, Pseudomonas aeruginosa
atgaaattcgtcgatgaagtatcaatccacgtgaaagccggtgacggcggcaatggcctcatgagctttcgtcgcgagaagttcatcgaaaagggcggtcccaacggcggcgacggtggcgatggcggttccatctacctggaagccgacgtcaacctgaacaccctggtcgactatcgctacacccgccgtttcgatgcccagcgcggcgagaacggtggtagcaaggactgcaccggggccaagggcgacgacctgatcctgccggtgccggtcggtactaccgtgatcgacgccaatacccaggagatcatcggcgacctgaccgagcctggtcagcggctgatggtcgcgcagggcggctggcacggcctcggtaacacccgtttcaaatccagtaccaatcgggcgccgcgccagaccaccccgggcaagccgggtgaggcgcgcgacctcaagctggaactgaaggtgctggccgacgtcggcctgctgggactgccgaatgccggcaagagcactttcatccgtgcagtgtccgcggccaagccgaaggtggccgactatccgttcaccaccctggtgccgaacctcggcgtggtcagcgtcggtcgctacaagagcttcgtggtcgccgacattcccggcctgatcgaaggtgccgccgaaggcgccgggctgggcatccgcttcctcaagcatctggcgcggacccgtatcctcctgcatctggtggacatggcgccgctggacgaaagcgatccggccgatgccgccgaggtcatcgttcgcgagctgggtcgcttcagtccggcgctgaccgagcgcgagcgctggctggtgctgaacaagatggaccagatcctcgatccggccgagcgcgaggcgcgcaagcaggcagtgatcgagcggttgggctgggaaggcccggtctatgtgatctccgccctggagcgcgatggcaccgaggcgctcagccaggacatcatgcgctatctcgacgagcgtaccctgcgcctggaagaagatccgcagtatgccgaggagctggccgaactcgaccggcgtatcgaggacgaggcgcgggcccgtctgcaggcgctggacgatgcgcgcgcgctgcggcgttcggggctgaagaacgccggtgcggtggatgacgatgatttcgatgatgaggaagacgacggcgacggtccggagatcttctacgttccctga

SEQ ID NO: 364861 - DNA, 1119 bp, Pseudomonas aeruginosa
atgcgggacaaggtgactggcgcgcggcgctgggtggtgaagatcggtagcgccctgctgacggccgatggccgtggactggatcgcaatgccatggccgtttgggtcgagcagatggtggcgctgcattgcgccggcatcgagctggtgctggtgtcgtccggcgccgtcgccgccggtatgagccgcctgggctgggtgtcccgacctagcgcgatgcacgaactccaggccgccgcctcggtgggacagatggggttggtgcaggcctgggagtccagcttcgccctgcatggcctgcagaccgcccaggtgttgctgacccatgacgacctttccgaccgcaagcgctacctgaacgcccgcagcaccctgcggaccctggtcgagctgggtgtggtcccggtgatcaacgagaacgacacggtggtcaccgacgagatccgcttcggcgacaacgacaccctggcggcactggtggccaacctggtcgaggccgacctgctggtgatccttaccgatcgcgacgggatgttcgacgccgatccgcgcaacaatcccgatgcccaactgatctacgaggcgcgtgccgacgatccgcagctcgatgcggtggccggcggcagtgccggcgccctggggcgcggcggaatgcagaccaagctgcgggcggcgcgcctggcggcgcgttccggcgggcatacggtgatcgtcggcgggcgtatcgagcgtgtcctcgaccgcctgcgcgccggcgaacgcctcggcaccctgttgacccctgatcgcagtcgcaaggcggcgcgcaagcaatggttggccggtcacttgcagatgcgcggcaccctggtgctggatgatggggcggtgaaggcggtgagccaggatcacaagagcctgttgccggttggggtcaaggcggtccagggcagcttccgtcgcggcgagatggtggtctgtgtggaccagggcgggcgcgaagtggcacgcggcctggtcaactacagtgcgctggaggcgcagaagatcctcggtcagccgacggatgccatcgaggccttgctcggctacgtggatgggccggagctggtgcatcgcgacaatctggttctggtctga

SEQ ID NO: 364862 - DNA, 465 bp, Pseudomonas aeruginosa; identical to SEQ ID NO: 320461

SEQ ID NO: 364863 - DNA, 276 bp, Pseudomonas aeruginosa; identical to SEQ ID NO: 320460

SEQ ID NO: 364864 - DNA, 1497 bp, Pseudomonas aeruginosa
atgctgtcgcgggtcctcggtttcgtccgcgataccatcctggcgcggatcttcggtgccggcctcgccaccgacgcctttttcgtcgccttcaagctgcccaacctgttgcggcggatcttcgccgaaggggcgttttcccaggctttcgtgccgatcctggcagagtacaagaaccagcagggcgaggaggcgacgcggaccttcatcgcctacgtttccggcttgctcacgctggtgctggcgctggtcacggcgctcggcatcctcgccgcgccctgggttatctgggtcaccgcgccgggcttcgccgataccccggaaaagttcgccctgaccaccgacctgctgcgggtgacctttccttatatattgctgatctcgctgtcgtccctggccggcgcgatcctcaacacctggaaccgcttctcggtgccggccttcgtgccgaccctgctgaacgtcgcaatgatcggcttcgcgctgttcctcacgccttatttcgatccgccggtcatggtgctgggctgggcggtgctggccggcggcctgttgcagctcctctatcaactgccgcacctgaggaagatcggcatgctcgtgctgccgcgcctgaacctcagggacagcggcgtctggcgggtgatgaagctgatgctgccggcgatcctgggggtctcggtgagccagatctcgctgatcatcaacaccatcttcgcctcgttcctggcagccggttcggtgtcctggatgtactacgccgaccgcctgatggagctgccttccggcgtattgggcgtggcgctggggacgatcctcctgccgatgctggcgaagacctattcgaacaaggatcgccatgagtactcgcgcctgctcgactggggcctgcgcctgtgcttcctgctggtgctgccctgttcgctggccctggcgatcctcgccgaacctctgaccgtctcgctgttccagtacggcaagttcaccacggtggacgcggcgatgacccagcgcgcgctggtcgcctactccgtcggcctgctcggcatcatcctggtcaaggttctggcgccgggcttctatgcccagcagaacatccgtacgccagtgaagatcgcgctcttcaccctggtttccacccaactgatgaacctggccttcatcggcccgcttcagcatgccggcctggccctgtccatcggcctggccgcctgcctgaatgccggcctgctctactggcaactgcgcaagcagcgtctgtacctgccgcaaccgggctgggcgaagttcctggtcaagctggtggtcgcggtgctggcgatgtcggcggtgctgctggccacgatgcactggctgccggcctgggagcagggcgccatgctggagcgattcctgcgcctcggcctgctggtggttgccggtctcctggcctatttcggtatgctcgcgctgctgggtttccgcctgcgcgacttttcccgccgggcggtgctgtga

SEQ ID NO: 364865 - DNA, 939 bp, Pseudomonas aeruginosa
atgcagctgcttcgcggactacacaacctgcagcccctggccgggggctgcgtcgccaccatcggtaacttcgacggcgtccacctcgggcaccaggctatcctggcgcgtctgcgcgagcgctcgctggagctgggcgtacccagctgcgtggtgattttcgagccgcagccgcgcgagttcttctcccccgattcggcgccggtgcgcctgacccgcctgcgcgagaaactcgagttgctgcgtgggcagggcgtcgatgtggtgctctgcctggccttcaaccgccgcttgcgcgagctgtcggcagccgagttcgtccgccaggtcctggtcgatggactggcggtgcggcatcttgaagtgggcgacgatttccgtttcggctgcgaccgctccggtgacttcgccttcctggtgaacgccagtcgcgagcaggggttcaccgtcgaggcggccaccaccgtcgaactggacggtgtgcgggtgagcagcacgcgggtccgccaggccctggccgagggcgacctgcatctcgccgagcgccttctggggcgtcccttcagcctgagcggacgggtcctgcatggacagaaactcggccggcaactgggctcgcccacggccaacattcaactgaaacggcgcaaggcgccgttgaacggggtctacctggtcagtacgctggtcgatggccagcgttgccagggggtggcgaacatcggcacccgcccttcggtgaacggcgacggccgtccccatctggaagtgcacctgctcgatttcgccggcgatatatacggccggcatctgcaggtgaccttccaccagaagctgcgcgacgagcagcgttttgcctccctggaggcactcaaggcggcgattctcgcggatatcgccgccgcccgggcctactggctgggccaaccgcttgattga

SEQ ID NO: 364866 - DNA, 2832 bp, Pseudomonas aeruginosa
atgaccgactacaaagcgacgctaaaccttccggaaaccgccttcccaatgaaagccggcctgccccagcgcgagccggaaaccctgaagttctggaacgacatcggtctgtaccagaagctgcgggccattggcggcgaccgtccgaagttcgtcctgcacgatggccctccgtacgccaacggcagcattcacatcggtcacgcggtcaacaagattctcaaggacatcattgtccgctccaagaccctggcgggctacgacgcgccctatgtgccgggctgggattgccacggcctgcccatcgagcacaaggtcgagaccacccacggcaagaatcttccggcggacaagacccgcgaactgtgccgcgaatacgcggccgagcagatcgaagggcagaaggccgacttcatccgcctgggcgtgctcggcgagtgggacaacccctacaagaccatgaatttcgccaacgaggcgaacgaaatccgcgccctcgcggaaatggtcaagcaggacttcgtgttcaagggcctgaagccggtcaactggtgcttcgactgtggttcggcgctggccgaggccgaggtcgagtacgccgacaagaagtcgccgaccatcgacgttggcttcccggtggcggatgccgacaagctggccgcggccttcggcctggcggccctggacaagccggcgcagatcgtcatctggaccaccacgccctggaccatcccggccaaccaggcactgaacgtgcatccggagatcgactacgcgctggtcgatgccggcgatcgctacctggtgctggccgaggccctggtcgagtcctgcctggcgcgctaccagcgcgagggcaaggtggtcgccaccgccaagggcgaggcgctggagctgatcaacttccgccatccgttctacgagcgcctgtcgccggtgtacctggccgactacgtggccctcgacgccggcaccggtatcgtccactcatcaccggcctacggcgaagacgacttctacacctgcaagcgctacgggatgagcaacgacgacatcctcagcccggtgcagagcaacggcgtctacgtcgactcgttgccgttcttcggcggccagttcatctggaaggccaaccccaacgtggtggccaagctggaagaggtcggcagcctgctggcccacgaaaccatcaatcacagctacatgcactgctggcggcacaagacgccgctgatctatcgcgccaccgcgcagtggttcgtcggcatggacaagcagcccaggcagggtgcttccctgcgcgagcgagcgctggaagccatcacccagaccgaattcgtcccgggctggggccaggcgcgtctgcacggaatgatcgccgggcgtcccgactggtgcatctcgcgccagcgcaactggggcgtaccgatcccgttcttcctgcacaaggccagtggcgaactgcatccacgcaccgtggagctgatggaagaggtcgcgcagcgagtcgagaaggaaggcatcgaagcctggttcaagctcgacgctgccgagctgctcggcgaggacgccgcgcagtacgagaagatcaacgacaccctggacgtctggttcgactccggcaccacccattggcacgtgctgcgtggttcccaccggatcggccatgccagcggcccggtcgccgatctttacctggaaggttccgaccagcatcgcggctggttccactcctcgctgctgaccggctgcgcgatcgacaaccatgcgccgtaccgccagttgctgacccacggtttcaccgtcgacgagtccggccgcaagatgtccaagtcgctgggcaacaccgtggtgccgcagaccgtcatcgataccctgggcgccgacatcctgcgcctgtgggtggcttcgaccgattactcgggcgagatcgcggtatcccagcagattctccagcgtagcgccgatgcctaccggcggatccgcaataccacgcgcttcctgctgtccaacctgaacggtttcgatccggccacggatctgctgccgccccaggaaatgctggccctggatcgctgggcggtcgatcgcgccctgctcttgcagcgcgagatcgaagaggcgtaccgcgagtaccgcttctggaacgtctattccaaggtgcacaacttctgcgtacaggagctgggcgggttctacctggacatcatcaaggaccgccagtacaccaccggcgccaacagcgtcgcccggcgctcctgccagaccgcactgttccacatcgccgaggccctcgtacgctggatcgccccgatcctggcgttcaccgccgaggaagtctggaagttcctgcccggcgagcgcgccgagtcggtaatgctcgccacctggtacgacggcctcagcgaactgccggccgacgtgacactgaatcgccagtactgggaacaggtcatggcggtgaaggccgcggtcaacaaggagctggagaaccagcgcgcggccaaggccgtgggcggcaacctgcaggccgaggtcaccctgtatgcggaagacgcgctgcaggtccaattggccaagctgggcaacgagctacgcttcgtcctgatcacctcgaccgcgaccctggcgccgctgtcggcggctccggccgacgcggtggacagcgaagtcgccggcctcaagctgaaagtggtcaagtcgacccacgccaagtgcggtcgttgctggcaccatcgcgaggacgtcggtcagcacgctgcgcatcctgacctgtgcggtcgctgcatcgagaacatcgaaggcagcggcgaggttcgccactatgcctga

SEQ ID NO: 364867 - DNA, 510 bp, Pseudomonas aeruginosa
atgcctgacgtcgatcgtttcgggcgcttgccctggttgtggatcaccgtgctggtgttcgtcctcgaccaggtcagcaaggcgttcttccaggccgaactgagcatgtaccagcagatcgtggtgatccccgatctgttcagctggaccctggcctacaacaccggtgccgccttcagcttcctggccgacagctcgggctggcagcgctggctgttcgccctgatcgccatcgtcgtcagcgcgatcctggtggtctggctgaaacgcctgaagaaaggcgagacctggttggccatcgccctggcgctggtgctcggcggcgccctgggcaacctctacgaccgcatggtccttggccacgtggtggacttcatcctggtgcactggcagaaccgctggtacttcccggcgttcaacctggccgatagcgccatcaccgtcggcgccgtcatgctggcgctcgacatgttcagatcgaagaaatccggagaagccgcccatggctga

SEQ ID NO: 364868 - DNA, 441 bp, Pseudomonas aeruginosa
atggctgagtcgacccgcattggccaggagagccgcgtcaccctgcatttcgccctcaagctggaggacggcaacgtcgtcgacagcaccttcgacaagcagccggcctcgttcaaggtcggcgacggcaacctgctgccgggcttcgaacaggcgctgttcggcttgaaggctggcgacaagcggaccctgagcattcttcccgaacagggcttcggccagccgaatccgcagaacgtgcagatcatgccgcgcgaccagttccaggacatggagctggccgagggcctgctggtgatcttcaacgacgcggccaagaccgaactgccgggcgtggtcaaggcgttcgatgagcagcaggtgaccgtcgacttcaatcatccgctggccggcaagaccctggccttcgaagtcgagatcattgacgtccagccggcctga

SEQ ID NO: 364869 - DNA, 945 bp, Pseudomonas aeruginosa
atgcaaatcaaactcgccaatccccgcggcttctgcgccggcgtggatcgcgccatcgagatcgtcaaccgtgccctcgatgtcttcggcccgccgatctacgtgcgtcacgaggtggtgcacaacaagttcgtcgtggacaacctgcgccagcgcggcgccatcttcgtcgaggaactcgatcaggtgccggacaacgtcatcgtcatcttcagcgcccacggcgtttcccaggcggtccgcaaggaagccgaggggcgcggcctgaaggttttcgacgcgacctgcccgctggtgaccaaggtgcacatggaagtggtgcgctacagccgcgacggccacgaatgcgtgctgatcgggcatgaagggcaccccgaggtggaaggcaccatgggccagtacgatgccagcaacggtggtgccatctacctggtggaggacgaggccgacgtcgccgcgctggaggtgcgcaagcccgaagccctgcactacgtgacccagacgaccctgtcgatggacgacacctcgaaggtcatcgatgccctgcgcgccaagttcccgcagatccagggaccgcgcaagaacgacatctgctatgccacccagaaccgccaggatgccgtgaaggaactggccgaccagtgcgacatggtcctggtggtgggcagccccaacagttccaactccaaccgcctgcgcgaactcgccgagcggatgggcacgccggcctacctgatcgacggcgctgaggacatgcaacgcggctggttcgacggtgtgcgtcgcatcggaatcaccgcaggcgcttccgcgccggaagtgctggtgcgcggcgtgatcgcccagctacgcgagtggggggcgtcggaggagcaggaactggaggggcgggaggagaacattaccttctcgatgcccaaggaactgcgggtcaaggctttgtga

SEQ ID NO: 364870 - DNA, 426 bp, Pseudomonas aeruginosa
atgaggacaagacagaagggcttcacgttgctggaaatggtggtggtagtggcggtgatcggcatcctcctcggcatcgccattcccagttaccagaactacgtgatccgctccaaccgcaccgaggggcaggcgctgctctcggacgcggccgcgcgccaggaacgctactactcgcagaaccccggggtcggctacaccaaggacgtggccaagctgggcatgagttcggccaactcgccgaacaacctgtacaacctcaccatagcgacgcccaccagcaccacctataccctgaccgccacgccgatcaactcgcagacccgcgacaagacctgcggcaagctgaccctcaatcagctcggcgaacgcggcgcagccggcaagaccggcaacaacagcaccgtcaacgactgctggcgctga

SEQ ID NO: 364871 - DNA, 348 bp, Pseudomonas aeruginosa
atgaaagtgctgcctatgctgctggccctggccgttcccggcctctgctgggccgaagatccccagaccttcgaaggcgctggcgtggtcttcgaagtccaggtcgagaagaacctggtggacatcgaccaccggctctaccgcctgcccaacagcaccgtcaggaacggcatgcccagcctgttccaggtcaagccgggctccgtggtgtcctactctggcaccgtcagccagccgtggtccaccatcaccgatatctacattcacaaacagatgagcgaacaggagctggccgagatgatcgagaaagaacagccccgccaggacggggaggagcagccccgatga

SEQ ID NO: 364872 - DNA, 3492 bp, Pseudomonas aeruginosa
atgaaatcggcactcaaccagatcggcaagacctcgctggcagccgcgctcagcggcgccgtcctgctctccgcccagaccacccacgccgccgccctgtcggtcagccagcagccgctgatgctgatccagggcgtcgccccgaacatgctggtgactctcgacgactcgggcagtatggcttatgcctatgcaccggatagcctggtcaacagccgcaacaacgtctatttcgcgtcgaacagctacaacccgatgtacttcgacccgaatacccagtacaagctgccgaaaaaggtgaccctttccaatggccagatccaggtgcaggactattccaagcccagcttcaccgcggcatggcgcaacggtttcactcaggaaggccgggtaaacctttcccgtgactacaggccaacggtgcagtaccagggcggatcgggagcaggcaccgagtccagcatcgactggtacggggctcctgccttctactaccaatacagcgggggccgcggttgcagcctcaccacttcgagttgctacacccgtgtggaaatcagcggcgcggcccagcagcagaacttcgccaactggtactccttctatcgtacccgcgccctggccacccagaccgccgctaacctggcgttctacagcctgcctgaaaacgcccggatcagttggcaactactgaacagttcctcgtgcctgatcggcagtggctccagtaactgttacaacaactacctgagagacttcaccgggcaacatcgggtgaacttcttcaactggctggagaacctgtcggtcggaggtggtactccgctgcgtcaggccatgactcgagcaggggagtttctcaagaagaccggcgtcaacggcccctatgcctatcgacctggtacccagacctcgccggaatacagctgccgtggcagctatcacattctgatgaccgatggtctttggaacaacgactcggccagcgtaggcaatgccgacagcacgagtcgtagcctccccgatggcaagagctacagcagccagacgccttacagggatgctgcgtccaataccctggccgaccaggccttccattactgggccaccgatgcccggccggatatcgacgacaatatcaagccgtacattccctacccggaccaggccaatccctcggcggagtactggaatccgcgcaacgatccggcgacctggcagcacatggtgacctataccctgggcctgggcctgaccaccagcctcaccagcccgaagtgggagggttccacctactccggcggctatgacgaaatcgccgccgggcgcctcagctggccgaacgcttcgaataaccatagcaacaacgtctatgacctgtggcacgccgcagtgaactcccggggcgagttcttcagcgccgactcgccggaccaactggtcgcggccttccaggacatcctcaaccgaatttcgggcaaggacctgccggcatcccgccccgccatcagctcgtccctgcaggaagacgacactggcgacaagctgacccgcttcgcctaccagaccagcttcgccagcgacaagaactgggctggcgacctgacccgctacagcctgaccacccaggacaaggccaccgtgcagaccaagctgtggagcgcgcagagtatcctcgacgcgatgcccaacggtggagctggccgcaagatcatgatggccggatccggtacctcgggcctcaaggagttcacctggggcagcctcagcgccgaccagcagcggcagttgaaccgcgatccggaccgcaacgatgtcgccgacaccaagggccaggaccgagtggccttcctgcgtggcgatcgcagcaaggagaacagcgacaacttccgcacccgcaactcgatcctcggcgatatcatcaactcctcgccggcgacggtcggcaaggcccagtacctgacctacctggcccagccgatcgagcccagcggcaactactccacgttcgcagaagcacagaaaacccgtgccccgcgggtatacgtcggcgccaacgacggcatgctgcacggtttcgataccgacggtaacgagaccttcgccttcatcccaagcgcggtcttcgagaagctccacaagttgaccgcccgcggctaccagggcggcgcccaccagttctacgtcgacggctcgccggtggtcgccgacgccttcttcggcggcgcctggcataccgtgctgatcggcagcctgcgcgccggcggcaagggtctgttcgccctcgacgtgaccgaccccgccaacatcaagctgctctgggaaatcggcgtggaccaggagcccgaccttggctacagcttccccaaacccacggtcgcccggctgcacaacggcaagtgggccgtggtcaccggaaacggttattccagcctgaacgacaaggccgcgctgctgatcatcgacctggagaccggggccatcacccgcaaactggaagtcaccggcaggaccggcgtacccaacggtctatccagccctcgcctggcagacaacaacagcgacggcgtagccgactacgcctacgccggcgacctgcaaggcaacctctggcgcttcgacctgatcgccggcaaggtcaaccaggacgatccgttcagccgagccaacgacggcccggcggtggcctcgagcttcagggtgtctttcggtggccagccgctctattcggcggtcgactccgccggcgcggcgcaagcgatcaccgccgcgccctcactggttcgccatccgacacgcaagggctacatcgtgatcttcggtaccggcaagtatttcgagaacgccgacgcccgggccgataccagccgcgcccagacgctctacggcatctgggaccagcaaaccaagggcgaagccgcgggcagcacaccccgactgacgcgcggcaacctgcagcagcagaccctggacctccaggccgactcgaccttcgcctcgaccgctcgcaccattcgcatcgccagtcagaacccggtcaactggctgaacaatgacggcagcaccaagcagtccggctggtatctggacttcatggtcaacggcaccctgaagggcgagatgctgatcgaggacatgatcgccatcggccaggtggtgctgctgcaaaccatcaccccgaacgatgacccctgtgccgacggcgccagcaactggacctatggcctcgatccctataccggcggtcgcaccagtttcaccgtgttcgacctggcacgccagggcgtcgtggactcgaaatccgactacagctacaacaagcagaacgtcgcggtatccggtaccgagcagaaaggcctgggaggcttgacgctgagcaccaacgaacagggcaatccggaagtctgctcctcgggcgaatgcctgaccgtgaaccccggtccgaacacccgtggccgccagaactggcgccccatcgaaggaaagaactga

SEQ ID NO: 364873 - DNA, 588 bp, Pseudomonas aeruginosa
atgaacaacttccctgcacaacagcgcggcgccacgctggtcatcgccctggcgatcctggtgatcgtcaccctgctggcggtctcgagcatgcgcgaagtggtactggaaagccgcatcaccggcaacgtcatcgaacagactcgcttgcagaacgccgccgagtccggactccgcgaaggcgagcggcgcttcgtcaacaccctgcgtccgccggagcccggcaccggttgtacggccgacaacgtggcccgcccctgcctgctggacctcgccgcgctgaacctgaagctggcggacacccaccagaatccggtcggcgtgctgaagggcatcgccaatacctggatgagttaccgcggcagcgacatcaccagcgcgaccaccgcgggcacgctctacagcgtgcagtggaacaacctgcccattccctcgggcggccaggtcaacgaagcggaaagccccgaatacggcaacctgatgcgcggcatcggcaccttctactacgagaccaatagcgtcgcgcgcaaccagaccaacagcgaaaccgtcctgcagaccgttctcgcccgtctctataccaactga

SEQ ID NO: 364874 - DNA, 825 bp, Pseudomonas aeruginosa
atgagcatgaacaaccgctcccgacggcaatcgggcctgtccatgatcgaactactggtggccctcgccatcagcagcttcctgattctcgggattacccagatctacctggacaacaagcgcaactacctgttccagcaaggccaggcaggcaaccaggaaaacggacgcttcgccatgatgttcctggaccagcaactggccaaggtgggtttccgtaggcgtgcggacgaccccaacgagtttgccttcccggcgcagcagaaaaccgcctattgcgaggcattcaaagccggctcgaccctggtgcccgccgtggtcaaggccggccagagcggattctgctaccgctatcaaccggcgccaggcgaagcctacgactgcgaaggcaactcgatcaccacccctagcgatcccttcgctaccgcccaggccatcaccgcacgcgttctgttcgttcccgcgaccgccgatgtccccggcagcctcgcctgctccgcgcagacaatcaaggaaaaaggccaggagatcgtcagcggcctggtcgacttcaagctcgagtacggcgtcggcccgaccatggccggcaaacgcgaggtggaaagcttcgtcgaacaggccaacatcgccgaccgtccggtgcgtgccctgcgctactccgcgctgatggccagcgacaagaacctgcgccagggcgacagcaagaccctggacgattggatcacgctctacccctcgtccaagaccagcctgcaaggcaacgacaaggaccgcctctaccagatcgccaagggcagccagacactcaggaatctcgtgccatga

SEQ ID NO: 364875 - DNA, 558 bp, Pseudomonas aeruginosa
atgctattgaaatcgcgacacaggtcgctgcaccaatccggcttcagcatgatcgaagtgctggtcgccctgctgctgatcagcatcggcgtgctgggcatgatcgccatgcagggcaagaccatccagtacaccgccgactcggtcgagcgcaacaaggcagccatgctcggcagcaacctgctggaaagcatgcgggcgagcccgaaggcgctgtacgacgtcaaggaccagatggccacgcaatccgacttcttcaaggccaaggggtcggcgttccccaccgcgccgtcctcctgcacgccattgcccgacgcgatcaaggaccgcctgggatgctgggcggaacaggtgaagaacgaactgccaggcgctggcgacctgctgaagagcgactactacatctgccgcagctcgaagccgggcgactgcgacggcaagggctccatgctggaaatccgccttgcctggcgcggcaagcaaggcgcctgcgtcaacgccgccgacagcagcgccgacacctccctctgctactacaccctcagggtcgagccatga

SEQ ID NO: 364876 - DNA, 507 bp, Pseudomonas aeruginosa
atgtcatatcgttccaactcgaccggcttcaccctgatcgagttgctgatcatcgtcgtcctgctggccatcatggcgagcttcgccattccgaacttcaagcagctgacagaacgcaacgaactgcagagcgccgccgaggaactcaatgcgatgctgcagtacgctcgcagcgaagccgtgtcccagaggcgcgcgatcagcatccaggcgctgaaggacaaggactggggcaagggcctgagcataggtgtcctggcctccggctcgatcgccgcgcccctgcgcaaacacgacggcttccgtgccgccacgctgacagcgaaggaaaagagcgccgtggaacatctgaccttcacggccaacggtaccctcgtaccgccaacggaacgaaccttcgccatctgccagaacggcaagaccgacgggggccgcgtgctgagcatcagccaggccggccggatccaactcgaaccttcctccaaggcgccccagtcatgctattga

SEQ ID NO: 364877 - DNA, 510 bp, Pseudomonas aeruginosa
atggtcgaaaggtcgcagagagcgttgacgctcaccgagctgctgtttgcgctggttctgctgggaatactgggaagcctggcgctgcccgggatggcagcctggctggacggcaatcgcgagcgaagtgtgttgcacgagctgagcgcgagcatccagctgggcagaacccatgccgtcgcctaccagcgcccggtgacgctctgtccgtcgaccgatggccgtcactgcggcagcgactggggagagggctggctgcttgcggaagacggtggggaacggcttctcgtgggacgcgcgcttgcaaagaaggaaaggctcctctggaaccgttcgaaccgcctcaggttcctccccagcggccagctcaacattcacaacgggcggtttctgctctgcggaaggcataccgttgcctggcaactgatcctcaaccggcagggccggctccgtaccgcgagcgccagggagaaccgggagaaacgtgagctatgcagcacttccggatga

SEQ ID NO: 364878 - DNA, 1095 bp, Pseudomonas aeruginosa
gtgtcggaaagagttgtggtagtgggcgctggcgtcatcggcctgttgaccgcccgggagctggcgctcgccggactgcgggtgaccctggtggagcggggcgagagtgggcgtgaggcatcctgggcgggaggcgggatcgtctcgccgctctatccgtggcgctacagcccggcggtgaccgccctggcgcactggtcgcaggacttctacccggccctggggcagcgtttgctcgacgagaccgggctcgatcccgaggtccataccgttggcctgtactggctggacctggacgaccagaccgaggcactgcagtgggcacgcaaccacacccggccgttgagggacgtgccgatcgaggaggcctacgcggcggtgcccgggctgggcgcaggcttccagcgggcggtctacatgtcgggcgtggccaatgtgcgcaatcctcgcctggcgcgctcattgcgggcatccctgcaacaattcgccaatctcgaactgcatgaacagacggaggtgcgcggctggttgcgcgacggcgatcgagtggtcggcgtggcgacctcgcgtggcgagatccgtggcgacaaggtgctgctggcggcgggcgcctggagcggcgagttgttgaagccgcttggcctggaactgcccgtggtaccggtgaaaggtcagatgatcctctacaagtgcgcggcggatttcctgccgcgcatggtgctggccaaggggcgctacgcgattccgcggcgcgacggccacatcctgatcggcagcaccttggaacattcgggcttcgacaagacgccgaccgacgaggcgcaggaaagcctcagggcgtctgcggcagaactgttgccggaactggcggacatgcagccggtggcccactgggcagggttgcgcccgggctctcccgaaggcatcccctatatcggtccggtgcctggcttcgacgggctctggctgaatactgggcactaccgcaacgggctggtcctggcaccggcgtcgtgccgtctgctggcggatctcatgagcgggcgggaaccgatcatcgacccggtcccctacgccccggctggtcgcctctga

SEQ ID NO: 364879 - DNA, 1338 bp, Pseudomonas aeruginosa
atgagccgacaaaaagccctgatcgtcgacgatgaaccggatatccgcgaactgctggaaatcactctcggccgcatgaagctggacacccgcagcgcccgcaacgtcaaggaagcccgcgagttgctggcccgcgagccgttcgacctgtgcctcaccgacatgcgcctgccggacggcagcggcctcgatctggtccagtacatccagcagcgccatccacagaccccggtggccatgatcaccgcgtacggcagcctggacaccgcgatccaggcgctcaaggccggtgccttcgacttcctcaccaaaccggtcgacctcggtcgcttgcgggagctggtggcaaccgccctgcgcttgcgcaacccggaagccgaggaagcgccggtggacaaccgcctgctcggcgagtcgccgccgatgcgcgccctgcgcaaccagatcggcaagctggcgcgcagccaggcgccggtctacatcagtggcgagtccggtagcggcaaggagctggtggcgcgcctgatccacgagcaggggccacgtatcgagcggccgttcgtgccggtgaactgcggcgcgattccctccgaactgatggaaagcgagttcttcggccacaagaaaggcagcttcactggcgctatcgaagacaagcagggcctgttccaggccgccagcggcggcaccctgttcctcgacgaagtcgccgacctgccgatggccatgcaggtcaaactgctccgggcgatccaggaaaaggccgtgcgcgcggtcggcggccagcaggaggtcgccgtcgacgtgcgcatcctctgcgccacccacaaggacctcgccgccgaagtcggcgccgggcgcttccgccaggacctctactaccgcctcaacgtcatcgagctgcgcgtaccgccgctgcgcgaacgccgcgaggacatcccgctgctcgccgaacgcatcctcaagcgcctggccggcgacaccggcctgccggccgccaggctgaccggcgacgcacaggagaagctgaagaactaccgcttcccgggcaacgtccgcgagctggaaaacatgctggagcgcgcctacaccctgtgcgaagacgaccagatccagcctcacgacctgcgcctggccgatgcgccgggtgccagccaggaaggcgccgcgagcctgagcgaaatagacaacctcgaggactacctggaagacatcgagcgcaagctgatcatgcaggcgctcgaggagacccgctggaaccgcaccgccgcggcccagcgcctgggcctgacgttccgctcgatgcgctaccgcctgaaaaagctgggcatcgactga

SEQ ID NO: 364880 - DNA, 1593 bp, Pseudomonas aeruginosa
gtgcgcgctgaacggctacggctgagcgaggagcaggggcaacgcatcctccgtctgtaccacctgtaccgcctgaccatcggcctggtactggtcctgctaatctccagcgaactggaagatcaggtcctcaagctcgtccaccctgaactgttccatgtcggcagttggtgctacctggtcttcaacatcctggtcgcgctgttcctgccgccgtcgcggcaattgctgccgatcttcatcctcgcgctcaccgacgtgctgatgctttgcggcctgttctacgcaggtggcggcgtacccagcggcatcggcagcctgctggtggtggcggtggccattgccaacatcctgctgcgcgggcgcatcggcctggtcatcgcggcggcggccagcctcggcctgctctacctgaccttcttcctcagcctgagcagtccggacgccaccaaccactacgtccaggccggcggcctcggcaccctgtgcttcgccgccgcgctggtgatccaggctctggtgcggcgccaggagcagaccgaaacgctggccgaagaacgcgccgagacggtcgccaacctggaggaactcaacgcattgatcctgcagcgcatgcgcaccggcatcctcgtggtcgatagccgtcaggccatcctcctcgccaaccaggccgccctcggcctgctcaggcaggacgacgtgcagggcgccagcctcggccgccacagcccgatgctgatgcactgcatgaagcaatggcgcctgaatcccagcctccgtccgccgacgctcaaggtggtgccggatggcccgacggtgcaacccagctttatcagcctcaaccgcgaagacgaccagcacgtgctgatcttcctcgaagacatttcgcagatcgcccagcaggcgcagcagatgaagctggccggtctcggccgcctgaccgccggcatcgcccatgagatccgcaacccgctgggcgcgatcagccacgccgcccaactgctgcaggagtcagaggaactggatgccccggaccgacgcctgacgcagatcatccaggaccagtcgaagcggatgaacctggtcatcgagaacgtcctgcagctctcccgtcgccgccaggccgaaccgcagcagctcgacctgaaggagtggcttcagcggttcgtcgacgaataccccggcaggctgcgcaacgacagccaactgcacctgcagctcggtgccggcgacatccagacccgcatggacccacatcagttgaaccaggtgctgagcaacctggtgcagaacggtcttcgctacagcgcccaggcgcacgggcgcggccaggtctggctgagcctcgcgcgcgacccggagagcgacctgccggtgctggaaatcatcgacgacggtcccggcgtaccggcggacaaactgaacaacctgttcgaacccttctttactacagaaagcaaaggcaccggcctgggcctctatctctcccgcgagctctgcgagagcaaccaggcacggatcgactaccgcaatcgcgaggaaggcggcggctgcttccgcatcaccttcgcccacccgcgcaaactcagctga

SEQ ID NO: 364881 - DNA, 246 bp, Pseudomonas aeruginosa; identical to SEQ ID NO: 324316

SEQ ID NO: 364882 - DNA, 1026 bp, Pseudomonas aeruginosa
atgcaagtgaaacacctgctgctgatcgccatcctcgccctcaccgcagcctgctcctcgaacaaggagactgtcgacgagaacctgagcgagagccagctgtaccagcaggcgcaggacgacctcaacaacaagagctacaacagcgccgtcaccaagctgaaagccctcgaatcgcgctatcccttcggccgctacgccgagcaggcccagctcgagctgatctacgccaactacaagaacatggagcccgaagccgcccgcgccgccgccgaacgcttcatccgcctgcatccgcagcaccccaacgtcgactacgcctactacctcaagggcctgtcctccttcgaccaggaccgcggcctgctggcgcgcttcctgccgctggacatgaccaagcgcgacccgggtgccgcccgcgactccttcaacgagttcgcccagctcaccagccgcttccccaacagccgctacgccccggacgccaaggcgcgcatggtgtacctgcgcaacctgctggcggcctacgaagtgcacgtcggccactactacctgaagcgccaggcctatgtcgccgccgccaaccgcggtcgctacgtggtggagaacttccaggaaaccccggccgtcggcgatggcctggcgatcatggtcgaagcctaccgtcgcctgggtctcgacgacctggccagcaccagcctggaaaccctcaagctcaactatccggataacgccagcctcaaggatggcgagttcgtcgcccgcgaaagcgaggccgacacccgctcctggctggccaaggccaccctgggcctgatcgaaggcggcgagccgccgccgcacatggaaacccaggccgccaaggacgtgatcaagcagtacgaggatgccgagcgggagatccccgccgaactgaagccggaaaaccaggatcacagcgccgacgacgagaagccggagagcgatgacgacgaagactccggccgctcctggtggagctacatgaccttcggtctcttcgactga

SEQ ID NO: 364883 - DNA, 963 bp, Pseudomonas aeruginosa
atgtccgatatgattcaacgcgcggccgaggtgccgttcgagctgggtggccagcgtctcgaccagatcgccgcccagctttttcccgaacactcccgctcccgtctggccggctggatcaaggacggacgcctgaccgtcgacggcgccgtgctgcgcccgcgcgacatcgtccacagcggcgcgcaactggtcctggaggccgagcaggaagcccagggcgagtggctcgcacaggacatcgagctggaaatcgtctacgaggacgagcacatcctggtgatcgacaagcccgccggcctggtggtccatccggctgccggccatcaggacggcaccctgctgaatgccttgctctaccatgtcccggacatcgccaatgtgccgcgcgccgggatcgtccaccgcctggacaaggacacgaccggcctgatggtggtggccaagacgctggaggcccacaccaagctggtggcgcaactgcaggcacggtcggtcagccgcatctacgaggcgatcgtgatcggcgtgatcacctccggcggcaccatcgatgcgccgatcggacggcatggcgtgcagcggcagaagatggcggtggtcgacgccggcaaggtggcggtcagccattaccgcgtgctggaacgcttccgtgcgcacacccatacccgggtcaagctggagaccgggcgtacccaccagatccgcgtgcacatgagccatatcggctatcccctggttggcgatccggtctacggtgggcgcttcaggattcccccggtggccagccagaccctggtccagactcttcgcgagttcccccggcaggcgctgcacgcgcgcttcctcgaactggatcacccggccaccggcgtgcgcatgaagtgggagtcgccgctgccggaagacttcctctggctgctcagcctgttgcgccaggatcgcgaggcgttcgtcggatga

SEQ ID NO: 364884 - DNA, 729 bp, Pseudomonas aeruginosa
atgaacgcctggctgacccccgactggccggcgccggcccgtgtgcgggcctgcgtgaccacgcgcagtggcggggtcagccaggcacccttcgacagtctgaaccttggcgcccacgtcgacgacgatccgcgcgccgtggaagaaaaccgccgacgcctgaccgagcgtctggaatgccggccgagctggttggaccaggtgcacggagtgacggtggtggaggccgacccgagccgggtgctcagggccgacgccagctggagcgcgatgccgggcgtcgcctgtacgatcatgaccgccgactgcctgccggcgttgttctgcgaccgctcgggcacccgcgtggccgcggcccatgccggctggcgcgggctggcggcgggcgtgctggaggcgacggtggacagcctgggcgtgcccggcgacgaactgctggtctggctggggccggcgatcggcccgcaggccttcgaggtcggcggcgaggtccgcgatgcattcgtcgctgcgcacgccgaggcgcgctcggctttcgtacctagcgccaatccgggccgcttcatggccgacatctaccgactcgcgcggatccgcctgggcgcccatggcgtcaccgccgtgcatggcggtggcttctgcaccttcagcgataccgcgcgcttctattcctaccgccgctcgtcgcgtaccggccgttttgccagcctggtctggctccaggactag

SEQ ID NO: 364885 - DNA, 2565 bp, Pseudomonas aeruginosa
atgcgaatagaccgtttgaccagcaagctgcaactggcgctctccgacgcccagtccctggccgttggccatgaccatccggccatcgagccggtgcacctgctttccgccctgctcgagcagcaaggcggttcgatcaagcccctgctgatgcaggtcggcttcgatatcgccgccctgcgcagcggcctcaacaaagaactcgacgcgctgccgaagatccagagcccgaccggcgacgtgaacctgtcccaggatctcgcacgcctgctcaaccaggctgaccgcctggcccagcagaagggcgaccagttcatctccagcgagctggtattgctggccgcgatggacgagaacaccaggctcggcaagctgctgctcggccagggcgtgtcgcgcaaggcgctggagaatgccgtggccaacctgcgtggcggcgaagcggtgaacgacccgaacgtcgaggagtcgcgccaggcgctggacaagtacaccgtcgacatgaccaagcgcgccgaggaaggcaagctcgacccggtgatcggtcgcgacgacgagatccgccggaccatccaggtcctgcagcggcggaccaagaacaacccggtgctgatcggcgaacccggcgtcggcaagaccgccatcgtcgagggcctggcccagcgcatcatcaacggcgaagtgccggacggcctcaaggacaagcgcctgctggccctggacatgggggcgctgatcgccggtgccaagttccgcggcgagttcgaggaacgcctgaaggcggtcctcaacgaactgggcaagcaggaaggccgggtcatcctgttcatcgacgaactgcacaccatggtcggcgccggcaaggcggaaggtgccatggacgccggcaacatgctcaagccggctctggcgcgcggcgagctgcactgcgtcggtgctactaccctcgacgagtatcgccagtacatcgagaaggatgccgcgctggagcgccgcttccagaaggtgctggtggacgaaccgagcgaggaagacaccatcgccatcctccgtggtctcaaggaacgctatgaagtgcaccacggggtgagcatcaccgacggcgcgatcatcgccgcggccaagctgtcgcaccgctacatcaccgatcggcaactgccggacaaggccatcgacctgatcgacgaggccgccagccgcatccgcatggagatcgactccaagccggaggaactggatcgtctcgaccgtcgcctgatccagctgaagatcgagcgtgaggcgctgaagaaggaagacgacgaagccaccaggaagcgcctggccaagctggaggaggacatcgtcaagctcgagcgcgaatacgccgacctcgaggagatctggaagtccgagaaggccgaggtgcagggctcggcgcagatccagcagaagatcgagcaggccaagcaggagatggaggcggcgcggcgcaagggcgacctcgagagcatggcgcgcatccagtaccagaccatcccggacctggaacgcagcctgcagatggtcgaccagcacggcaagaccgagaaccagttgctgcgcaacaaggtgaccgacgaggaaatcgccgaagtggtttccaagtggaccggtatcccggtgtcgaagatgctcgagggcgagcgcgagaagctgctgcgcatggagcaggagctgcatcggcgagtgatcggccaggacgaggcggtagtcgccgtgtccaacgccgtgcgccgttcgcgcgccggcctcgccgatccgaaccggccgagcggctcgttcctcttcctcggcccgaccggggtgggcaagaccgagttgtgcaaggcgctggccgagttcctcttcgataccgaggaggcgctggtgcggatcgatatgtccgagttcatggagaaacactcggtggcccgcctgatcggcgcgcctccgggctacgtcggcttcgaggaaggcggctacctgaccgaggcgatccgccgcaagccttactcggtggtgctgctggacgaggtggagaaggcccatccggatgtattcaacattctcctccaggtgctcgaggacggacgcctgaccgacagtcacgggcgtacggtggacttccgcaacaccgtggtggtgatgacctccaacctcggttcggcacagatccaggagctggccggcgaccgcgaggcgcaacgtgccgcagtgatggacgcggtcaatgcgcacttccgtccggaattcatcaaccggatcgacgaagtggtggtattcgagccgctggctcgcgagcagatcgccggcatcgccgagatccagctcggtcgcctgcgcaagcgcctggccgagcgcgagctgagcctggaactgagccaggaggcgctggacaagctgatcgccgtcggcttcgacccggtctatggcgcacgcccgctgaagcgggccatccagcgctggatcgagaacccgctggcgcaactgatcctggccggcaaattcgcgccgggtgccagtatctcggcgaaggtggaaggcgacgagatcgtcttcgcctga

SEQ ID NO: 364886 - DNA, 1302 bp, Pseudomonas aeruginosa; identical to SEQ ID NO: 328571

SEQ ID NO: 364887 - DNA, 783 bp, Pseudomonas aeruginosa
atggccgaggtcaccgcctggcaggccaggccgctcgagcccatgtatccggtcgtgttctttgacgcgctgcgggtcaagatcagggaggatgctgtcgtgcgcaacaaggccgtctatctggccctgggcgtgctacccgacggcacacgcgatatcctgggtttgtggattgaaggcaccgaaggcgccaagttctggatgaaggtcttcaacgacctgaagacccggggcgtgggcgatatcctgatcgccgtgactgacgggttgaagggtatacccgaggcgctggccgcggtgttcccggccaccacactgcaaacctgcatcgtccatctgatccgcaacagcctcgattacgcgagctggaaggatcgcaaggcgctggccgccgcgatccgaccgatctataccgctgtcagtgctgaagcggccctggccgcgcttgacgcctttgccgatgggccgtggggtcagaagttccccaccgtctgcgcggcatggcgcaatgcctgggatcgcgtgattccgttcttcgcctttgcgccggagatccgcaaggtgatctacaccaccaacgccatcgagaatgtcaactcgcagctacgcaagatcatcaagacccggggccatttccctactgacgaagccgcctccaagttgatctggctcgcgctgcgaaacatcaccgccaaatggagccgatccgctcacgactggaagcaagccatgaaccaattcgctatcctttacgctgaccgattcagtcgcccttccgtgtaa

SEQ ID NO: 364888 - DNA, 240 bp, Pseudomonas aeruginosa
atgaatcatgacgacatactgaataaccgggcggagctactccaagagcaaaacggggatgacagcgggagcctgtgccatgacgagctcatctttgcgctgcaggataaacatcacgccttctcccttggcttgagcaccgttcttcagtgcttgaaaatggccgagcatgaaggggtggtccccgaacttcccgagggctggtggagccggatggctaatcgatacaggctgaattga

SEQ ID NO: 364889 - DNA, 918 bp, Pseudomonas aeruginosa
atggatgtctacaagttgaagccagaggaaaccgatgagcgaccaatcgagcgcgaacgtttcgaagaagaaacgcgacgccaggagccttggttctccacctctgaaaatggtacggagggacatttcgctgtctgtcccgcctgcgacaatccagtacaaatcataggtctttatcatttgcccgccaatgtgactcgtccttatgggcgtcattacgctcgttcggttcgagatcttgccgaagcggatgaggaggcgcgagagaactgcccttatttcaaaccaagggtacaccaaaagacagagcgaaaagcctcggtagacggcacgcctctgaaaatactaaaaatactgatcgagcagttcgacagggttgtctacctgctgcggaaagaactgggtgtgaatatctctcaaaacctggctatccggatgctggaacagtacagaagggagaaaggatatctttatactggggcaacgctgaccaatatcccctggatatttgcctatatggctgattctcagagtcttttcggacagcttttacttgatgatgagcttatcaaggcagtctccactgaagtgtcagcagcctcgattgatgaatatggccgagtttcctcgaaggtggatgcgtcagggaggaaggagtatttcgatctcaatatgtgctttgtgaagcaccggtttcgtaaggacagccttgagggtgagttgatcgaggggatggagatgctggtttccacagagcggaaaggaaaggctatcgacatatataagaagtcgattgtatttaaccgtcagtatttccagcgtttgattgctttgcccgaggatcatccgcgtagagaccgtagcttggtcgaggcggcgcggagggtgctgggtgacttgctgcccggcgaacgatga

SEQ ID NO: 364890 - DNA, 219 bp, Pseudomonas aeruginosa; identical to SEQ ID NO: 333835

SEQ ID NO: 364891 - DNA, 180 bp, Pseudomonas aeruginosa; identical to SEQ ID NO: 336161

SEQ ID NO: 364892 - DNA, 843 bp, Pseudomonas aeruginosa; identical to SEQ ID NO: 333836

SEQ ID NO: 364893 - DNA, 663 bp, Pseudomonas aeruginosa; identical to SEQ ID NO: 333837

SEQ ID NO: 364894 - DNA, 285 bp, Pseudomonas aeruginosa
atgagagctctgaattcgctgacccagaacctgatcgacaacctgacccagatcctgcagaaccccgaagaagatgccctgcaaacgctcaggatatgcgctcctgtactgatcgaggagctgcagcagatacaactgagggcggtcgatcgccgagacatagtcccgcagataaagcagctcctggatgaatggctgcaacagcatccacagcctgatacggcccaacaggcgctcatcgaggccgtggaccgcgcggaaatcctacagcggaggcaagcgtga

SEQ ID NO: 364895 - DNA, 2952 bp, Pseudomonas aeruginosa
atggaattgcttcaattttttcgccgccgcgcccaaggacatgacgcggctattcaggaagggcagaacaccgctccacaagaagccaaagtccaagacgcactacgggaagaagccaccgagcgctatctggcgcgactggccgccatgggtattcctctgcccaacaccgggagcaagaatggcgccacgcaggctgaagcgtcacgcctctacgatcacgacccatcgttcgtcgacctgctgccctgggctgagtacctgcccgacgaacaggtgatgctcctggaagatgggcgttcgcgtgccgtcttcttcgagctggtgcccttgggcaccgagggccgcgaccccaattggatgcagaacgcccgggacgcattgaaagaagccctgcagaactccttcgacgagcacgaaacctcgccctggatcgtccagttctacgcccaggacgagatcagctgggacaatttccaggagcagttgaggcagtacgtccatcctcgagcgcgaggatcggccttcagcgagatgtacctggcgctcatgaagcatcacctggagggcatttcgaagccgggcggactgttcgtcgacaccgccgtcagcaagctgccctggcgaggacaacagcggcgcgtgcggatggtcgtctaccgccggatccgcaaggcggatgcgcagattcgcggacaggacccgacggcatatctgaaatccatctgcgagcgtatccaaggcggcctggcgaacgccggcatcgtcgcttcgcgcatgagcggccaggacgtcaggaactggttgattcgctggttcaacccgcacccggatcacctcggcaagaccgatgcggatctacgtcgcttctacgaactggtatgccggccggacgaaccgatcctgcaggacgagttgccgctggccgacggcaccgacttctcccagaacctgttctatcggcagcctgtttccgatgccacccagggcgtatggctcttcgatgccatgccgcaccgtgtgatcgtggtcgaccagttgaacaaggcgccgctgacaggccacttcactggcgagacgctcaaaggcgatggcctgaacgccctgttcgatcgcatgcccgaggacacgctgctgtgtatcaccatggtggtgacgccgcaggacatgctggaagggcatctgcagcagctctcgaaaaaggccgttggtgacacccaggcctcgatccacacccgcgaggacgtggccaccgttcgccgcctgatcggccgggagcacaagctctatcgcggttcgatcgctctgttcgtgcgcggccgcgaccatacccagctggaggagcgctgcatcaccctgagcaacgtgctgctcggcgccggccttgtgccggtcgaaccgcagaacgaagtcggaccgctgaacagctacctgcgctggctgccctgcaatttcgatccgaacgagaagcgagccctggagtggtacacccagatgatgttcgcgcagcacatcgccaacctgtcgcccatctgggggcgcaccaccggtaccgggcaccctggcttcacgctgttcaaccgtggcggtgcgccgttgaccttcgacccgttcaacaagctggaccggcagatgaatgcccacggcttcatcttcgggccaaccgggtccggcaagtcagcgtccctgaccaacctcatcagccagatgctcgccatgtacctgccacggatgttcgtcgcggaagcgggcaacagtttcggcctgctggccgacttcgccaagcggtttggcctctcggtccaccgggtccgcctcgccccgggctccggggtcagcctggcgccgtacgcggacgccatcaagctggtcgagagtcccgaccaggtgaaggtcctggatgccgaagacatcgaggcctcggactcggtccagggcagcaaggccgacctcgaggacgaccagcgagacatcctgggcgagatggagatcgtcgcccgcctgatgatcaccggcggcgaggaaaaggaagacgcgcgcctgacccgtgccgatcgcagcgccatccgccaggcgattctggcggcggccaggacctgcgccgccgcgaaccgcacggtgctgacccaggatgtgcgcgatgcgctctaccaggcctccaggagcgatggctccgcgccagaacgccgcgcgcgcctggccgaaatggcggaagccatgcagatgttctgcatgggtgccgacggcgagatgttcaatcgcgaaggcacgccctggcctgaagccgacctcaccgtggtggatttcgcgacttacgcgcgcgaaggctacgccgcccagctcgggatcgcctacatctcgctgctgaacaccgtgaacaacatcgccgaacgcgaccagttcaagggccggcccatcgtcaagatcaccgatgaggggcacatcatcaccaagcacccgctgctgctgccctacgccatgaagatcaccaagatgtggcggaaactgggcgcctggttctggctcgccacccagaacatcgacgacatcccagcctccggggcgccgatgcttaacatgatcgagtggtggctgtgcctgaacatgccccccgacgaggtagagaagatctccaggttccgcgagctgtcgccggcgcagaagtcgatgatgctctcggcccgcaaggaaagcggcaaattcaccgagggcgtgctcctggccaagggcaaggagtacctcttccgtgtggttcccccgagtctctacttagccctggccatgaccgaaaacgaagaaaagaaccagcgctacaacatcatgcaagccaccggctgcgacgagctcgaggcggccttgcaggtcgcagcggatctcgacaaggcgcgcggcctgccacccttccccattattttcccagaccaaccggcagtggagtgccaggacgaatga

SEQ ID NO: 364896 - DNA, 444 bp, Pseudomonas aeruginosa
atgcaacagcagacttggactaacccccttcttcgtctctgcgccggcctggcctgcgcgctggttctggcagcgtgctccaccagcaaggaggagatgctgccccacggcgaggccaacatgctcgacgtctgggagcgaggtgcgaccagctcgataggcaacagccgtggccggctgctcctcgatgccaggcaaacgctgcggcgcccaatcgatccgcagcaggctgcctccgcgaatgaccaggccgactacacccgcacggccagcaacgagatccacagccagttcaaacgactgcccaatcccgacctggtcatgtatgtgttcccgcacctggccggcagcgatcccgccccggtcccgggctacaccaccgtgttccccttctaccagcgagtccagtacgccatgccgggcgagcgcacggaggcctactga

SEQ ID NO: 364897 - DNA, 1506 bp, Pseudomonas aeruginosa
gtggcgctgaccggtaatcccctcctgaaattgctggtcatccccgtcgtgatcggcgccatcctgatcggcgtgagcatgatgggcaagaaggaaagcgcgcaatcacaaggcgccgcaaccccgacggtaacgtcggaagaagcggcaaccctgggcatcgacggcgacacacccgccgacacactacgcaccatcgtggcggaaagccggcagctcaaggaccagatcagcaaggtcatccaggagaatgactcgctcaaagctgccaatgagaacctgcagggccgcctgcgcagcatcgatcagaacatcgagcagaagctcaacaacaccgcccaggagctgcagcaacagcaggagaaccgtagccagacgatcctggaccaggtacagaaacggctcgagaacctaacccacgttcccgaggccggcgacaccgacctgcccgtaggattcggcgtgcgaccagaggatggccagcactttcagggagcgggctcgtcttcatcggacatcgtctggatcgagccccaggacgcccgcgcagtcgatgccaatggccagccgctggccgccggctccaccacccaaccgagcggattcagcttcccgacctccttcggcaatgcggtcgatcgcggccagaacgcgctggagcggatcgatgacgggctgcaccccgtcggccaacagcgatccgacctcgagaaccgcaagctcgtccgcaagacctacacgctgccgcagaactcgacgctcatgggctcggtggccatgtctgcgctgatcggtcgtgtgccggtcgacgggacggtcaatgatccttacccgttcaaaatcctcataggcccggacaacctcaccgccaacggcatcgagctgccggacgtcgccggcgcggtagccagcgggaccgcctcgggcgactggacactctcctgcgtgcgtgggcagatccgcagcctcacgttcgtgttcaacgacgggaccgtgcgcaccttcccggcgccggccgaggaggtgaatgacaaccagagcaacaacaaccagaccgccagcgccgaccagaaaaccatccagggcggcctcggctggatcagcgacccctacggcatcccctgcatcgccggtgatcgccgatccaatgccaaggagtacctgggcaatcagagcctactcacggctgccggggccggcatcgccaagctcctggacgccgacgagaacaacaccagtaccgtcttcagcggcaacggcaccagcttcgggacgaccggaaccaacagcaactcggccctcaacagcatcctctccggcggcgtcggcgatatccggcagtggatgaacaagttgtacggggaggccttcgccgccgtctacgtgcagccaggtgcgcgggtcgccgtgcatctcgatcagcaactggcgatcgactatgaactcaagggccgcaaggtcgattacagctctggagccgctcatgcaacagcagacttggactaa

SEQ ID NO: 364898 - DNA, 885 bp, Pseudomonas aeruginosa
atgatccggaagtcgacaggctcgctcttgctaatgcttgccctacccacactggcccacgcggtggagattctgcgctgggagcgcattccgttggccattccattgacggtcggccaggaacgcattgtctttgtcgacagaaacgtgcgagttggcgttcctcgggatctgcagggcaagctgcgcgtccagagtaccggcggcgcactctacctgctcgccaacgagccgattcctccagcgcgcctgcgcctgcaggacgcgaccaatggcgagcagatgctcatcgatatcgccgcctccgaggcagcggccgatcaacagccgcgcgagccggtcaggatcgtcgccggcgagcccgtggctccgcactatggccagccccgggaagcccagccatcggcagcagcgaaacagaccgcgcaggcagaagcaccgaaggccgtgccgcgcgaaacgcccgtccccgtggttctgacgcgctatgcggcgcagatgctctatgccccacttcgcacggtggaaccggtggatggagtcggtcaggtgcgcgtcaagcgacagctcgacctgaataccctgctccccagtctgcccatcacggctaccgccttgggcgcctggcggctggacgactactacgtcacggcggtgaagctgcagaacgccagcgcccagcacctggccctggatcccagggacctgatgggcaatttcatcgccgcaaccttccagcacccgtacttgggaccccggggcgacgcttccgacaccaccaccgtgtatctggtgacgcgcggccgcggccttgccgacgcgctcctgccctccgccatcagccagatcgatcccaaaggaggccgtcgtggcgctgaccggtaa

SEQ ID NO: 364899 - DNA, 660 bp, Pseudomonas aeruginosa
atgagtttcagaaaacacaccgcgcaacagcaggctcacatcaacacgttccggttcatcaccggcttcttgtgcatggtcatcgtggtgctggcctactgcgtctgggaagcccgcaaggacctctggatccacattccgcccgacttgcgttcagggagcacccggttgtggtgggacattccgccggagagtgtctatgcattcggcctctacatcttccagcaggtacagcgttggcccaaggacggcgaggtggactacaagggaaacctgttccgctacgccgcctacctcactccctcctgcaaagtcttcctggagaaagacttcgagtttcgtcgtaacgccggcgagctcagggggcgcgagcgcaccacctcggaaatccccggtcggggcattggcgagagcgatggccgcgtgatccagcactcgatcaatgactggaccgtcaacctggacatggacagcacggagtattacgccggcgagaagatcaagcgggcgctggcccgctacccgttgcacgtcatccgcgccgacgtcgacccggagaccaatcccttcggcctgcagtgggactgctactccgacacgcctcaacgtatcgaactcgaggagccggccgcccccaccaagcgggagggaggtctatga

SEQ ID NO: 364900 - DNA, 387 bp, Pseudomonas aeruginosa
atgcccgaagaacatctgtttcaggatgggaccctcagcttcctgccgacccgtttgaaccggcaaccggtggtcatcggcggcctgaccgcagacgaaatgtggatcacggtcttcaccagcggagcagccgggttcgctcttggcattccagctgccttggtcgtaggtaacgctgcctgcattccactgggcgcgctgctggttggcgccctcggcctgggtatcggcagccgcgtcctgcggcggatgaagcgggggcggcctgacacctggttctatcgccaggtggagctggccctctcgctgcgctttcccgtcttcggcaaccgtcacctggtgacgcgctccggcgcctggaccagtcgacgcacggagtccccatga

SEQ ID NO: 364901 - DNA, 357 bp, Pseudomonas aeruginosa; identical to SEQ ID NO: 360821

SEQ ID NO: 364902 - DNA, 150 bp, Pseudomonas aeruginosa; identical to SEQ ID NO: 339448

SEQ ID NO: 364903 - DNA, 339 bp, Pseudomonas aeruginosa
gtgaacactccacatcaaccccttcgccgaacctgcctggccgtattggcctgcggtgcgctggtcgcacagggagccttcgcagcgagcgcctccgagcaggcgaacctggcggtgatgatccggcagctcaatgcccttgaggacaccgcccgccgcagtgcccagggcgccgatgagcccggacagcgcttctacttcgactactcgcgcctggccgctgacctgcagcgcatccgccaaggcctgcaggactacatgacccccagccgcgcccaaccgcgtgacccttcagacctatctgggaattacaccctgcgcggagggccgatgccgtga

SEQ ID NO: 364904 - DNA, 300 bp, Pseudomonas aeruginosa
atgaagcagaccttcgaataccatgtcgagaacatcgatattccctacaaaactctcaccaagggcgtcgcgatgttcaaacacaaagaagacaccttggaacccgacgaccacgccttgctcaaccctctgcgctgggccgaggtcgtgcgtctgggccaggaaggctgggagctggtgagcgttcagccactcatgcggggcgtaaccgagatcggcaatcaaaacgcccagggctgggcctggggcatcgctctgcccgtcagctacctgctgtttttcaagcgcgcaacctcataa

SEQ ID NO: 364905 - DNA, 1110 bp, Pseudomonas aeruginosa
atgaaacttatccttgatttcgacggacgccttctaaatccaagcaacatgctagaggccctatcaaaagcaggaaagaatacaagcatcagcataagcaacgcgcaagcactaaatatagacactcttctcaaggcaacaaccgctgcagaaaacacaaaaaacctctcaacaactttcaacggcgcagagctgactgctaacaaccttcagcaagtcataaactcagcaggatcactaaccagagtatccacaatagccgcacaagccatcaatataaacacacttctttccgcaatatctacagcaggcaactcaaagagttttagcgcagaattcaatggagcccaactcagcagcgacaacctacttagagcagtaaatgcggcaggaacaaacactagcataagcgtcaacaccgcacaagcggcaaatataaccgcccttcttcagactattcatgcagcaggtaacacaaaaacattcagcgcagagttcaacggcgctcaacttacttcaaacaacattcaacaagctttagacgccgcaggaacccgaacatccattagcgtcaacactgctcaggcggttaatataagcaccctgctagccctcatcaattctgccaaagacacgaaaaaatttagcgccgacttcaatggtgcacaactaacagcagacaaccttcagcaagcgatcagcgctgcggcctcgggaaccagtatcagcgtcaacaccgctcaagcggcgaatatatccacccttttacaggccatcaacatcgcgggcaacactaaaagattcagcgccaactttaatggtgcccaactcacttcaaacaacatccagcaggcgctccgagcggcaggatcaaacacatcaatcagcatgaactccgcacaatccgccaaccaaagcactctacttgaacttctagacatagcaagttccagcaagcaattccaagccaattacaacggcggcatgtctaatccgagcaacctacaacagatagtttctcgtgcaggcgctagtacaaccgtgtttatttccgacgcacaaggcctaccaatcgcaaatatccttacccttatatcatctgccggatga

SEQ ID NO: 364906 - DNA, 1482 bp, Pseudomonas aeruginosa
atgcagtggactcacgaacagtcaccgatcatccagtcgaaggcatcgaagatcctggtgcgggccttcgccggcactggcaagacgaccaccctggtgggctttgccaaggcgaaccctaccctgagaatcctctatctctgctacaacagctcggtggagaaagccgcgaagggcaagtttccccgcaacgtagtgtgcaagaccgcccacagcctggctcatgcggtgtacggcatccagtacgcccacaagaagacgaagaacctgcgtctgaccgatatcgcccgcggactcgatacccaagactgggagttggtacgtgacgtgctggccacgctgaacaactacatggccagcgccgacgcggaactcggccgaccgcacttcccgcgcttccgcgacaaggcgttcctcaccagtgcccaggaacgcttcctcaagcagggcctggacatggcgcgagtagtctggaggcgcatggtagatctccaggacaccggcatgctgatgccccatgacggctacctgaagctgtatcaactgagcaagcccgatttgagccagcgcttcgactgcatgctcctggacgagggacaggacatcaacccagtgatcgcggacattgcccactggcagcgcatcagaatggctatcgtcggcgatccccaccagcagctctaccggttcagaggcgcggaagatgccctgaacagcgactggatggtcggcgccgaggagcactacctgacccagagctggcggttcggccccgcgattgcgcacgtggccaacatcatcctctcctacaagggcgagacacggaaacttcaaggattgggcccgcagacgctggtgaaaaagtccctcccggcggaccttcctcaccgcactttcattcaccgcaccgttatcggcgtcatcgagaatgccctgcagctggtccgcaatcatccggagcccaaattccactgggtaggcggtatcgacagttactcgctgcgcgacctggaggatctgtacgcattcagccgaggcctacgccaaaacgtccagaacaagaaactgctccgtgactaccgcgactacacccagtacgtggagatcgccgagatcagccaggacggtgagatgcttcgctcgatcaagatcatatcgacctaccctgatctgcctgcgcggatccttgagcttcgctcactgacccttgacgatgagctggacgcaacaatcaccctgaccaccgcacacaaggccaaggggctggaatgggatttcgtttgcctgtacgacgacttcaacgcggacccgctgtcccccgacaccgacccaggcaagcgcgacgatgagttgaacctgatctacgtcgcagtgacccgagcgatgaagatcctcgccatcaacagcttggtgctgtcgatcatgcagcggtacgtggacgacagacaactgaaggagcagatagctatctgtaaaaaatga

SEQ ID NO: 364907 - DNA, 747 bp, Pseudomonas aeruginosa
atggctgaagtcactcaacgtgcagagcagcaacaagagagccagaagacccttgtcggcaccatcatcagtacgcccttccaatttctcggcgtgatgttcggttcgctggtcggcgcaatcatcgtggagtgggtttgcctgtatttcttctggcctgacgcgggctggaagcatgcccaggccatgttcgagtacgaactcagttggctgtcgcaggggctgctacacagcgtcgtcgtgcaggagccaggtcgaaccgccacctggctggcccagttggcctatgactggttgttcgtgaagaccgggatagtcgactggatgaccaacatgaccaccatcgcgcaggcagggccacggagccctctggacgttcgctatctcaccgcccagggtgtctccacgctgcagaactacggcctggccgcgctgtacacggtgctgacattcgtcgtgcgcctggtgattctggtcatgacgatcccgttgttcctgatggccgcgttcaccggcctggtggacggcctggtgcgccgggacctgcgcaagttcggcgccggccgggagtccagctacctctaccacaaggcgcgcggcagcatcattccgctagcggtcgtcccttggaccctctacctggcgatccccatcagcatcaaccccttgctcatcctgctgccctgcgccgcgctgctcggcgtagcggtgtgcatcacagcatccaccttcaagaaatacctctag

SEQ ID NO: 364908 - DNA, 2232 bp, Pseudomonas aeruginosa
atggctggccagtacccgctggaagcgctcttgcggccggccgtggagctctacaccaccaccgtgtgcttcaccgcggccgcgctctgtatcgtcgcgccgtggacgttcgccctcactccgctgttcggcatcgtggccgcactgggcttcgcctggctgggtatcgtgcggctgaagcaggccggcgtggtgctccgctaccggcggaacatccgccgactgccgaagtacacgatgaccagtgccgaaatgccggtcagcaacgaacacttgttcatcggcaagggctttcgctggacgcagaagcatacgcagcgcctggtagatacctacctgccccagttcgcctcctacgtcgagccctcgccgctctacgagcgcgcgcgccggctggagaagcagcttgagttcgcccccttccctctgaagctggtcgccaaagccactgcctgggacgtggcctggaaccccgcacggccgctgccgcccgtgggcggtttgcctcggctccatggcatcgagccgcgcgaacaggacgtaggcctgcaactgggcgagcgcgtcggccacacactggtactcggcactacgagggtgggtaagacgcgactcgcggagctgttcatcacccaggatattcgccgtacccactgccggggccgacgccggcgggcgaagatgggccggcggacccagacggttcaccacggccaccggcgccggcgcgcagaggagcagccggactacgaggtggtgatcgtcttcgacccgaaaggcgacgctgacttgctgaagcgtatgtacgtggaatgcgaacgtgccggccgcctcgatgagttctacgtgttccacctcggccaccctgacctgtcggcacgctacaacgccgtcggccggttcggccggatctccgaggtcgccacccgcgtcgccggccagctctccggcgaaggcaacagcgcggcgttccgcgagttcgcctggcggttcgtcaacatcatcgcccgcgcgctgcacgcgctgggtatccgcccggactaccagcagatcctccggcacgtcgtgaacatcgatgcgttattcgtcgagtatgcccagaagtacatcagcgagcacgacccgagggcctgggacaccatcatccacatcgagggcaagctcaacgacaagaacgtgccattcaacatgaaagggcggcccttccgtgtcgtggccatcgaccagtacctgacacagaaacgcatcgccgacccggtcatggaaggcctgaagagcgccgtgcgctacgacaagacctacttcgacaagatcgtggcctcgctgctgccgctactggagaaactcactaccgggcggatctcggagcttctttcgcccaactacgcggacctcaacgatccgcgaccgatcttcgactggatgcaggtcatccgcaagcgcgccgtggtctacgtcggcctcgacgcactatcggataccgaggtcgccgccgcggtgggcaactccatgttcagcgacctggtctcggtggcgggtcacatctacaagcatggagtcgatgacggcctgcccggctcactcgccggcggcaaggtccgcatcaacctgcatgccgacgagttcaacgagctgattggcgacgagttcatccccatggtcaacaaagcgggcggcgccggtgtgcaagtgacggcctacacccagaccatgagcgacatcgaggccaagatcggctcccgcgcgaaggccggtcagatcatcggcaacttcaacaacctgttcatgctgcgggtgcgcgagaccgccacggccgaacttctgaccaaccagctccccaaagtccagatctacaccagcacgccagcgagcggcgccaacgacgcgatcaacaacaagaaggcagccttcacctccagctcacacgaccaggtgcagatgaccagcgtgccgatgctcgagccggcccacatcgttggtctgcccaaaggacaagcgttcgcgctactcgagggcggcaatctctggaagatccgaatgccgctgccggcggtcgatcccgacgaggtgatgccgaaaagcctgcaggagctggctgccggtatgcgcaagggccaggccgcaaacagcgagtggtgggaggcaccgggatactccgccctgcaggatggtctgccccaggacctggtcgacgatttccgtcacctcggcgccggtgaggatgccgcctga

SEQ ID NO: 364909 - DNA, 501 bp, Pseudomonas aeruginosa; identical to SEQ ID NO: 345811

SEQ ID NO: 364910 - DNA, 582 bp, Pseudomonas aeruginosa; identical to SEQ ID NO: 329850

SEQ ID NO: 364911 - DNA, 756 bp, Pseudomonas aeruginosa
atgatcagaaccgtatcgctcctgtccggcctggtgctgctgctgagctatcccgcagtcggccaggaggctgcggcaagccgagagaccagcagccagctgtccggtagccaactcggcacgctgaaacagcagacatctcagagcgacctggcccaggagtggggactgaaccaacaggaatggacccgctaccagacgctcatgcaaggccccaggggcgtgtactcgcctggcattgacccgctgactgcgctgggcatcgaggcgcgatcggcagaggaacggcggcggtatgccgatctacaggtccaggccgaacggcgccgggtcgagaaggaactcgcctaccagcgcgcatacgacgaagccttcgcccgcgcctatccaggcgagggggtgatccgcctcaccgaaagcagcacggccaacccgtcgggcaccccgaacatgagcccagcgttgcagagcagcgggcgcctggccctgttcgtccaggacaactgcaccgcctgcatccagcgggtccgcgacctgcagcagcagaacaaggagttcgacctctacttcgtcggtagccagaacgacgcagagcgagtgcggcattgggcaatcctcgccggcgtcgacccgaagaaggttcgcagcaagcagatcacgctcaatcatgacgagggccgctggatggccctgggactgggcggggcccttcccgccctggtccaggaggtgaacggccgatggcaacgtctgtaa

SEQ ID NO: 364912 - DNA, 693 bp, Pseudomonas aeruginosa
atgaaacgcccatcccctgcatcaatgattcttggcctctgcttgacagcaatggccggcctgctgggctaccagcagtaccaactcattcagctccgatcaggcgtggacagtgccgcggaaaagacctcgctagaggcgatcctggcgcgcttgaatcgagtcgacgagcgcctcgacgccgtggatggacagcacctggtcagcaacgaggacttccgctcaggccagcaggcgctgtccaaccgcattgacgccgcgcaggccttcgccaagcaggcctccgacgccgtcgagaacctggctcaaaccaccgcctcggccggcgatctcctggtgctcaaggcaacagtggagacgctggacggttctgtccgcacgctgcaagagaagcaagccaaggctccgccgctgatcgtgcctccaccgaagcgcggtgccttccctgtcaagcccaagccgaaacccaagccgatcgagcctccgcccttctcgatccttggcgtggagtatcgcgggggcgaacggtttctgtcggttgcacctccgggatccacccagctcagccagatctacctcattcgccaaggcgatgccgtcgccggcacgacctggcgactgaccgaccttgacgatcgtaccgcgcacttcgacgtcgccggcgcctcgcgcagcgttcgcatccaaccatag

SEQ ID NO: 364913 - DNA, 198 bp, Pseudomonas aeruginosa
atgaatacagaccttccccagctcgaacaaaccatcatcgatatagcgcgccaggaactggccgccgtggctgctttttatcgcaagagggaggcagggattgagagcgcgcacgtcgatgaggcatggagcgaatacctggctcgctaccatgcactgagcacgcttttggtgctcggccagttgcctataggttga

SEQ ID NO: 364914 - DNA, 255 bp, Pseudomonas aeruginosa; identical to SEQ ID NO: 328955

SEQ ID NO: 364915 - DNA, 633 bp, Pseudomonas aeruginosa; identical to SEQ ID NO: 324420

SEQ ID NO: 364916 - DNA, 351 bp, Pseudomonas aeruginosa; identical to SEQ ID NO: 324421

SEQ ID NO: 364917 - DNA, 714 bp, Pseudomonas aeruginosa; identical to SEQ ID NO: 324422

SEQ ID NO: 364918 - DNA, 198 bp, Pseudomonas aeruginosa; identical to SEQ ID NO: 324423

SEQ ID NO: 364919 - DNA, 159 bp, Pseudomonas aeruginosa; identical to SEQ ID NO: 324424

SEQ ID NO: 364920 - DNA, 135 bp, Pseudomonas aeruginosa; identical to SEQ ID NO: 324426

SEQ ID NO: 364921 - DNA, 180 bp, Pseudomonas aeruginosa; identical to SEQ ID NO: 329851

SEQ ID NO: 364922 - DNA, 567 bp, Pseudomonas aeruginosa; identical to SEQ ID NO: 324427

SEQ ID NO: 364923 - DNA, 438 bp, Pseudomonas aeruginosa; identical to SEQ ID NO: 324428

SEQ ID NO: 364924 - DNA, 1380 bp, Pseudomonas aeruginosa; identical to SEQ ID NO: 324429

SEQ ID NO: 364925 - DNA, 957 bp, Pseudomonas aeruginosa; identical to SEQ ID NO: 355135

SEQ ID NO: 364926 - DNA, 1080 bp, Pseudomonas aeruginosa
atggggggcttctgggagcagttgcagttcgccttctacagcaagcagttcggccgcaaggaacgcctgcagttctacgaaagcatgtccaccctgctcgaaaacggggtcccgttgaaggacgctgtggcagaggtgcacaagatcttcgctcatgagggacagcatccgtttcatccggtggccatcgccagtcgcgaagcgctgatggggctgtccaacggcaagcgtctggccaccgccatggcgctctatctgcccgcccaggagcgagcgctgatcgaggccggcgagatgagcggcaacctggttcaggccatgggcgatgccgtctccctggtcgaggcccaggccaggatccgcgccaccatctggcaggcgctgctctatccctcggcgctgtccgccatgatggtgttcctgctgtgcatcgtggcctatcgcatggtccccagcctggccaggctctccgatccagtcacgtggaccggcccgctcgccacgctcaacgccattgccagcttcgtcacaggacctggtatctacgttctggtcgccgtcatcaccctcacggtggtggtcatcgtcacgttaccgacctaccgctggaaaggccgggtctggctggaccggatgctgccgccctggtccatctaccgcatgctccagggcaccaccttcctgctgaacatggccgtcatgctcaacgccggcatacgcccctacgacagcctggccagcatgatcaagatctccccgccctggctgaagcagcgcttggaagctgcccgctacggcgtgggcctgggccagaacctgggagtcgcccttcgcagcgccggtcacgatttccccgaccgacaggccatccagtacctgtgcatcctcgccaaccggggaggcttctccgaagctctggtcaagttcagccgccgctggcaggagaccagcctcaagcagatcgagctggccgccgggctggtgaagaacttcgccctgatcttcatcggcgcgctgatgatcctggtcctgctcggcgcctaccaggcacagcagctcatccaatccatgaaccactga

SEQ ID NO: 364927 - DNA, 1581 bp, Pseudomonas aeruginosa
atgacgaaccttcaaattgccgcgcttgcacagccctccatggtgacccaactgctcaccgccgacggtggcgagtgggaggtctcgaaacacctgcaagagatcatggccctggccgccgacggcacgctctatctatcggagagccaccagaacgacattcacgttctgtcgttcatcgaccgtctcgatcgccgtggcttccgataccagctcaacctcaccgacctgcagaccattcaccagctctaccgcgccgtcgccatggacggcctggtcgatagcgatggccagcgcgccacccagatgcaggagcgcgtggtcaagatcattcgtaaggccactgagctgcgcgccagtgacgtgcatttcgtcgtgagtcccgccggcaccggcagcaagatccgtttccgcgtcgacggcctgctgaagaccgtcgagcagtaccgcagccaggaactgcacgaactttgcgcaaccatctaccagtccatgtgcgacgtggccgagccgcttttcaagccacaacttgaccaggacgcgcggatgagccaggccttcgtcgagaagctgaacctgttcggcgcccggatcgcgacccgcccgcgcgccggtgggttcctgatgatcctgcggctgctctacgacgataccggcctcgacagcctggagcagctcggctacctgcccgagcagaacgcgctgttcgatcgcatgatgcgcatgccttacggcatcaacatcctgtccggccccaccgggtcagggaagtcgatgaccttgaaggtcaccatggaaggactcgataagctgcatggcggatccaagcatatcctgaccatcgaggatccaccggaataccgcattcgcggcgaaggcatcaaccagaccccactggtctatgacgccactgacccagacgcagaacgccaggcctgggccgcaggcatcgccaacggcatgcgcctggatccggactacatgatgatcggcgaagtgcgcgacctcttcgccgctgtcgccgccttccgtggcgcgatgaccgggcacggcctgtggtcgaccctgcacaccaatagcgcgatcggcattgtccagcgcctcaaggacctgggtgtcgaccccggcttgctgttcgatccggccctgctgaccggtctgatcaaccagagcctgctgcccaagctctgcccccactgcaaagtgcgcttccaagaccaccaagaccagctcgcgcccgatctggtcgaacgggtccagcgcttgaccgatgtttcccaggtgtacgtcaaggggcctggctgccaggcctgccgtggctccggagtcaacggccgctcgatcgtcgccgaggtggtgctgcccaccctggccttcatgcgtgtgttcgccaaaggcggcccagccgaggcacgcaactactgggtcaagaccatgcagggcatcaccaagcacgcccacgccatccgccgcatcaacgagggcatgttcgacccgcagatagtcgaggatttcattgggccactcgacttcgatgagcatctgctcgacgacagcttctactcgcaggaggcgtgctga

SEQ ID NO: 364928 - DNA, 534 bp, Pseudomonas aeruginosa
atgcgaactgagccgatcggcatggccgtggccgtgctcttcctcctcgcgtccggccaggcctgcgctggcaccgttggcgaacttgcggagatccaggcccaggccatcctcaccgaggccaaggtgcgcctggccacggcgcagcggcaattggaaggcaaaggcgaaaccggccaggtcgtcagcgcccaggggcagacgttcgccatgccggtgccggcggcgccgccgacgatcacgcagccggttccgccggtggtgcggaccatctacggcgccggcggcaagatgactgccacattcttgttcccgggcgggtacgagattgacgccgccagcggcgcggagctgccgggcaactaccgcgtcgagtcgatctccctggaccaggtcgtactcaccgacaaggacggcaaccgcgtgcccgtgggcttctccagcgttgcccccacccaagccgcctcctcggcccaaggcgcctccgttccgccggcgctgcccggggcggtaccgcagccgttcatccagtag

SEQ ID NO: 364929 - DNA, 1326 bp, Pseudomonas aeruginosa; identical to SEQ ID NO: 357102

SEQ ID NO: 364930 - DNA, 1710 bp, Pseudomonas aeruginosa
atgcgtgcccccctgaagaacctcttgccttgcctcctgatccccgcactggccagttgctcggtcacgcgggtgaacgagtcggcggatcgtgtcgaagctacggcagattccgcgtcgacgatcgcagcacagatgcgcaacacccgaccggatcgccgcgatacggtggttttctccgacaaaccctgggtcagcacgaagcccctgagcgtttcgcacactttgtccagtgactgtatcgtgacctggcgccctgcaggcgcagcgtcgctgcaggaggccgcccaggaagtcatcaaccaatgccacctggcggtcagtatcacgcccgacgcgctgaacccggccgcttttgccctgcaacctcagcagcgcgcgagcaacgccccgccgcccatccaaggcggccaggacatggccaccatgctgtttcctgcctccgtcgccaacggcatgtccctaggtgccggcggcagcatcgggtcgagcttcgggtcctacggcccgcggtctctgtacaacatcaaatggaacggcaaggtcagcgggttcctcgatctcatcgccgcccgcgccggcgtgtcctggcgctacaacccaaccgagaaacgggtcgagttctactacctggacactcggaccttccgcatctacgcctttgacgacgtcaacacggtggactccaccgtgcgttccggtatgacgacggccgccggcatcagcggggacggctccggatccaccggacagaatggcagctccggcatcagcggcgactccggcagcaagcagaccaccagttcggagctgaagacatcgatcctcagcgacatcgagaacagcatcaactcgatgctgacgccgagcatgggacgcatgtcgctgtcgcgtgccacgggcaccctgaccgtcaccgaccgaccagaggtcctcaaccgcgtccagcagctggtcaaccgggagaacgagagcatcaccaagcaggtgctgctgaacgtcaacgtgctctcggtcgccctgaccgacaaggatcaactggggatcgactggaacctggtctacaagtcgctcaacaacaagtggggcatcggcctgaagaacaccatgccgggcatcgaccaaagtgcgatctccggctccgtgagcatcctggataccgccaacagcgcctgggcaggatccaaggccatggtccaggcgctggcccagcagggccgtgtctcgaccgtccgctccccgtccgtgaccacgctcaaccttcagtcggcgccgatccagatcggccgctacgacagctacctggcctccagccagatctccaacgtcgcccaggtcggcagtaccacctcgctgatcccgggcgccgtgaccagcggctacaacatgagcctgctgccgttcgtgatggaaagcggcgagatgctgctgaagatcaacatcaacatgacctcccgccctacatttgaaatgcagaccagcggggactccaaagcccagttccctagctacgacatccagctgttcgaccagaaggtacgcctgcgcagcggtgagaccttggtgctctccggcttcgaccagaccaccgaggacaccaacaaggtcggcaccggcgacgccggattcttcggccttggcggcgggctgacccgcaataccaaacgcgaggtcatcgtggtgctgatcacccccgtcgtgctgggctga

SEQ ID NO: 364931 - DNA, 1125 bp, Pseudomonas aeruginosa
atgaccaggcagttgaccactctcacgctgtgcctgctgctcgccagctgcacgacccacaaggctgagccggccaggcccgccttcgacagcagccgcaatccagacctgctctcaccggacctgtacccgaatggcgtacagccggagaaggagcccgtcgtgcgctacgggcgctacaccctggtcagcacccagccggacgctggccagcgcgacctgatggcacagattatcgacgtgaccatcccgtcgagcatgaacccgagcgtcaaagatgccatgcagtacgtgatgagccgctcgggttactcgctgtgcccggcagaggccggtcatgtgaacatcctctacacccggccgctgccggcggctcagtacaagctcggccccatgaccctgcgcaacaccctccaggtcctctccggtccagcctggcaggttaaggtcgacgaagtggcgcgacaggtctgcttcgtgcttcgcccaggctatcaacttcccccgacgccgaggccgaaaccggtccagcaactgtatgcgaagcccgctgccccaactccagcggcggtagcgcaactctcctccacagaaaaagtcagcacgctggagtcgcccgtcgtggtcgcctcggtgccaacgccggcgccgatcacaaccagccccgctccgaccaagaagcctgaatccaccactgtgctccccccagccgcaccggccaaggatggccacccctcttctcctcccgcggcttcggcaccgatcaagcccctggcctccaccgtgaagcccacgccgcccactccggccagcgtggcttccgcccctccggtcaaggtgctcacgccagcggagccgagccggcagttggcacagtcctggtcagccgaaacgggatcaaccctgcgcgacaccttggaagcctgggcaaagcgcgcacgctggaccgtccgctgggagccgctggatctcaactatccgatcgaagctcctctgaccttccacggctccttcgaggacgcggtatccgagctgttcccgctgtatgacgctgccgaacggcccttcctggtgaacgccagccggccgcagtccctgatcatcatcaaggagcgcaagaactga

SEQ ID NO: 364932 - DNA, 1974 bp, Pseudomonas aeruginosa
atgaaccgtccacgcctgatcaaccgtacctccgcgacaccttcgacgcttctgcagcgggcgatcttcgacggctacgacttcggcttgaagatcccctacatcgcaggcagcaaccgcgcgctgctagagctgtccggcttcttcatcagcgcccgggagcatccgttgcaccgctactggcgggtccccaaaggcaagctgctccctgaactggacactctgtacaaccgtctcgccgagctcgctggaggccttcactcccagtcctggcgggagttcagctccttggtcgaatccgcgcaggcctcgcttgaccgacaggccttcacctgggggatgctgctgcgcatcgcgcccctggccgagggcggcgtcctactgtcaggcgagttccatcctggtgtggtggcggtggctcggcggatgcgcggggtgttcctgcgcccatcgagttcctggcgcatcgacaccactcccgagctgcttcgaagcaacctgattctggagcttggcctcgccgaggaacaattcgagattctggatactgtccaggagctgctcagcgacggcagcttcgcgccgtcgaccgagctgcccagcatgagcatcggcggtccacagcaggaaccggcagcgccatccctggaggacgagtcagcctctgacatctacctcgccgcggtgccggagatcgagcgtaccgagtacagctcggctgatatcgaggcggcgctccagggctactcactactggcccaccagcctgacggcatcgctcatctgctgcagaggaccagcgccttactggccgacgacatgggactgggcaagacccgccaggcggtcatcgccgcttcgatccgcgcggcgggcaaaccaattctggtcatcaccctggccaccctgctgatcaattggcagcgggagatccaggaggtctatccctcggccaccgtggccatccagcaggacaccccagaggcgcagtggatactcgttaactacgagcagttgagccccctcgtcgccaacgcttcgcgcttcgccgtgatggtcatcgacgaggcgcagcggatgaaggaaccgacggcgcaatgcacgcggcacggtttcgacattgccgcccaagtgccgaaccgctacctgcttaccggcacgccggtgctcaaccgcgagaccgagctgcacaccctgctgcgcctctcgggccaccccatcggccaactgccgctgaaagagttctgcgaccgtttcgccggcaacccggagttccgccagagtctgcgggcggagctgggtgactggatgctgcgcaggcgcaaagatgtgctgcccagcctcaagggcaagcagcggcagttgctgaaggtggccctctccaccgaggaacgccagcaatacgacgtgctgcgtctcgaggaccgaccggtcttcgcgcgactcggcgcgctgcggcgttacctggaaacggtgaaggttcgcgtggcgatggacctgttgagcgagctcgacgccgaggacaaggtgatcctgttctgcgagttcaagccgaccgtggctgcgctgaaagaactctgcgagcaggccgggcacggctgcgtcacgctggtgggcaatgactcgctcaccaagcggcagaaagcgatcgatcgcttccagcaggatcccgactgccgggtgttcatctgcaccacggcggccgccgggacgggcaacaacctcactgcggcgaactacgtgtttttcctcggtctgccctggactcccggtcagcaggaacaagccgaggaccgcgcgtaccgcaacggccagctccgcatggtggtggtgaagatcccactggtcgagggcacgatcgacgagcagctgtggcaactgctcaacgcgaaacgccaggtagcccaggacctcatcgagccagagcaggttgacggaaaccgtgcgcttttagccgcaagcctaactggataa

SEQ ID NO: 364933 - DNA, 1890 bp, Pseudomonas aeruginosa
gtggcacctctcgacaacgcctcccctagcgggccgctacaggatccattccttgcccgctacagcgagcggcagctcgccgttgccaacacctgggcaacgcatttctccctcgctgggacagctcgaaccaagttcatccgtcactacctgcgcagcacctctacgaccaggtgctggtgcatcaccgtcgctgcagacaacggtgtgcgttacaccatcatgcgtgcagggccactactccaggtgttcgacggtcaactgatcggtgcgtgggagtgcaagcctacccatcgtatcccggcaagcacgccgtccccagcaggggcgttgaagctgctacagcgccttgagaagttcgacgacgcagttgctgtactcagctcatacaccaagcgagcgcacgacctagccacacagatggccagggacgacctcggacttccacatcgcctcgtgtatccgagccacagcaacaagcgctactacgcgccaaggcaccagttctacttgaagcagatcggagcggtcttgcgaaccttcagacaggtcctggaccaagacctgctgttcgccatccgctcggttcggtgcctctcgccccagctctacaactggctggctcaaggcaaccgggtgcgccggctgcaaatgctgaaggctcagccggtcttgacgccgctactggtggattgcgaggagggagtctggcctcacacgacgaccaatgacaacggcgagagcatctaccattaccttccttgccccttttccctgattgatagtgaacgaccgcaggccgccgccatgccatgcgatttgtacctcgatatgggccgtattcttgggcaggtcgcggacgaagggatttcggtcatcaactttttcgcctggctatttcaggcgccgcgggcctcgattcgatttcttagtcacgtcagtcccggccgtgcgggaggagctctcttccatcgcaaacgggaaggccgatgttcgggatggcatgctctcctactggcagcatcgttaggtaaccggcggccgatcactcgcgctcaatggacagcattctatgccgcctacaatgcgatcccttggcaaattcacaacgccaagcccgactacaaccgtctcttcaacggctgcccgtcggattggcaggatccggcatggcttgcaatcactgcacggctgagcgacatcaaggaattctattccgccctcgaccaggggaactcacaggttgttcggcaggcgcgcagcgccctgaaagcgtatctgggtcattgtacctaccgacaggctggcaacctggtggacgactaccatcaggtccagagggagctgcgtgctgcagtgcagagcagcctgcccgatctggtcgacaccgacgagtacaccacctgggagggaatgctgcctgtcggccttgtcgattgccctaatggcctgcagatcgtcgagctccgctgtcctgccgacctctatgccgaacatgtcgctctggcacattgcatcgatagctacgaccaggccgcctaccgaggagactgccgactgctctcagtacgtgaggctggtcgtccgctggcctctgccgaattggagctcaggcgtgagcatggcgagcctataggtaggccctggagtcccaagcacctttccacggtgcaacttcgcgaattcgataatgcccccgtgccgacagactcgcctgccggccaggcataccgctggttcatggaacgaattcgctctggagccatagcgacgaacctgaactggcccgacatgaccgtccacatgacgcgcttcgccaatggtcgctggaaggcgggcctcgccgaagccacggcgaaatggctgctcactcggttggaagaccgatga

SEQ ID NO: 364934 - DNA, 753 bp, Pseudomonas aeruginosa; identical to SEQ ID NO: 334362

SEQ ID NO: 364935 - DNA, 1920 bp, Pseudomonas aeruginosa
atgcaccttgtaatcattgaagccccgggcaagctgaaaaagctgcggtcccttctcccctccattcgtcccgacgtgacctggcaggtcgaggcgacagccggccacatcagagacctccccgttcacggccaggatccgcagatgctcaccgtcggcgtgggccaggatttcaaaccgcactaccagatcctctcgggcaaggaaaaagccgtcgcacggctgaaggatctgcagcagaaagctctggagatctacgtcgcatccgacccggatcgggaaggcgaaagcatcggctggcacatactccaggctgccgggatcaagaactacaagcgcgttgccttcaaagagatcaccaagtcatgcatcagcgccgaactcagctcgccgcgtcgcctggacctcccgaaggtcgcctcgcaggaatgccgtcgcgtcatcgatcgcctggtggggtatctggtcacgccagagttgcggcgcgtgatgggcaggccaaccaccgccgggcgcgtgcagtccgtcgctgtgtacctggtggtcctgcgagagcgggagattcgcgccttcacaccaatcaagcatttcggggtggaactggccttcgtttcgcccagcgacggccgcacctggaaggcggagtgggatccagtgcccacgtttgccagcaaggaatttccgtatatccaggatcgtcaactcgcagaactggtgggggctatacgcaatgtgatcgtcgagacctgcattgatggcgaagaaaccgatatgcctccggcgccgttcatctcctcttcgctccagatggcagccggaaatgcactgaagtggtcacccgacaagacgatgaaagtcgcccagcggctgtatgaacaggggctcatcacttaccaccgaacggacaaccccaatatttcgaaggactcgatgccggatatccgtgctgtcgccaaagccttggggctgaagtgtgtagagcaacagcgaatgttcaaagcggaccaagacgctcaggaaggccaccccgccatcacccctaccgactggatggccgctaccgccggtgaaactgctgatgagcaggcgctgtaccagctcattcgagttcgcgcgcttgccagccagatcgaagctgccgtgtacgcagtgagaaccatcaccctcctgggcgtcggccccgacaaaaagccactgcgcttcggcgccaaagggaagctgttgaacgtgcctggatggagaaaactgctgcagggcgatgatgccgaggagcaaaagaacgaaacgccttcaagccccatcccggcgctggagccaggccagatactcaaggtctacagcggcgaggtcctggagaagaaaaccacccctcccaaacgcttcaccgatgccagcctggtgggcgagatgaagcgccgcgggattggtcggccatcctcctacgcctcgatcgtgaagaacatcatcgacaagggccaggtgcagatgaagggccgaagcctgatccccggcgagctgggcgaggccaccatagcgctcctggagcacaacttcagcttcctcagcctcgacttcacccgcaacctcgaggtcgccctggaccggatcgccaacagcgaggacacctacatgaacgtggtccagcagttctaccagctcctgcagtcagagctgcagacgctgcgcgcgctccccagcgcacagggcgacccgcgagcaagctctaccgccagcgctccctcggcgccggccagtgacttcctctgcggcaagtgcggtctgcccctggtccaccgaaagaaagccggcaagggcggcttcgacttctggggttgcagcggctatcgcagcaccggctgcaaagtcagctaccccaccaaggacggccaacctgacttcgacaacccgcgcgggctatag

SEQ ID NO: 364936 - DNA, 489 bp, Pseudomonas aeruginosa
atggctacccccgtcttctgggaaggcaacatcggctcggcgccggagcaccgcagcttccccaacggcaacaatcccccgcggcagttgctgcgtctcaacgtgatgttcgacaactcgattcccgatggccagggtggctacaaggatcgcggcggcttctggtgcagcgtcgagtggtggcatcaggatgcccagcgtttcgccgaactgttcgcgaaaggtatgcgcgtcaaggtcgaaggccgggcgatcatggaccgctggccggacaaagagtctggcgaagaagtacaggcgctgaaggtcgaagcctcgcgcatttccatccttccgcatcgcctggccgaggtcaccctgttgccgtctaccaacggccagtcgacacaacatcagcagtctcggcaggtgccgccgcaacctgctcagcaggatgcgcaatcgcagcaggactacgacagcgccttcgacgacgacatccccatgtaa

SEQ ID NO: 364937 - DNA, 831 bp, Pseudomonas aeruginosa; identical to SEQ ID NO: 324445

SEQ ID NO: 364938 - DNA, 549 bp, Pseudomonas aeruginosa; identical to SEQ ID NO: 324446

SEQ ID NO: 364939 - DNA, 729 bp, Pseudomonas aeruginosa; identical to SEQ ID NO: 324447

SEQ ID NO: 364940 - DNA, 198 bp, Pseudomonas aeruginosa
atgtgcgactcaatcgtgtatgcccctatggacgaactcgaattcgagcggctgctagggctggcaaccctattcaacgacaacgatgaatggcctatcgactttacggagctgcaggaactgagcgagctgctcggcaagctcaaaagttgcgtcgacgtagcgatagacaacgcccctgaggcggccaagagctga

SEQ ID NO: 364941 - DNA, 306 bp, Pseudomonas aeruginosa
gtggaacagttcgttcgagcgctgggcagagatgccaacggcgccgaactggaggccacagatccgctgactcgagccgcaaccgcagccacacgccactcgcctgcggacttcttcaaggcactcttcgccgccatcgaggagaacagcgagcagagcggtggtccgctacccgaaggcttcaggctcagcgatgccacgctggcctcgctggtgaactgcgcattggatctgggccctgacgaactgaaagacagcgcctacgtgaagcgactgcgacaacgcgaacgcaatagcgacaagtga

SEQ ID NO: 364942 - DNA, 750 bp, Pseudomonas aeruginosa; identical to SEQ ID NO: 329605

SEQ ID NO: 364943 - DNA, 234 bp, Pseudomonas aeruginosa; identical to SEQ ID NO: 334916

SEQ ID NO: 364944 - DNA, 861 bp, Pseudomonas aeruginosa
atgccccggctccgccgggctggcggggacgatgtacggcaggaacggccattcgctcggcagctcctcggcttcgatttcgccaagcccaatctgcagcaacagactgcgcacggccttgacggcatcgggtgtctgctcacgctgacgcacccgtcgcccgaagatcaccacctgcttaaactgcgtttccaccgctcgatagatccgcaggtcggtgtagtggcgtgtcagccagccgaccagctcggcatcgagcacgtagccggggacgatgaagaccagcacgccgccgtactgcaacaggggcagcgtgcgctggtagaacagcttttcgaggcgggctcggccctgaccttgatagccaatgttgccgttgacgtccttggacaggtcgccatacggcggattgagccagagcagaccgaaggactgcttggagatcatcgtgtccatcaggtccgcgtgcagacagtgatcgaccagaccacgggcatggcgcgcccgctctgcgtcgaactcgacggcgaacgccttggcatgctcgcgccccagggcatgagccgcttcagcgattgccacgccttcgccggcgcagggatcgaggatgcacatcggcccattggattcagagttactgggcatcaatgcgttgagcgctctttcgagcgtgggttcgtcggtcgggaagtacccgtttttcacgaaattgcgggcgagccgcgggaacatgagagccatggaagtctcctggttggcggggatgattggcgcaggcacgccttggcgtgcctgcgcaggtgggtcaagccgctaccgtttccggcgtccaaatcttggccggatagggataggcggtga

SEQ ID NO: 364945 - DNA, 651 bp, Pseudomonas aeruginosa; identical to SEQ ID NO: 334469

SEQ ID NO: 364946 - DNA, 1767 bp, Pseudomonas aeruginosa
gtgaatcaacggcacaaccgcttgcatgtgcgcttgttggaggtacaggagccgacgtcgcgccccgtgttcttcgacgatggttttacccgcaagctgaccttcaaggagcatccgtaccgagaagccataaaggcactgctggcggacaatgaccgccactgcgtcgaaagcccggagcaattacgtcatacccctcatgccatgacggctcaggggctgatgtcgggcaaagaacgcttcttcgacaagcaggaccagaagcgtctggacgaagactggctgaccggcttcgataaccgtgaccgtctggccttcctggctgagcagattcgcgaggtcaatgagcggctcgagccagccaagctcgccttggatgctgcccagggcgacgttcgtcagttggagactcaagcttcgctgctgaatcgtgtcaaagaactgcagttcgaggatattgatctgccgggtgcccagagtcagctggagtcgctgcgtacgcaactggccaccctgacgcgccccgattctaaccttgccatgatcaaggtcgagctggatgcggccgaggccctgcaggagtctctggatcaacagctccgccaactgatcgaacagtacgttcagttaaaaactcagtttgaccaggccgcatccgctacccgtaaggcctataacagcgcggagaaagggctgaacgatacgcagcgtgaactggcgcaagcgcatttcccgactctgaccgcggatgacctcggcgatattgtcgagctggagcgcaagcatacgcgtgagcttcaagggcagctcaaagcgcttggcgagaaactgggcgatcagaaatcagagcttgccaaacgtatgtctgatgccctcaaggtagacaccggggcgcttgcagaggtcgggcgagagctggtggatgtccccaggtatctggagcgtctgcgtgtgctgaccgaggaagccttgccagagaaactcaagcgcttcctggaatacctcaatcgctcctcggatgacggcgtcacccaactgctcagctatatcgaccatgaagtctcgatgatcgaggaacgcctggatgacctgaatagtacgatgcagcgtgtcgactttcagcccggacgctatctgcgcctggttgcaggcaaggtcatccatgaaagcctgcgcaccctgcagcgcgcccagcgccaactgaactcggcgcgtttcatcgatgatgaaggcgagagccattacaaggcattgcaggatcttgtggggttgctcaaggacgcctgcgaacacagcaggaatcagggagccaaggcgcttctggatccgcgcttccgcctggagttcgcagtatcggtgatcgatcgagaaagcaggaatgtcatcgaaacccgaacaggttctcagggcggtagcggtggcgagaaggagatcattgcctcctacgtgctgaccgcttccctgagctatgcgctttgtcccgacggcagcagccggccgttgttcggcaccatcgttctcgacgaggcgttctcgcgcagctcccatgcggttgcaggtcggatcatcgctgcgttgagggaattcggcctgcacgctgtcttcatcacgcccaacaaggaaatgcgcctgttacgccaccacacgcgttcggcagtcgtcgttcatcggcgcggcctggagtccagtctggtttccctgagctgggaagctttggatgagcatcatcaacagcgcatcaaggccatgcatgaagtcgcccactga

SEQ ID NO: 364947 - DNA, 267 bp, Pseudomonas aeruginosa; identical to SEQ ID NO: 330012

SEQ ID NO: 364948 - DNA, 825 bp, Pseudomonas aeruginosa
atgttcgcagcagccaaccagacccacttcagcctcgccatcgacggcctcgccctcgacctgcaggtgctttccttcagcggccgcgaagccatcagccagccgttcgccttcgacctggagctggtcggcgaacgccccgtgccggacctcgaaagcctgctgcacaaacccgccttccttaccctcgggcccgccggcaacggtatccacggcctggtgcgcagcgccggacagggcgactcgggcaagcgcctgacccgctaccgcatcaccctcgtcccgcaactggcctacctcgcccagcgcaccaaccagcgcatcttccagcacctcacggtgccgcagatcgtcggccgggtgctggaggaacacggcatcctcgccgacgcctaccgcttccagctcggcacccgctaccccgagcgcgaatactgcgtgcagtacgacgagagcgacctgcagttcgtccagcgcctgtgctgcgaggagggcatccactttcatttccagcacagcgccacggcgcacctgctggtgttcggcgacgaccagacggtgttcccgcggctcgcgccggtggcctaccagcaggactccggcctggtcgccgaccggccggcggtcaagcgcttcggcgtacgcctggaaacccgcaccagccgcgtcacccgccgcgactacgacttcgagaaaccgcgcctgacgctggaaagcgccgcccgcggcgaagcccggccggacctcgaggactacgactatcccggtcgcttcgtcgaccgcgagcgcggcaagcacctggccaggcgtgccctcgaacggtag

SEQ ID NO: 364949 - DNA, 255 bp, Pseudomonas aeruginosa
atgaacccattgttcaccaacctcacccaggaaaccctcgcctacctcgaggaccaactgtccaacaacgacgtcgccggcgacgacgagctcatcgacctgttcatcgaggagctgtcgctgaccttggagcaggccgaagcggctgtcgcgctacgcgatcagtacctctgccaggtcttcctgatcggccaagggccgctgcaccaagccgatgggctcagcttcgaccctcacaccaagagcgttcggtag

SEQ ID NO: 364950 - DNA, 378 bp, Pseudomonas aeruginosa; identical to SEQ ID NO: 360371

SEQ ID NO: 364951 - DNA, 534 bp, Pseudomonas aeruginosa
ttgaccacggttccatccgccagcggcgtggacggggtgaagctccagttgccgctgccgtcggcagtgacctgcccgatcggattgccgctgccatcggtcagggtcaccgtggcgcccggttcggcggtgccgctgatctccgcgccgttgctcggattgaccaccggcgcggccggcgccaccgagtccacggtggtgctggccggagcgctggtattgccggtcgggtcgctggccgtggcgttgaccacggtgccgttggccagcggcgtgcccggtgtgaagctccagttgccgctgccgtcggcggtgacctggccaatcgggttgccgttgccgtcggtcagggtcacggtagcgcccggctcggcggtgccgctgagcgtagtgccgttgctcgggttgaccaccggagccgccggggcctgcgagtccacggtgacgctggcgcccgggctgctattgccggcggcgtcctgggccaccacgttgaccacggtgccgttggcgatcggcgtggacggggtgtag

SEQ ID NO: 364952 - DNA, 903 bp, Pseudomonas aeruginosa
atgttagtcgatgtctttcgtcgcctaacaccattccaagctattgaagactattgctacgttggttttggctccgtctggttttctgattttatattgttccacaaatcgcttggcatcaagaatatggtttcaatagaagagtcagaaggtgcacgcgaaaggttcgaagagaaccgtccattccaaataaaaatggagttttcaaattcagcgacagccttacccaggctagattggagccaacggacaatcgcttggctagattatgatgacaccttagtaacatccatgttgcaagatatcagatctgtagcagcacgagcagtgtctggctccattttagcagtatccgtacaatgcatgaaagccaaggcgctcattgaataccatgcagaaaacgacccatccaaagaaagcgctatcgaaaggtttcgacaaacttttggtagatcacgcgtaccagatgacacccaagatgaggatctcgcaggctggccatatggcacactatgtcgaaatataataaagactgagattgagcttgcattatcagatagaaacacaaacccagaaaccgccatgcaattcctccccatctgtgaaatcgagtatcaggatgatgcgcgcatgaccactatggttgggatatttgtctcgccggacgagatgagtcgctatgagctttgttcattcaacaaactagacttcatacctccagacaataaggccatccgtatagaaatgccaaaactaacaattagagagcttagaaagatcgagcagcagttaccgaagactgatggcatggagctttccctgggttccatccctccatcagacgcggaaaaattctgcaagatgtatcggtgcttcccaaattttgctgttatggagtcttag

SEQ ID NO: 364953 - DNA, 924 bp, Pseudomonas aeruginosa; identical to SEQ ID NO: 325920

SEQ ID NO: 364954 - DNA, 234 bp, Pseudomonas aeruginosa; identical to SEQ ID NO: 325921

SEQ ID NO: 364955 - DNA, 600 bp, Pseudomonas aeruginosa
atgattatcgaatgtaacttttgcaaggcgaatgttgatgcaagggtaataggagagcacgagagctacgatcgagaagagcccgcaccttttattgccactttgcttgagtgcccgtcttgcaagaattcgttagttgctggccagtatagatggccggatagttttagtgatagttacattgatgagatccctgagcgggtttggcctcagcctcgaaagtatctatcttggtcgattccggaaggaatacgagtctccatcgaggaatcccagaagtgcatctctgggggcgcttttatagcaagcgctgctatgtctgggcgagccctcgaaggagtatgtagacacttcaaaacaaaaagcaagtatttggggccggggttggaggagcttaggcaaaaagaagttattgataagcgactcttagagtggggaagagagcttcagaagcataggaatattgccgcgcacgcgggagatgagaaaataaatccccaagatgcgaaagatttggttgatttcgtaatcgcaatatgtgagtacgtttttgttttgaccgataagttcgataagttcatggcccgtgctaaggcgtga

SEQ ID NO: 364956 - DNA, 2028 bp, Pseudomonas aeruginosa
atgagcgataccgcccacggcctgcatgccgacaccgagcgctggcccgccagcctgttcgccgtcgccctggccttctcgatcttccaggtcgccaccgcggccttcccgctgatctccacccaggtcctgcgcgcggtgcacgtgggcttcctgctgctggtggtctacctgtgctacccggctcgcggctacggccggccctggcaaccgctggcctggctgctgggcctggcgggcatggccacggcggcctaccagtggttcttcgaggccgacctgatccagcgctccggcgaactgacccacggcgacatgctcatcggcctggcgctgatcgtgctggtgttcgaagccgcccggcgcgtcatgggcatcgccctgccgatcatctgcgccctgttcctcgtctacggtctgctcggccagtacctgccgggcgacctggcgcaccgcggctatggcttcgaccagatcgtcaaccagctgtccttcggcacggagggcctgtacggcacgcccacctacgtgtcggccacctacatctacctgttcatcctgttcggcgccttcctcgaacaggccgggatgatccgcctgttcaccgacttcgccatgggcctgttcggccaccgcagcggcgggccggccaaggtctcggtgttctcctcggcgctgatgggcaccatcaccggctccggggtggccaacgtggtcaccaccgggcagttcaccatcccgctgatgaagcgcttcggctacgcgccggccttcgccggcggcgtcgaggccaccgccagcatgggcagccagatcatgccgccggtgatgggcgcggtggccttcatcatggccgagaccatcaacgtgccctacgccgaggtggccaaggcggcgctgatcccggccctgctgtatttcggctcggtgtactggatggtccacctggaggcccggcgcagccatttgcacggcctgccgccggagcagtgccccagcgcctggggcgcgctgcgccagcgctggttcctgctgatcccgctgctggtgctgatcgccctgctgttctccggccgcaccccgctgtactcgggcatggtcggcctggccctgaccgccatcgtcatcctcggctcggcgatcatcctgcgcgccggcaacacctggctgcgcatcgccttctgggtggcgctgggcgtgctctgctcggggttcttccgcctgggcatcggcgtcatcctgctggtcatcgccgccctggcgctggcctgcttcttcgtccgcggcggccgcgccaccctgcgggcctgcgtcatggccctggccgaaggtgcccgccatgcggtgccggtgggcatcgcctgcaccctggtcggggtgatcatcggcgtcatctcgctgaccggcatcgccaccaccttcgccggctacatcctcgacctgggccgcgacaacctgttcctctcgctggtgctgaccatgctcacctgcctggtgctgggcatgggcatcccgaccatccccaactacatcatcaccagctccatcgcggccccggccctgctggagctgggcgtgccgctgatcgtctcgcacatgttcgtgttctatttcggcatcctcgccgacctcaccccgccggtggccctggcctgcttcgccgccgcccccatcgcccaggagaaggggctgaagatcagcttctgggcggtgcgcatcgccctggccggcttcgtcgtgcccttcatggcggtgtacgacccggcgctgatgatgcagggcgacagctgggcggccacgttctacatgctggtcaaggcgatcttcgcggtggtgctctggggcatggcctccatcggccacctcagtgcgcccatgccctggtgggagcgcggcctggcgttcgccgccggcctgctgctgatcctcgccctgccgatcagcgacgaggccggcttcgccctgggcgcggcggtgctcggctggcacctgtggcgccatcgcggcgctgccgggcagccggcatga

SEQ ID NO: 364957 - DNA, 408 bp, Pseudomonas aeruginosa
atgaccggcctgtgcctggggctggccggggtggtctgggccagcctgccgctgcagcatttcaccctcgcctggcagcacagcatcgagaagatccgctgggaggaggactaccaggtgacctctgccggcctgctgctgggcgaggcgcggatacgcggcaacggcgccggcatggagataccggacgacgcggtcctgcgcgacggcgcctggcactaccggcgccgccttccaccgctgcaaccgctgcacgccgggcgcacgcccgaggccggcgactaccagctgtgcaccgaacacggctgccaggcgctgtcgcactggctggggccaccgacgacggcgaccccggccgtggatttctgggcctgcgagacgaccaccgaaacgtcccggcccctctag

SEQ ID NO: 364958 - DNA, 1974 bp, Pseudomonas aeruginosa
atgaatgccccatccaagccaaggagtaccctgaatccaccggtgttctacagcagtgcagtgcttatcctggtactggtgctctatgcctccgttttccaggagcaggcacaagcgttgttcaacgacgtgcagcaatggatcatcaccaatgccagctggttctacatcctcgcggtggcgctgatcttgatcagcgtcgtgttcctggcggtcagtcgctatggcgatatcaagctcggccccgaccacagcgagccggagtaccgcagcagcagttggttcgccatgctgttttccgccggcatgggcatcggcctgatgttcttcggcgtcgccgagccggtcatgcatttcaccacgccgccggtgggtgaaccgggcacggtagccgccgcgcgcgaagcgatgaagatcaccttcttccactggggcctgcacgcctgggcgatctatgcgatggtcgggctgatcctggcctatttcagcttccgcaagggcttgccgctcacgctgcgctcggcgctctatccgctgatcggcgagcgcatccatgggcccatcggccatgccgtggacattttcgccatcctcggcaccgtgttcggcgtcgccacttcgctgggctatggcgtgttgcagatcaacagtggtttccaccatctattcggtttgccggtgaaccccaccgtgcagatcgtcctgatcgccattacctgcggcctggccacgctttcggtggccagcggcctggacaagggcatccgcattctttcggagctcaacctgggactggcggcggtgctgctgctcttcgtgctgttgctgggccccacggtcttcctgctgcagacctacgtacagaataccggcgcctacctgtccgacatcgtctacaagacgttcaatctctacgcctaccagcccacggactggatcggtggttggaccctgctgtactggggctggtggttgtcctggtcgcctttcgtgggtctgttcatcgcgcgcatctcgcgtggccggacgattcgcgagtttgtctgtggcgtgctgttcgtaccggccggtttcaccctgctgtggatgacggttttcggtgactcggcgatccacatgatcctcaccgatggcgtgcaggacctggcggcgatagtcgaccaggacagctcactggcgctgttcgccttcctcgagcatttcccgctgtcgagcgtggtgtccatggtcgcggtactgatggtggtggtgttcttcgtcacttccgccgattccggtgccctggtggtggacatgctggcctcgtccgggcatgaccactcgccgctgtggcagcgcatcttttggtcggtgagcatcggcgtggtggcgattgcgctgctgctggccaacggactgaaggcactgcagaccgcgaccatcgccagtgcgttgccgttctctatcatcctcctggcgtcgatctggggattgttccgtgcgttgcacctggacgccacccgccgcggcctgcgcaaccaagcactgccgtcgccgcgccaggcgccccatgcccatggcggctggcagcggcgtctgcgcaacatcgccatgttgccgcggcgtgcccacgtgacgcgcttcatcgccgaggtggcgaggccggcgtgcgaggaggtcgccgccgaattgcgcaagcagggctacgaggtaacggtgagcgaacgcgaagacggccgcgtgagcctggaactggaccacgccggcgaaggccgcttcctctacgaagtgcgaccgcgcgcgttcaccacacccagtttcgtcatgcgtgacaccgaggagagcagcgatgcgcgcaaatacttccgtgccgaggtgcatctgcgcgagggtggccaggactacgacatcatgggctggagccgcgatgccgtgatcagcgacattctcgatcagtacgaaaggcacctgcactacctgcacgtcgtcggctga

SEQ ID NO: 364959 - DNA, 261 bp, Pseudomonas aeruginosa
atgggcggccggggagttcgcccacagcagggcgatgacagcggcgaccagcaggacggcaccactgacggcttcgatgtgcaggaagcgctcgaggttggcaaaggcgcgttcggccattcgctgggcacggggcaggtgattctgttgcatgcgcacaagctctccgcgcggcggcccgacctgcgcattgacctgtctcgccacccttgcagcagacacccggagcgcaagtctacaggaccctttcgcggtcagtga

SEQ ID NO: 364960 - DNA, 906 bp, Pseudomonas aeruginosa
gtgggcgtgctggcgttgctgggcaaatccatccccgccaacgtcagggtgttcctgctggcgctggccgtcatcgacgacatcatcgcggtcctgatcatcgccgtcttctactcaggaggcctcgactgcagtggcttcgccatcgcggcagtgggcatcctgctcgtgctcggcctgcagaagatcggcgtcggaaccgcctacgcctatgtgcttccgagtgcggtgacctgggccggcctgctcatgaccggggcgcatcccagcctggctggcgtggtgctcggcctgatgacaccggtgtacagcatgccgatgcgggaacgccccctggagcgtgtttcgcgcattaccggcgaactgatcggccgggcccaatcgccggaacgggacgcaagcgacctgatgccacccctgaagagcctgcgccatgcacaacgcgaactggtcccgcccgtggtacgcgttcagcaggtcctgcatccctgggtcgcctacggcatcatgcccctgttcgcccttgccaacgccggggtcagcctccagggcatcgacctggctgccgaggcgccgcactgggtcctgctgggcgtggccgccgcgctcatcgtcgggaagccactcggcataatcagtatcacctggttgatggtgcgcctgggctggtgtgcattgccgagcggggtcacctggcgaggcgtcatcctgatcgggctgctcgcgggtatcggcttcaccatgtcgatcttcatcgccatgctcggcttctccgatcccagcctgctcggccccgcgaagctcggcgtactgatcggctccaccttcgccgcggcgctggggctggcgtggggggctttcgtcatgcgtcaggacaaggggcgggagcctgcgcgcgcgaagtga

SEQ ID NO: 364961 - DNA, 411 bp, Pseudomonas aeruginosa
atgcccagcctgaatccaagccgcgaacaacttgcccggttcaccgaggaaatgccggccggcaagccgatactgatgctcaatctgctgcgttaccggaccgaagccgactatccgccagatgagggagcgcccccctgcaccggccgcgaggcctatgcccgctatgcccgcgtcgccggggcgaaagtcgccgcagtcggcggttcggttcggttactggcagatgcgcatgtagcgttcatcgctccggaagaggagcgatgggacgaaatccttctagtgcgttatccctcgaaagacgcgttcctgagcatgctggccgatagcgaatatcgtgcggcaacggtgcatcgcacagccgccctggccgactcgcgactcatcgccagtaccgaacgcgaggcctga

SEQ ID NO: 364962 - DNA, 1734 bp, Pseudomonas aeruginosa
atgaacattccacccagcctcagccacccctggcgcctgcgcctggtcatcctgctcttcggccttctttcggccgtgctctgctggcgcctgcttgaactgcaattgcatcagcgcgagttcctgcaggcccatggcgatgcgcgtagcctgcgttatctgaagattcccgcccatcgcggcgagatcaccgaccgccggggagagcccctggcggtgagcacgccgatgctcaccctctgggccaacggcagggaactggccgcggcccccgagcgctgggcggaactcgccaatgccctgggccaaacgcctgcggccttcgcggcgcgcctgcaggccaacagcgaacgcgagttcttctacctggagcggggcctgccgccggtggtcgggcaggccatcctggcgcgcaaggtgccgggcgtctatgcgcgggaagagtatcggcgcttctacccggccagcgatacgacgtcccaggtggtcggcttcaccgatatcgacggccacggccaggagggcgtggaatatgccttcgacagttggctgtccggggtgcccggccgacgcctggtgctcaaggacctgtacgggcgcgtggtgaagaacctgcaggtcgtgcgcaacgccaagcccggcaaggacctggcgttgtcgctggacctgcgcctgcaatacctcgccaaccgcgaactgaggcgggcgctggaccagttcggcgccaaggccggcagcctggtgatgatcgacgtgcgtaccggtgagttgctggcgatggccaaccagcccagcttcaacccgaacaaccgccagggcctggaccccgcggccatccgcaaccgcgcgctgaccgacgtgttcgagccaggctccaccgtcaagcccatttccatgtgcgccgccctggaaagcggccgctggcggccgtccgaccaggtcgaagtgtggcccggcagcctacgcatcggccactacaccattcgcgacgtgacccgcagcgagggccgcatactcgacctcaccggcatcctcatcaactccagcaacgtcggcatgagcaaggtggcgttcgacatcggcggccaagccatccacgacatgatgcaacggatgggcctgggccagtacaccggtctgggcttccccggcgagcgcgtcggcaacctgccagcctatccgcgctggcggccagcggagacggccacgctgtcgtacggttacggcctgtcgataaccgccgtacagctggcccacgcctatgccaccctggccaatggcgggcgcatgatgcccctgtcgctggtgcgccgcgagcgcgcgccgcgccccgagcaggtcattccggaaaaggtcgcgcacaccgtgacggccatgctcgaacaggtggtcgaatcgccccgcggcatccatcgcgcccgggtgcccggctatcacgtggccggcaagagcggcacagcgcgcaaggccgccaccggtgcgcgcggctaccgggaaaacgcctaccgctcgatgttcgtcggcttcggcccggtcagcgctccgcgcatcgccatctcggtggtgatcgacgagcccagccgcgacggctacttcggcggtaaggtcgccgcgccggtgttcagtcgcgtgatgagcggcgccctgcgcatcctggaagccccacccgacaacctgccggagccgcccttgcgcgaggcggcaacggctagccagacaccggcgtcaggctga

SEQ ID NO: 364963 - DNA, 804 bp, Pseudomonas aeruginosa
atggcgctggcccatggatggttcgtcgtcctggccctgcaggtggccctgtggctcgatgcctgcgcccgcctgtggacccgcgacctcgccctctcgcgattcggcggcatccagaacccagtgatggcgacaatcatctcggtggtggtgctgatcgtcgtctgggctgtgatgctactttccatcctggccaacctgggcgtcgacatcaccgctctgatcgccagcctgggcgtaggtggcatcgctgtagcactcgcagtgcagaccatcttgagtgacgtgttcgcatcactctcgattggcttcgacaagccgttcgagatcgatgacttcgtggtgttcggtgacgtggcgggcaccatcgagcacatcggcttgaagaccacccgcatccgcagcctcagtggcgagcagatcgtctgctccaacaccgaactgctcaagcagacgctgcataactacaaacgaatgaatacccggcggatcgtgttccagttcgggatcagctaccggacctcagccgacaaggcaaaggcggtgacaggactcgtgaaggaaatcatcgacgcccagacagaggcgaagttcgaccgcgcccatctagccaccttcgaagaaagccggctgctgttcgaggtcgtctacatcatgcagaccgccgactacaaccgctatatggacgtccagcaggcgatcaacctgcggctgctttcggggctcgatgagctaggcgtcgaattcgccttccctgtacgggaattgcgcatgccggagcaaaccggcaaggcagttcaatag

SEQ ID NO: 364964 - DNA, 180 bp, Pseudomonas aeruginosa
gtgcaaaccaaccccgacagcccggcctactacgccaccgacggcaccatctacaaggacggggaattcgcgctgtccggagcgctcaccgggaactggaatgccttaatcttcgccactcacaatagctccaaggagtccgacgaagtgcccccaattggagcgagtggaagcagttga

SEQ ID NO: 364965 - DNA, 828 bp, Pseudomonas aeruginosa
atgaccgacttcgatccctcggaatggatggggcgtacccaggaagttcacgaccaacttagccgcaacctcgtgcaacgcatcgcggctaccttcaatgcatcggcgccggcccacggcgaagagctgccatggctctggcactggtgcttcttcaacgatcaggtggcgggcaaccgtctgggcccggacggccacccggcgctgggtactttcatgccaccggcccacgggcgcaatcgcatgtgggcaggcggccggctggatttcctcgaacccttgcggatcggcgccgaagcctggcgcaagacgcgtatcgagcgcatcgaggagaaggccgggcgcaccggttcgctgctgttcgttaccctcgcccacgagtattggcaggaccgtcaactgtgcctgcgcgaggagcaggacatcgtctaccgcgagccctcgccgcccaagctcggcgcaggcgagccctcgccccagatgggttgggaagagcgcatcgcgcctgaccccaccctgctcttccgctactccgcggtgaccttcaacgcccaccgcatccactacgactggccctacgtcaccggcgccgagggctaccccggcctggtggtgcacggcccactgactgcaaccctgagcctcgctgccttcgcccgcgccaacccgctggcacgcctgcgccgcttcagcttccgaggcgtgcgcccgttaatcgcacccgagccgttccaggtgggtggacgccacaccgaacccggcgtagccgaactgtgggccgccaattccaccggcgtgtgccagcgcgccgaagtcctgttcgactga

SEQ ID NO: 364966 - DNA, 810 bp, Pseudomonas aeruginosa
atgcaactggacaagctgcgcagcgcgctgttcgtgccgggagatcgcccggagcgcttcgccaaggccctggccagcggcgccgatgccgtgatcgtcgacctggaggatgccgtgcaggcgtccgccaaggcccaggcgcgcgaacatctgcgcgccttcctcgacgcccaccccgacgccggcgtctgggtacgggtgaacatggccgggcaccgggaacacgatgcggacctcgacctgtgccgtcatcgtggcgtggtcggcctgctgcttcccaagtcggaaagcgtcgagcaggtggtcaatgccgccacggtcggcaaaccggtactgcccatcgtcgagagcgccctgggcctgcgggcgttgccggaaatggcacgggttgccggcgtgcagcgcctgaccttcggcggcctcgacctgtgcctggacctgggcatcagcgcgggtaccccggtcgcaacgcgcctgctcgaccaggtgcgctacgagctgttgctgcacacccgcctggccggcctcgccgcgccactggacaccgtgtttcccgagatcgccaaccccgagggcctcgcccgcttcgcccgcgatgcccgagatgccggtttcgccggcatgctgtgcatccacccgcgccaggtcatcggcgtgcaccaggcgctggcgccaacccgtgaacagttggattgggcgcaaaagatcgtcggcgcggcccaaggcaatggtgctttccaactggacgggcagatggtcgatgcaccggtgatcgaacgcgcccggcgcctgctcgcactgcacgactga

SEQ ID NO: 364967 - DNA, 1197 bp, Pseudomonas aeruginosa
atgcacgacgcgctgatcgtttctcccctgcgaacccccatcggcaagttcggcggcgccctcgccccgttgaccgccgaccagctcgccgccggcatcatccaggccctgctgcagcgcctggacatttccccggcgacgctggacgaggtgatcgtctcgcagtcctatgcctccagcgaggctccctgcatgggccgctatgccgcgctggccgccggcctgccgctggaagtgcccggctataccctcgaccgccgctgcggttccggcctgcaggcactggccgacgcggcgatgcacgtgcagaccggccacgcccaggcggtgctggtggtgggcgtggagagcatgagcaacatcgagtactacagcaccgacatgcgctggggcgcccgcgccggcagcgtgaagttccacgaccgcctggagcgcggccgcgagcgctcgcagccgcacgagcgcttcggctacatctccggcatgcccgagaccgccgagaacctggcccgcgactacggcatcagccgcgaggaagccgaccgcttcgccgtgcgcagccaccacaatgccgccgccgcgtggcgtgacggacgcttcgccgaagaagtggtagcgatcgacgtacccggcaggcgtggcagtcgaaccaccgtatcgatggacgaaggcatccgcgaggacgccagcctggaaagcatggccggcctgcgcgtgctgctgcctgacggcgtgtgcacggcgggcaattccagccagcagaatgacgctgcggcggcctgcctggtggtctcgccggactatgcccgacgccacgacctcaagccgctggcgcgcctggtggactgggcggcagccggctgcgaccccgcgcgcatgggcatcggtccggtgccggcggtggagaagctgctgcaacgcacccggcgcacgttggccgagatggacctgatcgaggtcaacgaagccttcgccgcccaggcgctggccgtgctcaaggcctggggcctggaggatgacgagcgggtcaacgtcaacggttcgggcatctccctgggccatccgatcggcgccaccggcgtgcgcatcatgaccaccctgctccacgagatgcagcgccgcggcgcacgctacggactggaaaccctgtgcatcggcggcggccagggcatggccgcgctgttcgaacgggtgtga

SEQ ID NO: 364968 - DNA, 870 bp, Pseudomonas aeruginosa
atgaactggatcgaagtcaaccaggccgccctgcgctaccagttgctgccagccgaacgccccgacacgccggtgctggtactcatccacgagatgggcggcagcctggaaagctgggacgacctctgcgccaccctggccggcgaactcacgctgctgcgctacgacacccgctgcgccgggctgtcggaaaaatttcccggcgagttgaccatcgacgatcacgtggccgacctggcagccctgctcgacgcgctgcggatcgatacccccgtcgcgctgatgggcgtcgctgtcggagcggccatcgccatccgtttcgccgcccggtatcccgggcgctgccagcagctgatcggcctggcgccggcctgcggggtcgccgcttcggctcgcgatgccacccgccggcgcgctgccgcgttgcgtgaagaaggcctgggcgaactggtgccggcactgctggaaaaaacctggcctgccccgctgcgcaccgatgccgggcgcttcgacgccttccgcctgcgctggcgcgccgccgatccccagggcttcgccgcaactttcgccatgctggccggcctggaactggaaaacgacctgccccgccttccgcaacgcaccctgctggtggccggcgaatacgacgccctgcggcccccgtcagaaatagaccgcctggcccgatgcgctgcacagatcgagcctttgcaggtagcctccgggcatttcatgccgctgcagagcccccgactggtcgccgcgctggtgcgcggttatgtgtgcgccgggttgtccggctcgacgctctaccgggcgttcatcgagcacccgcagcaccgcgtcggcgccagtggccatgccgcctga

SEQ ID NO: 364969 - DNA, 888 bp, Pseudomonas aeruginosa
gtgagcaccttcgaccgtgcaagagcctgggatcagggcgatctgacacagctgctgagcctggaagacggcccgcaggacaccttccgtgccaccgtcaacgacagcaacgtcaacggccgcgtgtacgccggacaactgctcggccaggccctctgggccgccgcgcagaccgtgccgcaccgcgtgcccagtaccctgcaggccactttcctgcagggcgcgcgccccgaggacgcgctggaatacaaggtggaggcgctgcaggatggccggcgcttctccagccggcacatctacggcgtgcagggcaccgcgctggtgctcagcgcccacgcgaccttccagcaccccggcgaatgcatcgatgcgacgccacgcctagagcgcgaggtcccgcccccggaaagcctgccggacctgcgcgaactggccgagcgctaccccggccagggcgaggcggcgcaggtgcgtttcaccgggcaaccactgctggatatccgcccggtgaaccccgcggtgtacttcggccgcacaccgtcgcagaacgaaatcgcctactgggtacgcctgctgcaaccgctgacggccgaaggttgcctgcaccatgcggcgcttgcgtatctctccgactgctggttcaacggcgccctgacaccccctgcgggtgcaagggagctgtggcaacggcactacgtcgccaacctcaaccacacgctgtggttccacacccccgaaccggcctgcgacgactggctgctgttcgtcagccaggccacccgcagcctggccggacgcggcctggcgctggcgcacatctaccgccgcgacggccgcctgatcgccagcatggcccaggacctgctgatttctccgaggaccgactga

SEQ ID NO: 364970 - DNA, 1245 bp, Pseudomonas aeruginosa
atgccaatgctgctgcaagcggacgcgctcgacctcagtgaactgatccgccccggcgataccgtactctggggccaggccaacgccgaacccctgccactgacccaggccctgatggagcaacgcgcgcgcatcggccgcttccgcgtcatgctcggcatcgccagcagccggacctgtggccccgaacatgccgacgtggtcgatttcctcgcctactgcggcgccggcgccaaccgcgaactgggcaacgccggggcgctcgacatcctgcccagccactattcgcaactgcccgggctgatcgccagcggagccctgcgcatcgacgtgctgatgctgcaactggcacccgccgacgccaatggccgctacagcctgggcatcgcccacgaatacctgctgcctgcattggaccatgcgcgggtggtcatcgcagaagtgaaccagcaggcaccacgcaccttcggcgaacgcacgctgggcgaggcagacctcgacgccatcctgcacaccgaccggcctccactggaaaatcccccggcacgcatccgcgaagcggacacccgtatcgccgcgcacatagccgagctgatcgacgacggcgccaccttgcagatcggcatcggcgccattcccgacgcggtgctcggcgccctgcgcgcccatcgcgacctgggtgtgcattcgggcagcctgggtgacagcgtcgcgcaactgatgcaggccggcgtgatcaccaacgcctgcaagagccgcgaccggcatgccagcgtaggcggggtgctattgggcagccgggtgatccacgactacgcccacgacaacccggccatccagttgcgctctaccgcctatacccacgacgcggacgtgctcgccagcctggaccgcttcgtggcgatcaactccgccgtggaggtcgacctcaccggccagatcaactcggaagtcgccgccggcagctacgtcggcgccgtgggcggtgccttggacttcctgcgcggcgctgctcgcgccaaaggcggcctgcccatcatcgccctgccctccaccgcaggcagcggcagccgcatcgtcgcccgactcaacggccccgccaccatcccgcgcagtgacgccgggttgatcgtcaccgaattcggcgtcgccgacttacgtggcaagactattcgggaaagagtggcatgcatgctggaaatcgcccacccgcgacaccgtgcggcgctggaggcacagctctaa

SEQ ID NO: 364971 - DNA, 906 bp, Pseudomonas aeruginosa
atgaaccggggccacagtgggaaagtcggggacttttccgaggggccgctgcaagtatgcgagccgccaccgaatttcctattccgccgattgattaaccccgggggtacccgcatgaacctgacgctcctggacgtgggctggcaccgggccttcgggcaactggccgaacgcctcgaccagcccgatttctggcgcgccatggcccaggtgctgggcgaccacatggcgctgggcagctgggtggcgctgctgttcagcgacgaccgcccgcggatattcgccgaaagcccctacgagggcggcggtcccgacccgctgttccacgactacgtgcagggcctgtacctgctcgaccccttctacgtcgccaaccgcgagaagccggcaagcggcctgttccgcctctgcgaggtggccccggaatgcttccgcgacacggaatactaccggctgtacttcacccacaacgtggtcgaggacgaggtgcagtacaacgttgccctcgatggggagcgcagcctgtgcctgtcgctgggcagccgctcgcgcttcgaaccgcagcaggtcgcgctgctcgagctgatacgcccctgggtctgcgcgctgatgcgccagcgcctgttcttcgaggccggcgtcaacgagccgccctcacggccaagcgaacgctggcagggcaacctggagcagatgatggcgcgcctgggcacgcccctgaccgcccgggaactggacgtcatccgcctcgtcctcagcggctgctccaacaaggaggcggcggcgaagctcgacatttccgccgagaccgtgaaggtccaccggcggcacgtctacgccaagctcaagatcaagtcgcagtcggacctcttcaagatcttccataacgcgcagagcactcgctag

SEQ ID NO: 364972 - DNA, 816 bp, Pseudomonas aeruginosa
atgaagcttgaactcgtgcaacaagccgcccgcgacggcgacacctcgtacaacctccaccgcatcctgcaggccatcgccggctgctcgccggacacggacatcgtggtgttccccgaggcgcagatcaccggcttcctcaacgcgcagaacatcgccggcaacgccgaaccgctggatggcccgagcctgcaggcggtacagcgtgccgcacgggagcgcggcgtggcggtggtcgtcgggttgatcgagaacgacggcggcaagttctacaacaccacggtattcgtcgcccccgagggcctgctgctgagctaccgcaagacccacctgtgggtctccgagccgggcctggtgctgcctggcgaccgcttcgccacgctgcaatggcgcggcgtgcgcatcggcctgctgatctgctacgacagcgagttccccgaaagcgcccgcgccctggccgagctgggcgccgagctgatcctggtcagcgacggcaacatggagcccttcggccacgtgcaccgcacctcgatcgccgcccgcgcccaggagaaccaggtgttcgccgtggtggtgaaccgcgtgggcgaaggcgaggacgccatcaccttcgccggctgcagcgcggtggtcgaccccttcggccataccctgttcgaggccggcaaccgcgagtgccggcacttcgtcgagctggacttcagccaggtcgccagcgcccgcgaactctacgactaccaggcggaaaagcgtttccgcctgcccggggaacgcatcgagcacgccgatgggcgtcatgaactgctgattccctga

SEQ ID NO: 364973 - DNA, 606 bp, Pseudomonas aeruginosa
atgcgaagcccattgttcaagacccgtatcactgaaatgctcggcattcgccatcccatcctttgcggaggcatggggcccggtctctccgacgcgacctatgtcgcggctgtagtcaacgccggcggaatgggattcatcgttgccgccggcttccctgatccggaagaatttcgtgagcagctgcggaagtgccgccagctgactttcggaaaacggttcggcgtgaacctctacctttcagggcaagccaaggcggctgggcgtctgcaggagcaagtgaagattctcgcggaagaggatgtcctctgcgtcgagacttctggcgcaagtcccgaaggtattcttccagccctgcgggatgcgggtatcaaggtgctgcacaaggttcccgcggtctgttacgcgcgatcagctgaacggcttggcgtggatgcagtgatcgtcgtcggcaatgactgtggaggccatccgggtacttatggcatcagcagcatggtccaggcgccccatgcctcaaaggagatatccattccgctggtgattggcggaggaatgggaaccggccgccagttggctgccacgctcatgtgggggcagtgttga

SEQ ID NO: 364974 - DNA, 810 bp, Pseudomonas aeruginosa
ttgagtggaaccggaaaactccttggaaccctgtcgatccccgtctgtaccgagggataccagcgcctattagcttgggctatgtcctatggggaactccggcgcgctggcgttgaaggtactggtacatacggagctgggctgactcgaatactgtgtaagcacggtgtcgaggtgctggaaatcaaccgtcctgatcgggccgcgcgccgattccagggaaaatccgaccccaccgatgccgagagtgcggcacgtgccgtactgtccggcaaagctacggcaatacccaaggcccagtccggcgctgcggagtccatgcgcgtggtgctggtggccagacgtagcgcagtcaaggcccgcacccaagccatcaatcagattaaggctttactcatctgcgcgccgcaggcgttgcgtgaccgcctctggcggaacaagcccgctgaatgcatttcgggttgcttacgtctgcacgagagggaaagccaccccttgcatagcttgagcacaacgttgcgcttgttggccaggcgttggctgctactcaatcgagaagttacagcgctcgatgccatgcttgagcgcctgacaaagcagcacgccaagcgtctacggagcagatttggtgttggcccgcaaaccgccgcaactcttctcgcggtgtctggtgataatcccgaacggttgcgaaacgaggcggcactggcagccctttgcggggtaagtccattgtcagcctcctccggtaaaacgattcgtcatcgactgaatcgaggcggtgaccgctctgccaacaacgccctatga

SEQ ID NO: 364975 - DNA, 957 bp, Pseudomonas aeruginosa
atgatccgacgcacccgcctggcgctggccggcgccgccttcctcgccgtctgcgccaccgcccaggccgcccctgtattcatcaacatcctcaccggcggcaccagcggtgtgtactaccccgtgggcgtcggcctgtcgcagatctacagccacggcatcgagggcagcaagacctcggtgcaggccaccaaggcctcggtggagaacctcaacctgctgcaggccggccgcggcgaactggccttcgccctcggcgactcggtggccgatgcctggaagggcgaggccgacgccggcttcaaggcgccgctgaagaagctgcgggccatcgccggcacctaccccaactacatccagatcgtcgccagcaaggagtcggggatcacctccctggccgacctcaagggcaagcgcatctccgtcggcgcgcccaagtccggcaccgagctgaacgcccgcgccatcttcaaggctgccgggctgagctaccaggacatgggcaaggtggagtacctgcccttcgccgagtcggtggagctgatcaagaaccgccagctcgacgccaccctgcagtcctcgggcctgggccaggcatcgatccgcgacctggcctcgaccatgccggtgagcttcgtggcgatccccgccgaggttgtggcgaagatcggcaacaacgcctacctgccggcgaccatcccggccggaacctacgacggccaggacaccgacgtgcccaccgcggccatcgtcaatatcctggtaacccatgaaggggtgagtgacgagctggcttaccagatgaccaggcaactgttcgacaacctgccgcgcctggtcaccgcccatgcggcagccaaggacatcagcctggacaaggcggcgaagaacctgccgatccccctgcaccccggcgccgagcgcttctacaaggaaaaaggcgtactgcccgagtga

SEQ ID NO: 364976 - DNA, 1341 bp, Pseudomonas aeruginosa
atgtccgagcatcccggtccaaccaacgcagaacatgcgtccccttcccatccccggcgcttccgccggccccgctggctggaatggcgacagcgcctggcgttctgggtcggcgcgttactggtgggcctggtggcactggccttcgcctggctggcggaccagtccttcgccctgttcaagcacatgctcggcgtcgccccctggctgccgctgctggtcacccccgcgggtttcgccctgctggcctggatcacccagcactggttcgtcgaggccaagggcagtggcattccccaggtgatcgccgcgctggagtcgccttcgcggcgtttccgcgcccaggtgctggcgctgccggtggccgccgtacgcatgctcttcaccctgggtgcgctgctggtgggcggctcggtggggcgcgaagggcccacggtgcacgtcggcgccgcggtcatctacgccttcggccggcgcctggggctgcatggccggcgcaccatcgccgggctgatcctcgccggtggcgcggccggcatcgccgcggccttcaacacgccgctggccggcatcgtgttcgccatcgaggagctcagccgcaccttcgagcagcgcttcagcggcctggtgctgaccgcggtgctgatcggcggcgccgtcaccctcgggctgatgggccactactcctacttcggcgagatcggcggcagcctgccggcgggctggggctggagcgaggtgccggcctgcgcgctgctcggcggcctgctgggcgggctctacgtcaagctggtgctgcccacccgggccggctggctgggccgcatgtgccgcctgcgcgagcgcttcccggtgcgcttcgccggtgcctgcgggctgctgctggcgctgctggggctggcctcgggcaaccacgtgttcggcaccggctacgaggagacccgcgccctgctggagggccacccgatgaccgagcagagcttcctgctgtggaagttcctggccaacgtggtgtcctacctcgccggcatccccggcggcctgttctcgccctcgctgagcataggcgcggccttcgccccgctgctggcccagttgcccgacgtcaacccgcagacctgcgcgctgctgggcatgggcgcctacctcgccggggtgacgcgctcgccgctgaccgcctcggtgatcgtcttggaactctcccacagccccgacctgctcatccccatgctggcggccacggtcatggccgccaccgtctccggctggatcgcaccggtctcgctgtaccacgccctggcgcggcagatcctcgacaagctggcaccaaatagaccctga

SEQ ID NO: 364977 - DNA, 249 bp, Pseudomonas aeruginosa
atgactgcgataaccgccaacctgcgcagtctagtcggctacatcgacaccggtgtgcgtcgcctcgcccaggcctccgacgagctgagcagcggcagcctgggcgaccgccgcattaaggctgtgggtgtcgtcatcgcagccaacgctggcacgatcctgagcaacggctgggaggggacgttccgaagacccatgtcagccgggcgtgcctgccctcctctcacccgtcgtgcgcgggggcgataa

SEQ ID NO: 364978 - DNA, 825 bp, Pseudomonas aeruginosa
atgagccaggaacgtcttgaacacatcgccattccaacggcgctcggagagttgcacgtcagggttggcggacagggtccggcaattctcttctggccgagccttttgatggatggaacgatgtggcaaggggtagcggacagactgatgtcgcgctatcaggtagtcctgatcgatccccccggacatggagacagctcggcgctatctcgccatttcgacttcacgacctgtgctaactgcatcgtccagatcctggacagtctgggcatccgcaatgcccactatgtgggcaactcgtggggagcgatgatcggcggaacctttgctgcgctctatcccgacagagtcggtgtggccgtgcttatgaatggaacggcctccccttgcggcccgggccagcgcctgcaatttcagctgatggtccagttggggcgcttgctgcacggtataagggggcccttgcgagctagcgctgttgcggccttcctggggccaaccagcctacgagacaggccacaggtcgccgccggtgtccgcgccgccctggcgcgaatcgatttccgctcagcccgctgggcagtggagagcgttgttcttcgccgccctgcccagcacgagctgttgagcaccatccgtacccccgtcatggtcgttgcaggcgccgaggatgcgacctttcccgtcgccgagacacaggccatggctcaagccatcccaggctcatcgtttgtcgtgatgcaaggggccgcacacctcgctgggctggagtgcccaggggaggctagcgagatgatcgagtccttcattcgtatccacggatga

SEQ ID NO: 364979 - DNA, 390 bp, Pseudomonas aeruginosa
atgggggacaaagaacactcgccttcagacgaactgctgcgcctgtaccaaacctgggccgatggcggcgtcggcctgatcctcagcggcaacgtcatgatcgatcggcgcgcactgactggtcccggcggcgtggtattggaaaacgaccggcaattggcgcggttccgtcagtgggccagtgcggggcgtagccgaggggcgcaattctggctgcagatcaaccatcccggccggcagatgctggccagcatgggccagccgaccatggcgccgtcggcggttgcgctggagctcggcgccttgtcgcggatgttccagatgccgcgggagatgagcgaggcggatatagacgatgtcgtgcatcgcttcactcgtacggcagtgtag

SEQ ID NO: 364980 - DNA, 855 bp, Pseudomonas aeruginosa
atgagccactacctttccggcctacgcgcgtgggccggtttctttcaagtcctgatggcgttgctggtcagcgccctcctcctcggctgccagtcgcctcgcgaagcgttgcagcagttggcggatgcgcatgggcggcagttggagatcttgtcggggcagccatttccgttggtcatgctagcgccgcagggcacaacgaaaaccactcgtttacgcgtctacctggaaggcgatggccatgcctgggcgacggcgacacagcccagcctggatccgagtccgcgcaatctgctggtggcacggctggcggtagatgatccgtcgccgaatgcctatctggcgcggccctgccagttcgtgattgcaccggcctgcgaacctgacctctggaccgatcggcggttttcgcaggaggtggtcactagcgtcagccaggccctggaccagatgaagcagcgttacggcaatcgggagttcgagctagtgggatattccggaggcgcggcactggtgctgttgctggccgctcagaggaatgatgttgctcaggttcagagcctagccggcaacctcagcccaaggctttgggcgcagatgaaaggactctcgccgctcgacggctcgctggatccgttggactatcgcgatcgcctggcagcaataccacagcggcacttggtgggagatgcagacgacgctgtccccacatctctggccaaggcctatctcggacagctaaccccatacacctgtagtcaggttgcactctcgccagcgacaaatcatcagcaaggctgggaggctgtctggaaatcatggagagataagccgttgaactgcgggagtcattaa

SEQ ID NO: 364981 - DNA, 1386 bp, Pseudomonas aeruginosa
gtgaaaaaaagcacctacctgacctcgccgaccatcattcaattcgtgaactggctggcgacgaacctcgacaacggcacgctctcccactgccacaccaaccggaagagcggtggcatctggagctgcggcggcctgtacgatgcgtacgctcaatatcactggccgcatccctcgttgccgcgcctatcccgcccgaagggagcggacttcgcccacaatgcggcaacgctgtcggcactgcgtagcgatctgcaaaaagtactgtgcccaacgcctaacgacagcgcggcctgtatcgccgctatcgatgtaatgacctggggcggcgtacgtgccggtaatgtccgttggctcaatgcgaacgccaaagggctggccgaactgctcatcaatatccgcgatgcattgaatgccaacgatacctcggatcatcggctgaccaatccgaacccgcgtttcaacgctggcatgaccaaggtctactcgctgatctgcgaaagcctggtcatctacgacagtcgtgtcgctgccgccctgggctggatcgtggtcaagtactgccaggccgtgggactgcagcaggtccccgaagagttgcgcttcccctgggcaccggcaaaaagtacgccgggcacctcgaatcccaaacaacgcaatcccagcgcaggggccctgacctttcccaccctgcgctccggcgctcatcacgctcaatggaacctcaaggccagttggctgctggaggcggtgctgtcctctcccaaggcccagagcagcgagttcgtcacctcgatcccccagggagaacggttgcgcgcccttgaggcagcgttgttcatgatcggctatgacctggcttcctgccctgccgcaggaaacggttcagcttctccggaaccaaccagtgcaggcccagtggcaccccagggtgaggccttcctcgaaggcacctccagatacgactgctacacgctaggcaagggcaggccgttccagtaccagatccaccctgaaggcatcgatatcggtaaggaaaagatcatccctgttcaggacatcaatgccaccctcaccaggctgtggcatcacttcggtgacaatccgttccccctagccaacagcgccacggacgttcccacgggcgaagcaccgatgggcatgggaactgcctatttccaggacaccggcaaacccgccccgcacaccagcaggctggccgcggtcctggaagaactggacgtaatcatcccgtgcaatcccgcgtcggcgaggggcttgcactggacgcttaacgctcagttgctaggtctggactcctcctcggcacaggcggacgtcagccccattctggaagaatttctggcactggaagatgaggactag

SEQ ID NO: 364982 - DNA, 1887 bp, Pseudomonas aeruginosa
ttgaatacccgagcactgactgaaatcctgcaggacgtcatctcgctggcagaagcgatgggcgagttgctggtacaggaatggcacagggaaggtggcccgagggggactggcgacaaggccgagattgatcacgagatcgaggtccggctgcgtcaggaactgctcaccctgctggacgctgacttctggggcgaagaaaccggaagccggctcactggccatccctattgctgggttgtcgatccgcatgacggtaccagtgactttctgcagggtctgcccggcagttcgatctccatcgggctgttgcgcaaccagactccggtactcggcgtggtccatgccccgatcagcccggaccgtggcagtgactgcatcgcgtgggcggaggggctccctcatctgctgcgcaacggcaagccggtaaatgttgatctgagcactgtcgggtttgaacagagcagcattgtctggctaagcgccgcggcgatgaagaaacccggcatcaatagcgaactctgtcagccggcccgctttatcgcgcaatccagtattgcctaccggctagccaggactgccatcgacgatggcgtctgtggtgtgtccctggtgcccttgtcggcgcacgatgtggccgccggtcatgccctactgcgcggagccggcggtgtgctgctacagcaggatggcaagccgctgacctacaggtctatggacctggtgtcgtcccgctgcttcggtggcgctccggccgcctgcgaagtgcttgcaacgcgcctttggagcagggcactacaggcaccgaccgagatccagcgagtggcactcggcttcccttccgtagaacggatgcgccgagcagcaggttgtctgacgggcctgattgccggtgacaatctcggcgcccaagtggaattcatggacgcagagagcatcgccgaacgctgccgagcgcgtcccctgcgcatggaggatggcggtgtctggaacatcctggccggacaacccaccgacgatggcgaactggcgctggcattggcacgcagcctggtcgaggacatcggctattcgtcggagggcgccgcccgcgcctacgtccattggctgaactcccaccccttcgatatcggcaacacgacgcgtcaggcactcatcggccccttgcgttacccgtaccagtcgattgccgaggcctgccgcaatgcagccagtaccagaagccaggccaacggtgcacttatgcgggtagcccccatcggcatcgcggcctatgggcgaccagagcttgctgcgcagtgggcgcgagacgacgcgtccctcacgcatcctcatccgatctgcctggaatctaatgcagccatggccgccgccattgcggtcggtgtagcaggtggcagtcgagccggtatgctacaggccgcccttggagcactcagcgaaaacgaagaatctttcgtcgtacgcaactgcctcgaagccgctgcggccggcgagtccgttctggagttccaggaacagatgggctgggtgctgatcgccctgcagaacgctttctatcagctgctgcaggaaagaagcctcgaggaggcgattatcgacacggtgctacgcggtggtgacaccgacaccaatgcctgcattgccggcgcattgattggtgctatggaaggcgtggcacgcgtacctgcagactggagcctgtctattgccgcctgccgtcccctagacaccgtgcgaagtcgccctgacgttttctggccctgcgacatcgccctgctgggccaggcactgctgagtgcatcgagttccgcggagcgaaccgcaatgcctcttcccaacactaccgccgatttcctctggccccctcaaggaagcaacgagtga

SEQ ID NO: 364983 - DNA, 996 bp, Pseudomonas aeruginosa
atgaacatgcgtacgcgtggggagcttctgttgaagctgctgccggtaaagtcgcaggcagtggataccgcaacgctatacgagcgactgaaggagcaggggatcaaggtcagcctgcggacggtgcaacgggatttggatcgtcttgcgacggactacccgcacattcatagtgaaagcacgggtaatggctttcgttggtgggcagaccgggaactgtcgcgcttgagtctcctgcctaccgatgccatgaatctgacaatgatcatggaccatgcagcacgcttcggcatgcaggcgcaggtcgagaacctggcgcggctccgtgactacgcccgagggcttctgcgggaggcgcggccggcggaggactgggcgaaaaaggtcgtcagcaccacccgtttcatcaccctgcgccccggcaagatcaatcctaaggtgctggctaccctccagcaggccctgctggatgactatgccgttgaggccatgtacctcaagcgtggggccaaggagcccaaagcctaccggctcagaccactgggcctgtcctatcaggattccaacatctacctctcctgtgtcttcgaagggcataaaccgggggactctcccagggctttgccattgcaccgcttcgcctccgtacgcacgattttcgccgacatcccggcgcccgagggcttcgatatcaattcggtcgaagcacgacgcagcctggtggacctgaagtccgactcgcccgtggaactgaagctgcgcctggtcaaggagatgtatgagcgtctggccgagaaccctctgaccgaggaccagcaactcaccgcggaggcggacgggtactggaccatgacgggtaggctgtacctgagccagggattgaagctctggctgcttagccagggtgacatgctggaggtgctggcgccggcaacgctgcgtaaggacatcgcagcgacagccatgcgcatggccactctttacgagagcgcctga

SEQ ID NO: 364984 - DNA, 165 bp, Pseudomonas aeruginosa
atgaagacttattccgcatttctgcaccgaatcgacccgagtgccggccagaaggccaacttcaccatcacggtgcaagccgtaacctcggaaatggcccggaaaacggccgaggctcagtatcccggctacaagtgcgccagcgctccggtccaggtgcgctga

SEQ ID NO: 364985 - DNA, 726 bp, Pseudomonas aeruginosa
atgatggaagctggtgtctatgagctacaggtgcaaggggccggtgctctggctctggccgaggagccgacgatcgcgctgctggttgcggacgaagccggagtccagtggtgggggccgcgcctggagtcggcgttgtcgggagccaggtcagggcatggtgtgcgcaatgcactcaaggtactcattcagccttggagtagtgtgctgccggtagttgtccgggatatccacgttatcggcgctgacactttgcccatcgatgtgctggcccgtctcgagtcccacggcgctttgctgaacctgcatcacttcgatagcagcgaccactctgaatccatgctgtggcgcagcgagagcgatctggctgcctatcttgaaaagctggttgccaatctgagcggccaggctggctttggcatgcgctgggacgattacgctctccacctgcgccaaccgggtaggcgagtagggcgacacgcccgaggagcggactggcagacgttgctgccagtcctgctggattcgccggagcaggcctggcaggcgacgtcggtgatcctgttcctggacggtggcgcagacctcaccttgggtcactacgtggaggtctgcaattggttggatagcaggcttcctgcgcgctgcctggtcaccgtcagtgtattgactggcgacggagacccgtgttcggcgaccctgctcttgacgacattgcaaggttga

SEQ ID NO: 364986 - DNA, 294 bp, Pseudomonas aeruginosa
atggcccgcacccaccgccgccgtacctgccgatacgattatgtgttcgctctctggggcatcgacgaggccgattgggacttcaggtccattgccgttcgccggcgcctggcgcgtttccacagcgagaacttcttcagctatcgcaagcgcccgccgcggagcttccgaaaggtggatgaccgcaagcttcgccagagcaaccggacagcattgaagcgctggcttcggtggccgcatgctgaaccgctgtacatggatattcgtcgctgtcctgactggcagccgatgtag

SEQ ID NO: 364987 - DNA, 315 bp, Pseudomonas aeruginosa
atggagttcaccgcacatgccatccagcgttgcagccagcgtggcatacgcgtccggcaggtcgagtggctggtgaccttcggttgccatacgtggaaccgcggtgctcgggtgtacttcttcgaccgtgcgcgttttcagcgtctattgctcagtctggagcccacagagcgccagttggctgaaaagacgcgtggcagctatgcggtggttagcgatggacgagtagttaccgtcgggcatcgagaggctgctttctgtgcaagcaagcccggtagtcatcgctcccggcatgggcagatccatgtcgcatga

SEQ ID NO: 364988 - DNA, 141 bp, Pseudomonas aeruginosa
atgaaaaacctgtttgcagccatcggatttgtcgttgttgccgtgaaaggctgggagctctatcgcgattacagcgagatgaagcgggagagagaggcacgccggcaaccgggagctccccagcctgagggatactcctga

SEQ ID NO: 364989 - DNA, 675 bp, Pseudomonas aeruginosa
atgaacaggatggcagtcagcccgtggctgatggtttccaacgaaggcccgattacctgcgccgaagaacgcggcggcagagtgcatatgcgccaaggggatgcggatggtgcatgtggcccttacgcactgatgatgggtcttatcacactgggtgttctcgatcgggatcacatcacagacatgagcgcctggcatggaaacagcagggaaggccgattccgcaatgccctgctggagcacggcgcactgatttcgaggggaacaaacatacttgatcttattggtctcgccgaccatttttcagggctcggtattcaggctgaacaaaccctgggaaacaagaagacactcatagatcagattcagcgcgatatcgagaatgatgccattcccctgatcagcgtcagttggtccagattcgaggggcactggctgatggttgtagggcaccaggggtacgaggccgccggcgtttatcaaccgactcacctgctttgcctggaccccctcagcgaagcaccgaaagcctccctgtggaacgcagtcattgaagtcgtcgatgaggaaggcaatgcactgcgcggtggcacattcacctgtgatcactggggtctcgacggcaatgttacccaatgcaagctcgatgaactgctgacgctgtccaggagctga

SEQ ID NO: 364990 - DNA, 444 bp, Pseudomonas aeruginosa
atgatcaaggatttctcttccgacctgcgccaagccaagaatcccgtcccgtttctggccatcgacatgtgggggatcgaaggcccctatgcagacggcaactggcacgagctgatccacgacttcgccaggaactgggtacgccgaaatcccgagcagcagacggcaaccctctggtcgacagttcagccctgcgccctcttccctaacggcacgtcctgctacctggccggcagcagcaaactacctttcgctttcctggaggaactcgaatcccacctgctggggcagttcgggcagcacgccagaattggcggtgaaattctggtgagcaaagcggaaggctggcggccttatctgcacttcgattcaggcgaggcctgggaacagatcgacgcttatgaatggcgcccattgcagaaccaggaaaaagacatcgattaa

SEQ ID NO: 364991 - DNA, 1047 bp, Pseudomonas aeruginosa
ttgcccagcaacagcacaagaaacaccctcgcccgtcagtgggaactgctccgtcagcttccttccaaggggcccgggatcaccagcagcgaccttctggaaaggatgaaggatgctggctatagggtgaccaagcgaaccatcgagcgcgacttggtcgagctctccaggctcttcccgctgacctgcaacgacggcggagtgcccttcggttggtactggacgcccggcaccagtatcgaactacccggcatgagcgcaaccgaggccctcagtctcacgctgatcgaagacagcatccgccccctgttacccagcggaatgctcaacgccttgcagagccgttttcatcatgcgcgccagaagctgacgtacctggcggacgagaatctggccgcccgctggatgaccaaggtcgccagcgttcgcccggaactcgatcttcaagcgccggaaattgcaaccgagatactcgaggcgatccagctggcgcttctggaggaacggcaacttgcctgccgctactattcggcccatggcgacaagaccagcgagctgactctcaaccccctggccatggtccagcggggacaggcgacctatctcatagggacggcaccaccctactcggacttgcgccaatatgcggttcaccgctttcggagtgtcgagttgctgccctctcccgcggagggcgtttcgcagttcgatcttcgcgaatacctggccagcgatgccctgcaattcggcagcccgcagaaaatcaggcttcacgcctgggccagcgacagccttgctcgcctacttcgggagaccccgctttcccccgacatgcagatgcgccgctgcgaagatggataccagctggacgcgaccgtcagcgacacctggcaactgcaatggtggattctgtcccaagcggacaacctgatagtggagcagcccctggagttgcgacagcgactactggaaaagcttgagggcaccctgaagcgataccagacgcctccccctcgccaccagccaatcgaaacacaacagcaatga

SEQ ID NO: 364992 - DNA, 279 bp, Pseudomonas aeruginosa
atggatttcattactctggtatgggggcttgccgcctttactctgtttgcgctgttgagtggggcctggctagccatcgcattctggctgcgctgcgaccttctgcaggagcagaaggctgcgctacaacgtcagttggaggttgggcggcaagagagggcgaagatggtgaattccatgatggagttggaagccgcgctgagagccgaacgctttcacgtcgagcagcttcagcgcaagatcgctctgttgaagctgccgatcagtgggggaaactga

SEQ ID NO: 364993 - DNA, 696 bp, Pseudomonas aeruginosa
atgaaagagaagcccaacgaatggatttccgtctcggacctcatgtccggagtgatggctgtaatcatgctcatgctggtggtttccgttttgcagaacaaggccgcggaggcagccatgcgggcggagaagctggaaatggaggcggcccgcaaggcagaaagggaacagggtgccgcagcgcagcaaaccagaatcacgaaactgctggaagagatgcaggcagatctcagccagcagggtgaaacggaccttgtggacattgacatcagaaatcgccgcctgactcttcccgacaaggtgtttgcgcgaggaagtgcatgcatcaccgatgaagcccgccaggctctgaatcggctaagtactcgggtggccacctttgtatcgaatgacaggcaggctcgggtgctcgtcgaaggtcatacggacaatgttcaggtatcgcgacctgtggttgatttcaaccgtttctgcacggtctacgatgacaacttcacgctatccgccgcccgagccagggaggctcgcaagttgctcatacaggcactgaacgaagagcaggcaaaacgtgtgatagttgccggttatggcgactcccaccctctggaaggcaaagatccgggagatgcgcgaaaccggagggtagaaattcagctcagcccctcaggttcaggcaaggcagcggacgataactga

SEQ ID NO: 364994 - DNA, 1707 bp, Pseudomonas aeruginosa
gtgaacggggagattgtcagctttctcactccctctcccgagcacgggatcgaagtagtgttcttttccatcatcgttggcagcaccatcatgtcgctgatcacatccgagctgctggggcgccccgctgcctgggagcgcaactggcagggcggttcccgttcggctgccctagacatcgagcatggctcgatcagtgaactgagccatgcggtagctacgctggccgagcgaattgccgtgaacctgcccggcctgctgcttatcttcggcctgcttggcaccttcctgggtctggggctagctctggacaaggcatcgtcaatcctgcagggcaacgatgactcccttaacgccatgagttcatcactatcgcaactgacaggaatgatgaaggacctcggcaccaagttcaaaacctcgacctggggaatcatggccttcatcactctcaagctctgggagtcggcccgatggtctgcagacagtcggcgcgtgaactggtgcctgaagatgatgaaaaacgtcatcgatcaggaacgggcccggcaccgtgcagaaagagaaaaacagcaactcgaggcacatgaggtactcgagcgcaccggccaattggtggtcgagtcgatcacctcccagagcgtcactctgtccgatgaacttcggcaactgaaggccatcgccttccagcagggccagatacgccaggaactgatcagatacctgacgaaaagcctcaagtccgtcgacacgcaacttgccgaacaacataaacagtttgagagcatttccggacacggcctccgctctgccgacctcctggaagaattcgtgggcagcagtcgtgacaacctccaggctctgcagcaggcaggatccaccatgggaagtgcagccctggaagtcgccaactcggccacggcacttcagcatggagtagatgccttgggccagcgcatgaatcaggtcctggacagtatgcaggccgacctcaatggcaccatcaaccggatgaacaaggacttcgccagtaatctgcaagacatgggaagtcagcttcagaacaccatcggccatctggggcaggtcatggacagcataaagtccgatctcggccagaccatcgagaccatgagtaatgatttcaagcgcagcacgctggagatggcagatcagctcggtaacgccacttcggaaatctccggggcgatcacccatctgaacgagaatgtcggcggtgtcatggccgaggtgaagcagaccaccgttcaggcaaacgagatacagaaaaaaaccagtgtcggctttgtacagaccagtgacagcctgaacgctgccactgtgtcgatgacagagcgaatgaacgaactgggtcgggaaatcaagagcgggctcagcgcagtctcgaagagcagcatgcaggtacagagcatcatctcgaagctagacagcttcccggaacttccccgccagttccaggtcctggccgatacggcaaaatcgggtaacgaaaggctggataccctggtcacttatctggatcggatgacgacgatgacccacggaattccggataacatcgaaaggctgaatggcattgccagcgagacgttgctggcacttgagcgtacacatcagtcggtaatcaaactgcgggagtcctcctctgaattgcagtccgatcaacaaaacctgataccagcctga

SEQ ID NO: 364995 - DNA, 1254 bp, Pseudomonas aeruginosa
atggggctcattagttggattgtggataccttcgacagtgtgtgcgaaggagcgaaaacaatggtgagagctgccaagaaggttgcagcgaagacaatcgaatggcttgcaacggaagccgaaactttcgtcggggaagtcaaatccctctaccaagcagccaaaccctacattgccaaggtgcggtatggcttgaccctcgctgccaagacagttccctggccctggctcagagtcgctgcaggaaagcttgagcgagcacttgcctttatcgagcacctggacaatcaccccttcgcagcaaaggtacagtcagccatcgactgggtaatcgccaaggcccgcgaactacagaaacacctgctcaatgaacaggaagtccgcgaagcggaaactcgcgcagaagatcttgaacaggccatcgcgcaggtgccggatgcagaaaagccagcattgcgtgcggcagccctgatcaatcgatacctgctggtcaaggcaagaaccgcgcaattggtggactccggggattttgtggatttcgaacactatctccgtgtaagggcggtgcaaaagctgctactggcctatgaggagcagatgacgaaactggaagacattgaagcggttaacgacgaacccctgttcatcattgacgtcgcctttgcactggtcagcaagcgggctcagcttgacgatgcagccctccaacggctggacaaggtaaccattggccacttcggaaagccggtcataccgtttgtcttcgaggaaatgatcaatacctggagcctcgatctgcagaatcttgaacaggcatgggacactcagaacaaggccgtggccaaggacaaggttctcaagcgtcggctcgaactcgagcaaggcctggagccactccctgctgacgaggctgtcatgctcagtacgctcaacgttacgttgccgcaggacgaagcaaggcttgcgagtctgggcaacgatgttcgcgccaagcgcaactatgtctatgccgcagaaggattcctgcagctactggagaaggacgaacagcagcttctcgccaatggagaagagtacctcgcagaattcggcagccagatcggcgtcatcctgattcgctgcgctcagaacaatgtgaaatgggaaagcctgagtgaggatgaacaggcactcatcattgactttgccaacatcttcgaagccgactgccgtgcacggacagaggcattcaagacagtggaggttgctgcgtga

SEQ ID NO: 364996 - DNA, 972 bp, Pseudomonas aeruginosa
atgtcgtccaaggaatatctgtaccgcaagctcaggcccgagcttctcgagccggaatccaaacgcccgggcaacatggagaagcctcgcagcatagaaccacggttcactctggagcgagatgtggtgctatcggcgagcgcgaagcaacagctcgatgaggccatcggaaagatccgcaatcaccagaccatctatgtcgactggggcttcggagaagtcgatccctgtggctccggcactctgcttaatttccacggagcacctggcaccggcaagacgctgagcgccgaagccttcgccggcactctgggcaagcggatcatcactgccagcattgccgatttggaaagcaagttcatgggagacacggcgaagaacattgcgctcctgttcgaggccacacgtcaggaggacgccgtgctgtttctcgatgaggcggacacactcttggggaagcgcctctcatccgtaacacagggaatagacaacgaggtcaacgccatgcgttcgaccctattgatcgaactggagaaacacaccggtatcgtgatcttcgccaccaacttcgcccgcaactacgacactgccttcgtaagccgcatttcccagcacatccacttcgaactgcctggttatgacgagcgtcatgccatctggtctcgcatgctagtacccggcatcccgctcggagaggatcggactcagctgctcgatgcattggggacactttccgatgggctttcgggacgggaaattcgcacctgcatgcgcctggcacttcccaagccccttatgagcaacggcggcggagtattggtccgcgcccatatcgaagatgcaatcctgcagttgaaagcaacacagaaaagccttcagggctcacaccctgacgatcagagcgcacaactcggcgcggcaagaaaactactcggaatcagcaagggagatgtaacgaatggggctcattag

SEQ ID NO: 364997 - DNA, 726 bp, Pseudomonas aeruginosa
atgtcgattgcacttgatattggaaatgacctcgacctgctcgcccttctgatgaaggcggagcctcatgatctggatgtactggtgaatgtactgaccgataacgggaaggggcgcctgtcgctctcgggcagctcgaaggtagcgctgctcgatgccgggcggttgcaccgctatgacgaggacgtcatcaggctgataatctcggagctccagctttttggcggaaacagcgttgtgaacctcatgcggggcaacggtgtggaataccgtacgatcgtgactgatgtagctgactctcttggcctgaaggtcggatccgacgagtcgctgttgagtgccgagggcaggatactgagctctctctgcaagaaggcatgggaacgcatggatgaggaggaacgtcagaggtaccgagatgattttctcgagctggattccggtctttacagttccgctaccatcctgaaaattatccttggcaggggaaccaattgggtgatggggctggctgcggcgccttcgcttcttcgattggttgccggcgggatcgcgggccgtgtagctgtcgggggggtgatgagcgctgcggccggtgctgcgctgctggccggttggggggcctataaggcttccggagaggccttgagggttaccattccttccgttgttcttatctcaatcattcggcacaagcatcttgctgcaagtaaaggtgagagctga

SEQ ID NO: 364998 - DNA, 1146 bp, Pseudomonas aeruginosa
atgcataaactagattcgggcaagggggcggcggcgggcccatcttcggcaattctgatcggttactctgcagagagaccgttggtggtcatagacagtttgccggactgcgtggatctctcagatgccaatctactgggttgcggtggggctcatgtcgatcggctggctccccttctccaggctgttcccagtaccctggccgggctagaggttgcaggccatcgctacctgcgtgtggtggtcgatggtcccctggctgctgctgccgacggtaatggcctgcgggggttcacgcgtgatgtcgagggaaacttcagaagtcatggtcgctttttcgaggacgaccgcctcaagaaccttgtcgcggggggagcactgttccagattgcatccattgctgtagcccagaagcatctggccgatatcagtgccaagctgagcgagatcagggagggcgttcagaggattcaggagtttctggacgacgagcgtcgggcgatcatcattgggcgaattgattatctgcggaatgtggcgcccgtagtgatggccggagaggcctcattatccgtctgcaatgaactggagcgctgcgaagtcgatctggtggctgtgcagagacacttggagcttcagattgggcgtcttgcagatgaggttgcggagcagaaggataccagcctttttggaagtacagggcttaccgatgctttgcttgggcatcaggaaaagctggagcctctgctggagcaatggcaactttgcatggcagctcgtctggtggcttgccagttgctgggtacgttcagggaggcggcatccatggcggcaaagcgtcagaaggatctggagattgcaatcgagcagtttcgatcgcgctcgggccccacatatcgcttcatgcaggcgatggaaaggcgagtccgcaatctggctgcggtaactgattccaggacgacaatccatgcaaatcggattcgcctgagcgcatggggtaagcatgcgcttcccgagttcgaaaaggaatgctcgaaatcctttacccgcatagcacaagtggggcttgagcagcaaagaccggtgacactggcactaaaggtgcgtgagggacagattgtggaagcatttcacctgcccggctag

SEQ ID NO: 364999 - DNA, 213 bp, Pseudomonas aeruginosa
gtgccagtccctccccaccccttcaccctcacctgcaagtactgctcttggaaaaaaaccattttgccccggagtgacgaactgatgctcggccacgactggttcaccaactgccccaaatgccataccccttcgcttgagcgccgttatgcgactcacaaagaaattctcaaagctcgcctggagcagttcttgaggcttagtggaagctga

SEQ ID NO: 365000 - DNA, 1128 bp, Pseudomonas aeruginosa
atgagtggaaaagacgaagaaatcgtcgtgcgcgccctacgaacgacacagggcgacaatttggacgtatatgcattattcgttcggggctccgacctggtacgtatcgctgacatcagtagaatttcaagagacgaaaacaacacactcaaaggatttcaacgtccagagatccgcagtcacgtaaaaggcattgttgactatctgaaccaaggtaatgtgctctttcccaactctattatcctagccctgtctccagacataaaattcgtcgcagcccgcggtagcaggcccaccggcgacgaagggattgcgcaagccggaaccttgagaattccccttcgaaacgacggcctccgctcagcctggatcgtcgatgggcaacagaggtcgctagcattagctgagtcaagcaacgccgatctgcctgtcccagtggtgggattcgtgtcggatagcctcgcgacccagcgcgagcagttcattctagttaataaggccaagccactgccgaccaggctgatcaacgaactgctaccggagactggaagcattctcttgccacgtgaactcagtgtacgtaaggcacccgctgaactctgcggcttactgaatagggatccacactctccattctatcgccttataaaattgtcctctgacaaggtagagtcacaggcagtagttattgataccgccattgtaagaatgatccgcagcagcatgactaatccattgggtgccttatacccctataaatctagcgatgacgaaacgaccaatgttgaagccatgtaccaactactggtcttattttggcgcgctgtcaaagaatgcttccccaacgactgggcggtcgaccccaaaaacagtcgacttatgcattcagcaggtatcacagcgctaggcgtcctgatggaccgtatctacgccaagatcagtggccacgaaggaaactataaccttatacgcaaagaagtagagaaaattgccccccactgcgcctggtcttcaggaaaatggccactacttaatgcatcctggaacgaggtgcagagcacaccgcaggacatcaagaatctgcaagacacactcattcgcctttacatgacaagttcacaagcatga

SEQ ID NO: 365001 - DNA, 936 bp, Pseudomonas aeruginosa
atgagcattgtcatcattaccaactgtacgaaccgtaaacgactcggaggtctcgctccactggagctctgcacctctcacagccagtcgctgactgccgtgacagccacttggatccagcaggtgaaggcaaggatcgcctcccgcccagccgagtcgctctatacaggccggagcgtacaagacgcaaagtgggtagcgcggcaactcgatgcgaaactaatgttcgcctccaccggcatgggcttgattgcaagtgagcatccctgtccgccatacaacctaaccgtcgcagcagcgcccgattcgattcgtccctggcttagcaagataggactgcacccatcagactggtgggatgcgatcaattcacactggcatcgtcctaacccaatagccacccttgcccgacgcacagatatcaagcacatcctggttgcgctctcggcgaattacatcgacctggtcgccaacgacttggggcagatcggccacaccgatcggctcaagatgcgtttcttcacctcacgtcctggcatcaaatgccttccggagcaatttcactctctggccatgccgtatgacgaacgcttggagagctcacacttggccggtactcgaactgactttccgcaaagagccatgcggcacttcgttgaattggtcgccgcccccaccaactctccaaacgccgattatcaggcagtcgctaaggcaatgtccgcactaacgacgatggataccgtaaaaaggcgtcgagtctccgatgaagaagtgaaagcactgctgaatgaggcatgggatgcccaccagggcagttctactcgtctactacgctacttgcgcgacaatgccctggtcgcgtgcgagcaatctcgtttcagaggcttgtggttggaactgcaagaactcaacgcgcagcggagcaaagcatga

SEQ ID NO: 365002 - DNA, 996 bp, Pseudomonas aeruginosa
atggccatagcgtctatcgatcgtgtaaaacgtgatgaaaatgggcgcctgcaagggttccagaggccgctagtatccaagcacatcagggaaattcgcgactatctagaaaggccagattcggtgatgcccaatgccattgtgctggctttcaccaatggtgtccgagtcgtaagtgatactggtgcttatgtggagatcgaggtcgatgtctctcttggtcccgttggttttgtcgtagatggtcagcagcgtttgtctgcaatggcaggattgccagagcgggatttccagttattggtttcagcgctaatctgcgaaactccggaggaactgcgtagacagttcatcctagttaacaatacaagtccgttacccaaatctctcatctatgagttgctgccagcaattgacggccttccgaaacgtatgacagcacgtgcacgtgctgcgcgcgtggttgagttgctcaattttgatagtcgttcgtccttgcaggggcagatcaagcagcacacaaatccgacgggcattattggtgacacagccctccagaaaatggtgatgaactcattgtcggatggttattgtcgcactgttatggatcatgaaaatggtgaggaaagatgtttcatggccataagtgagttcttctctgccgtgcaggaggtttttgcttcggcgtggatagggcatacgccaagaacttctcgtttagtgcacagtgctggaataatttccatggggtatgtgatggaccaactatgtgctacaggaagtccattggcgccgttgttcaaacttggactgaagaagcttgaaggaaaagttgcttggacggcggagcaaggggcatggggttttcaaagtggcttaagagtatggaattctattcagaatttacatggtgacatacatattctctctgattatctaacgcgacttcttcgtagagaatattccgctgcacggcgtgttgtcgtgtatgatgcttaa

SEQ ID NO: 365003 - DNA, 861 bp, Pseudomonas aeruginosa
atggtgctgggtgatgaccaacacatgctcctgcccagccagcgccagcagacgcacgcgcagcagcggcccacgagccaggtcgaatggctggcggatttcctcggccacccgctggcgcaacgttgcttcgctcgccccggcgcaatcctccaggacaatgcgcaacggcatgttcgccaggatcgtctggcgcgcctgaccgtcgacctcctcgaagcgggtgcgcaaggtctcgtggcgcagcaccagccaatcgaaggcctgctgcaacgccgcctggtccaggacgccacgcacgtgcagtacgctggggagatgataggccgcgctttcaggctccagtttccagaggaaccacatgcgttgctgagcatgcgacaaaggcagctcggcgactcgcggcaatacttgcagcacaggggcaacgctcgccgcctgggactccagggaagcggcgaagtctgccaggaccggccgctcgaacaggatgcgcaagggtacgtccagctccagatcctggcgcaggcgcgagaccacccgggtggcgctgagggagtgaccgccgagttcgaagaagtgctcgtcgcgggcgatgccctcgacaccgagcagcgcctcccagatcgctgcgaccgaacgttcgagcccctcccgcggaggctctccggcctggtggcgggcagctgcgtccaccttcggcagcgccttgcgatccagcttgccgttggcgttcagcggcaagctggacagcacctccaagccgtcggttgcatgtacgcaggcaagcgtccggccagccaggtgcgcagctccgccagaaggtcctcaccccgcatagcgtcacgccccaccaggtag

SEQ ID NO: 365004 - DNA, 1041 bp, Pseudomonas aeruginosa
atgatcgactggattgcggccatgatcgaactgcaccacgcgcctttgagcagtggggcggtggtctgtatcgaggctgacggcacggttgcttgggaaaccccgcgcaagatgctggtccgtggttcccatgactcgacgatccatatccggagcgtaggaggggacgggcagggcaacgcgactcatctgtacatcgacggcaacccaagcaagtggttgcaaggacataaccttgttggttcctgtgatctcgttgccctcgtctgggatgcttttcaacgcctctgcgccctggtgggccttgagccgactgactttgagcgtcagaaggtcagggcagggcagtaccgcgtcactcgcgtcgattacaaccgaatgttcgaacttccaagccgggccgatgttcgagcctggctgcgtgcgggcgagttcaaatgtaagtctcgtcatggtcgcccggtaaacaatcgcgggactctaactttcggtaaaggctcaagtcattggtcgattgtttgttattgcaaggccgatgaaataacttccggtggttcgcataagttgccagaagaattccaccaatatcctgaaatctatcagtggatagataacaagctccgcgttgaacttcggttgcgctcgaagaaactcaaggcgctgaaccttgaatatgcctctcaactaacccccacggttctctggaagctctaccgtgatttcattggggaacttgatatgtcagagcaaatagaacttaactcggagcagttgctgtcgctgccgaacaagattcgtggaacttatgttctttggaagcaggggcatgatttgaaatcgatgcttccaaatggaacttattatcgtcatagaactgcgctcatggagcatggaatagatatcaatattcgttgtgatcgccgcgacgatagcaatgttgtgccgatgatacggattcttgaggctaagcctgcggccattccggatttcttctttgaaagagggctgattcataaatcggcccgtcaggtggctgtatga

SEQ ID NO: 365005 - DNA, 180 bp, Pseudomonas aeruginosa
atgcccaccaaacacatcgacgaggccacctggcgcaaggtggagaaagagaccgtcaaggcagtgatccaccttcaggcatcggtcaaagacaccgaggtcctacgctggctgatcctgaaagggctggaagaaatcactcccgaagacctggagcgcttccacaaaaaaagggactga

SEQ ID NO: 365006 - DNA, 1107 bp, Pseudomonas aeruginosa
atggacgacttgctggccgagcaacagcgagctgagtcatccgtcaacgtccagcaggatgccggcgttatcaacgaaatggacgctcggcagcgaatcctggacattcaccgagcgacctacgagaagctccagcagattcggccgatcctggaacagatggcccgccagcctggcgaggtcggccgagctgctgccgaatcgctcgcccagctggaagctgaagcggagcgactccagcagaccacgacgctgctcgaaaccaccttgcgggacgggctcactaccggctttaccgacgccatcaaggggctggcttccgggaccatggacttgcgcgacgccattacgtcgctgggtgaggctgtgctcaatgccttggtgaacatggcggcgcagaacctagcgcaatcgctgtccagcggcatcatggggctatttggtggcggtcagcaggacaccagcatgacgaccggcgcggcggctgttaccgcgtcggccggcgcgctttcgaccgctggggcgtcgttgctgactggggctgccgcaatccaggccgccgccgcatccctggccgctgctaacggcgtccagggcctgggcgcagccggtggcgcggcgggtgcagccggagcagcggcgggtggcggcagttggtggtcctccatcgctggagcgttcggttttgccagcggcggccatgtacgcggccccggtacgtccaccagtgacagcattccagctcgcctctcggactgggagtacgtcacccgtgccgccgtcgtgaagcaacctggcgctctggcatttctcgaacagttcaaccgttacggcatggccgcactggccggctgggcgaatcctgttcgtcacgcaacgggcggacgtgccggcattcccgcccccaacctgccggcccccgtccgtgtcggcgcgaacctgcccgaaccatccaagaacttcagtacctcggtcgccaactcgatctacctgcacgccgttcaggacacggatcagatggcggccgacatgtgggccggcaaaggcggcgaacacttcctggtctggctgaacaagaaccgccaggccgtcaagcagattatctag

SEQ ID NO: 365007 - DNA, 822 bp, Pseudomonas aeruginosa
atgcttcttttcccgcgtgacgttccacgtcgacagacagatgacgatcaggaagcacagcgcagcacctttgaacggccagcgcttccagatcggcacaatgtcattagcggccagttcctggcctgcggccgaggaccgcgtatgcgacttccagaatccgtagaactgtttctgatactcccggatgctggtattcacgacctcaccgcgcagaccatcctggaccttgcggatatagcgatcattggtgccgaaagctgtggctttcttacagcgatacacgacctggacaagatcacgaattgcacggttgatcttgccgtaactctgagtgatcaacagcacatcagccagttcgtgacgatgaagcgaataccactcttcaaccggcacaggcgtgccgcgcagcggtatcgaaaggtgacattcatcgatcacatacagcggaccgaatccttcatcaggatgccgccaagggtccgcataatgatcaaccctactaaacgggcgtactaccctactctcatcctcgccactctcattgttgaacacctcaacagtagaatcccgaagctcgatcaaatgccaagactccggaaaaaacgccttgaacttatccatatccaaggccaggttcgtgatgacctttcgcccttgattcaacgcaggaacaacatgatagacaacagcctcatgagactttccgccaccaggctggcccaggatcaagttaatcattacgacccccagcggacaaacgggatagtttgtaacaggaatcggacgaccagagcgccgacaataagcgttatagcctga

SEQ ID NO: 365008 - DNA, 324 bp, Pseudomonas aeruginosa
atgccgcccgaggtcaataactttgtacggatggttctggccgaaaagcgcatctccagtttgcttcaacaaccgatcactgactcgttgagtggctaccgaaagtgggaaagatatgggcaggccggccaggcgtccatacggcatcaagagatgacgcagacagaacccatggaccgtaccaatgaaaagattaggtgcctgctgaagtcccaagttttcaattcggcgagcgagttcgcgagcgcactcctggctataagtgatgcacgcaacgccacgaggggcctcgacgtcttcggccaggatgcgggcgagctttag

SEQ ID NO: 365009 - DNA, 795 bp, Pseudomonas aeruginosa
gtgcgacggcaccatgtattccggcaggcgctcgcgcagcgccgtcttcaactgcgcccggcactccgcctgcgcttccggcgaatccgcgaccgccggctcctgcgccaccacgtagcccaccaactgctggcccaccgcgcccggctgggccaccaccaccgcctcgcgcaccgccggatgctcgcgcaggcgcgcctcgatctctcccagttcgatgcggaagcctcggatcttcacctggtgatccacccgtccgaggtagtccaccaccccatccgcacgcccacgggtcaggtcgccgctgcggtacagccggctgcccggcgcaccaaagggatccggcacgaaacgctcggcggtcagcgccggacgctccaggtagccgcgcgccaccccttccccgcccaggtacagttcgcccgccacgcctaccggcagcaggttcaactgcccgtcgaggatgtagccgctacggttgcccagcagcgtaccgatcggcatgtaggccgcgccgcaggcatcgcccgcccgtgctttccacagcagcggcgtcaccaccgtctcggtcgggccgtagccgttgaacaggtacttcggcttcagcgcccgccacgccaggtcatagctggcctgcgccaccgcgtcgccgccgaagcagtagacccgtaccggcggcggattgccgtcgcgctcggcgtgctcggccagttgctgcaggtacaccggcggggacacccccaccgttaccccgtggcgatgcatctcggcgtaggtccgttccggcagccatag

SEQ ID NO: 365010 - DNA, 618 bp, Pseudomonas aeruginosa
ttgaaactgaaaagtttagggctgaccaatttccgtggttttgatcgactggatatcgagtttgacgagcgcatgacagtgattgccggtgtcaatggtgtgggtaagtcaacgatactgcaggcaatagcaatcgcctactcccatgccctaccggaatttacggtatctagggagaagccgctgccaatactcaactcggacatccagcaaggtaagtcatcctgcattatagaaatatggagtgacggcttggaggcagcgtcgctgaacatgtttctttccaaggaggatcttggtcggaatgaaaagctttctcttgagcgcaagcaatccttgatgaagcaggagctttctctcttagaaaaggggactccggattacaagaacttgaaaaatgacatttcctgggtagataagcgcctagagggagattttgaaaggcgcttgaactggttgtttaccgatacctatgaaaccgaagcgcggttgagacggtatctgaagagcagtccaacacaggcactggcgatttcttcgatattcctttcaacatcctcattcatttcatcagcccccatcagaacactcaaaatccagtttgagtccgctccatag

SEQ ID NO: 365011 - DNA, 1125 bp, Pseudomonas aeruginosa
atgcctagatcactagcctatgagcgcgagaatgcgttaaacgcaatttgcccttacttcacaatgttccctcttgagtatccgctgggggtactcaaagcacatgaggcgcaatctcccgtcatcatggatccattttgcggtcgcgggacaacactttttgcagctagaaagctgggacttacagctcgcggaatagattcgtcgccgattgcagttgcaatagctcgcgccaagttagcaaaagtcaacatcgaagcagtgctcaaactcgctgaaacttatatcgaagagcactcgaatatccgaacccccgaaacagagtttttccagcacgcatatagtccaaccgtcttgcgcgccatttgctcagttcgtcaaggcctgcttaacacctcaaacgacacagatgatacatctattttgcgagcagcgatgctcgggtgtctccatggcccgcttaataagtcgcatgacaacctttcgtatttttcgaatcagatgcctcgcaccttcgcacccaaacccgattactccgttaggtactgggctgcaaagaacctcaacgccccagaggttaacctccttgaggttctgcgaaaaaagttaactcgcctagcgtggaaccaatacgctaaggtcggaaaaatatcatgtgtgagacatggagactcacgcctcgcagcgtctttaccctcctcatcccgagatttttccattgttatcacttcaccaccgtactatggcatgaggacttacgtagaggatcaatggctgcgcaattggttcgttggtggacccgatcacgtaatgtacggcaacgactcccagctccagcactccggaatagacgtattcgctaaatctctcgggcaagtttggagaaacatggggaggacaagagcagacgacctcgacatgtacatccgatttggaatcattccctctcggaaagttgatgcaaaagccctaattcaggcctcactggaggagtctagggttgggtgggaaattatacgagtacgccaagcaaagactgcatcatcaggcaagcgccaagccgatcacatggctacagattcgtctgcagcagttgaatacgatttccacgttagaaggttgtag

SEQ ID NO: 365012 - DNA, 4233 bp, Pseudomonas aeruginosa
atggctacggcacctcttacgctccgagtctccaagaagacactttccatgtttctccgcactcggtgcgacaaagagctgttcttgtctttgcatgacccggaagccatggctgcggcaggccttccagagcccatcaagcgcccaggaatcggaattctcgcagttgaaggaagagaatttgaggcagctcgaaacgaccagctagtccaactgttcccaggtatcacgaaatacggcaagtctggaaccaagtatctcgacacaagcttacaaacggagctatcgaccataacttcgggtcccgcgctgattttacaagggcgattttcgatcaacccccatcaagcagcggtcttagggaatgtcggcctccaaccatccgatatcgcgaccgtaccaccattggccgattttattcctgatgtactgtacgtgcggcaacctaacgccagcgacatggaggtgcagcctgacggaacgcgaaagccaatcgatctggcttcagaagacaggctcgctctgagcatcatagacatcaagcacaccgctgaagccaatccaagctactgctcagagattgcaatgtatgcactgatgttggccaactggcttcacttacatccagcacttcgaagccgcttctttgtaacatcaagcgctttcctgtggacacgagtgaagcagggagatagccagctcgagacactacagtccaaaggaagtgcaaccacacagcagctgttggaggctcttatctcagactctgaagatgctcagttgcgtttctacctagccgctatccgagggttcttcgaggacgtcgttagagttattcgaatcggccgctctcaggcaaacggttggagcaaccttgactggcacgttgcaagctcatgcagtagctgtgattggctcggtgacaagcggcacatggggcaacgagatcgcatcaaagtcgatgcacggcccgaccactattgcatgccgctggcatcagccagcggacacttgtgcttagttccaggaattacgcgaggcgccaaaaaggtgctctgccacaataccgtcctggacactccaagcctcgccacagctgccggtcacccagcacttcagcagcacaccttactcaaacgcgaggcgaagacgctgccagagcggtcgaaagccatcacgacggggattctctcgaatgaccccagcgcagtcatcgcctcaatggtgtccagcgctaatctgctcctctacgccagcgtcaattttgactcaagcgcaggcctgctcactggcctgtcactctcaggcgtagcgacaaacttcacgcccggccaatcgcctcgccgctttcagcccgtacctttcgttgtcgaccagaagactcttgctgctgagtgggtggctcttgagggtttcctgactcagattgccagccatatagacgtcgcagaatcacttgtaacaggcacgctatcgggccaaatccatttctgggagcaacgtcagtttcaggaactatgtaacgcgatgggacgtcatctccctcgcgtaatggcgttatcggttcgcaaggcgaaggcactcgcctgggtgttcccggccgaagagatgattgcgcggcccgactcgctggatgctgcaaccgtagtagcagtcgacgaaattgtcagaagactagtgtttgcgccgactccccatgtcatcacgctgtttgacaccgcggagcactatcgcgcgggtccgtcacacgctgttcatgactcttactatcgagagtacttgagcaacggaattcctcgagaacgtatctacgaaatttggtcaaccctgccgcaggtcaagcgggggacaaacagtattccccggaacactgtcattgcgcagtactcggatgccctaggaaaacaatgtaaggctcttgagtccgtatgcgagaagctgcgacaggactatcgcgggcaatttcgagcgcgagcggcacgcatcccgacatccattccccagggagcccgtggtgtagcattcgacagcaagctttggctgtggtgggacgatttagatttcagcgcaagtcaacttgaggcacatatcaagttggcgatggacggcgaaagacttgaagccagctatgaggcagtcttactaagaaatggtgttcatgtaggtggtgacgattatgaattcgacgtggctcccagctccacagaagctaagttcaaggaggagtcgatactcactctaggcaagctcggccgacctggcatgccactccaacggcctgcaggcctgcttcgtaccggtgcaccgccatatgcagggaatggagacattctgctgaggcccttttggtccgtcgtcgaggcaaaactcgtttcattcgaccggcagcatgcccgagctcgcgtaaagcttcgcgcaaaggacgaacctcaattagtaccttatctcatcgcgaatgctgcgtttccattactccatgatgtcttcttggtagaagccaagaaaccagctctattcaactgggctgcacacagcacgcacatcttttcagcgatcggcgatcctcgaattgctactcccgatcccaatgcagctcatgccatgggcatcaagcttcccgcacgtcgcgctaccagctcagcagaaacaccagcagccagagtattatggaacccctcgactctggagcagaagatcattgttccagccgctacggcgcaagccctagccgcgcaagtcagggtattggacaacctcaatccgtggcaggaagcagctgttacccacgccattgaacgcggtcttacgctgatatggggcccccccggaacggggaagaccaacacgctggcagccatgctccacggcatggtcgctcatgctgtttcgcagcatcagccacttcgcgtcctagtcaccggccctacctacaaagccgtcgaagaagtcgtccatcggacagtaaacttcctcagtgcggacacctcttcgccatgcagggtgttcctgggttactcgcaaggccgaatccctgccccgccgcctaccagcttgcagcgtcacgtagactaccggacattattttttattcgaggagacacggagtatcaaaattgccttacggagctcagcatcggtaatggtgtaaccgtggttggatgccaggtccgccagacacgccagttcgcaaggcaaattgccggtgcttctcttcacgaggtgttcgacgttgtcgttatagacgaaagctcgcaggtaccagtgtcccacgctatcgccgccttctctggcttaaggaccgactcaagactaatcatcgcaggcgaccacctgcagatgccccctattgcgtccattgaagcgcctgcagaagcgacatatcttgtgggaagcattcaaacgtacctcagtaaacgtcctttcccgcatgcggttgcacgatgcgtgctagagcgtaactaccgctccaatgagcacatcgtcgaatttgcgcgcagcatcggatacccgaccacacttagcgccgagtacccacagacatcccttcaccttgttcagcccctcccgcaggaaagctcatatcccagccatttgccatggtgtgcagccttcgacgaactcttacgcccctctaccaaggtcgccacattgctgcacgaagatgacatctcttctcaaggcaataggtacgaggcgcaggtggttgctgggattgtatggatgctaaggcagacggtcagtgccgagcttgatggccacaatggatcaccagcgcatcaacttgcaacggcgcgggaattctggaagcactgtgtgggcattgtgactccacaccgtgctcaacgtgcactagttattcaagaacttgaacagctttggccgacggaagcggacctaattgccgatgcagtggatacggtcgaacgattccaaggaggggagcgtcacacggtgatagtgacatttggcgtggctgatgttgacattattggaggtgaagaggcgttccttatgcagttggaacgcaccaacgttgctgtctctcgtgcaatggcgaaatgcatagtagtgatgccagatgcgcttgcagcccacatccccgaagataagaaagcacttgagaccgcgtacgctctgaaggactacgtggaggagttctgcaaccaacgcgtgacaacgaccttgtcgcttggaggtaacagtaggtgggctcaggtgaggctccggaattga

SEQ ID NO: 365013 - DNA, 165 bp, Pseudomonas aeruginosa
atggtgcggttgcgcttcgaaaggagcagcgttttgagcattttgcgacaggttaaaacggctctgggggcggaatggcaaattacggctctgccaggctacgtgatcatctacaaggagcgagaggattactcctgcgggatagtcatcgaggctgaaaagtag

SEQ ID NO: 365014 - DNA, 147 bp, Pseudomonas aeruginosa
atgatctatgaggtcgactttttgcctgtgggtgaaggctccggcgacgcaatcgtaatccgctacggtgacgacgttaacggttattacctccatgtagtcgatggggggcgcgcttcgacggctgaaaccattatcacgctgtag

SEQ ID NO: 365015 - DNA, 2241 bp, Pseudomonas aeruginosa
atgattgagtacttcgcacccggcgaagtgctagaaacgtctcgggagagtgagctataccccgagacggatgcactgctgagagcttgccgtgcaagtccctacgttgaggttcgcgagctgcgctgtgagacgtcgggaatgtctcgcacggagtacatcgtcatcgatgcgggagatgggtccgttgacgcggggaatcctggtggaattcgtcgccaggaacgccttgcgataggtatcaatcctcagtaccgcgtgccgatactcgttcatgcgttacgtaaggattttccgccgctttcacatcagcatccgagagcaccagggcatccgcgaacactatgtttgtttgatcacgactggtcagcggttcagatgaattggacccccgagcgttttatcgcccggatgttctggtggctccgtgagtcagcgcagctgaaactgcaccgagatgatcagccgttggagcaacttttctatatgagtcccttccagctgatcctaccttccaacttcgccgattactcggccgctggcgggaaatcgctgactattgggagagtcggtggaagtcagtccaccatcctgcgtgccgtgccttcaacgcagggatctcaatccaaacctttgcgagtggtctccatcgctgttccgccggtagactcgacaaccgtagtcgaattgccagaaacgctaggtgccttacaggatcaattggagacatggggtagtgatctttcagggcccctttacgaaagcgtgtttgaagccatccctgaaggagtttcacctgtaggggggaatggagaagggatcctgattctcttgtgggttcctcgtaccaggcagggtgagccagaacggattgacgtcctggggttcatgatgacgtcttctctgtatgaacttgcagaagctttcgacatgctcggcctctctgaagcaaacggacttcgcaggcgcatagcgctagtgggcggccagaggggaactgcgtggcggtctctggcgccaatgcctgtcgaggtgcgttcggcgctcacggccaatctggcgagagatttgtcggcagtggtagctgaaggtgcccaattcgatggcgtgttagcgggtgtaggtgcccttggcagcgcgttggcggatctgtgggttcggcaacaatggggacattggacatttgtagatcccgatcagctgatgccccataacctcagccgccacgtagcatctgactggggtatcggcctagctaaagctgatgtcatgcgagacatctcatcttggatctaccccaatgaaccaccgccggtttccatcgcaaaaagcatcttgtcgcaagacgaggatgtgcttaaaacactgtcacaagcccaactggccgtggacgtcacaactaccctccaggcaccccgaggattagctcgcacggacactgctccgcgtaccgcgagcctctttatgacgccgtcggggctgtctagcgtgatgattctcgaggatgaggctcgactgcagcgcctagacgggctcgagggccagtattaccgagccatcctgggtagtgagtgggggcgtgagcacctagctaaccacctgggcgatcggtgggtgggtggcggctgtcgagacatttcggtgcgcatttccaatgagtgcatccacatccacgcaggcattctttctcgccagctgcgtcaggcagtagcaaagcctgacgcgcgcctgtgcgtatggacatatgacgagcagactggggcgataggctcccatgagattccgctgtccaacgttcacaccagctactcgaatggctggaccatcaaatatgatttggcgctcgtcgagaagctcaagcaagctcgcctcgctgctcttcctaatgaaaccggtggctctattgtaggagttatcgacttgaaggccaggaccatcgtcattgtcgatgtgctgcccacaccacccgacagccagtgcagccccagccacttcattagaggagaggaggggcagcaggatgcgctcgatgaggcgcgacgtagaaccgcacgagtggtggactatctaggtgagtggcattcacatccggatggagttccagcacggccaagccaagatgacgaaaacctactaaacacgattcaacgcaagatgagcgttgagggattgccagcagtaatggtcattgtcgccagaaacgaaatgtccttcattgttcgctacgaggaagaggcataa

SEQ ID NO: 365016 - DNA, 1182 bp, Pseudomonas aeruginosa
atgcacgtgactaattttgagcaacaccatagcggtgatggggacaacgttgcgggcaacaagatcatcaaggtggtcaaggagcttgctccgaaggacctcgtcaggcccttagaaatggtgtttgaaagcctacggcaaaaggataaggaaaaagccaaggctcagatggacatcctcaaagtagtcgcgcagcgcacagtggaatctgctgctctggcagaagtcgtatccatctatggtgggctcgtggaagctcaagatcaggatgctgcctgggcgaccgtcgcaaagatcgtttcacgcgccataaaccctatcatcagggacgtttgccaggccgctctgctgcaactgtcctaccgcaccgcacgtgagggagaggcgaaagacctttatttttctgagccctcaccaggtgcttactcccaggaagcttatctgcgttgttacgcggacgaagagcaaatacgggcggccgtaaaaagcttccccacggagggcgtactgaccggtgctgttgaaggggctattcggctgtccgcaacagatctggcgcttgagctggcaacacgcctgaactcactctatagctcttacaacgccagagtacttttggcgatagctacaggcgttgcactcaatccagatcttgctggacagcacttttggctgaaccgcccggaggtgaaggagcgggtagacaagctcagagatatggccattcgacttcttgatgagtcgggtaccgacgggcgagtccatgaccttagctgctcgattcttaatatatatcaataccaatccgccgagttgctcgacgctttgaaaaagcacgttcagcacttagacccgaatagatcaaagataattgctaggtgtaaggcgttggccggagacgatacgtgccttccgcaggctgagagggacttacaggtagcgtatggagacccgcaaaagaggcaagcatggtgccggcaatttcttgaagcgaacacgcaccaactagaagaagtaggtccatttctcaatctggctaatccgtccgagcttggtgaatggctgagtcgcgagcgaatattgaccggggcctcggaatggaagaagcctatatcaggctggttgcggatatttttcgacgcacggatcaagacgataacccagtccatcggcacgaagtaa

SEQ ID NO: 365017 - DNA, 981 bp, Pseudomonas aeruginosa
atggcattggtgggtagacgcgatggccgcaattttggctacggcagacaattgagctacgcaggtccgcaggcgctgaaagacatgttcggcggtggccactacggcacggtcaaggcgcacagtgaccggtggcaggcattcgccaaatggtgccgctccgaacagggccccggtatcaatgatgcgcggcagattgatcgaacggtattggccgactacgcggcgtatctgcgcgacattgttaagcgcggtgatctcgccgtcagcaccgcgcaaaaccggctatccagcgttaacaggaccatggcagcgcttcgcggtgatcagcatgtgaaactggcaagcccgagcaaggcgttgggtatgcagcgcagcggagttcgacactcagtgccgcagggccaagacaatcaacaagttaagcagattgtcgatgtgctttgccgcgatcatcagctacgggccgctgcaatcgttgtactggcgcgagccaccggcatgcgcttgcgtgaggccatcctagccgacttgccacggctgagccgtgaggctagcgacctaggcaggatcaacatccaggatggcaccaaaggcggccgagctggcgcctcagcgccacgatggattgcggtggaccaccatgttcaagacgcacttgggtttgcacggcaggtgtcgcttgcgagtagccgcaacctgattgcgccaggcgaaagctatcggaatgttctgcaggaaatcatccgtccagcgcgagacgtgctgcatgcacacaagctcaaaggcgttcatgagctacgagcggcttacgcatgtgagcgctatgagcaaattactcaacaccacgcgcccatcaacggcggccagtgttgccagatagataggaaccttgatcgagaggcccgaaggcagatcagctatgagctggggcatcgtcggatcgatgtgctcgctgcctacattggaggatgcacatga

SEQ ID NO: 365018 - DNA, 1086 bp, Pseudomonas aeruginosa
ttgaatactgacactaccgtgctattgccccaggcggcaagagggatcatcggggatactgcctcttactgggcctctttttactgtgctatattgaaaactgtgcgctatcaaaaaaatctcccttttaattgggggtatagttcgagcttgcaagagtataagggggcgctcagggaaagtggcttcttcgggaaaatggaaagcacagtcttgaatcatgcatttgaatatgtcatggttgattttcttaagacaaaaacaggagtttcatacttcaaggagctgtgtgcgagtatattgagtgagtatgatatcaaaggcttcaatataacgaaaatgaatattttcaaagtggggaatgattctgaattccactttgccagaaaaaattatgacaagacaagagttttgatgctcctgcctagggggattaaggcttatccaacaaccaaaacccccggattgagtctgaatgagaccttaaagaactctgacttgtttatattgatttcaaatgatgaagagacaatcggttttgttggggaggttgaggggaatcacggcgaagacttatttctatcgtcgtactataaagataaaccaatgaaggacaagtattgcacctttggtattggtgtgtctgataaaaataaacacgggggtaattcgataaagggggaggtaagtttaaatcgaagtgaggcggttgaacgttggattctgcatttttcaaaatctaattattttgcgaaagattatcggagcgcagttcggggcattaaggctctggtcgatggacattttggttaccttgaggatatcgaagatcctggtcatcaaaaaatactcgacatgatcagggaggggtggggtaagaatgtacttgaattaattgctgcccttgagttatttgtggattatatatctccggcgaaaaactattattatcaggaggttgttggtgaaaaaatcctgtatagaccgtcgcctcttgtaatgccggatcagtttccactttattccattggtgaagaagaaacctcgcctcatcaaagtgcggagggtgttattcagatgttttga

SEQ ID NO: 365019 - DNA, 909 bp, Pseudomonas aeruginosa
atgaagacaattagctacgagttttctgagcgcactggctctccacttacggctgaatctccattttttattcattcaggcgttgctgagttcccagtgatatttcgtgttttatcgggaagttgtcaaatcactaatttgaacaccgatgaaagtagtgttatttcaaagaactacttctacagcgatgctcggcagaatgaaacctgcgacctatcctttctgaatgaattcgatgaaggtctgagcttaactgactatgagcgtctgataaaaaaaacagcctggaccaatcgcaaattctataagcctttcttaaacgaattggctagctgtatttatcatgagcaaaacgagcgccacacagcttcattcgtgcatttatatcgagcgtacgaacacctttcatatgctttcccgatgatctatgcgtcgcgcactcaagattacgttggcacgtttgaaaacctcagaaagtggatgagtcatgattcagacggcaatgttggcgagctaaaatttcataaaaattttatcgttagccttttcaaggaccttcctgaattatcacgaaccattgacgtggaaattaccacaaggcaggagcatagagagccagtatttacagctctagcagttaaagttgccggctggaatgcaccagataaatacacagccacgacaatccgacctgatcgactggctattccattcctcgattaccatagcttctttgtaactcttaggaataggtttttccattactcaaattctcgatccgacaatattgggcttgaggatattgtagattccgacttgctattctcctttatcaacaaggtaacactaaactacattgccacaatattccatggggtaatgaaacatcagattgcttcgcttgactga

SEQ ID NO: 365020 - DNA, 1029 bp, Pseudomonas aeruginosa
atgagcattcaaattttcacgcaagaatacgattcagtaattaaaagcgtcgtactaaccgggcaaactacatacgggtatgccattgaacatattttccctctgataaaccgctttgctgctcagcgcaaaattcagaacccagcgttctacgaccggctgcgcaatgacttgcttaaaggctgtttaatgcctgccattactctcgcactggtggacccagatacatccctatttgattcagtagagaatgctgaagactacgccaatgaaaatatcgacaacggttatgtcttggatggtatgcagcgactgaacacgctcaacagcattaaggatgacgaagattttccttccgataaagcgctttacttaagcgttgtaatttccggcaataaagacatgcttttgtatcggatgattactctaaataacgggcagcgcccaatgactcctcgacatcaaattgaagtactcaccgaagagttgtttgacttcgaatctttggatatcgaagtacagtcagaaaaagatagaggcgaaaaaatcaaacgaggagccttcaatctggcggatatttccaaaggttatttggcgttcttcactaacagcgttcataatgaaaacaataagatcatcagcgaaaaaatggatgagataattgttggcaatatcatggctactgcggttgtcgagaatggacttgagttccagcaagtactcgaattagtggacaaattctcggcaaacgaaaacgcgaagagctggctgaaaacccagaacaatttcattgggttctgtgtaggggtgaagtcgtcatacgacgaactttcggagatgagcgccgaagagtttggtgaagctgtcgagaagtttgatactgcattcaggtcgattgatgcggcgaaagtaaaccttggcaaatatcgtcgtgaactgagcaagaaatatgttgaaaaaatcagtgaactcaaagattcgagtgacattgagcttctctcatatttttcggacgagacaacagcgtag

SEQ ID NO: 365021 - DNA, 213 bp, Pseudomonas aeruginosa
atgcaactgagcgacatcaagcaagtgatcgaggtctccggcgaaatcgaagcgcaaaaacggctcaacgatgggtgggttcttctcgccgcagccggcggaactaaccaggacaaagagggctacatcatctactccctgggttccacagaagagcccaagccgatcaaggccggagcggtattcagcccccgcatggaacctcaaaagtaa

SEQ ID NO: 365022 - DNA, 225 bp, Pseudomonas aeruginosa
ttgcgcaaatcggcgccaaatttcgcgccgcgctacagcaactgcatctccaacgtccgcctggaaggcctcagctacggcatggccgcgcaccgcctgctctacctgatgcgcgaggcctgccggcggcagctttccggggtcaacctgaaggacgaggcggaggtccaggcgctggacggcgaggctccgcgcaccggcaacttcctcctggcgagggactga

SEQ ID NO: 365023 - DNA, 441 bp, Pseudomonas aeruginosa
ttgaagaacgcacgcttacgccaaccattggatgcggaatacgcccaagcactgggggaggcggcctttgtcttcagcatccttgaatggaatgccatctgggcctgcgagcgcataaagcctggctccatcaacgagctaaatcccaaaaccgctggcgcgattgccaagagattgctcttgctggctgatgggttagcggaacacccggatcgaactgagttcatgctatgcgctcaaaaattcagcgaactggtggagcaccgcaacggtttaatgcatggccgcccaggtaccgactcatccgatcagaaagcaaagctttttcgaaacggagaggcatggaccgcacagaaaatccaggatattgcgaatgagttctcagaatgcagcatccagctcaataagcacctccatggctttctaaaggcggtgcggtag

SEQ ID NO: 365024 - DNA, 480 bp, Pseudomonas aeruginosa
atgggagtcattgatcgggtgcgcgcagatgaagccaacaggctgcgccaggaccaacctgcccggcgcgtggtgaagacctcgcgctggctcctgctgcgtaaccggcagaacgtcccggccgatcagcgcatcaagctcagggaactgctggcggccaacaaggtactgacgacctacctgctcaaggacgacctgaagcagctctggcgctactgcagccaagcctgggctgaaaaggtgtggaagagctggcgacagcgcgctttgcgcagccgcctcgagcctctgcgaacatttgtccgccgtctgcagcgctatctgccaggcatcctggcccactgccgatggccccttggagcgaatctggtcgaggggatcaacaacaagatcaaagttatcaagcgcgtcgcctacggataccgagacgacgcctatttcttcctcaagatccgggcagccttccccggagttgggtga

SEQ ID NO: 365025 - DNA, 699 bp, Pseudomonas aeruginosa
atgttcaataacagaatcccgacgctcgacgagcttccctcctctgcacacttggtcaagtcgaccttcatagcaatcggtgctgccctggtgttgctggtaacggtagtcatgccttccgaatatgccatcgacccgacaggcgttggccgagtgctagggctgacccaaatgggcgaagtaaagactcagttggccgccgaggcggctacggaggctgcaccgagcaccctgtccacagatatgcgggtccccagtaagacagctgtggcagcgaccttcgaacccgtaccggaagacctctccgttcctgtacaagaaactgccgttaggacgccggtggcaacggagaaagccgaacctgttgtgactggccaacgccatgagctaagcatcacactcaaacccagtcagggggccgaggtgaaactggagatgaaggaaggagccaaggtcgactacctgtggtcggtcgaaggcggtgtagtcaactacgatacccatggtgacccgtacgacgctccgcgcggtttctaccatggctatggtaaaggccgtgcgacccctcaggaccagggaactctagaggcggcgttcgatgggaagcatggttggttctggcgcaatcgtaccgacaagcctgtgaccgtcacgctgcgcaccgagggagactacatcagtatcaaacgagtgatatga

SEQ ID NO: 365026 - DNA, 351 bp, Pseudomonas aeruginosa
atggcctggatcttcaccaaatatgtcctgaccgcctcgatggtggtattgctttccgaactagccaagcggagcgacaggctcggtggattgctcgccgcacttcctctcgtgaccatgctgacgctggtctggctccatctggagcatcaggggcaggaaaagatctcgaagcatgcctggtacaccttctggtacgtagtaccaaccctgcccatgtttttagtgtttccgctactgcttccacgcctgggattttgggcgacgctgatttgcagcagcatcatcacgatagcgtgcttcgggctgttcgcccttttcatgcagcgttttggcatcgaactgctctga

SEQ ID NO: 365027 - DNA, 1119 bp, Pseudomonas aeruginosa
atgtcaggtttcgccgatattctccagcagggggcagcccatgcctggctgtatttccccagcgccatcctgctgggcgcgttgcacggcctggagcccggccactcgaagaccatgatggctgcgttcattgttgcgatccgcggtacggtgaaacaagcggtattactgggtctggccgccacggtttcgcatactgccgttgtctggctggtggccatggcgggaatgtatctgggcaacaatctgaacgccgaaactaccgagccctatttccagctggcctcggcggctattatcgttaccgttgccctgtggatgctgtggcggacttggcgtggagagcagatgtggcgtttcgaacaagtctctgaccatagccattcacacgacgagacccggtatgtcgatactggacatgggcgcttgcagctttccatctttgaagagggtgttcctcctcgttggcgattgacggttctcagtggccaacgttgggagaccaactcggtgagtctgcaaaccatacgcgtggatggccgtatgcggcgcttcgctttcgtaaaccgcggtgcgtatctcgaatcggtcgacgaaattccagagccccatgaattcaaggtgcggctcagcctggggcatggcgatcactctcatgactatgatcttgagttcaccgagcatgaacatggccactcccatggggagctggaaggcgtggagctagcggtagatgggtatcaggatgcccatgagcgcgctcatgccaacgatattcgcaagcgtttcgccaatcgtgaagtcaccaccggacaaatcatcttgttcggattgacaggcgggctgattccctgtccagcagcaattacagtcctcctgttgtgcctgcaggtgaaggagatcgcgctgggggccgttctggtgctgtgcttcagcataggactggcgcttacgctggtttccgtcggcgctgtcgcagcgatcggcgcccgccaggcttcgaatcgctggccatggcttggcaccatggcacgccgtgctccctatctctcgagcgtgctgatcattgccgtcgggctgtacgtcggtttccatggctggatcggcctaaacgcctga

SEQ ID NO: 365028 - DNA, 561 bp, Pseudomonas aeruginosa
atgatggactggcatgagcgcgttctcgctgagaacgatgagctacgcaaggcaaaagcagtgctgcgtaaagcacaggggttatcgcaacgggccaaggccgaaaaacttccagaccctaccgtaggggtgttcacggcatccgagcaaggcaatggagagcgtttgtacggcgtcagcttcagcatgcctatcccgagcaaaagccggagcgctcgatatagtcaggcgctggcccaggaaaactctgcccgcctggacgcagagctcctccagcgtcgcatagaagcagatgtcgcacgcaacctagctttggcgaccggagcgtatgacagctacatgatcgccaaggaaggagcagtggcgatggcggagaacgaagcccagatgcaacgggcctacgaacttggcgaagcggagctgcaggccctgctcctggcgcggcgccaagcggtcaccgcagccaccagcgctctgcaagcgcaattagaaacagttcggacccagctctcgttgttggtagatgcccacaagatctggaatctggacaaggatgattag

SEQ ID NO: 365029 - DNA, 303 bp, Pseudomonas aeruginosa
atgtctgacatcttgctgacgctactctgcccaccaagcctggaggagaagctcatcgatcaccttcttgtcgccagcggcaccttggtattcaccagcacgacgaccgccgcacacggtctctccacatcggagctgaatcctgtcgagcaggttatgggacgagcccgtgcagtccagctccagttgatcatggacaagcaggaatgcatggggttactcgatacgattcatgaactctttcccaaaacaggcctgcgcttctggacttcggacatcattgtttcaggggagctcgcatag

SEQ ID NO: 365030 - DNA, 3084 bp, Pseudomonas aeruginosa
atgctgagcaaactcgtccagttttccctggcccaacgctttttcatgttactggcaaccctgctgatttctttcgcgggttggtacgcctatctggggctgcccatcgatgcatttcctgatgtagcgagcacccaggtcaagatcatcatgaaagcgcctggcatgacgcccgaggaggtagagactcggatcgcagtccccattgaggtggagatgctcggtattcccagaacgaaaatcttgcgctccgtaacgaaatacggcctggttgatgtcaccatcgacttccaggacggtaccgatatcttctgggcacgccagcaggtcagcgaacgcctcggcaatctgacggacagccttcccgaaggtatctccggtggtatggcgcccattaccacgccgctcggcgagatgttcatgttcaccgtcgacggcgaatcgatgtcactgacggagcgacgcagccttctcgactgggtcatccgtccggcacttcgaacggttcctggcgtggcagatgtcaactctctcggaggccaagtccggaccttcgagattgctcctgaccctgcccgcatggcagctaacggcatcacgctggaacagctcaccagcgcagtcaacgccaacaatcgcaatgatggtgccgggcggctcggcgaaggcgacgaggtgctacttgtccgcagcgaaggtagcgtcaggactctcgaggacttacgtgctgtcgtggttcgctcggacaatatatccccggtgagggttgccgatattgcccaggtgaagatcggtacgttgacccgatacggcgtggtgacacaggacggcaagggcgaagcggtccagggactggtcctcggcctcgctggtgccaatgccagcgaggtagtgaaaggtgtccaacagaagctgaaggagctcgaatccacacttcccaaagaaatttccatcactcccttctacgaccgctcctccctggtagaaaaggcggtaggggccgtatccaaggccctgctagaagccacggccttggtcatagttctgctcgccttgtttcttggcaacgttcgcgcggcactcacggtagcgctggttctgccactggcggccctgatcactttcatcctcatgcgcttcgttgggatgtccgccaatttgatgagcctcggaggcctggccatcgcgatcggcatgttggttgacgcagcggtggtggtggtagagaacatcgttcagcggttggctactgacacatccggtggcaagttgcctaggctccacattatctatcgcgccgtacgagaggtcgcggtaccggttacctctggcatcctgatcatcatcaccgtattcctgccgctgatgaccttgcaggggcttgagggcaaattcttcgtccctgtcgccatcacaatcgtatttgccctggctgggtccctgctcctctccctgacggtcattcccgtgctttcgtcctaccttctgcgggaggtcaggcacgaagagccctggttgtcccgcaagctcctttccctgtatggccccgctcttgagtggggtctgcgccggcaaaaggtcatcgccttcggtgctgtgctgttgctgctgaccgccggggtcatctacacccaggtcgggaaaaccttcatgcccaccatggacgagggtgacctgatcgtcggcatcgaaaaacttccatctgtcagccttgagcagaccgccgaactggacctgaagattcaccgggtactcatgggagccattcccgagatccgcggcatcgtcgcacgagcggggtcggacgaaatcggtctcgacccgatggggctcaaccagaccgatacctatctgctactgaagccgatgagcgaatggagaatgagcagcaaggaagaactcatggacgagatacgcaaggtgctcgatcccatgcctggcatcggctatagcttcacccagcctatcgagatgcgcgtttcggagatgatcatcggggttcgtggcgacctagcggtaaaggtgtacggcccagatctggatacgctcaaccggatggccgggaagatcgagggactgctaaaaaccatcccgggcaaccaagacgtctataccgtccagaacgatggcgttcagtatctgcgagttgagatcgaccgcctgcaggcaggacgctacgggcttgacgtcgagacggtccaggatgccctacgcgcccagatcgaagggcagcgtgccggcatcgtcatcgaagacaaccagagaacgcccatcctgatccgtgccgacgagaccgtccgagcatcgccggcggagttcgacgccatacgcatcacaacacccgacggaaccacggttccccttcgcagcgtggcaaggctcgagcgtgccgaaggccctgtgaagatcgaccgggagatgggcagccgctacagcgtagtaattgctaacgtcagcggccgggaccttgtggggtttgtcgaggaagccaaggcactcgtcgacaagaacctggaactgcccaacggctaccgcataggctggggcggccagttcgaaaatcagcagcgtgcggccgcacgcctttccatcgtgatcccggttgcactggggctgatcttcgtcctgctgttctcgacattcggctcggtacgccaggctctgttgattctgagcaacatccctttcgcactggtaggtggcatagtggccctctggctgaccggtgagtacctgtcagtaccggcctccgttggcttcatcgccttgcttgggatcgccgtactcaacggcatcgtcctggtcagctacttcaaccagttgcacagcgaaggtttcaccctacgcgacgttgtcattcagggggctcgtcggcgtttgagaccggtgctgatgacagcctcgatcactgccttcggcttgattcccttgctattcgcaacggggcccggttcggagatacagcgtccgctggcaatcgtcgtcatcggcgggctgatcaccgtaaccgtcctgacgctgctgctgcttcccattctttacctgcgattcgcacatcccaggcaggagaccaaccatgtctga

SEQ ID NO: 365031 - DNA, 1116 bp, Pseudomonas aeruginosa
atgaagaaacctaggcacaaattccatccgacagtggtcctgttactgtgctcctcattgctaacaatctctgtagtcggcgccgagagattctcagtttccgaaaatcagattaaagcgatgggcataagacttggtaatgtcaaagagcaggctgactcattgaggtacagttatccaggcaaggtaattgttcctccgaaagcagttcaggttatcagctccccacttgagggggtgattagccagatatttgttggtgagtatcaatcagtcaaagcaggggaggccatcttacgcatttcaagccctgctatgagtcaactacaactacagctgcttcaagcgtcggcccgggcgacactggcccggcagagctactctagggagaaggcgctgctcagcgagggaataattccaatacgtcgtgcccaagaagcgcttgcctcgttgaaagaagctgaagccacgcttcttcaggccagatcggctttggctttggctggtcttttcgaaaaggatataaatgacgttctgcgatctgctcgtccttcggacagccttgttctacgtgccgttcaagatggaatcgtcagctctttaactgccactccgggccaacgcgtcgacgccgctaccgcactcctgcaagtcactcaactggaaaccctttggcttgatgtccaagtccctgcagaggtcagctcgggcattcgaattggaagcactgttacggtttccgagaaagagggcgtaaccggaaaagtagtcggcctaagtcccaccattatggccagcaaccagttcgttacgctgcgggcggaactgaatcacacggcgtatcaattgaggccaggcgaacttgtaactgcggagatacccgttgagtcctctgggcgaacatgggatctcccgctctccgcgctcgcccgaaacaaagatgcctcggtggtcttcgttcgtactgccaatggcttcgaagcccgccccgtcatcgtcagaagtagcacagggcaattggttcgggtcgaaggcgatatttcggctcaggaccaagtagccatcagtggggtagtgacgctaaaaggtgcctggctcgaagaggacggggaataa

SEQ ID NO: 365032 - DNA, 675 bp, Pseudomonas aeruginosa
atgcggatgctggttatagaggacgaagcaaggacggcagagtacctgcagcaaggtctttcggagagcggcttcatagtggactgtgccagcacaggtaccgatggactgcacatgttcagaaacaacatatatgaactagtatttcttgacgttaatctccctggaatggatggctggagtattctcgcagagattcgcagggtcagtagagtgaaagtcatgatgctgacagggcgaggccggctacatgagaaagttagaggtttcgatggtggtgcagatgattatttggtcaagccattcgagtttccggagctgttggcccgggtaaaggccttgctccgtcgtagcgacaagatgtctgagaataatacattgcgggtagcggatcttgagcttgaccctggccggcaccgggcgtacaggggagacacgagagtcaatctcaccaccaaagagtttgcacttctgcaactgctgatgagtcactccggagaggtgttgagccgcacacagataatatccttaatatgggatgtgaactttgactgtgacaccaatgtaatcgaggtctgcatccggcgtctgagatctaagatagacgatcctttcgagaacaagctgatacatacactcagaggtattggatatgttcttgaggaccgttcatga

SEQ ID NO: 365033 - DNA, 1404 bp, Pseudomonas aeruginosa
atgatatctgacagccttgcggccaggctcggcctaagagttgggctgatgagtgtcgctctagttaccttgctaggtgtcgtaggctatctgacattggctcaaggcttacagcgtattgccaagtcaaacatacaaagcaagatggtcagtattgaggacaatgtttcaaggaacttaagcctcgatgggatatccccaagatcccatgttctagtggatctggccatgggccacaataatctttatgtaagcatatataaagacggagagcacgttcagccgcttctcaccataggctcgaggcccattcgttttgaactgcacaaatttccttctgatagttcaatcagatttcacgaatggcaagatcctatgggacgcccgatgatgagtgcctctcagtcaatgattctgaaagatggtgagagtatcgacgtctacttgacggttgacaggtcttccgacgccgagttactggagctgctgcccaaggggatgcttattgcttcgccacttctgcttctggtgatcctggtcattgcctggtggaccgttcggaaaggcctggcaccactgacaagctttctaaacatagcctcgaagatatctacggacaaccttcagcaccgactgcctactgagaagctgcctgctgaactacgacagttggcggacggtatcaatttcatgcttcaccgtctggatgacggcgttcagcaactttcccagttctcggacgatctggcacatgagttacgttcaccaatttccaatttgatgggtaaagctcaggtcgttctttcacgcgatagatcgatcgaagagtataaagatgtcttgggcgtttgtatcgaggagcttgaaagggtagtacgtatcgtctccgacatgctttttctggcccaggtcagtcatcctgctgcaatggtcaacttcgaatgcgtggcgttggaagacgaactggatcgcctgctcgatctgttcagtatctcggcagaggaaaagaacgtacgcctgatttcgtccggaagtggaatggtcaaggggaatcgcttgatggtacagcgtgccatatccaatcttctatccaatgcaatccgccactctccagaaaacacggctgttctgatcaagatcgaacgtacccctgaatgcatgaggctgaccattggaaatcccggtgcaggcattccaagtgaacacctacctcatctgttcgaacgtttttaccgagtcgacaagagtcgctcaagaagcgaaggaggagccggcctgggccttgcaatcgtacgctcgatcatgagcttacatcacggcaaggtggccgtgcaggtcaaagacggcgggtacacacgcttttttctagagtttcccctgcctgcttccggggggaaacagtag

SEQ ID NO: 365034 - DNA, 1299 bp, Pseudomonas aeruginosa
atgctttccgtcctggccaaccgcacctaccgccacctattcatcgcccaggtcatcgccctcatcggtacaggtctggccaccgtagcactgggattgcttgccttcgacctggcgggagcgcaggcaggggcagtgctgggcacggcgcttgcgatcaagatgaccgcctacattggcgtcgcaccggttgcggccgccttcgctgaaaggctgccacgcaggaccatgctcgtctctctggacttggtacgggcagctgtcgctgttttgttgccattcgtcagtgagatctggcaggtatatgtgctgatcttcgtactgcagtccgcctcagcagccttcacccctacatttcaggcgaccatcccggacatccttccggatgagcgcgattacactcgtgcattgtcgctttcccgactggcctacgatctggagagcgtcctgagccccatgctggctgcgctgctgttaacggtcatgagcttccatagcctgttcgcgggaacagtcgtaggcttcttggtatctgccgcgatggtcgtttccgtgacacttccgattgcccagtcgagccccaagcgcgacatctacgagagaaccacacgaggcctgcgcatattcctggccactccacggttacgcgggctgcttgcattgaatcttgccattgcctcggccagtgcgatggtgatcgtcaataccgtggttctggtgcaatcccgtttcggcctgccgcagacgtcaacggcaacggccctaatggcgttcggtgcaggatcgatgctggttgccctgattctccccaggctcttggagcgtctgaatgaccgtatcgcgatgctgtgcggcgggggcgtgctggtcgtcggccttttcgctggggcgttggtttcagaatatccaagtctgctgaccctgtggttggtattgggagcaggatattcgctggcacagacgccgtccgggagaattctccggcgctcctcgaacgcccaggaccggccagccctattcgctgcgcagttcgccctatcccacgcctgctggttgatcacttatccgttggcagggtggattggcgcgaacatcggccttaccagctcgttcatctgtctggcagtgctcgccgctgccgcctggatcacctcagccgccatctggaagccggaacatgacgaagaagttcttcggcatacccatgatgatcttgcggcggatcatgagcacatcgtcgatggcaaggaccactcgcatctctacgtgatcgatgatctgcatcgccgctggccgtag

SEQ ID NO: 365035 - DNA, 717 bp, Pseudomonas aeruginosa
atgagccgggccggttcgcggcacgccagcctagacatgatcaagtggcttgctatggccagcatgctgctggaccacttgcgctacttatggccggactcggactggctgttcatcgtcgggcgattggcgtttccatttttctgcctggcgcttgcctgcaatgtggcgcgctcactcgcggggcagttcttcaccgatgcgaatgtccgctacctcggctggttgatggcgttctccattctgtcggaggttccttatcgctggttggccggagcaagcccgaccgccaatgtgatgcccacgttgatgctgggcctgatcgtagcctggggcgtacatcatcggacccatgaaagtctgcttgccacgggggtcactctattactggcgctcgcgatacaacgccacctgatgtttggattcttcggcgtcctgcttcccgcctgcttcctggcggcactctaccgtcctggagtctcatggctgctgcccgcagtagcctgcctcctcgccaacagtcgcaaccgttggctgctcgaaacagggggggagccgttttccttgttgatcctgctggcgtcattcggtgcaccaatgcttggcctctacttgttgcgcagtcccattcatagtcgcatctggccagtcaggcgctggggatactatttctatccgctacacttaacactgattcatttgatccgccttgtttaa

SEQ ID NO: 365036 - DNA, 954 bp, Pseudomonas aeruginosa
atgccctcaggaaatgccccctcgaaactctacaaataccgttccatttcggaccgcaccattgagcttctcatcacagaccaggtgtatttcgccgatccatccacgttcaacgacccgttagatactcgacccagcgtaagagcagatgctcctgctggggtacttcaggacgcgctgcgcgagttgattcagcgacggatcgagcgagagcttagcgctgcggctaaaacgatcaagtatcaaggcccgaagactctgcagcacatcactgaactcagccagaagcaggcccagcggaagttgagccagatatcttatctggcatccgaatccggggatttggatgcacgggggaccgatcacctcaggctccttgaaaatgcccttcagactgagctcctgctgcgctacgagaagggcattctttcgttagctgaacggtactcctgcccgctcatgtggagccattacgccgatcagcacaaaggcatctgtatcggttacgaagttacggactcaccctatccaccactcaaagtgcagtacggaggatcaagggagatcctcggcagccagatcgccgcgatgatgcgtagcggcggccgcgcccaggacgaagtcgatgccgcagtgcttctgcgaaaggccagatcatgggcatacgagaaggagtggcgctcgatcgccccgaaaggcctgacggaaaatcccttcaagctctccgatgtgactttcggcctacgctgcagcgagccagtgaaatttgccgtgatggcctcgttgtcaaagcgcgcaggagcacaggtccggttctatgaaatgacggaaagccgtattaatttctcgctcagccggcgacgtattcaccctgacagccatgactactatcccaagtcggctttcgaggagaggaactacttcgatctacgtctctctccggagcaggcctga

SEQ ID NO: 365037 - DNA, 273 bp, Pseudomonas aeruginosa
atggacatcaaagcccaaatcgagaagcacctcgcacagttctgggacaagcgcgcccttgcgattgccaacgatccgctctctgttgatgagctgggcgcccccctggactcgatcgtagccctcgatgcgctgaaagagatcgggaagatgtttaaggtaaaaatcccggtcgatacggtgatacgcaatggcggctacgattccaaggaacagttcgtggaactggttaccaaggaaatcctaaaactcctgaagaaaactgggtcatga

SEQ ID NO: 365038 - DNA, 1014 bp, Pseudomonas aeruginosa
atgagcttccgtgagatagccttgagagccgcgctacgcgcgtctgaagtactggaagagtcaggagcaatggatcgcacacgcgagggctattcgcggattgatccttttctgattgctgccggacaccgagtgcttgtcatgctaaagccgctggataagcttctgggagccttcatcggtgacacctctcccggaattattttgaataatcagcgctccgctggtttgatacacatgacctgtgctcatgaattggggcactacttcatggagcatgggagcaacaccgaccagcaaattttctacagccgatcatctgcggaaatagaacaggaagcggatcaattcggctacaacctgctcatacctcgtgacctgatttcgcacgttatgcggcgaaaaagatggacacgtcagtgcttgctaaaaccgctggtgatgtatcagctatcgctgcgcctcggagttagctatgaagccgttgcatggtctctgttgcgttacaaggttttcgactccagggcaattcaacgtcttctgcaaaccaagcctgccgaaataaagaaagccattctcggaaaagccccctcagacgctagaaaagaagtctggctcctcgacgatttcgacaaggacgcgatcctcgaacctcgcgttgatgatcagatcatcgtgcggctaaaaagtaacgcctcagccggatatctctggcgcgcggacaaggccacggatgttcagggggaaggttttcagctccagccgatcaccgttccttctcagaattcgaaggaacagttggcctttgggggagcggacacgatggactatgcgcttctcaatggcgctgcattcaatacagagctcacgccatttaagctgtccgagcacatgccctggcaggaaaatggtgaggtgctaggcacattcagttcggcgaccaagtttgaaggtcttgaaacaggcctagccgcctcctccaaaaagcagtatctggaggatgcggcatcttga

SEQ ID NO: 365039 - DNA, 651 bp, Pseudomonas aeruginosa
ttgatcgttccagagattttgctggaggagttcaaaactcccgcccgggcacagggcaagcggcagacctgcctggctttcgcaatttcagatctaaatcgccaattcgcaccggcagaccttagccccgagtacctttaccaacgtgcggctctggcttcccctaactggaagccgggggacaggctaatattcgctgatgcccagcaagcggcccaagacggacagccagaagaggtccacttcccctactgcagcgttgatcccatcccgccgattccggcgctaccagccaatctcacccattttggctgtgccccaacatatgtgtctggggaccccacggatattgcgagcctcatccgcgcaggtcgcgccgttggcctcggactgcgagttactcaagagttcttcgatcccgtggctggtgtggtcccttacagcgaagaagtcatgcccagcattttgcatgcggtcgtggctgtaggtgtagggcgaaaggagggcgaagtcgttccttggttttatgttcgcaatagctggggtcccacttggggccagcaggggcacgcctggatttcaggtgaatacgtagccgcgcacgcagcatgtgcgttcggagtggatcatggccaaaatcatcgccagtga

SEQ ID NO: 365040 - DNA, 804 bp, Pseudomonas aeruginosa
atggccaaaatcatcgccagtgaaggcataggtaccgcatggctcgcagcagccaggcatctcaatacgaagaaaggtcgtatagaacggaacatggtactggaaatatccaggcctcagacgctatcagcagatgaccgcaccatcatcaaagcgatagacggcaagctccgcgaacaccataacgatctctccatcgagaccgtatcaggaacaattttccctaatggcttgtatcgccgagaaggaaggccgcagttctacgagtcgtttgtcgatctcatggccctaggaaagagacccaatagctggggcacgtacgcgctgaggatgattcaacgcaaggatcctaaaaccaaggatacttacaacccgcttgatagcatcgtggaaagactgctgctgacccatcagggcaagacttaccaagcagcctacgaactcggcgttcatgacatccatgaggacttcgatcctgctcttgaaggttacggcttcgagctcccaatttatgatccgtcgcgtgatgcgaagccgatgaagatcccgtgcctcagtcacctgagcttcaagctgaccaatggaaagctggatcttaccgcggtgtatcgttcccactggtattgcgtacgggcgcagggcaacctggttggactaagccaactgcataaattcgtgggcaacgaatcgaactacgaatgtggaacgctgacctgtatcgcgactcacgcttacctggactcggagagcttcggcggtgtcaccgcaacaaacgactttctgaagtcactgccgtcgacatga

SEQ ID NO: 365041 - DNA, 807 bp, Pseudomonas aeruginosa
atggcttctagcaacgttgtccaaatcggcgcctcagtaggtgcccgtactgagccagcagtctgcgatgagcacggcccgtatgagcagagaatcaccagcttgcttggacgtgaatttcgctctcgctgcccagcatgcacccagcgcgccgatgccgaagagatggcgaatcgcaaggcaatggaaacgtgggagcgtcaacgcaatcttgaacaccgtctcgggcgagcagccatcccgaaacgcttcgctgagaagaacttcgatgagtacgtaactgaccacgcagggaaggcaaaagcgctgcgcgtgtgccaggagttcgcggagggcttcccggaacatgcagaggtcggacgttgcatgctcctgctgggctctcccggtacagggaagactcaccttggcgcagccattgccaacgctgtgattaagctccacggcaaaaccgctgtgtacagaaccatcggtagcgtgttccaggaaatccgcgatagctacggcgataacagccacaagaccgagggcgaaattctctccccgctggtggctgctgatcttctggttctggatgagatcggcgtcagcaaagaacagcctagtgatttcgagctgcgcaccatcttcgccatcgtaaacggccgctacgagcaatgcaggccgaccgtgatcatctccaaccttggcgttgatgaagtgaaagtcgcgctgggcgagcgttcagcagaccgcttgcgtgaaggcggggtcatcgtcctgctattcaactggaaatccgcgcgtggaggtattggtcatgactaa

SEQ ID NO: 365042 - DNA, 552 bp, Pseudomonas aeruginosa
atgagcattgactggaccaaggcaccagagggtgcgacgcattgggagccgagctcttatgaattcgctgaaggctggatgcggaaagacggggatggatggtcctattggatcgaaggaagagaagtgtgggtccgtggcgttataacctgcgatgtatccccagagcgtgaggcgacattcgagcctagaccgcaagagacctggaacggccagggcctgccgccggttgggacggtgtgtgagcactacggcacagcggatgacctcgcgtggcttgaagtcgaggttattggtcatggcaatgtcgacggcagaaatgtcgcgttcttccgctacgggaccggatcgccgcgcttcaccgtcagctactccacggccaacaacttccgccccatccgcacccccgagcagatcgccgccgaggagcgctcgaaagagtgcgaccgcatcttcgtcattctttcaagcgtcgagcgcgagggaaaccgcagcgacatggctgaagcactatacgacgccggctaccgccgccaggaggaagggaaatga

SEQ ID NO: 365043 - DNA, 762 bp, Pseudomonas aeruginosa
atgagcaactccattgcccagcggcaggaaagtgctgccgtcattccggccggtgaatcggccaccatcctccaggtcatccagcgcgccgcggctgatccgcaatgcgacatcgagaagatggaacgcctgctggccatgaaggagcggatggacgccaaggccgcagagatcgagttcaatgacgcactgtcccgcgtacaggcaaacatggggcgcgtagctgccgacgcaacgaacaaccagacgcgcagctcctacgccacctacggcaagctggataaggtactgcgacccatctacaccgccgaaggcttctcactttccttcggcaccgaggatgctcctgaaggcatggtcggcatgatctgcttcgtgagccaccgggcaggccatacccgccagtaccgtgcgcacgtcccttctgacggcaaaggtgcaaagggcggcgacgtgatgaccaagacgcacgccttcggctccggcacctcctacggcatgcgctacctgctgaagatgatcttcaacgtcgccatcggcgaggaagacgacgacggcaatgctgctggcgacgacagcttccgcaacgcggtgctggacgacctgattgcgaaggcaaaggccgcaccgagcagcgccgaactccaagccgtatggcaatcgggcctcaagaccctgcaggcagcgaaggatgtggccggcgccgatgaactccgcgccgcagtcactgcccgcaaagcagagttggaggacacgaaatga

SEQ ID NO: 365044 - DNA, 1143 bp, Pseudomonas aeruginosa
atgcccaaaggaaacccaactgcagctcagctatgggcaggtgatgtctcttttttctcccttgatacggatgtaatccaagctgcaggctacaacttcaacgctggcgcactcaagcttctacccacgcaacttcccgacacaatgtcgcttaacatgtctgaagttgtagcccaagaaatagtttcacatcggatggagagcattaagaaggcgaccgagcaattcaggggcgcctccaacgatctgaaacgcttagcccaggtcgaaatgtcgggcattgacggagatttcgataaattatctgtcgaagaagccgcttcgaagtattactacaaacaaatctcagactatgtagacacctgcgggggaactatcctacaaatagacggaattcgcctgacagagcgattatttcgtctctattttgaatcacgtccaccattcgaagagcgcagggcaaaaaagtccgaattccccgatgcgacctccttactcattcttgaggactttgcgcgagacaaccgcacgatgggcgtggtggcatccgccgatgaaggctggagcaagttcgcggacgcctcagagtatttgtattgtgttaggtcaattgacgaactggctgctctatttgctgccactggcaactatgcgaaagaggtcgaaaaacgagtttccgacgctgtccaagaagaaaaatcatcactacgcgataaactccacgatgcactagttgaacacatcgaagcttccgagtggaccgctaatgatgtgacaggcggcacggtggcgcgagttgaggcatatgtatacgagaaagaattaatctcctatgagatcgaccacaccgaggtgtgggaaggtaaggaaaagaaaagctgggtcatcgaactcaatgtcagcgtaaaagtgaaacttcacctagatgtggagttctacgcttgggattccattgatcgagaagaaatttcgctaggttccgattcattccccaccgaaaacacaattgaggttgaagtgtttttcacatgctcaggtgtggaggaaggcaccccgcctgaggattggcagatcgaaatagaaattgccaatgggctttacgagtgcgatccggttgatgtggaaccagatttctacgactga

SEQ ID NO: 365045 - DNA, 795 bp, Pseudomonas aeruginosa
atgagaaagtctcggtcgggcgtcgtgttttttagtgttgcggcccgcaacactccaccaaggatccacttcggtgccgccgacgagctgagtggtgccactggcaccacttcaccaaggatcaaccacggcgccgccggcgaactgggtgttgccactggcaacactccagcagggatcattcacggcaccgccagcgaactgggtgttgccactggcaacactccagcagggatcaaccacggcactgccagcgaactgggtgttgccactggcaacactccagcaggagccgacctcggtgccggcgacgagcagggtgattccactggaatcactccaccagggatcaaccacggcaccgccagcgaactgggtgttgccactggcaacactccagcagggatcaaccacggcactgccagcgaactgggtgttgccactggcaacactccagcaggagccgacctcggtgccggcgacgagcagggtgattccactggaatcactccaccagggatcaaccacggcaccgccagcgaactgggtgttgccactggcaacactccagcagggatcaaccacggcactgccagcgaactgggtgttgccactggcaacactccagcaggagccgacctcggtgccgccggtgaactgggtgattccactggaatcactcagcaaggaaccgacctcggtgccgccggcgaactgggtgttgccactggcaacagtccgccaggacctggcctcggcgccgaccgagggctatcaacctctcccactcaatag

SEQ ID NO: 365046 - DNA, 186 bp, Pseudomonas aeruginosa
atggccgagtccttcgtcaagaccatgaagaataactacatcgcattcatggacaagacggatgtggccacggccctgatcagcctgggccgcgcattcgagcactacaacaagcatcatccgcacaaggccctgcgctaccgctcgccacgtgagttcaggcgcagcatagtaacgtcagcttaa

SEQ ID NO: 365047 - DNA, 828 bp, Pseudomonas aeruginosa
atgcaactgagtcagtttgagatcaagcgtcactccgagaaatattggcgtgtcactttcaataatccgccgatcaatcttgtcaatcccgagacaattcaggagctgcaagcaatcgtcgaccaacttgaggcggacccaagtatccaagtggtggtattcgatagcgcccatcccgattacttttttgcgcgctatgacctgaagcgagcagcagatacgtcggttgcccctgggccatcaggtttaccggcctggatcgatttcaccacgcggctaagtaaaatggccgcgatcagcattgcgttgattcgggggcgaacccggggaggtggcagtgagttcgcgctggcgtgtgatatgcgcttcgccagcatggaaaaagccgtattcggccagccggaagtacccgccggtgtgatcccaggcggaggagctattgagcgccttccgctgcttatggggagggccagggcattggaagttgttatcggcggtgacgacttcgacgccgacttggccgaacgctacgggtggatcaaccgcgctctgccggatgatgagttggacgactttgtcgaaaatctggctctgcggataagtaccttcgaccgtactgcacttggcgacgccaagcgactgttgaaccgtgattcgctccctgacaactctcgcctgcaggaagcacaagacgcgttcttcgaagcgacacaacgtccccaggttgctctcattggcaagaaggcggtgctgacagctgcgactgtgggggcggacgaattcgagtcccgcctcgggtattacctcggccgtcttccagatatctga

SEQ ID NO: 365048 - DNA, 612 bp, Pseudomonas aeruginosa
atgaaaaaagagcagcaaggcaaaaagcgagggggggggcgcccgttatcgttcgaccgcaatcaggcacttgaggccgcgatgcgtgttttctggagccgtggcttcgaggccagttccgtcaacatgctggttgaggccatgggagtcacccctcccagcctttacacggcttttggtgacaagcagagcctctatgccgaagccctggatcactacttgcgacacccttccatggatgcacatcgcttgctgacagcggcctcaactgcacgaggtgccgtagagctcctgctgcaggcagcgatcctccggcaaacaaaaagaggacagcctcaaggctgcatgctgatgggggctatggtgaactcaccgcccgtatctgatatcgatcaaaagataatacgggcacgcgccgacttcgaggatagcttgcggattcggctcgaccgagccgtacaggatctcgaattgcctccagacactgatacccacgcccttgccggttactacctcgccatgctgcaaggcatatccgcacaggccagggacggcgccaacagcgagaaactggagggtattatcagaatagcaatgcgtgcttggccatag

SEQ ID NO: 365049 - DNA, 435 bp, Pseudomonas aeruginosa
atgagcactgacactatgaccggattggaactgctgcgcgccggggctgccggcaagctgccgcatgcttcgatcagcgacatcatggggatgtattcaatggaagtggaggaaggccgcgtcgtcatccatgcccgagctgatgagcggcatctcaacccgttgggtggagtgcatggcggcttcgccgcgacggttcttgattccgtcacgggctgcgcggtgcattcccgcctgccggctggcgccgtctacggtaccgtcgatctcaatgtgaagatgctgcgccccgtgccgcgtgatcagaacttggtggcggaggctacggtgacacatctatcacggtctttgggcgtgtcggaggggacactgcgggatgagaaaggcaatctgctcgctagtgcctcggcgacctgtttcatcaagcagtcgtaa

SEQ ID NO: 365050 - DNA, 2145 bp, Pseudomonas aeruginosa
atgacgacgcttgcgcctgcggcgcccccttctttttcagcaatcacgtcctccctcaaccgtctcttgcgcccgcgctcggttgctatcataggtgcatccgacaagcctgggtctctgggggcgtctgtgctttccaatctcactcgcagccagttcgcgggtgatatccatctggtcaaccccaaacgctcagaaatagggggactggtctgccttccctccgtcgaggccttaccggaaggggtggatgtggccgtgctcgccattccgcgcgtcgccgtactggaaacggtgagagggctcgcagcccgcaaggtgggcgccgctatcatcttctccgccggctttgccgaaggcggcgacgaaggactggccgagcagcgcgagatcagccgtatcgccagcgaatcaggcatggtcatcgaaggccccaactgcctgggcatgaccaacttcatcgaccgcgtgccactgaccttcgtggaaaccgccgcgaggtcgccgggcgagccccccggtattggcatcgtttcccagagcggcgccatggcctgcgtgctctgcacgacgctagcctcgcgtgatctcggcctctccttttctatctcgaccggcaacgaggcggcgagcggggtggaggattacgtcgaatatctggtggacgatcccgcgacaaaagtcatagcaatgatcaccgagcagttccgcaagccccggcgctttctggccgctgcccgccgtgcacgggccgcaggtaagacgatcgtgctgctccatcccggcaagagcagcgctgcgcgcgaatccgccgcgacccatactggcgcgatggccggtgactatcaggtaatgcgggtgaacgtcgcccgcgccggggtcattttcgccgaaacgctggaagaactgggtgacatcgcggaaatcgcgctgcggtgccaacccatcccggtcggtggcgtggcgatgatgggcgaatcaggcgctgtcaaggcgcttgtacttgacctttgcgaagagttgggactggctctgccacacgtgagcgacgacaactcccccgccctgcgcgccgccctacctgactttgtcggcgtttccaacccacttgatcttaccgcgcagggactggtcgatcccgacctctactaccgcacgctcgccgcgctgttcagcgacgaccgtttcggcagcgtcgttgcgggaattatccagaccgatccggtgacgataggcataaagttgtcgccggtcctgcgcgccgtgcgcgaactgaaaccggaaaaggcgatcatctttgccggggtagatgacggcgctccgattccgccgacggatatcgctgcgcttcgggcatgcggtatcccctatttcccctccatcgaacgcgtcctgcgcgccctgaagcgcctcagcgacttcgcccttcgcgatttcagcgtaagcggcgcaaccgcgctccaagccattgacctgcccgccatgggcggtgtcatacctgaatatcgtgccaaaaacctccttacgccgctcggcattccgttcccagttggggccttctgcacaaccattgaggagacgttggccgcggccgaaagaatcggttatccggtggtgctgaaggcacagtcggcgcggctcagccacaagagcgacgccggcggcgtggtgctgaaccttggcgatgcggaagagttacgaaaggggtgggagcgcctacacgccaatatcgccgctcatgacgccaagctttttctcgacggtgtgctgctcgaaggcatgtgtccgcgcggcattgagctgatcattggtgccaagagcgatccagactgggggccggtcgttctcgtgggcttcggtggtgtcgaggcagaaattcttcacgacatacgcctgctgacgccggacatgccggaggagaccatcatcggcgagttgtacaagttgaagcaggccgcactgctgcgcggcttccgcggagcgccgtcagccgacatcgaggcggtggcgcgcattatcgggacgctcggccgactgctactcggcgaacccgctgtacgcgagatcgacctcaatccggtgatggtctatcccaagggagcggtagcggtagacgcccttatcctcacgaatccggccaagtga

SEQ ID NO: 365051 - DNA, 831 bp, Pseudomonas aeruginosa
atggccaacgatatcgataccgtcgccttcgaagtaacggatggcattgcttgggttcgtttcaaccgtcccgacaagcgcaacgcaatgagcccgaagctcaaccgttccatgatgaaggtactggacgacttggaattccgtgaggatgtaggggtactcgtgctaactggcgaaggttccgcctggaccgccggcatggacctgaaggaatatttccgtgagacggagtctgaggggttgaagggcgttcgccgctcgcagcaagaaagctatggctggtggcggcggctgcgctggtaccagaagccgaccatcgcaatggtgaacggctggtgcttcggcggcggctatggcccattgtttgcctgcgaccttgccttcgccgccgaggaagcaaaatttggactaagcgagattaactggggaatcctgccaggcggcggcgcatcgaaggtcgcagtggaactcacctctttccgcaatgccatgtaccacgcattgacgggggaaaacatcgatggaaggcaagcggcggagtggggcttcgtaaacgaagcggtgccgctggtcgagttgaaggcgcgcgtgaccgaggttgcgaatgttctactcaagaagaacccggtggcactgaaggcgaccaaggacgccatccgtcgcgtgcgcgagatgacctacgacaatgccgaggactacctagtgcgcgcccaggaggcggccaacagctttgacggtgacggccgccaggaaggcatccgccagttcatcgacgagaaatcttacaagccgggcctcggtgcctacgatcggtccagaaagggcgcctaa

SEQ ID NO: 365052 - DNA, 921 bp, Pseudomonas aeruginosa
gtggagacgctggaagaaggcggtcttccggctgtcgtcgacagcttcgtgaccaacatgcctgaagacgcggttgagattgtcggcgcactggtcgaccacccggatatccgtcggatcaacctcaccggctccaccaaggtcggccgcattatcgcccagcgcgtcgccggtagctttaaaccggtgctgcttgagctaggcggtaaggccccgcttctcgtgctaaaggatgccggcatggacgaggtggtgaagacctccatcttcggggccttcttcgaccagggccagatctgcatatcgacagagcggatcatcgtcgtgccggacatggcggaggccgttgtggtggagttcaccgaacgcgcaagggcgctcaaggccggcgatccgcgcgagggcgcagcgccgctcgggaccgaggtcgatgcccgcaccgtcgcgaaggtagaggcactgagtgctgacgccgtggccaagggggcaactgtcaccagcgcgggagcagtcgaaggcgtgctgatgccgacacaggtggtcgatcgtgtgaccgccgggatgagcctctacttcgaggaaagcttcggcccggtcgccgccgtcctgcgagcgatggacgaggaggatgttatccgccttgccaacgacagcgaatatggcctctcggctaccgtcttcagccgcggtacggctcgcgccgtttcggtggcccgccgcatccggtccggcatccgccacgtgaatggcccgacgatgcatgacaaggcgcagatgtccttcgccggcaccacagcttccggctatggccgcttcggcggcagggcccggatcgtcgagttcttcaccgaactgtgctggatcaccgtcgagccggagccgggcagtactttttcggggcgtaatatcggtgtggcctag

SEQ ID NO: 365053 - DNA, 432 bp, Pseudomonas aeruginosa
atgtttttcgtccatgcgtattgtaggggcggtgtatgccgtatccggcgaccgaacccagtcactggcgaagtcgcaagcgaggccgcagcggccacggtcgcagacgccatcgccgaggccgatgctgtcgtcgttgccatggtcggagagatcggcgcgacggagggcaggatccggttcaacgtcgcgctcgccgcctccatgttgcgggaggccctggtccttaccacgcaagtgtccggctccgtgatcctgtccgacaatctcggcggcctgtccatggtgatccgcgaaccggcgagtgtcgtgctcggcattacgccgtggaacgccccgatcattttcggcgtgcgggcgctcgcaaccccgctcgcctgcggcaacagcatcttcttcagggcgtccgaaatctgcccccccatgcgctga

SEQ ID NO: 365054 - DNA, 480 bp, Pseudomonas aeruginosa
atgtcgttggagatgcctcaggacgaccatgtaatggcggacgatccggccagccggcttgaggagttggtgggctaccatcttcgccgcgcatcggtgttcgacctgcagggcgcggtatcggcgctcgaagcgaccaacacacgcccggttccgctcagcgtgctcgtttgcatccaggaaactccgggcatcagctcagcggaaatctgccgcaggctcggcatgcagcgcgccaacatcgtgtccattctcgccaacctcgaggagagggggcttttcctgcgggagacggacgctgcggaccagcgcatccagaggctgtttcccacccgacgcggcgaagcggaagccgcacatgggttggcacttctcacggaacatgaacggaggttacttcaccgcctgagcgcggcggagcaaaaggagcttcgccgactgctggcgaagatctggcaggaggatgagcattgcgggtaa

SEQ ID NO: 365055 - DNA, 969 bp, Pseudomonas aeruginosa
atgactctagcaccgcgacacctgcgcatagaacaacgaggacgcgtcctgcaagtcctgctcgacaatcccccggcgaacttcctcaccacggcggtgatgcaggaactggccgacctgctggacgacctggagcagcgccaggacatcggagccgtcatcctttccggagcggcggatggggtcttcctgacccacttcgacgtcgacgagatcgagcgcgccgtcgcccccatcaccttctccatgccggcctggctgacacgcctgctgctggaaagcgaaagcctcctgcgccacctgcctggagcgaggaagctgctgcggcgcaccctgctggccggcgtcgccgacatgaacctgttccatgaggtcaccgcgcacatgcgccgcatggacaaggtgttcatcgccgcgatcaacggcctggccctgggcggcggctgcgagctggcgctggcctgcgacctgcgcctgatggccgaggacgaccaggtggaacgcttcctcggccaaccggaagtactcatcggcctgataccgggaggcggcggcacccagatgctggcgcgcagcctgggcgtggccaaagccctggagttgtgcctggaaggacaactgctggagccgcgccaggctcttgcgctgggcctggtcaacgggctggcgccagcggaggagctactggaggccgccgacgcgctggcgcaacgcctgtcccggcgctcgccgcaggcggtgcatctgatcaagcgttcgatctaccaggcggcttcccgcgactggacggagggcatggccagcgaaaaggccggcttcctctccgccgcctcccagggcaatacccgccgcgccatgcgcgaatacatcgaacgggtgcgcaccatcacccgggaagagcgtcctttccgccgtgcggatttcgacgatctgaccgaaggcaacgccatcgacatggcttacaggtga

SEQ ID NO: 365056 - DNA, 327 bp, Pseudomonas aeruginosa
atgaacgtccccgaagggttccagccgctgttccgcagcagtccgttgctcgacctgctcggtcctttcttctgccggcacgacgcccagcgccagttggtggtggcgctgcgcatcgacgaaaagcactgcaaccacggtggcaccgcccacggcggcctgctctcgaccctggccgacgttggcctcggctacgccatggcgttctcccgcgaaccgccgcagccgatggtcaccgtcggccagcgcatggccttcgcctcggcccggctgcacagcggcgagcgcctggtggccagcgccagcggcgtgtttcatctgccctga

SEQ ID NO: 365057 - DNA, 705 bp, Pseudomonas aeruginosa
atgcgccaggcggttggcccggcggttcagctcggcgtagtccaggcgctcctcgccgaaggccagcgccggcgccgtcggcgtgcgctcgacctgctcctcgaacaaccggtgcacgccgcgttgcagcggatactcggccgcagtggcgttccagccttccagcaactggccacgctcctcggcatcgagcatcggcagcgagtcgacgctggcctgcgggttttccagcatgccgcgcagcaggttctgccaatgccgcgccatgcgctcgacggtccgcgcctcgaacaggtcggtcgcgtaggtcagcgcggcgtacaggcggccgcccttctcgtaggtatccaggctcaggtcgaactgggtggtacggctcttccagtcgagctggccgaagctcaggccggccacgctgtccagcgcctcgatgtcggccaccaacggctggtggttgtacatcacctggaacagcgggctgtggctcaggctgcgctcgaccttgaacgcctcgaccaggcgctcgaacggcagatcctgatgggcctgggcgccaagcacggtgtccttgagcccggccagcagggtcgccaccgacgtgcggccgtcgaataccgagcgcagcacctgggtgttgacgaacaggccgatcagcccttccacctcggcgcggttgcggttggcgatggggacgccgacccgtag

SEQ ID NO: 365058 - DNA, 588 bp, Pseudomonas aeruginosa
atgaaggttggcggcgccgtcggcattacctactcggtatcccccgacaaggtgacgacgctgtttcagaagtaccgggcgggaatcgacgaaatcacgaacaagttcctgcggaacatggtgcgcgatgccttcaacgatgttgcctcgaagcttccagtcgagagtgtctatggcgccggcaaggcggacctgctgctggccgtcgagaagcgcgtgcgcgaccaggtggcgcccatcggcatcaacatcgagcgcatctactacgcatccgacctggtcctcccgccgcaggtcacgcagagcctcaacgcgaagatccaggccactcagatggccgagcagcgccgtaacgaggtcgcccaagccaaggccgaagccgacaaggaacgcgctcgggcccagggggaggcggacgcgaagctgaccctggccaccgccgatgcgaaggcgatcgagatccgcgcccaggcgctgcgctcgaaccccgacgtcgtgaccctcaacgcggtcgagaagtgggacggcaagctgcccacctacatggccagcggctccccgctgcccttcatcggcatcagcaagtag

SEQ ID NO: 365059 - DNA, 312 bp, Pseudomonas aeruginosa; identical to SEQ ID NO: 325389

SEQ ID NO: 365060 - DNA, 186 bp, Pseudomonas aeruginosa
atgaacggctatgtcggcctgcgcgacgaccgtcgcgacggcgagcgcctggcggcgcggatcggcctgctgttccccggcccctcggcggcctggctgcaacgcgccgagcgcctgcggcggcagcaggcgtcggcgggcctcggggtcagacgcgggtggcctgcatcgacgggcgctggctga

SEQ ID NO: 365061 - DNA, 234 bp, Pseudomonas aeruginosa
atggatatcaaagtgctcggcacaggctgtgccaattgcaagaacaccattgcactgatcgaacaagtcgctcgaacgaagggagttgcagtttctctgcaaaaaatcgaggagctcaaagacatcatgagttacggcgtgatgagcacgccgggcgttgtgatcgatggaaaggtcgtccatgcggggggagttccatcccgagacaagatcgagcaatggttggttgcatga

SEQ ID NO: 365062 - DNA, 990 bp, Pseudomonas aeruginosa
atgaagcagatgagtctggaggcgccgatgtatacgggctttgagctgcgcgccaagcgcacccgcaagcgtgcgtttttggagcagatggaccgtgtggtgccgtgggcagagttggtcgcactcatcgagccgtatgcgccgaaggcgggtcccaagggtgggcggccaccctttgcggtagagaagctgctgaggattcattttttgcagcagtggtttggtctgtcggacccggcggtggaggaagccttgtacgacacgccgctgctggcgagctttgttggtctggacctgggggtggatgtcgtgccggatgagagcaccatcctgcgctttcaccacctgctggagcaacacggcctgagccagcgtatcctcgagacggtcaatcgcatcctgaccgagcgtggcctcatgctcaagagcggcaccatcgtggatgccacgctcattgctgctcccagctcgaccaagaacgcccgccgtgagcgcgaccctgagatgcaccagacgaagaagggcaaccagtggtacttcggcatgaaagcgcacgttggggtcgacgccgagacagggctggtacacacggtggtggccaccgctgccaacgtctcggatgtgacgcaggcgcatcggctcttgcacgggcaagagaccgacgtctttgccgatgcgggctatcagggagtggacaagcgagcggaaaaccagggcaagcaagtcgcttggcacgtggccatgcggccgggcaagcgccgggcattggacaagcgcacttttcttggccaggtgatggatgccttggaacgcaccaaggcgcgcattcgtgccaagggtgagcatccgtttcgggtactcaaatgccagtttggctaccgcaagacgccctatcgaggcttggccaagaacggcgcgcagctcaacgtcctgtttgcgctggtcaatctgtggctggcgcgcaaagccttgctggctgcgacgggataa

SEQ ID NO: 365063 - DNA, 729 bp, Pseudomonas aeruginosa
atgcccggaaacgtcgcccttgtggggcacgcgcacatcggccacggtgtcaccgcagacaaggccattgctgcacacgaagcggaacattccggccagcatctgataactgctcgtcccgtcatgggagttcagcagcacgatttcgttagcctcggcgccgttgatttggctggcgtggcgcaggcgcagcatgtgtttcgtatgctcgcgcttgccttcgtcgcgcacgcgggtctgcgtcaccatgaaaggctggaacccttctttgcgaagctcggtcagcacggcggcggtggggatgtagctgtaccgctcggaacggctctcatgcggggcttccgcgaagatggacggggccacgcggcggatttggtcgtcggacagcgggtagtcgctgcgcagtgccggggaacgggaagcgaaacgggatgcgagttgcatggtctttctcctgacaaaaagaggtttgctgttcacaccgcacaccggattcctagattcggagcccagcctttcggctgtttggtgcggtcggcacgaagaacccggttggccctgttgccaccgtctttcctgagttcatcgcccgcgacggtcaggagcgcgcggacgggggccgtcaaggacacaagcgcagggttggtgcggcccgcaggcgcagccgaggacacggccatgcgcgccttgacggcacacggccgcgagctacagtcgcgagcaaggtga

SEQ ID NO: 365064 - DNA, 270 bp, Pseudomonas aeruginosa
atgtcagagaaaaaaggctttatcgcgcgtttgcttggcaagcaggacgaatcggattgctgcgcggtgcgtatcgaagaggtgccggagacggaagtagcacgaatgcccgccgcaaaaaagtccgcttgctgcgcgccgcgcatcgaaaaggtgcctgagttggaagtagcgcaaacgcccactgccaaaaaatccgcgtgctgcgcggtgcgcatcgaggaggtcaaggacgatgatgtcacccagtcaccacctgccacccagtag

SEQ ID NO: 365065 - DNA, 222 bp, Pseudomonas aeruginosa
atggctgaaaccaatgttaccggccgccagagccgcgagctaacgaaataccgtgtgaccttcgcggccgccgtcatcggcctggccgtggccggctggatgttccagacggcctatgagcagcacatcaaggttttgcagatcggcgacgacaccggccagcgcctgcaaatgcgcggcctcaaccacggccaggagggcgcggagcatgagcagcgttga

SEQ ID NO: 365066 - DNA, 921 bp, Pseudomonas aeruginosa
atgagcagcgttgaatcctggcggcgcgctgccctggcggcctacgtcctggcgggggccgccctggcctccggcggctatgcccttgccaccacgcaggcgaacgtaaacgccatcgcggccgcgcagaagcgtcttgatgacgacgagtggagcaagcatcaggcgcacgccaagaccgacagcgcccgcagcgccgccggcgaaggcgtggcgctggacgcccgcccctaccctgccgccgtcgattggtcggccgtggccggccaggtgatgccgtccgttgtcatggtggccgtcatcgagcgcgccaagggcgacggcagccgtaaccgggcatggcttgtccctggcgttcaaaccaacctggcaaccgagctgctgacccgttaccgggcctggcaacacgaatgggcgaaggccgaccaggaacgcgaatgggtgacgctgggcgcgggcttccttgtcggcgacggtcgcacggccctgacggccgcgcacgtcctggccgacatcgagggcgtgcgggtgaagctggcaagcggggaatggcgcagcgcccgcgtggcgcgcatcgaccaggtgcgcgacgtggccgcgctgctgatcgacggcgagccgggccagccggtgcgcgtggcccctgccctgccccgtcaaggccaggccgttgccgcgatcggctccccgaagggcttggacttctccatgagcgcgggcattgtcagccgttacggccaggtcggcggtctgattggcgcggcgggcatgttgcagatcgacgcgcccatagcgggcggcaactccggcggcgttgtcgtgaatggccggggcgaggccgtgggccttgtgagccacagcgccgggccattcacccaggccgtgcccatcggccgcgccttggccgtggcgggcttgtag

SEQ ID NO: 365067 - DNA, 135 bp, Pseudomonas aeruginosa
atgaccgacccgaaaaacctggaaaactggctgcatgagaaggccggcccggcctatgacgcattgaaggccgacccggcctattcgagcacgcccacgaagtcgcggcgcgggccagggccacgcacggcctag

SEQ ID NO: 365068 - DNA, 159 bp, Pseudomonas aeruginosa
atgcgcctaccggccgagatggtcgaagccatcgacgcggaatgctcgcgccgcgcgggcaacgtctcgcgcaatacctggatcaccgaagccgtgcaggaaaagctggcgcgcaacggagcggcgggccaatcaaccagcgcaggggagggggcgtaa

SEQ ID NO: 365069 - DNA, 996 bp, Pseudomonas aeruginosa
atgaataaaccggccacggccgcgccgatggtggcgcgggtctatctgcgcgtcagcaccgacgcgcaggacctggaacgccaggaacgaatcatcacggccgcgaaggcctccggctactacgttgccggcatctaccgcgagaaggccagcggcgcacgcgccgaccggcccgagctgctgcgcatggtggccgacctgcaaccgggcgaggtggtcattgccgagaagatcgaccgcatcagccgccttcccctgccggaagccgagcgccttgtggcctcgatccgggccaagggcgcgcgcctggccgtccctggcgtagtcgatctatccgacctggcggccgaggcccagggcgtcgccaagatcgttctggaatccgtgcaggaaatgcttttgcgcctggccttgcagatggcccgcgacgactacgaggacaggcgcgagaggcagcgccagggcatcgagctggcgaaggcctccggcaagtaccggggccgccgggccgatccaaagcgccgcgcccaggtcattgccttgcgccgctccggccacagcatcaccaggacggccgagctggcagggtgcagcccgtcccaggtgaaacggatatgggccgaggaagtgagccaggccgaggcccgccgacgtggtgcgttcgccgaggacgctttgagcgaggccgacgccctggcggccgtcgatgatgaacgccaggaagaaggtccggcattccttgatgacgaaggcccggcgaatgacctgccgctgccgccgtatcgaacgcagagcctgccgcaaatcctggcggccctgcccgatgacgagctggcgagctggcccggcgagctggccgaccaggagcgggaacgccggcgggtgcgggcgctgacccccggcgagctggccgggctgcgccaggacatggccgaggcctccgcctggatgcgggccgagctgacccggcggcgaaccgacaaaggccagccctga

SEQ ID NO: 365070 - DNA, 630 bp, Pseudomonas aeruginosa
atgatcgtcggacttctgaaccagaaaggcggggtcggcaaaaccaccctcagcgtgaacctggcggccagcctgtcgcgctcaggggctcgggtgctgctgatcgacgccgatccgcagggaagcgccctggactgggcggccgcccggcagggggaaccgctgttttccgtggtcggcctgccaaggccgaccgtccacaaggaaatcgcgcagatcgggcagggctacgaccacatcatcatcgacggcccgccgcgagtcacagaccttgcccggtcggccatcatggccgccgacgtggtgctgatcccggtgcagccttcgccctatgacatctgggcggctgacgaggtggtgaagctgatcgacgaggcccgcgtctataaagaaaacctgaaagccgcgtttgttgttaatcgtaaaatcgcaaatacggcaatcggccgcgacgtgggcgaggcgctggcggcctatccggtgccggcgctggcggccgccatcacgcagcgcgtggtgttcgccgaagcggccgcgcaagggctggccgttcatgagattgaccaggaagggccggcagcggccgagattgaggccgtagcggccgagctgatggagttcgcacgatga

SEQ ID NO: 365071 - DNA, 237 bp, Pseudomonas aeruginosa
atgagcacgaagaagatttcgattggcaccaagccgaccgccaagcccgcgccggtggcggccgatgcctgggtggaaagccgtgttccggccgaggggccggagccgatgaagcgcctcaccatcgacgtgccggagagcctgcaccgctcgatcaaggcgcagtgcgccatgcgcggcaccaagatcgccgatgaggtgcgcgagcttcttttgcggaaatacggacaagcgtaa

SEQ ID NO: 365072 - DNA, 1377 bp, Pseudomonas aeruginosa
atgccgcgcaagcccaagcccaagaccaagccagcgtccaaccctgccgatacgcaaggccaagcgtcgctgttcgacggcatcgtgtccggcgatctccggcacgtcggcattccgggcgttgccgtcgaggtctcgcccgaggacgcggcgatgatgggcgcgttcgaggaggacgccttgagtttcgaggacgtgatggagtgccaggacgcgcctgaagccatcccatccacgccagaggaggcgcaccggcagcgcatcgagcggctgcgcgagcatcaccgcgtgctgtccgagctgatcgtgagcacgaaccgcgacatcgcgcggatcgtgggcaagaccggccgcctggaatcccccgaggcctccgcgctgctggcgcggctcaagagcctgcaagaacagcgggccgccatcgaggccgagacgcaggaggccgtgaaggcgctcaaggccttggagcgccgcctgacccccgcgccgcgcgagggcgacggcaagggcgggctaatcaaggtgcggcacccgaaccgggactttttcctagccgacctattcgactacgcgatgaaggacgacggcgcgagcatggaagcgccgatcttcacgctctcgaccaagcccgacctgtcgatctgggaatggcgcagcaaggacggcaacaagtatgtgaaggtggcgccgtccgtactcggccgcgccacgcagcacgacaaggacatcctcatctacgtggtatcgcagcttgtcgaggggctgaaccgggggagggacgatgcaaggaaccgtgtagtgcggttcactgtgtatgacttcctggtgacgaccaaccggcagacaagcggcgacggctaccagcgcctgcatgaagctttcgagcggctggcaggcacacggattactaccgacatcaagacgggcggaatgcgtgtcaaagaggggttcgggatcatcgaccgctggaagatcatcgagaagtcaccgaccgacgagcggatggtagccgtcgaggtcacattgtctgaatggctttacaacgccgtgcaggccttcgaggtgctgacgatccacccggactatttccggctgcgcaagccgctggcccggcggctctacgagatcgcccgcaagcattgcggccatcaggcgcaatggacggtgagccttgggctgctccaggagaaggccggcagcaaatccacgctcaaggagttccggcgggcgctgcgtgcgatccaggacgacgacagcctgccggaataccgcttcgtgctccaccaggacgaccgcgtgaccttctacgttcgcgacccccagcggctggcgcggagcatcgcccggcgcatcgagggcggggagaaccgtagctga

SEQ ID NO: 365073 - DNA, 582 bp, Pseudomonas aeruginosa
atgcgggcagggctggccgcgttcgcggtcatcctggcggcgacaaccgcccacgccggcgagctgcgcggccgggtggtggccgtcgccgatggcgacacgctcaccattctggacgccagccgacagcagcaccgtatccggctggccgagatcgacgcgcccgaaaagcggcagcccttcggccaacgctcgaagcagtccctttccggcctttgcttcggccgcgaggccgtcatcgaggacaggggacacgaccgctacggccgcgccatcggccgcgtgagctgcggcgggatcgacaccagcgccgaacaggtcaggcgcggcatggcctgggtgttcgaccgctacgcgaccgaccgcacgctgtatgcgatccaggatgaagcgcgagcggccaggcgcggcctgtggagcgatgccgccccggtgccgccgtgggaatggcgggcgcaacaccgccgcgaagcgcccccaagagtcaataaacccggcccgcccagccttgcaggaacagaaaagcccgcgcaggacgggccttccttcgccacttggaaggcggaagcggcgcagtgttga

SEQ ID NO: 365074 - DNA, 393 bp, Pseudomonas aeruginosa
atgtgggttttcgtcgtcatcggttatctgctgctgctcggcctggccgtctggttcggcggcggcgcggtgatgacggtcgccgccggcggcttcgtcctggccgtggcgctctggctgctcgacggcctgctggccgatctgctgcgcgggccgctgcggtggctcgccaagcccttccgggcgctggcctcggccctgggcgtcctgatcgtgctgccgttcatccccggtatcttcctggggtcgtttctggtcgaactgttccgctggcggcagcgccaggcggaacccggccaccctgccccagccacgccgatgcagaccgcgacgcggcgcacggcggacgtgatcgacctagcggcattccggcgacgaaacaacattaaatga

SEQ ID NO: 365075 - DNA, 2523 bp, Pseudomonas aeruginosa
atgatggattttgaagctctagcagcgcgattgtgggccgccgtggcggcggtgtttttcggcgtgttctgcctgtctctggcgacaacggcgcacgcccgcgttttccccgaatgcaacccggcggccgaagccggaaagctctacggcgcggcggatgctgacgcctgggtgaagcgcatttgtgacgcgcaggaatcgacctaccggacgtgggaagcgaacctgcaaaagctcgacattgggcagcaggatttggcaatggcgacgaatgccggagactggaacgcctaccgcgccaagtgggccgaattgctgcccatcttgaaggaaatggaagcggccgcgctggcaagccggaacgccgttggcgcggcgaacatccttagcctgtaccgctccgatctcggccttttcttgcagaacgcgggcctgggaacggcggcgaacctggacgagttcagcgcccggatttccggcggcctggacggccagcgcccggcggcggccgctaccgccggcgtcaatgtggtgcagcagtccgtgacgcggggcgttgagttcgtgaaggggctggcggctgcggaaggcgacaaggttctagcggagtatcgcggccaggtcgagcagagggccgagacccgccgggagcagctttcaggcaacacggcaagcggctatttcggcggctttgcccggcgcatcaccgaagtttggggcatcttcttcttcgtcctgttcgtgctgatgcttggcgcggtcgtggtggccgtaaagcgcaagcaaaacccgatcacgctggcgggcgcggcctcgctcgcttacctgctgccggggtcggctatggtgctggcgttcgtgctggttccgttcctgccttcctgggccatgatcgcggcaaccctggtcggcacctatgccatgtatgcgcaaggcggccgcatttgcggcgcgctggcgtccaggctcggcgacggctctaccctgggccgtcgtctgcgcgtcctgggggcctggctggacaatctgcgggccggtttgcggggtgaaccgggcggcgctgccagcatcggcgcggccgccgttcaggccgcttccgctcccggcgcgcagccggtcacgcatgggtcggccaggtggggcacggtcgcggaaatccgccaggccgggcacctggtcgcgcccggcaagcccgccggtttcgccctgggcagggtagccggtgcgcccgccggcctcgatcagcgtttccgctttaccggccacgtcgtgactgtcgccccgaccggctccggcaagggcattggcgcggtaatccctaacctcctggactatcccggctcggccctggtgctcgacgtgaagggcgaaaacgcggccgtgacggcccgcgcccgccgcgagctggggcataaggttttcgtggtcgatccgttcggagtgaccaagggcgaggcgcacgccttcaatctgctggatcgcctcgatacgagtgacccggaatgcgtcggtgaatcggccgtgctggctgactgcctggtcattccagacccgaaggggcaggcgcactttgacgagtcggcccggacgctgctgcaagggctgatgctgcacgttgccggactggatgaaggccggcgcaatctgccggaagtgcggcgcatcctgaccgccggcgaggaagtgctttttgagaccctggccgaaatggccgccgacgaaaaggccgctttcggccttccggcgcgggcggcaaacaccatcatggggatgcccgaccgtgaacgcggctcggtgatttcgacggcgcagaagagcacggcctttatggatgatccacggatcgcggcggccgtatcgcgctccgatttcaacctggcgaacatgaaggccgaactgatgacggtctacatggtgctgcccgccaacaagatcggccccaatgcccgctttgtccgggccttcatcggctccgtgatcgcggccatcacgtcgagcaccacgcaacccatgcaccgggtcgccttcctgctcgatgagttcggccagctcggctacatgaagcagatcgaggacgcggttagcctgatgcgcggctacggcctagccttctgggtgttcatccaggacttgagccagttgaagggcgtctatccgaagtggcaaaccttcctggcgaacagcgccaagtcgttctttggcaccgacgactacgacacggccaagtacatcagcgacagcctgggcaaagccacgattgagtttgagacggagaacagcggcaagaacagcggcaccggcatttccggcggcggcggctccctgaaccggggcaagtccagcggcacgagccagcagttcgccggccgcgagctgctgacgccggatgaggtcatgcgcctggggccggaaaagccgattgtcttggtgcgcggcgaacgtccgtacctgctggatcggctgaactacctcactgatgcagagtatgcgggcctgttcgacccgaacccctaccatagctga

SEQ ID NO: 365076 - DNA, 372 bp, Pseudomonas aeruginosa
atgagcacagaaccgacgaacgacgagctggcccaaggctacgccaagcagatcgagcaggcgcagcagcggcgcgaggcgaaagaccttgagcggctggaacgccacggccaggcggccgcgcagcagtcccaggccatcgaggccgagcagaagcaaggccagcagggccagggcttcgagctggacgccggccaaaaggccgagctgaacgagatcaacggccagcaggcaaagacgctggcaaaggaattgaaccgggacaacgagagcggcgaccaggtgaaagcagccagggcgcgggagatcgccgaacggttcaaggagaaggcggcgcgcgaccgcgagcaagcccgcagctttagccgctaa

SEQ ID NO: 365077 - DNA, 822 bp, Pseudomonas aeruginosa
atgagaaatccgggctacaaagcggttgctgcgacccatgaaagtgatgcccgtcgagcgcaggcgcgcaagcactgcaagccattaacgtggttcagccattatctgccgctctggctaaaacacggtatgagcccggagcagattgctcagcgcctgaagcaagagcagccggagcgcgcggtcagtcacgagtggatttatcggtttatcgccaccgacaaacacgcaggtggcgagttatacaagtatttgcggcaccgcaggaagctgtaccgaaaacgctacggaagccacgaccggcgcggacagttgcgtaatcgcgtatcgataaccgagcgccctgctgaggtcgaagcccgcgagcgtctaggtgattgggagggtgacacggtgcatggcgtaggcggcaatctggtcacgctggttgatcgtaaaagcggctacctgagcgcctatccggtcaagcgcaggacgcgccggcaggtaacgcgggcgatcaatctgttgctcaaggggcatgctgttcacacgctgacgctggataacgggaaggagtttgccgggcatgaacgcattgcgcatcggagccagtgccaagtcttttttgcagaaccctattcatcctggcagcgaggcactaatgaaaataccaacggcctgctccggcagtattttcccaagggcggcgacttcagcaagctgaccgtcgaggcggtcagtcgcgtggtaacgaagatcaatttacgcccgcgaaaacgcctgggctggaagacgccgtacgaagtttatgcaggggtgagcgttgcacttatgtgttga

SEQ ID NO: 365078 - DNA, 792 bp, Pseudomonas aeruginosa
atgactgacctttccccattgcagacgcgggtcgaagccgggatcgcctggctcgtcctgaatcgtccgcaacagcgcaatgcactggatatccccaccctggaggccctgcacgtccgactcgatgcctgcgagcgcgacccggcagtgcgcgctgtggtgctcggcggcagcggacgcagcttctgcgccggggccgatctcgccgaatgggcggcggctgaagcccgtggcgagctggaaagctatggctggaccgaggccgcccacgccctgatggggcgcctgcacgccctcgacaaacccacagtcgccgccgtcaacggcagcgccgtgggcgctggcatggacctggcgctgtgctgcgatttccgcatcgccgccgcctcggcgcgcttcaaggccggctacaccggcatggcctactgcccggacgccggcgccagttggcatctgccacggctgctcggcagcgaggcggccaagcgcctgctgttcctcgacgaagcctggagcgcggagcgagccctgggtgccggactggtcggcgaggtggtcgccgacgagcgcctggttgaggcggtcggcgccttcgctgcgcgtctcgccagcggtccgaccttcgccttcgcccagaccaagcgcctgctgcgcgacggcgccgggcgctcgctggccgagcagttgcgggccgagcaggccgccgggctgctctgcgggcgcagcgaggatgccgccgaggcgctgcgcgccgtggccgagaaacgttcccctcaattcagcgggcgctag

SEQ ID NO: 365079 - DNA, 582 bp, Pseudomonas aeruginosa
atgacgttgtcggcacggaagccccggccgaagaagtgcgcagtgtcgacgtgccgcgccgccttcgtcccggtgaagtcgtttcagacgtggtgcagccctgagtgcgggatcgtcatcgcccggcagaaacaggagaaggagcgtaagtcgctccagcaacgcgagcggcgcgagatcgcagttcggaaagagaaattgaagagccgtgcagaccatttgagggaggctcaggccgcattcaacgagttcatccgctggcgcgactgggaccgcccctgcatcagttgtgggcgctttcatgatgggcagtatcacgccggtcattaccgctctgtcggatcccatcccgagttgaggttcgacgagaacaacgtccacaagcaatgcgccccgtgcaacaaccacaagtcgggggacgtcgtgaactaccggatcaacctggtggcgaagatcggcgctgaggctgtagcgcgactggaggggccgcacgatgccaggaagtggacggttgaggagatcaaggcgatcaaggccctctaccgagccaaagccagggatgcgaagagggctgccgcatga

SEQ ID NO: 365080 - DNA, 2016 bp, Pseudomonas aeruginosa
atgagtcgcgacgacgtccagcgctggaaagacaagtacctggagaacatcgagcagcaggagcgcctgcaacggcgctgggatgcccgcatcgacctgctgcgtcgcggcctggtgcgtagcagtctggcggccgaaggcagcgacaaggcggtcgaccagtgcatgaaggagctgcgcgagatcctccgtcgcgacgacatggacgccggcctgtcgggcctgattccgcgcctggaaaaggccgtgctcgactccgaacaacgccgccagcaacgcacccagcagaacatcgatgccctcggcgaactggcccagcagttgctggccctgaacctgccgcgggaactgcgcaagccgctgaagcagttcgcccgcgatatcgaggagcgcgcccggcagtcgcgcgagattccgatcctgctcagcgagctgagcaggctgcaacgccaggcgctggccgagcgcaagggcggcgatgccgaagacggtcgcccgagcctgttgcaacgcctgttcggcggcaaggagtcggaaaccgccgcggagccgagcgcatcggtgccgtccgttgtggcggcaagcaatacaccgatccaaccggcggcggccgcgccgtccctgccggtcgccgagcacgacgaggcgccaggcggtccgccgcagccgttgcccgcccgcacggtcgccgccatcgaaagcgcgccagcgggttgggtcggggtcgccgagcgtggcgagccgaaccagatcctgctggatgagccccgggaaatctggctcgacagcctgccgctaccggccggcctgagttttagcgagacgctggaagaagcgggtgcggagccgtcgcccgcaatgccggcggacgttgaaagcgcgcccgaagctccggccacccctgtggataacctcgacgggcaggcggtagacgaggcctatgaactgccgccgccgataccggagcccggctacagcgcggtggcgccgcacatcgaggccagcctgctgcggctgctcgacggcctgtccctgccgagcagccaccagccccaggccgaggcgctgcgggagcggatcgatggcagcctgaactggtatgagctggtgccggtactcgacgacctggcggtgctggtgctgtccctggcggacagtggccagcgcgacttcgaggaatacctgcggcaactcaacgagcgcctggaaagcttcctcggccacctgggcgacgcccacgccggctataccgacgtgctggacaacgcgcgcggcttcgaccaatcgctgcgtgagcaggtcagcggcctgcaggccagcgtgcagcaggcgaccgacctgaacagcctcaagctggcggtggacagccggctgaacggcctgctcgcctccatggacgaacaccagcgcgaacaggccgagcacgaacaggaggtgtccggccgcctgcaggcgctgatggagcgggtcaacagcatggagcaggatgccaaggcgttccacagccacctggaggaccagcgacagaaagccctgaccgatccgctgaccgggctgcccaaccgcgcggcgctcagcgagcgcctggaacaggaagtggcgcgccggcaccgggacggcggcgatctgctgctggcggtgctggacatcgaccacttcaagcggatcaacgacgacttcggccacctggccggggacaaggtgctgaagatcattgccggcgaattgcgcaaacggttgcgccaggccgatttcatcgcccgtttcggcggcgaggagttcgtcgtcctgctcccggccacgtccctggaagccggccggcaactgctcgaacggctgcgcgcggcgatcgccgcctgtccgttccatttcaagggcgagcccctgagcatcacctgttccgccggcatcaccgcgttcgaaggcaacgaggccggcgaagtggttttcgagcgcgccgaccaggcgctgtatcgagccaagcgcgccggccgggaccgcctggaagtggcctga

SEQ ID NO: 365081 - DNA, 1332 bp, Pseudomonas aeruginosa
atgcgactttcccgcgccttggcactgactcacgaagcggcttctgccacccactcccttgacgagctgggggcgctgcttgatccagacctagttagcaccgcactggaaacggcgggagtggcgaccctgcgtaagcgacgtctccctcttgaagccatgatctggtgcgtgatcgccatggcgttgtttcgccggatgtcggcctgggatgccgcgagccgtatgggcatcatgctgcctgggcagaagccattggtagcacccagtgcaatcgtgcaaggtcgccagcgtttgggcagcgctgcggtgcgagaagtcttttccctgactcaacaacgctggcatgccagcgccaatcaccccacttgggccggtttgcgcctgctcagtgtcgatggcgtggtctggcgcacgccggatacggacgacaaccgcaagcactatggcagcgccagtaatcagcatggcgataccggctatccccaggttcgcatggtctgccagatggagctgaccagccacatgctggtgaatagtgcttttgccggctaccacagcaacgagatgaaactggccgaacaactgatcgacagtacacccgatcactcgctgaccttgttcgaccgtggcttctattcactggggttactttatcgctggcaacagacaggcactcagcgccattggttactgccgctgcgcaaggatgctcaatacgaggtgctgcgtaagttagggcgccacgatgccatcgtctcgctaaagacctcgccgcaggcgcgtaaacaatggcccgacctgccagacacgctacaggctcggttattaagcaagaccatcaagggcaaagtgcggcaggtactgacctcaatgatcgatcctctgcgcttccctccagacgaaatcgtggatctgtacagccagcgttgggaaatcgagctgggctatcgagaaatgaagcaaggcatgctcgcggggcactacacactgcgtagtaaaacgccggagatgattgaacaagaactgtggggcgtactactggggtacaacctgctgcgttatcaaatgttggaaatgagtcgccactgccctggcatctacccctgcgaaatgagttttaccgcttgcacctgggcgattctgggcttcttgaacggggtctctttgaatcatccaggcaacatccctcgctacctggccgaactacaggcctcggccatgcactacgtcctacctcatcgccgtgaggatcgcagttatccgcgagcggtcaaacccaagccgtccaagtatccgaccagaaataaaaatgccagtcagcttaactga

SEQ ID NO: 365082 - DNA, 393 bp, Pseudomonas aeruginosa
ttgcgcgagatccgggaccagctatgggccgaagcactgttctgctatcgggccggcgatccgtggtgggtttcgcgggaggagcgagcgctgttcgaggaggagcaggacaagcgctacacggttgacgcctgggagcacaagctgatcggctggcttgagggatacgtcggcgagaccgtgaccagtgcggctatcttgggcgaagcgctcaatctggattacgggcactggggcaagccggagcagatgcgagttggccacatcatgcaccggctgggctggcggcgcagacgtctacccgcatccggtaagtcgccggtgcgaccgtggggctacgagcggccgccgtcgtggaagggacagccgacgcagagggaggccgcattttga

SEQ ID NO: 365083 - DNA, 882 bp, Pseudomonas aeruginosa
atgaaggagggcgatgtacaacctatattggattttgtaaagcgcagttctgaaaaggaccagagtataatatctgagttctgcgagaagaggtttcctcttggcgcgatgagtcgaatatggaagaaaaatactattaaggtatctgatcttgttcgaagtcagaatggagagatttttacctgcactggtacattggaagagcgtcaggcagcgtacaaagtaattgatgagaattctcataatggcattgttttagacacttatacagcatgggtggcatcaggttccaagattctcgagattttaaaaaagtgctttggtaaagtaattgttggtcgagcaacaatagtagagttaatgcacgttcgtgatgttgcagttaatgatggtcgcatatccgctgctgagtactgtgcatctattgtcaacctggcatttcatcgtcatagccatatttcgctggttccgcataccctctataaaatatacgagaacgacggtacttcagatttaattgagttttctgctgctgcgaaatatatagggattgagaatgcggaggtatcgagccacattagcgtaagcaagcagttcttaaaaatgctttggtccgatgatgtcattcctaatagtaactcggtagtggagttttacttaaatcggtctgcaagtagagagaacccgagcgtcaaggcgatgaaggctaccagtatcctgttggcaaatgtcatccgtatgccggaaccgctcgggctccttggttatttgagcaaaacccctgcgttaagaatcagtgattatatttaccggtggattgagggacatttcctgctgagcagggaggaccgggagtctgcggaagcgagagcacgctcttag

SEQ ID NO: 365084 - DNA, 690 bp, Pseudomonas aeruginosa
atgccgccatctccacctgcggccgaaaggctagcccttcgacgattcgctaggtgctgcacctcctcagaactgcacggtaggaaaagcatgccgtttgtaccgaaaatcacgggaagtagtctcgtagttctcctttcctttgtgccagctttggctttcgctgacttctgtgaccttatctcggggggcgcggctcccagctgccgaagcaacgcggcaagcatgggagcgacagtagttgggaactggttgcgtttaaagccagagatggctagccagccaaataccggaaagaaagggaaatttgcgtccgcttctacagtttcgtatgagctaattggcgttaaaagtcctgataggttcaagctcactattgactgctttgctggcgaacgaagcatgcgactccaagctataccatatatgctcggattaaccaatgggcgtaacactgcgttcaagctaacattcaaaatcgacgaaaaaactccctttgcagaaagctgggttttgaattggcagcgttcggagttggaagcgccgagtgggagcagacttgcagcagggctttcaggggcgcacgacttggttattctgacagagggaattgttggtaataattcccgagtgggatacacctacaaagtggatggctttgatgctgcgaatagcgcagtttgtaagtga

SEQ ID NO: 365085 - DNA, 876 bp, Pseudomonas aeruginosa
atgagtgcaaagctcttcaatttttcaaaaaccaccacagttaccgtgctaatttcagctggtctgttgatgtctggatgttcagacaaagacaagccagagaatccaaagcccacggctgccgcagagatcaagcctgaagtgaaagccgtaactccggctaccccatctctggccgagcgtggcgttaccctagttgatccacctgcgtccccggccaaagatattgacttctacagagtatccactggtctagatgttctttatctttttggcgcaaatgctccaggtggagtggacttgaagtccgctattggccatatctatacgaattacggtgacttgagtgacaagaaactggacgctctggttaaaaagtacaatgatggcgatcagtttgtaaaaaatgacacagccaaagaaatcgggccagtccttcaggaaaatgcagcgaagctctctggcaaaaaatatgtagtaactgacgtgcaggggccgctaagccttggcgcatacgatttcgagcgtcaggggtatattgtcacgaatgcgctgaaagataaggccggtgaagacggtacggttccgtacactcgcccggccctacgatacagcgatgtgataggatacaagctatccttcatcaacgcctctgagcttagctttattgaaatgccagaggattcagccaggaagctgaatgagtatatgaaacaagggaatttaaatttccgcctgtacggttatctacagtccgttgcggaagacaagtctgaagatcaacggtacgttgtcatgaaaatccagaaggttgaactgactagctcaaccgatagtggcgacactcctgaagttttctattcatactccatctag

SEQ ID NO: 365086 - DNA, 264 bp, Pseudomonas aeruginosa
atgcagcagcgcacagcactagaacaagatgtgatcgattttgccaaatcaattgaagagatttttgaaaaacagctagagcttcaaagaaatttgagagaattgatgttcgcggtaatcgaacgtctatcccaagatgtaaatcaggacctccctcctctcactgaatttggcgtaaacatcgcccatcagcgcgaagcagtgatagacagatttgggaataaccgtcttacaaacaaaatgcgctccgacctctcaagataa

SEQ ID NO: 365087 - DNA, 1458 bp, Pseudomonas aeruginosa
atggcgatgcacgggttcagtagccactcgggaagcgctggtggaggtggcggggctcccgttagctacatgcttgacgatgactactacgaccgccaagcagagtgctggaggccacgaaatcccgctcctgatgtgatcgagggcgatcctcagctcatgattgaaatgatcgatgcgctcagcacgaagcatcgctatacgagcggcgttttgtcattcacgcacagtgacacagaaaagctgaaagcgtttggcctcgacgaagcagtgcatgacatcaccggcaggttgaaagagatgctgtttgctggaatcagcccggaatactggcagatcctaatagtcgcgcacacacatcttgatcgtctggaacttcactacgtcacaccgagacataactatgaagtagatcgggcatggaatcccgccccacccggagaggcaaaatttcggcatatggacgctttggttgatgccatcaatgtcaagtacggcctcgacgatccccgcgatcctctacgagttagagtgacgaaagacccggtctgggcgcccgctgagagcaaacctctacgtgaccaactcaatcaattcttcacagggctgattgctgagaatttggtcagtaatcgcgatgagttgattaacttcgcaaagggtgcaggactaaaaataacacggagcggcagtgactatatcagtgtgaaagcaccaggtcatgagcgagctgttcgattgaaaggtgcaatttacaatgagcaattcacttctacaactgagcttacaaatacaaaaacaaaaagtgcagaacgagcagcttatctctcaaaaccggcagttgctcaacgatataaacaagcaattagagagcgtaagcgatttgtcgaagaacgcttcgaaaaagctctccgcattgcgcgtgctggagaagactattcgaagacacagaaattccacggcgcaaaacgcggcacactcttcgacattagtaaaggtcgccctggcaatttcagttacaagcaccttgatccacataatattaataataggataaaaagaaatgacagccctagaagagcagctaatgaagttattgcaagatcagaacgactcagtcaagagactgagcaaatctttagtcgagcaggtcgagtcattacggctggagttacggtcgctaaatcagcgattgaacgaattagagagccaatagccacaccaccctatggcgttaccccgacagcaccttccgcgatggcgagtgccggcgccagcgaggtttcaggtggatttgcagcagcggacactggagatccggatagcgacagaataataaacagcaagcgatcggaggctattgcagctgcacaccaagaatcggctaggaataaagagtcagcgcgccgcaaccaagaatcgttgaagatcctgacgtccttactccctacaccttaa

SEQ ID NO: 365088 - DNA, 669 bp, Pseudomonas aeruginosa
atgctcttaacttctccaggtcttgccgttaaagtcatcgacaatcagtatgcttgtacgatctctgttgcagaggagttaattctgattgcgggaaatattctgtgggtcaggcactacgccgaaaaggtactcagtaggttctgtgtcggtactgcgccagatagtcaggcgagagtgttgagaggaaagatatccgagtatctcgcacgggtacgtgctttagaccggatgttctcaaggcaagttaaggcaatgcagcgcttagcggatgcaagctccagcgtaaggctattgcatcatcccgatgtcaattttgatgctgccctacctcttactctggctgagcggcggaagcaggcatttaccagtaaggcggaagtctacgcattcgtcgccggcatgtgcggcattggtctccatacgacgggagacgttcacattattgatctgcgattagctagaaagccgattcaggactggtggcagcagttattggcatctcaggcgctttgcgcacagcttcgagagtttcttgcgagccggtctgtgaaaggcaaaaggacaagtctggaaagcgatgtagaaaggttgagcctgacgctcaccgaggtggcttggtgctaccgggcaaaactgctcaggcggttgggtgaagacgtgttgtaa

SEQ ID NO: 365089 - DNA, 1794 bp, Pseudomonas aeruginosa
atgctttctcttggagaagtccctccttctaagcctgccagcgtccccagagatttaagtcgttgcacgcccgaggagctatcaggaatcgctaaagatctcgagacataccacaccaaaattctagagcgtctctatttactggagaaaattggctatctcagccctaacgaattgggcgaccataaaacccggttcatagaaagtctctccatctgcgacgtaaaaaataatcggatagcgctcactttcggattgcccaacgagcaatccattgcgcgggcctgtgactatcgctcactgaaaaagcagcttatcaagattgccaacgaccaacgtataaatcgtgaggcacaggcagcactagtcggcggcctaagcaaccagaactattgctcggaccaaacactgagattccgaaaaaggcaggaagagctgtcgcagcaagctttggaacaggtctacgtaagacgtcacgattcagctcagataattacactagccgagattgcgaaagaccaggagaggagaaaattcaatcatctctttcatatcgcaaagaatcttcaggtgatggcagatgaggccgagttgaccggctatttcgtgacattcaccgctcccggaaattaccaccctaatccggcaaaaggtaagcgaagctacgatcaaagcgagctacgtaacgcacatacctacctacaagaacgctggaagctgctcagagcccgtttggccaaagcacgcataccgctgtccatcagcaccctatttggaatgcgctttgtcgaagtgcacaaagatggctgcgctcactggcatctgctcatctttaccaccccagaccgattcgacgctttccaatgcattgcggatggcctcttccctgctcaccggcagtgggaccacatagccattgaccgggacaaaggggaagcgacgagctatctctttaagtaccttgccaaggcagtagacagctcaaaattcgacgatgcccggctaacagcaaacgcactggatgacatacgcagtgagcaggatcaagccagcctcgccagcgcagaacgcgtcaccgccgcgctaagagcgcaacggattagacaatatcagtgcttcggcgtcggcaacgcgatgaccaaatatcgcctaatcaacaaaatagaagaaagcgtcaatagctttgacagtgcgtgtgtccgatcaacactcaccgcctgccgaatgtacaacgacggcaaaaaagacaaagccactagaaacctcaccggctttaagatgctcctcaccgagttttcaaacgcgattgaagtagtaaaagagccaagcgtgaatcgcttcggcgaaagcacatcgcgcactatcggacttcgcttcagctgtggatatgtctatctccttccacagtacgaaataagccgcacactagaaaatctaatttttgagtcctcatccgattcgaatttcaccgataacgacgaactagatagactagagcgagagtctttcttggagcaaattctgcccgccaatgatgatgaatttcatgataacctctttaaagagcagagagacatagttacagttatttatagtgatccaaggagagcacaccgccctgatcaggcgaattatccacgaccttcagcgtcggatcttctaaaaattgtcaaccagataaacccgaagtattcttatgtcaaatacattgacaaaaacaacatacaaagggcacttcctccgctaaagacagaggaaataatcgagctattgtcaaattggcaaacaaagtaa

SEQ ID NO: 365090 - DNA, 150 bp, Pseudomonas aeruginosa
atgcggctcgtcgcccacgccctcgactggaagcactacgccgattatgcgcaacaggcgccataccgtttcggggtcatcctcccagcccagcaggacggtctgacccagatagcgcagcgcgctctaagcatccaggatgatcggtga

SEQ ID NO: 365091 - DNA, 912 bp, Pseudomonas aeruginosa
atgcatatcgatctccgccagctccgccacttcatcgcccttcacgagcaccgcagcttcgtcgccgcggcgctggcggttaacctttcgcaatcggccttcagccgcagcatccaggcgctcgaacacagcgctggctgccgcctggtggaccgcgcggccaaggacctgcgtccgaccaagcagggcctgatcgtcctcgaacatgcgcgccggctggtcagcggcgcgcacaacctggccaacgagatcgccctgttcaacggcctggaggccggcgaactgcgcttcggcgccgggccggctcccgccacctggctggtgccgcgtgcggtggggcgcttcaacgtgcgttatccgaaggcgcgggtgagtttccaggtcgaacactggcaggcgctgaaccgccgcctgcaggccgaggagttcgagttcttcgtcgccgacacccggcatttcgaggccgacccgcaataccggacctcgcgcctgcgtccccggcgctggcatttctgctgccgcgaggggcatccactggccgctcgcgagagcgtttccgccgaggagctgctgagcttcccgctggcgaccaacatcagcccgccgaacatccgcaaggtgctggtggacctcagcgggcgtcccgacttccgcccggccatcgagtgcgagaacggccatagcctgctcggcgtggttctcgcctcggatgccatcggcatcagcagcggcctcggcgacctggcgccgccgggacagggaggcctgcgtccgctgcgggtgcgcgagctgcccgacgacctcgacgaactgcatacccgctacggcatcgtcagccgcgccggctacagcctgtcgccgctggcggaggcgatgatcgacgaactgaagcgggtcgacgacgccacctga

SEQ ID NO: 365092 - DNA, 267 bp, Pseudomonas aeruginosa
atggttagccttcatgagggtgtcaaaaaactttacggcaccctctcgaattggatagtcgttggtataagcaagagccagaagtcgagtctcttcacaatttcttgttggttccgcaacatttttaagaagctccacaatgcggcgccaatcgtgaagacactgggcgaccctacaataagcaagaatctcagagtgactgctcttttcggtaacatcagaaagcccataatcataggcaatttgaataattggctttatctctga

SEQ ID NO: 365093 - DNA, 864 bp, Pseudomonas aeruginosa; identical to SEQ ID NO: 364776

SEQ ID NO: 365094 - DNA, 1188 bp, Pseudomonas aeruginosa
atgtttgttctccgcaccggtttgcagggtaatagtaagactctcaatacaattaaagaggtcgacaataaagccgcgaaagaggggaggacggtctactatcacaatattcgtgagttcaaggcggatcatccggcgatcaaggcggaatgggtcgagttcgacaatccgcaagagtggttcaagcttccgcccaacgccattatcgtgatcgatgaagcgcagtcgttctttcgtgtgcgcccgcagggttccaaggttcctgagtatgccagcgccctggagacgatgcggcattctgggcatgaggtgcatgcgattacgcaaagcccgatgttgatcgatgcgcatatgcgcgaactctgtaactgccatatccattatcaccggggtaacggtggaaatatcgttaagcggtgggagtttcagaaagttcagacggacgtgaataagaagtatgacttcgcggatggtgaatcgacccggatcaccatcgataagacgtacttcggctgttataagtccgttgcggatggggctgagcatcacttcaagttcaagccgcctcgggcgttgttcgtgcttgtcggtgcagccctggttatcggttatcttggctatggcgtctatgagcgtcgtatggcgacgcatgagcctgcccaatccgttcctgcggtttcttcgtcgagcgttgcgcctgcggcctctgcgggcgttcctgatgtcgatcaggtgcgtcacgtgactgccggtgagtatctggcgatgcgcaagcctcgggtgcctgatgtgcccagctcggcgccgatctatgacgaactgacgcggccggtggcgtatccgaagccgttctgtctgtcgtcacgtgatgagttcctggtgcagaagaatcgcaagcgcatggtgaccgggtatcgtgatggccggttgtatggatgccgttgcaacagccagcaaggcacgcgcctggatatctcgttcgaggcctgtatggcgtacgtcgagcacggtgcgttcgatccggcaattcctgaccgcgtacctgcggctgtcggcgtggccgggccgggcgaggcacgagccggtacggcggcgccgatggctgcgaactcgtcgacggttgcgccggagagtgctggcacccgcgtgactgtggtgaattctggcaagcctgggctgctgtggtga

SEQ ID NO: 365095 - DNA, 585 bp, Pseudomonas aeruginosa
atggtcatcgtggtgctggcctactgcgtctgggaagcccgcaaggacctctgggtccatattccacctgacctgcgctcagggagtacccggttgtggtgggacattccgccggaaagcgtctatgcgtttggcctctacatcttccagcaggtacagcgttggcccaaggacggcgaggtggactacaagggcaacctgttccgctacgccgcctacctgacgccttcctgcaaagtcttcctggagaaggacttcgagtttcgtcgtaacgccggcgaactcagggggcgcgagcgcaccacctcggaaatccccggccggggcattggcgagagcgatggacgagtcatccagcactcgatcaatgactggaccgtcaacctggacatggacagcacggagtattacgccggcgagaagatcaagcgggcgctggcccgctacccgttgcacgtcatccgcgccgacgtcgacccggagaccaatcccttcggcctgcagtgggactgctactccgatacgcctcaacgtatcgaactcgaggagccggtcgcccccatcaagcgggagggaggtctatga

SEQ ID NO: 365096 - DNA, 444 bp, Pseudomonas aeruginosa
atgcaacagcagacctggactaacctccttcttcgtctttgcgccggcctggcctgcacgctggttctggcagcgtgctccaccagcaaggaggagatgctgccccacggcgaggccaacatgctcgacgtctgggagcgaggtgcgaccagctcgataggcaacagccgtggccggctgctcctcgatgccaggcaaacgctgcggcgcccaatcgatccgcagcaggctgcctccgcgaatgaccaggccgactacacccgcacggccagcaacgagatccacagccagttcaaacgattgcccaatcccgacctggtcttgtatgtgttcccgcacctggccggcagcgatcccgccccggtcccgggctacaccaccgtgttccccttctaccagcgagtccagtacgccatgccgggcgagcgcacggaggactactga

SEQ ID NO: 365097 - DNA, 123 bp, Pseudomonas aeruginosa
atgtatgtgttcccgcacctggccggcagcgatcccgccccggtaccgggctataccaccgtgttccccttctaccaacgagtccagtacgccatgccgggcgagcgtacggaggactactaa

SEQ ID NO: 365098 - DNA, 198 bp, Pseudomonas aeruginosa
atgaacgtaagtagcattttgcacaagatccgctatcattttgtgatagttgatgaactgtcgactctgttcctcagaggctttaatattcaaatagcgcgtcactccacttattatggggatgaacgcaagcactacagttataagtgccaagatatcctgaagtctaatatttgtatccataaacactccttgtga

SEQ ID NO: 365099 - DNA, 1074 bp, Pseudomonas aeruginosa
atgtccgattacaaagacctgaacctgaatcgcgaggcactggatgcgaacatccaaagcttcttgcagtctaatggctatacgcttgatggctcgattcagattcagggcaatcggaaacgggttgtcttcggtgctgccggtgctgaatttgccacagtagatcttcatctcaacagcacaggaaccaccaccgttcaatggaagatggggaagaatcagcccgtaggtgagcagcttgctatttacctgaaagcaacaatcaatcccgctgaattcgagaacgtaaactactctctcagaggaataactgcggattcatttgaccctattctcgattgcctacaagaatccgaagaccttgaaattaacactctgagggatgagccagcctgtaaacaagtgacactgaaaagtattgcacaccaagacagcttaactctaacccatcaccgcacgacaagagtcttgcaaatacaaggaaaacctctttcttgttatcggcgcgttatattcatgctcaccgacttgctggacctgaaaggccttgagcaagtcttatatcgcaaggacgatagcagcgcagaaatagtaagaaaagaaatggctgaagactaccttaaaggtttcttccctcagagttacatccatttgcctgatgcggtaaaaaaacttctgatttctagctgctgcgtaaaacttgcagcacctaagcttcccgactattgcctactcctttatccagatttgcgctcactggaaggagttcttaaagagctgatgagcggatacaacatgtctgtcgaggatgcagccaatggcttcggagacttctttgacgtcaataatggcatctgcacactaaagccggattgcgcagctaaggttgggcacgcaaaaatgcaggacgctttcaataagggctatagttactacagaaagcatcggcacaccctattccacatggaagagtttgcagatggaagcagaatgattgacacactggataaggctatcagcctatcaaaagatgcttatatagcaatcgacaatctatacacagcaagaatgtaa

SEQ ID NO: 365100 - DNA, 180 bp, Pseudomonas aeruginosa
atgaagaacgacaacctcgaccacgagaaccgcccggtcaagcacggcatcactcccgacgagttgcgccagattcagcagcgccgaatcgaggcgcatgcagcccgcgagactagcgacgcgctgaacctgctgcgcgcggtcaagttgggcgcggcgttgcgcgaggcccaggactaa

SEQ ID NO: 365101 - DNA, 696 bp, Pseudomonas aeruginosa
atgaatgtcgtcgagcaggcgctatcaaactggaagaactcgttgcctcaagaggtgcccttggctgggctgatctccatcagttcaatcgcttataagtggaaggcactgtaccgcgcccgtattcttagggaagtcgttttctggcgactgcatgacctgcttgagcagtcgttcttgcttcaccagcaaggtcacgcattgggcgctcgcatcttattgcgcagtgggtttgagacattggccacgttgatctatctgaatcaactaaaagccaatgtcgtggatggcacgctgaacttccacacgttcagcgataagacttcgctgctgctcttgggctcccgaaacgacacgacgaagcacaaatccatcaacatcgtcacagttctggagaaatgcgacaagaggtatccgggcctgatggcgttatatgcagacctctgtgaggctgctcatccaagctacgaaggcacatgcttcggctactcatcaattgattttgataaccacattaccgtcttcaggaataagtgggtcgagatgtacgcagataagcatctttcagcgatgcagctttgcatggaaaccttcgagcatgaatacaacgaggtttctgttagcgagactcggcgcttggaaaagtggattgaagatcacgacgcggagcttgaagctaccaagtcagcggaatga

SEQ ID NO: 365102 - DNA, 258 bp, Pseudomonas aeruginosa
atgcccagaaattcactacgcatccaagatgcaaaactactcacctttggccaagtggcggaagtgctgaatttcgtgatcgagcatctcgaaaaggtatgcgctccagataacgacatcgactcgtgccttgcggtatctgatgttgcaaatatggttactgagcgtcttgtaatcgagttgagagaaacgctggagatggcggccgtgtcgttaatgccgctcccgccgtgggcacagcaagaagcaaaaagatga

SEQ ID NO: 365103 - DNA, 732 bp, Pseudomonas aeruginosa
atgactctgtcttttagtattccggtacttgatgctgaatgggggtgttcatatcaagaggtagcggactctatgggagtccctgatatcaggatttgctttgtaaaagttgatgatattaagacgtttgctgaaagcttgactggagacgttttggacacttcttggatggcaaatttagataaaggtgttcgacggcaatacgattacaccgtgaaagaaactgctgcggctttagtggggatattcaaagatgctatgggagggggtaaggttggtgctgagttcggagaggtaatggtttcaattggatctgcaagggcactggagcaagtatttagtcactcaaaagtacccattgctgagttgtggaagccccaggttaagcaaaatgaaggctttgactttcatacggtatgtaccggggactttataaattttggagaggctaagttctctgcaagcataaatcctcatggattggccatatctcaggcggcggactttatctccgtagagaaacatctgcgtgatcgggggcatcttgtaaatttagtgggggcctcatctatagagaacttggataatgataagtttggtgttgttgcagcattttctataaattcagataatcctctgaagatatttagaaatgcacttgagtctgctcttgattttttgaaagggaataaggttagtgggttctatcttgttggggtgggaagtaaatga

SEQ ID NO: 365104 - DNA, 1425 bp, Pseudomonas aeruginosa
atgttcacagtcatcgacatcaaaaacttcaaagctttttctgattggcagtctttaacgctagcccctataacgttaatttatgggcctaattcttcagggaaaagctctattatacattcaatcatgcttcttaagcagtcgttgacccggccaagttcgcagggagggttggtttcaaacggcgagtatgtggatctcggcgactactcgtccatggtgaacggacatgacatatcaaaagaaataagctttcgactttcgtacacgccttacaagaacagaaacagtcaagatggacgttcaaatgcattcggaaacagctacctacgaagctatgagctattctatgcatactccggcacagacaacaacagcacatacgaaggcttttcttacttaaaaagaatagatataacgctaaccaataaaaaaaatgccccagtcctttttacagcattcaactcctatttacgcgaaggaaacaaagacccactaccaaaaagattatctctcgcaaaaaagttctctctgctcacagaggagactttcgcagactacatagatcgacgtacgagagagtgggacaagcaaccaatcagcgacataagaaaagtattgcaaaggacggaattccagaccgacctaaatttcgcgacaccttgcatggcagccactgatctcaagcctaattcagggcttcccattacaactggaataatagtcaactacacaatgggggagacagcaagcgacttgaaagagaagctcgccagcgtaacttatctcggccctcttagaagccaccctagccgcttctatgcacccaaaggagaccagaatgaatccgttgggaaattaggggaaaacgttgcccgcttcatatatgagcaatcaccagaaatcacaaaaaagatcaatcactggtttgagctatttgaaatcccatacgaattatccgcaagaagtataggtgacaacgtaaccggaactgtaatctgccttcaactgagggatattcgttccaatgttgtagttggaccagcagacgtgggctttggtataggacagatgctacccattatcgtggagggtatcgtccgtgaagatagtgtcatttgtgttgagcagccagaaattcaccttcaccctcgcctccaagcacacttggctgactttataattgaaacatccaaaaacaaccaatggataattgaaactcatagcgaatcgttgctacttcgacttcaaaccagaatctatcaaggccttagcaaagacaaggtcagtataaattacgtcgagccagcaagtaatggtggagaaattataagtatacctctagacgatgaaggcgatttttgccgagagttccctgatggattcttcgaggaacgcataagagaaaaaaggaccaggagataa

SEQ ID NO: 365105 - DNA, 984 bp, Pseudomonas aeruginosa
atgattaccgaatttgctttcgacaagaatttctttgactctaaaagcctaaacactgctggacaaagtgctgctcatgactccatccttcaaatgtggcgagaccatggggtgctagtctcaaaccccaataaatttaacgactttttggaattaatcagaaaactccccataaaataccaacaacgttggaaggaagctcttgagtactatcgcacatccatggtcgactctgactggggtgatttttgcgagtatgaaaacttcgccaaactgaagagcttatcatccatatttaaaactgctttggcagatgacgaaataagtcaaatcttagctgacaatgaagattcagctatgcattgcggcatcactggattcgaattactgggtgcaggagctgccagcgagtcaatcaacttccaatcttgccgcacagcaggacgtactgaaatcccctttggaactacagctcaagctatctggtcagaaaaaatattcccactggctaagtactcaaaaaacataactataattgaccgatacttatacactcgcgttcttgatggcctcgcaagaggatcgacagcgtcaggtgctcttggcttcttacgaatgctctctgacgtcgataaaaaattcaatgtcactatgatttccggcggtgaagaacggaacagtaccgcctaccacgaaataaccaactacttcaatgtaaacgtagcaagccgcccacccattgcaaaaaatcttaacagcctgacactaatatctaatcatgataattttttcagggactatgctcatgagcgattcattcgtttcgactctcatgtctgtgagataggcgtaggaatgcagatttttgagaaccatccctcaccaatgaccagcttttctttaaaacacagttctgaaacatttttccatgagcgggagaagttaagctcaaaaaatatattatggcgtgaattcataatttga

SEQ ID NO: 365106 - DNA, 1215 bp, Pseudomonas aeruginosa
atgagcgccggcaacccgatgctgcacgaagcgctgcgcgcagtagcggggcaggccgagacactgacgactgcgggcccgctgtcgattgccttttatcactgggtgctcgccgaggggttgtccacccagcagagcgccgcgatggcgcgggacctgtgcgaagagatttccggcggtggtcggtcgattcatgccgtggcggctttggggttcctgctgagcatcgatccgacgttgagtgatgcatgccgcgactcattcgcgcagggcgtggactggctgatggggcgtagaggcgattcccaaacggctctcgtcagtctgatgcagccgttagcgcataccggcgttctggtgggtttgttggccacatccgatgatgtgcggtggtcgaaattcggcgcatggttcgcgtcgctctatgcaaagctgcagccgctgttgccggcggaagtcggctggcgccatgaactgctgtccatgatcaagacgcggtccgaggtgggattgaagggcgagctggcggtggtgcccgccaccgcgggcgcagctatttacgtcgcacgtcgcttggcggatgcttcgccggcggtcgataacgactttgcgtcgcagttgcttagccgcatcaagtcggttgtttatgacgaccctgaacaggcggccttggatctggcagcgtttcactatctcgcccagggcgcggcgcagatcgatctgcgcgcaccgagcctagacgatgtcggactgctgcttcgccggctcccatccgggttgcgtcggtggacctgggacgaacagaagaagacgccgaactcgaccgcgcaaaagtgggcggttgaaaacgaatatcactttcagaatcttctgtgcgcggtgctttcgccagtgttgcccgatctgcgtgatgaagagtggcttgcgtcggtggggcaaaagaaaccgcgggcagacttagtagtcccgtcgctgcacctggtgatcgaggtcaagtattggcgaaaaagcagcacgccgcaggacctgatttcgcagattggtgaagacgtcagcctttacctgaagcggggcagcccctatcgcaaagtgcttccgatcatctgggaccaaggacgacgcacagagcaatacgacctgcttattgcgggacttagtgagattcgcgacgtggtcagcccggtcgttatcgctcaaccggcgtttatggtttga

SEQ ID NO: 365107 - DNA, 2256 bp, Pseudomonas aeruginosa
atgggacgacagctgcagctcaatttcacgccgctgcgagtgcgcggtgatgccattcggctgcaggcgttgccctttgaggacgcgcagcagttccggaatctgcgcgacgagcaccgcgcgcactacgccgtgacccgtcgatcagatcacatcgtggcgctgccgcttactttgaatgcgtcgcccatcggcgaagaaaagattgtttcggtggttgagcatgcttcgctcatccggccgctgcttgagcagcgtctcgtgaccttgctcagttccaatcggcgaccggtggcgcgctataacccgattaccaccatagggcgcaccttgccgacgggcttcatcgaagccgaccggcatcttcatctgcaatcgcgggtcttgatcgcgatccgctcgttaaagctaccggacgcagaaccactcggtctcttgtgggacatcgagattcagaagacttgcgcaaccagccttgccgtgttgcatgcgcaaggcgttcggctggatgggttgacggtcgagcgcctggtgccggtcgaagatgtgcgcatgctgccctatcgccggctggtgggtcgagtcggcgcgctcacggacggccacgcgcgcctgtccgagcggtttcagaatgtagaggagttgcttccactcgacgagctgtacctggaggcctcacctgagaatcttcggcacctgctgcagcacttcatgcggaatacgtcgggcagggtgcagggcaagatcgatgagatcgtgttcgagaacagcagagggcgtgcgcgcatggagcacattgcccggatttcggactggctccgcggcctcggcgagatcgagctgcaagaaggtctcagcgttggcatcggcaacctgctgagcgagaaagatgcgcagaacttcccccgtttcaccgagggcacgacgccgacctatgttttcgacgccgggacgctcaagtcggagtcgcgggctgcggtcggtctaagcaagttcggtccctacagtcgccacgtcttcacgcccacgcggcctaatgtctgcgtgatctgcgaccgcgcgcggcgtggtcaatttgaactgttccttcggaagtttcgggatggcctaacggtcgacggcaagtcactgccatttgggcgagggtttctcggcatctacggactgcaggacatcaacctgacgtttgtggaggccgacgccttcacggccgacgcctatcatgcggctgcttccaaggcggtccggatgggcgccgagggcgcgccctggcatctggccttggtgcagaccgagcgagactcacgccaattggcgccgccgaagaatccgtatctggtggccaaggcggcgtttctctccaatcagatccccacgcagttcgtcgcgttcgagacgttctcgatggcgccgctcaatctcgcctacacccttagcaatctcgcccttgcggtctatgccaagctcggcggcattccctggttgatcaagtcggataagggtatcgcgcacgaggtggtcatcggcctaggcagcgcagcgattggcgaatcccgcttttcaaggaaagaacgcattgtcggcattaccagcgtctttcgcggtgacggcggctatctgctatcgaatctgtcgaacgctgttcccatgtcgaagtacggagaggccctgaccgaatcattgcaggccacccttcagcgcgtgcgcaacgagatgaactggatcaggggcgattcggtacgcgtgatcgttcatgcgttcaagccaatgcgcaataccgaggtggaatcggtcaaggcggcgttgaaggagttctctgaattcgatctgcagttcgccttcctgcacgtcaaacaggaccatccgtatctgctgtttgacgatgattccatcgggaccaagggcaggggagagaagacgccggttcgaggtctttttgcggaagtcggacacaatgagaccttgttgacgttgacggggccgcagcagctcaagcgcccgacggatggcctacccaaaccgctactgctaagcctgcatcgcgattcgacgttcacggacatcatctatctcaccaaacaggtctattggttttcgaaccattcctggcgcagcttcctgccggcggcgatgccggtcaccatctactactccgaccttgtcgcgggtctcttagggcggcttgaccgtttgggtagccggtggagtccgagtgtgatgctcggcaagatcggcacaacgcggtggtttctatga

SEQ ID NO: 365108 - DNA, 825 bp, Pseudomonas aeruginosa
atggacctgcgggcgctattccaaagctacaagccagccttggtgcgcatcacggtgcagacgccggtgggcgatttgagtaccggcaccgccttccatatcggtgacggttggctggtcacggcggcccatgtgctgcgcgatggtgtcgtgcaggaagtggtgtccgagcatgcgtcggtgccattgaccgtgcagtcggtgatcttcaacaaggacgatcgcatcgacctggccctgatgaagaccgatctggatctgtcgcactacctggacatgacgacgattcatggttcaccgaaaggctttgtgcaaactgaccatatcgagatcggtgggcatctggacgactggatcggcgacgagttggtgctctcaaaagtgctgctcatgggctatccgccgattccgttttcgcagcaggccgtgctcctggcgtcggaaggagaggtcaacgcggtgatggacaaatacagtgggccgcacccgcatttcatcatctcgtgtccggcgaggggtggttttagcggtggccccgtattgagtgaatatggctttttgctgggggtgcttgtcgaagcgctcgtgatggatggcaaggacgcggagaccggctattcgagcgccatctcgatcgagcccctgctggtcatgttgcacgacaacggcatctatcccggcaagaaccgccagatcatcgaggcgcttattggtggcatcgacaacggcttcgggaagccgtccttgcggatgcgctggatgtggttcatcgagaaatcaattctaaaaattcggatgctgatccggcgaaacaagaggatgtga

SEQ ID NO: 365109 - DNA, 1140 bp, Pseudomonas aeruginosa
atgctgatcgtcatgacctctccggacgccgtcctgcgtaatggccaacccgacccgcaactcgcccaggtgttgatcaacgccaaggcggcgggcaatccggtgggcttgatttccaatcatgcggaaccggcctggtttaacgggacgtttggcaccagtggcgttcagttcctgcaaagtcgagggcggcaatcgggcgagatcgtgtcgcagaacgccaagaagtttgcgctcaatcccttcgatgcgctggttctcgcggcaaaggacgaagacgtccagatggggaagaacggcggtgcgatcctcgtggcagccggatggtcggcagcacagcaggtcgcctcactgggcattcgcgtggacagcgccgcgcagctgcaagagatcatcaacctgacggccggctggtcggggcagtggtggtatgcaggcgacgctggccgctatcgggtgcgtgcgcttagcgacttgtccggccttggcaaaggtgtcacgcagcaactgttcgcgcagcggctgaccgccaccgtcaaaggcggtggcgcgcgactgaacgctttgctggccgtcacctcgcgttcgctgctcatggaaaaagtgaacgaactggatggactggtatggggcgtctatccgtcgtcgaagagtgctaacgacgatgacgagatccttagcgatttcacgcatcgcttgcgaacgacggtttcccgcgttcgcttctccaagcggggagggccgctattcattcggcacaccccttcgccgaagcgctcggcgggtggtggcggtgatcgaaccgatccgaccggccaaatttcgaccatccacctgaaccctttctacaaacagagcggacgattggtcggaaagcacgtgatcgttgtggacgattgcacgacctacggtgtgtcgtttggcgttgccgcggccttcttgcgcaaagccggtgccgcctccgtgacgggcgttgcgctggggaagtttggcaatcagttgcgttactacgagatcgacatcaagaccgatccgtatcagccggtcgtggccggcggcttcaccgtggccgcaccggggtggttccccggcgccaccagtggcgtcgctcagcaggttctgctgaccttgatcccgtaa

SEQ ID NO: 365110 - DNA, 639 bp, Pseudomonas aeruginosa
ttggctaagcgcgtactcaaaatcgatgccctgacacttccggatcatcactatctggacgcacaggacatttgctactacgcaggtgaatacactgcgggcgaggggcatgcctacagcgaaaccaaccagctgatcctcaacttcaagaagtccgtggacaagcgtggaaccgcgcagtggcaatacaaagagcgcgcgatcctgcaggcagcggcaatctttcgtgccgcgatcaaggctgacgccgaaatcaccttcgtcccgatcccgccgtcgaaggtgaagagcgatccgctatacgacgatcgcatgctgcaattgctgcaggccgtctgccgggggcgtcacaccgacatccgtgaactggtcgtccagcgcgaatcggcggcggcggcccatctgtcggacacgcgcccgacgccggacgaactggtcgccaactatcaactcgacgagagcttggccgagccggccccccagaccatttttgtcgtagacgacgtgctcaccacaggctgccatttcaaggcggtgaagcaagtgctggagcggcgatttcccgaggcacgcatcgtcgggctgttcctcgcgcggcgagcgcccaagtcggtggacttggattttgacagcatctaa

SEQ ID NO: 365111 - DNA, 885 bp, Pseudomonas aeruginosa
atgaatgacattgacgcagtactgagcaacaaaccgatttcaccgtcgcgggagatggcggcgtacgaggcgttgtgggcgcatcaaaaagcgacgttcaagacgatcgctgactgcttccgcgatagcccgaatgcgatgccctccgagctggtctcggaagaggaaattgacacggcgctacagcgggtgcaagaccagattgcgcacacgaagattcacgactttggtgtgcgtttgcatggcgcagaagactaccccgatcggttgcgcgatgccgcgcatcccgtcgaactgttgtactaccgaggctggtgggatctgatcgactcgcctaagcggatcgccatcgttggctcgcgcagcgtgtccgacgacggcttgcgccgaacccgcaagttggtgaagctgctggtccaagacggctacaccatcgtctccggtttggccaaaggcgtggataccgcggcacacacgacggccattgacaacggcggcagcacgattgccgtgatcggcacaccgattaccgagtattacccacccgagaaccgggcgctgcaagacttgattgcagagaaattcctgctggtgagccaggtgccgatctggcgctactcgacccaggactaccgtagcaatcgcctgttcttccctgagcgcaatgccacgatgtcagcgctcgcgcaggcaacggtcatcgtcgaagccagcgatacgtccggcacgctggcgcaagcacgcgcggcgctgcagcaggggcgcaagctgttcattctggacaactgctttcgcaatccgaagctgacatggccggccaagttccagagtcaaggggccattcgcgtcaccggcatcgacgacatcagggcagctcttggctaa

SEQ ID NO: 365112 - DNA, 1209 bp, Pseudomonas aeruginosa
atgagccgcggtggtattcaaggctttgaaagcgagcgcctcagtcagattcttgccgcgaggcgtttgagccaagcgcaacttgcctcgctggtcggcgtgtcgcccgcgacggtcagcaaatggcggtcgggcaatcaggcgcccgaacgggaaaccctggagcgccttgccggcgtggtcaacgtcacgcccgaatggttcacgcgggcgccctcggccaaggtgtcgctgccgctgtttcgcagtaacgcgtccgcccacgtggcggcgcgcgcgatgctggaagcgcgcatggagtgggcgcaggacgtcgcgctcgcgttgtccgagttcgtggactacccggcgctgaatttgccgacccggcagttcaaggagcccgatgagatcacgcctgacgagattgaactggcggcgagcgaatgccgcgatctgtggcgtatcggccgtacggcggtgcccgacctggcgctggccattgaaggcgctggcgtcgtcctgatccgcgaggaaacgggcatttcgcagatcgagggcctgtcggcatggagcgatgcgctggggcgcccgctggtattgctctcggccgacaaggataacggctatcgaagccgtttcgacttggcgcacgaacttggccacctgatcctgcatcggttcattccccggccgaccgagcgtgaccgtcataagcaactggaacagcaagcccatcgctttgcgggcgcattcctgctaccggccgaaacgtttgcaaatgaagtccgcacgccggtgacgctggacgatcttctcttgctcaaacgcagatggggtgtgtccgtcgctgcgatcgtgatgcgtttgcgtgcgctgaagattctggatgaagaagcggcccagtcgctgttcaaacgtcggtccgcccgttggggcgcgaagtccgagccgggcgacggcgataggccacccgagcggccgcgcctgctgcgtcgaacgatcgatctgctcgtcgaggaaaacgtgatgccgatcgactcgatccccaggcacattggcctggcggcccatgacatcgagatgctggctggcttatcggaagggtacttccagggcaagcccaaggttgtgcagctggctcggttgcgttcagtgcccagtggcgcggacgcaccggttgccacggacagcaacgtcgtgccgtttcgattttcgccgaagcgttga

SEQ ID NO: 365113 - DNA, 648 bp, Pseudomonas aeruginosa
atggcccagccgcccgtagacacaattcccgacctgttgcagcgcagcctgccgcgcgagctggtgatggccgtcgaggaagccttgaccgtcggcgcccagcgcgcgcacgccgcatccaaaggcatggacgaaggccacttgccccacgtcgtgggtcaactgcggcatttccacatgaacgaggcgtttcatcgggcactggaaatgggcgaggcttcgccaaccgccattcgcggtaacggcatcgtcagcggccgggccggggtgttcacactggccaggttcaacatcccggacggcttctggatcaacggccgacgtagccacacgcgccgccagatgtcctatgcgaacaaggccattgagccgttggtgcaaccggaactgttcgatcaatacaccgcgcctgccgatgcggtcgcgtttttcgtggcgtgcttctcgggctcgctgcatatccagccagagtcgcccgtgtcgatccagattgcggtgccggaccgcgagatgcgcggctggctgttcaaggaaccactgaatgcgttcctgcagcggtacgaacaaaagccggcggcgcaggacgacctggccaagcccaagctcaagaagatcaagaagcagggcaacgatggcagcgcgtcatga

SEQ ID NO: 365114 - DNA, 597 bp, Pseudomonas aeruginosa
atgcaaaccctcgccaaacaggtactagagcacgccgccggattgccggagggcacacccttggtcgccaaggaactgctccatttgggaaaccgggcggcgatggaccaggtgctgtctcgactcgtgcagcgcggcgccctgctgcgcgccggtcgcggcatctatgtcctgccggtggagagccgttttggctcccgcgccccctcggcctccaaaatggtcgaggggctggcccaccagcgcggcgaaaccatcgtgtcgcatggtgcggcggcggccaacgcgctgggcctgaccacgcaagtgcccgtgcgctccgtctacctgacctccggccccagccgccggttgaagctgggggcccagaccgtcgaattccggcacgcgccggtgtggcagttgatttttcctggccgcgctgccggcgatgtcgtgcgggcattggcctggctggggcccgagcgcgccggtgaagcgctgcgcacgctgcgcgccaaactgccggcggccgagatgaaggaagtcgcatcggcacgtgcgcgcctgccgacatggatggcaaaggaagtgagcgcgctggtgtcgcatggctaa

SEQ ID NO: 365115 - DNA, 1047 bp, Pseudomonas aeruginosa
atggctaagttcttcgacctgtctgccgatgagcgtctggaagcgctggcccaggcggccaacgcttccggccgccctccccacctgctggagaaggatgtctgggtggtatgggctctgggccatctcttcgctgcgccctacgcgtcgcatctcatcttcaagggcggcacctcgctgtcgaaggcctacggcgtcatccagcgtttttccgaggacgtggatctcacctatgacatccgcgccatcgccggcgatctgatcggcgaggcaggcacgccccttcccgccagcaagagccaggaaaagaaatggagcaaggagattcgcacccggctggctgaatgggtgacggacgaggtcgtcctgcggcttcagcaggacctgcagcagcagggtctgccggcccaggcccgcgccgaaggcgacaaggtgttcatcgactacacgccgttggcttcaggaacgggctatgtgccgccggcggtcatgctcgaattcggcgcgcgctccaccggggagccttgcgaaccgcgcgcggtccgttgcgacgccgccgcgcacctcgaaggcgtggaattccccgaagcgacgccgcaggtgatgcgtgccgagcggaccttctgggagaaggccaccgcgatccacgtgttttgcgcgcaaggtgtctttcgcggtggtgagcgctttgcacgtcactggcacgacgtaacgcgtttggacgccgccggcttcgctgacgcggcgatcgccgacagggcgctcgcgaaggcggtggccgatcacaagagcatcttcttcgcggaaaaaagcccggacggcgcatcgatcgactactacgccgccgtctcgggcgggctgtgcctagtgcccaacgacgaggccttggccaagttggccgccgactaccaacacatggtcgacgacgggctgttcctcgatgaggtcgaatcgttcgacgccctgctccagcaatgccaggctattcagcagaaggcgaatgccgttggagcgaatggggacctggagagccaaccgtctgcgtga

SEQ ID NO: 365116 - DNA, 726 bp, Pseudomonas aeruginosa
atgctgcagcgaatgacaccaaaagactattcggagttctgggagcgtgaatcgtcccaattctccagtgacaatatctatgcacatctcagccagattgttcccaccgaagcgaccttggaagtgggttgcggcgcaggatggagtacgttgagtcttgcgacaaatcggcctgtcttggcgatcgacaacaacgcctatttgattggcctcgctcgatcccgattgaacacccacggagtgactgcgcagatcatccagtctgacttgttcgagccgtccgaggacctgctcaaggcgatcgaggcattccagccgaaggtcgtggtcggatggttcatcggctcccatcctgacgacaatgacaagcgtactccggccgacctgcgcatcgacgaaaagcccaaggtctaccgagaaaatgtcgaggatcgactagttgcgctgccgctctgccctccatccgtggagtgggtccacaccgtgcaacgcggtgccgctccacccggggttagcgaggctcaaatcaaggatgagttggcgaaagaatacgaaacgtacatgttcaacaactcaggatttaccgtgacggacgtacaggtgctggactggaatcaaggggcaaccccattcccctatgttcagaccgtgagaccggacctgcccgccggcaagcccaagcccgtgatcatctccatcctggctcgtcgaatggccaacgtgtag

SEQ ID NO: 365117 - DNA, 927 bp, Pseudomonas aeruginosa
atgtcgatcggcatttccgaccttgcccattccgttcgcaagaacagcgctgctcaagggccatccgtgcccctcgggcattcgcagcagttggtcgtggcggcgctgggctacaagacctttgccgcctaccaggctgcacaagcgacttcacaggaaccggcgcatctggccgatgtccaccacgtcgtactcgacgtcgaccggctcgatcagcgtgcgtcggagcttggcgtggcgaccacgcccgaccaactgcacgcgttgctcgataccgccttcggcgagcgcgcgccgcatatccgcctccacgcgtcctacgccgccttcgaggattttctgcggcagcatgtggatcaaacggtcacggaagatagtgacgtgaatagcgaaatggccaatgccaactacgacggcatcgacgaggtgtatttcgatttcgaggtcgcgttcgatgacgtcgccgtgggcggtgcgctcgatatcgaactggccgggcacgtaggcctgggaatcgacaccgagcggccctacgcgggccacatcgtgaacgtggagggcgtgctgagcgtggtgcgcctgggccagcactgttttggatcggtggattgccaggtcaccaaggctgatctggataccgactggggcgacgacgaccacgaagacgggccgccggtgcgcagcacgtcgcaggcctacgcggagttgctcggcctggagctgcacgaggtcggcgacctggtcgatgtcgaggccgagccgcgagacggcaatagcggcgagatgatctacagctatctgctggatttcacggacgccgcctcgcccgagatcgcgcagaagatcctgcggcgccacggctcgctgcgtatcgaggtcggcccgagcttcttcgagaacttgcgtagcgacgactggccgcggtaa

SEQ ID NO: 365118 - DNA, 177 bp, Pseudomonas aeruginosa
atgccggactggctgcaggtcatcgtgcgcgtcaatgcgatattgcaccgggtctccgccgtgccgaagctggcggacgtcattgccatcggcgtcgatttctggctgacctcgctgggcgcggtcgtcatcgccgcgatctttgccccgctgaccttgtacgccgacatgcggtaa

SEQ ID NO: 365119 - DNA, 939 bp, Pseudomonas aeruginosa
atggcgacagtgacggtttctcccattcacttcgaggactacagcggccttcagttcgagcgcctggtctttgcgtatcacgtgcgcgccggctggcacgacttggtctggcgcgggcaatccggtggagaccaaggacgggacatctcgggcaccgagccgtttgatgaccggccagcacgcaaaaccatcatccaatgcgcgaaccgggacacgctgaccctggcgaaggccaagagcgacatgagcaaggcggtcaaggccatcggcggggtgccggatgccttcaagttcgtctgccgtggcgccgtgtcggacaccgcccgaacgcggatcgagcaggccgcagcgtccctgggcgttgcgcacgtgacgatatggtcgggcgtggagttcgaggaaaacctgcgccttcgcgccgaatacctgctgcgccgttttgtccagggcatcgaatttcccgatgccgaaacggcgatccgtgcgttcgtggacgactttcccgaattgacggatgccgatgcgctgcaattgatggcggccgtgttcgatcgtcccgcctttcgcacgccattccatcaggaaagctccctgcctgcttttcagcaggccatcgaagacactataggcgcgctgaacaccggcgtgtggcggacacgcgaaggcgacgagatccggcgcatcccatcgatccatcatcttcgcgatcgacgcatccgcgccgtattgaacaaggtcgttcgtcaggtcgatgcgctgcggcgcatcttcgtgactcgcctcaaggaaggggagatcaaacactgcggctgcggtcagccggattgtccgacgtacacgctcacccatcgcgccgctggcgaactggatgcggccaggcagagcatcctgacgacgtttcgatcggtgtacgcgcccttcgatgtcagtcttgagtag

SEQ ID NO: 365120 - DNA, 387 bp, Pseudomonas aeruginosa
atggagaatagcccgctgcaaaaaatcaatagggacgacggtgccgaaggactaccgcgagctgcctccctacccctccccggcacggccgcctacgaggaactgccccagtttcccaagcgcaacaccttgccgtttcgtcgcacgattcgccgccaggaactgcggcagatcgttccgctggccgagactacgatctacgagatggagcgccgtggcgagtttccgcgtcgcttcaacctgacgccgcgctgtgtcgtgtgggacctggccgaggtggaagcgtgggtcgaggcccgcaagcaagcgccgcgcggcggcgtctcgaaacccgatgtccgtctacgaaaaacccgccctgtgcgagcggcctctcgccaggaatga

SEQ ID NO: 365121 - DNA, 525 bp, Pseudomonas aeruginosa
atggaatacacctttaccctgaagtaccagcttgcggacgacgacagcgacaccgatgcgctggtcgagcgcttgggcgagaccggttgcgacgacgccttgatcggcatcgggcagccgggacgcatggcgctggaattcacccgcgaggcgaccgatgccggggcggccgtgcgcagcgcgctggcagacgtgcggcacgctgtgccttcggcacagttgatcgaagtcgcgccggacctggttggactgaccgacgtggccgatattgtgggtgtgtcgcggcagaacatgcgcaagctgatgttggcccacccgggcagctttccggcgccggtgcatgagggcagcgcatcgatctggcacttggcggacgtgctggcctggctgcaggccaagggcacgtattcgctggccttggacgtgctggacgtggcgcgggtggcgctgcaggtcaacgtggcaaaggagggccgacggctgacgcggtcagtgtccagggaactgggagcgttggtgagctaa

SEQ ID NO: 365122 - DNA, 1257 bp, Pseudomonas aeruginosa
atgcttaccgacgctgcactgcgtaatttgaagcctaagtcacggatttataaggcttctgaccgtgatgggatgtacgtgacggtatcgaccgccggtaccgtcaccttccgctatgactaccgtcttaacggacgccgggagaccctaaccctcgggcgctacggccctgacggtatttcactggcgatggcgcgcgaactgcttttggacgcgcggaaagccgttctcaagggcatctcgcccgccattgaaaagcaacgcgagaagcgccgcgtggtcgccatcaagaccttcggcgcggcgatggacgcctggctggcccacgcgaaattggccgacagcacccgcgccatgcgcaagcacatcatcgaccgggacatcctgccggtcttccagaaccgtctgctgatcgaaattgagcctgaagacttgcgggccttgtgcaacaaggtcaaggagcggggggcgccagccaccgcagttcagatccgggacatcgtgaagcaggtctatgtctacgccatcgcccacggtgaaaaggtggagaaccccgccaacagcgtgggggcggcgtcgatcgccaccttcgtgccgaaggatcgcgccttgtcgccgctggaaatccggctgatggtgcagcagatggaatcggtggccacctatccgaccattaagctggcgctgcgcttgattctgctgacgctggtgcgcaagagcgaactgattcacgccacctgggatgaggtcaatttcgagaacgcgacgtggacgatccctaaggagcggatgaaaggacgcaacccgcatgtggtctatctgtcgcgtcaggcgctgggcatcttcgtcacgctgcacgcctgcgcggcaggctcacgattcgtttttccctcgcgttacgacgcagagcgctgcatgtccaatgcgaccttgaatcgggtcacgcagctcgtggcggacgccgcaaaaagcaaagggctaccgctgcagccattcaccgtgcacgacctgcgccgtaccgggtcgaccctgttgaacgagatcggctttaaccgcgactggatcgagaagtgcctggcgcacgaagacggacgctcgtcgcgctcgatctacaacaaggccgaatacgccgagcaacggcgccacatgctgcaagagtggtccaacctggtcgacgcctggggtagcgggcagacctacgtgcccaagttgatgccggcgaacgtgacggtgccgatgttgagcgccatagcctaa

SEQ ID NO: 365123 - DNA, 240 bp, Pseudomonas aeruginosa
atgcccggaaagccgcataaaacaagcttctccgagaagatttttaccgtcaaagacggtaaaagtctgaatagtgaatgggagggtatcaatccggcctcgatttctaccgtcagctgtaccgccaactttttctgctggccggcgattgacaccgatagccgccgcgacgtatttctttctaaatcaacacgttatggctgtttttcgatagctggcgatagtccccgaaggacctga

SEQ ID NO: 365124 - DNA, 198 bp, Pseudomonas aeruginosa
atgggtattgccaaattgaacgattcagaggccctcgctgctcctcctacagtgttcggtggcggaggaaggcaaagagagtcaggcgaaagccgggaaaagaaatgtcaggcaagccagcgccaatgggcgcaagccttgatgaagcaagtaatgttccacttaaagtggaccctgttgcctcctctcctgcaatga

SEQ ID NO: 365125 - DNA, 618 bp, Pseudomonas aeruginosa
atgacgacgctacttgagtccgctacctatcggagcatcgaagcaaagcgcgaaacattcaccataaaaagccataagaccgcggctaagatcgtggttacaaggtatgtgcgcatttcctgggacgtgaagcccgccaagaaatacaagatcgttcgcgccaggacgcttgacagacagagtccaaatattctggtaaagctgccgcgtcacccccatactgaagccaagatttacgaattcttccatccatcgacgaagctcctacggaaggaagcagtaactatcatggctgcgttcagaaaagacttatttgtgtccgtcaccctcccgatcctaggcctaggggttgtcctgctgggcattgttggcggggcatacgcctacacctggagcgccttcaccagacttgatgacgcggcaataagcatgcgggaatcagcgtccaagatggccgaagcccaggccgcatccgcgcagcagttgtctgcacttgccgatgctcagaaggattcgaatgcaaagttggataaagtctccgagcaattgaaccagatgaatggaacactactcgtgctcaaaacgcgagcagacatgaaagattcctccacgaattga

SEQ ID NO: 365126 - DNA, 1053 bp, Pseudomonas aeruginosa
atgagcgccgtttcccaatccatgagtgccacgtcgctcgaccggcgcatccagatgctgcgcacggcaatggggccgctgatcgccaccgcgctcgaagaccccgacgtggtggaaatcatgctcaaccctgaccgcaccctttgggtggatcgcctgtcgtcgggccgcgcgcctatgggcgtggagctgcccgaagccgatggcgagcgaatcatccgcctggtcgcggcccacgtcggcgcggaggtgcatcgcggccagccgctgctgtccgccgaactgcccgaaaccggtgaacgcttcgagggcatcctgccgccagccgcgccggggccggccttcgcgctgcgcaagcgcgccatcggcgtgatcccgctggagcggtacgtcgtggacggaatgatgaccgccgcccaggcgggctttttggtgcgcgccgtgcgcgagcgccagaacgtcctgatcgcgggggccaccagcagcggcaagacgaccttggcgaacgcgctgctggccgagatagctgccacgggcgaccgcgtgctggtgctcgaagacacggtggagctgcaatgcgcggcccgcgaccacgttccgctgcgcacgcgctccggcgtggtgtccatgaccgagctggtgcgctcgtccatgcgcctgcgacctgatcgcgtcgtcgtcggcgaggtacgcggtgccgaggcgctggatctcatcaaggtgtggggcaccggccaccccggcggcgtcgccacgatccacgccggctccgcgctgggcgcgttgctgcgcctggagcaactgattctcgaagtggcggtgaatccgccgcgtgcgctgatcgccgaggcggtcaacgtggtgatccagatcgccgggcgcggacgcaagcgccgcatcgagaacatcgcccgcatcgtcggcttcgacggcgtgggctaccaactggtggacgcgctggaaacgccgtttcccgagctgccgccgatccctgatgccgcacccgctgcggcgacttcctcgtcccctgaccaacctggagaactgctatga

SEQ ID NO: 365127 - DNA, 285 bp, Pseudomonas aeruginosa; identical to SEQ ID NO: 82558

SEQ ID NO: 365128 - DNA, 801 bp, Pseudomonas aeruginosa
atgacgaatatcgttcccctctcagttgcatctcaagtagcacaagctcaggacatcattgagcggcatctgggccgccatgtcgtcgccattcacttgttcggttccgcggtggatggcggacttcgtccgtacagcgatatcgacctgcttgtcacggtggccgaatctcccggcaaagatgatcgacgcgcgttgatgaccgaacttctgacggcatcagcttttcctggatcgtcaatgtctctgcgggcgctcgaagttacagtgctggcgcttgagcacattgcgccttggcgttatccgccaaggcgggagatccaatttggtgaatggctgcgcaacgacatagaggcaggcgtttttgaggagcctgcacttgaccatgacctggccattctccttaccaaagcccggggcaagagcgtcgcaatcgtcggatcaagtgcgagagcgttgttcgatgaagtccctcacgcagacctgatgcgagcacttgtggatactgtcgcgcaatggaacaggccagaagactgggcaggtgaggaacgaaacatcattctcgcgctcgcccgcagttggtacacagcaaccacaggcgaaatcacctcaaaggatttctcggtcacgtggctgctggaaaggattgagcctcggtatcgtgcggtgctagctgaagccagagccagttaccttggtgaagggcaagacaatcttgctaggtatgcacctgatgttgaggctttcatcactcgcgcgcagttagaagtcagacggcgctgcttgagtgttgacagctag

SEQ ID NO: 365129 - DNA, 351 bp, Pseudomonas aeruginosa
gtgacccaaccgctcatcaccgccgaacaacgcgcgcaactgctcgccgtcggcgcggcgcgcgccgctggtcaacgcatcaatccgctgcccgcggtgcggttgttcacccctgacgcgcatgtcatctggctgctggccgcgctcgacccggccgatggcgatacggcatggggactgatcgacctgggcatcggtatgccggcgctggggacggtgaagctgtccgagctggcgtccatcgtcgggccgcgccagcagcccgtgatgcgcgatcgctacttccagccggtacggcggctggcggagtatctgcggcgggccgaagaaaacggctcgatcactgactga

SEQ ID NO: 365130 - DNA, 798 bp, Pseudomonas aeruginosa
gtggctgacccgaacgccgagcactggtatccgaccgccgcctatctctacgcgctgcacctggacggccccgcgctggcatgggaatacctgcgccgccaccccgactaccgccgcgactggctgcgtcggcgccgccggccagaggccgccgcgcgctggggcctgcgcctgctggaagatccggccctcgatgcgcgcgacgcgcatccggcctggttccccgaccacgatgcggtggtgcagctctatcccgatgccgacccgccgcccgatgcgctcgccttcgcgttctggcgcatccccggccacaagcacctgattcacgacggcaggcgcctggtactgctggcgcgctggccgggctgttgcctgcgcttcgcgctcgcgcccggcctggccgacggcatggcctgcgcctatgccattcgcgcctgcgcctcgccttgcgcgcgctatcaggcattggcagtcgaactggacaagctggccaccgctggcgatgccgcgcctgcggcgacggcccggccgcgaccgtccctgactgccttgcaggaactgcacacgcttcaggcactcgacgcgaccctggcgggcgcgtccttgcgcgatgtggccgaaggattgttcggcgtcgatgccgtcgccgacgactggcacgcggacagcgccttgcgcgcccgcgtgcggcgactggtaagccggggcgatgcgctgatgcgcggcggttaccgccgcctggcacagcttgcgccgctcagagagggacgttctgcatcccctgcaaaacgtccctga

SEQ ID NO: 365131 - DNA, 303 bp, Pseudomonas aeruginosa
atgcgatgcgtttccttgctgcttcccgtgctgctggtcgcttgcagccagcagccgaccgaagacctggtcgctgatcccgtgcggctcaaggctttgcgtgtgcagtgtgccgccgacaggacggccgcaggcgaagacgcctgcctgcccgcggccgacgctttccggcggcgcttcgtcgccggtgaaaccgggcctgacgagttccgcacgttggccgatctgccgccgatcccgccgagcttcgactcgcccatcagtgaccagggcgccatgcccttcgagggggacgtgccatga

SEQ ID NO: 365132 - DNA, 1032 bp, Pseudomonas aeruginosa
atgagcatcaccaagaacgacaagaacacgcgaaccaccggacgtcccaccctcaacgaagtcgcgcgccgcgccggggtcagcccgatcaccgcgtcgcgcgcgttgcgcggcgtcgccagcgtcgccgaagaactggcgcagaaggtccgcgacgccgcccgcgaactcggctacgtggccaaccccgcggcgcgcgcgctggcctcggcgcaaagccacagcgtggcggtgctggtgccgtcgctggccaacctgctgttcatcgagaccctcgaggcgatccacgcggtactgcggccgcagggcctggaagtgctgatcggcaacttccactactcgcgcaacgaggaagaggacctgatccgcaactacctggcctaccagccacgcggcctgctgctgaccggcttcgagcgcaccgagagcgcccggcggatgatcgaggccagcggcattccctgcgtgtacatgatggacctggactccggctccgggctcaattgcgtcggcttctcccagttgcgcgccggcgaggccgccgccgagcacctgctggcacgcggccgcaggcgcctggcctacatcggcgcccagctcgaccagcgcaccctgctgcgcggcgaggggttccgccgcgccttgcaaaaggccggctgctacgacccggggctggaaatccttacgccgcggccgtcctcggtggccctcggcggcgaactcttcgtgcagttgctggccagccagccgcaggtcgacggggtgttcttctgcaacgacgacctggcccagggcgcgctgctggaggccctgcgccgtggggtcaaggtgccggaacagatcgccgtgctcggtttcaacgacctgccgggttcggactgcacggtcccgcgcctgagcagcatccgcaccccgcgcgaagccatcggcgggcgcgcggcggagcagttgctggcgctgatcgccggcaaggaggtgcgcgatagcgcgctggacatggggttcgagctgatggcgcgggagagcacctga

SEQ ID NO: 365133 - DNA, 522 bp, Pseudomonas aeruginosa; identical to SEQ ID NO: 321527

SEQ ID NO: 365134 - DNA, 1353 bp, Pseudomonas aeruginosa; identical to SEQ ID NO: 321528

SEQ ID NO: 365135 - DNA, 144 bp, Pseudomonas aeruginosa; identical to SEQ ID NO: 348106

SEQ ID NO: 365136 - DNA, 1626 bp, Pseudomonas aeruginosa
atgaccgccccgctccacctcgattcgctgtttcccagcctcgacgccattcccgagcagtaccgccccgacgcccccatcgagcagcgcgactacctggtcgacggccaactgcgacattgggacggcccgctggcgccggtacgcagcccggtattcctcgccgaggccgacggcgagcgccaggtgatcctcggcagcaccccgctgctcgacgccgacgccgcgctcgccgcgctcgacgccgcggtgcgggcctacgaccacggccagggcctgtggccgaacctgcgggtggccgagcgcatccagcacgtcgaacgcttcctggcgcggatgcgcgagcaacgcgaggcggtggtcaagctgctgatgtgggaaatcggcaagaacctcaaggactccgagaaagagttcgaccgcacctgcgactacatcgtcgataccatcgaagcgctgaaggaactcgaccgccactccagccgtttcgaactggaacagggcaccctcggccagatccgccgggttccactgggcgtggcgctgtgcatggggccgtacaactacccgctgaacgaaaccttcaccaccctgatcccggcgctgatcatgggcaatacggtggtgttcaagccggccaagttcggcgtgctgctgatccgcccgttgctggaagccttccgcgacagcttcccgccaggagtgatcaacgtcatctacgggcgcggccgggaaaccgtgtcggcgctgatggccagcggcaaggtcgacgtgttcgccttcatcggcacccattccggcgccagcgacctgaagaagctgcacccccgcccgcaccgcctgcgcgccgccctcggcctggacgcgaagaacccgggtatcgtcctgccgcaggtcgacctggacaacgcggtgaacgaggcggtcaccggcgcgctgtccttcaacggccagcgctgcaccgcgctgaagatcctgttcgtccacgaaagcgtgctgcgaccgttcctcgacaagttcagcgcgcgcctggccagcctcaagccgggcatgccgtgggaaccgggagtggcgctgacgccgctgccggagccgggcaaggtcgactatctcgaaggcctgctgaacgacgccctggccaagggcgcacgagtggtcaatgcgggcggcggcgagcatcggcaaagtttcttctaccccgctctgctgagtccggtgagcccggacatgcgcctctaccacgaggagcagttcggtccgctggtgccggtggtgccctatcgcgagctggacgaggtgatcgactacgtcctgcgctccgactacggccagcagttgagcctgttcggcaacgacccggcgcagatcggccggctggtcgacgccttcgccaaccaggtcggcaggatcaacgtcaacgcccagtgccagcgcggcccggacagctacccgttcaacggccggaagaattcggcggaaggcaccctgtcggtccatgacgcgctgcgggtgttctccatccgcaccctggtggcgacccgcgacaccgaggcgaacaagaccctggtcagcgagatcatccgcaaccgcgcgtcgaacttcctcaccaccgactacatcttctga

SEQ ID NO: 365137 - DNA, 1260 bp, Pseudomonas aeruginosa
atgaacgcccgcgtccatcccgaagccaccgccgccagtctctccgaaggtgccgactacgaactgctcgcccagcgtttccgaccgatcttcgcgcgcatcgccgaaggcgccgtcgagcgcgaacggcaacgcgaactgccccacgaggcgatcgcctggctcaagcaggccggcttcggcgccgtgcgcgtgccgcgcgagcacggcggcgccggcgcctcgctgccgcagttggttcagttgctgatcgaactggccgaggccgactccaacatcacccaggccctgcgcggccacttcgccttcgtcgaggaccgtctcaatgccgagcccggccctggccgcgaccgttggctgcggcgcttcgtcgagggcgacctggtcggctgcgcctggaccgaggtcggttcggtacggctgggcgaagtgctcacccgcgtctcgcgcaaggacgacggtcgctgggtggtgaacggcagcaagtactacagcaccggcagcctcttctccgactggatcgatctgtatgcccagcgcgacgacaccggcgccgacgtgatcgcggcgatccgcaccgaccagcccggcgtgcgccagagcgacgactgggacggcttcggccagcgcaccaccggcagcggcacgtcgctgttcgaggacgccgaggtggaggaagagaacctcatcgacttcgccagccgcttcaagtaccagaccgcgttctaccagttggtcctgctcgcggtgctggccggcaccggccgcgccgccttgcgcgacgtcgccgccgaggtgcgcgggcggacccgtatctacagccacggcaatgccccgcgagtcagccaggatccccaggtgcagcaggtggtcgggcgcatcgccgcgcgcgtctacgccgccgaggcggccaccctgcgcgccgccgaagcggcccagcgcgcctacctggcgcgcttcgtaggcgacccgcaggcggagaaggaggccaatatcgccgccgagatcgaatcggccaaggcccaggcgatcgtcgccgaactggtgttgcaggccaccagcgagctgttcgacgccagcggcgcttccgccgtcggccgcggcaagcagctcgaccgccactggcgcaatgcgcgcaccgccgcctcgcacaatcccctgatctacaagcaacggatcgtcggcgactgggagatcaacggcagcgagccgccctacgtctggcagatcggcagcggtccggccacggcgtcccgctga

SEQ ID NO: 365138 - DNA, 1236 bp, Pseudomonas aeruginosa
atgagcgcactggaaaagaacgccgccgatccctatcggcaaccgctgccacggaccccggcccggcgcatcgccgacgacgccgaggcgatccgcgtcgcccgcgaactggccgggctgttcgccgaggaagcctcgctgcgcgaccgccagcgccggctgccggtggccgaactggaagccttctcgcagagcggcctatggggcatcagcgtaccgcgcgcctacggcggcgccgaggtcggctaccggaccctggccgaagtactgaagaccatggccgcggtagacccgtccctggcgcagttgccgcagaaccacctggcggtgctcgaccatttgcgcctggacggcagcgaggagcagaaacgcttcttctacggcctggtgctagacggcgtgcgcttcggcaacgccttctccgaacgccacagccgtaccgtcgccgaattccagacacgagtgctggcggatggcgacgggttccgcatcgacggccgcaagttctattcgagcggcgccctgctcgcccattgggtaccggccgtcggcctcgacgccgagcagcgcgcgcacctggcgttcatcccgcgcgacgcgccggggctgacggtgatcgacgactggtccggcttcggccagcgcaccaccgccagcggcaccgtcatcctggacaacgtgcgggtgccggccgagcacgtcatcccggtgcaccgcgccttcgaccgccccaccgccgccggcgccgtatcgcagttcatccaggccgccatcgacgccggcatcgcccgtggcatcctcgccgagaccgtgcagcaggtgcgccgccacgcgcggccatggatagacgccaaccagcagcatgcctgggaagacccctacaccatccagcaggtcggcgacctgcgcatccgcgtgcgcgccgcggaagccgtgctcgacctggcggccgacgccatcgaagcggcgctcgccgcccccgacgaggagagcgtggccgccgcctcgatcgcggtggccgaggccaaggtgctcaccaccgaagccgccctgctcgccgccaaccggctgttcgaactggccggcacgcgctcgaccctggaggaactcaatctcgaccgtcactggcgcaacgcccgcacccacaccctgcatgacccggtgcgctggaaataccatgccatcggcaactaccagttgaatggggtgaagccaccgcggcacgcctggctctag

SEQ ID NO: 365139 - DNA, 1410 bp, Pseudomonas aeruginosa
atgccgcgcgaaatccgtctcaacgccttcgaaatgaactgtgtcggccaccagtcgcccggcctctgggcgcatccgcgcgaccgctcctcgcagtacaaggacctggagtactggaccgacctggcgcggttgctcgaacgcggccgtttcgacggactgttcatcgccgacgtgctgggcatctacgatgtgctcgacggcaatggcgacgcggcgatccgccaggccgcccaggtaccggtgaacgacccgctggcgctgatcacgccgatggccgcggtgactcgccacctgggcttcggcctgaccgcctcgctgtccttcgagcatccctatcccttcgcccgccgactctcgaccctggaccacctgaccaagggccggatcggctggaacgtagtgacctcctacctggaaagcggcgcgcgcaacctcggccagcaggcccagctcgaccacgaccgccgctacgactatgccgacgaatacctacaggtgctctacaagctcttcgaaggcagttgggaggacggcgcggtgctccgcgaccgtcgccgaaggatcttcagcgacccaggcaagattcacgagatccgccatgtcggcgagcacttccaggtacccggcatccatctctgcgaaccgtcgccgcagcgcacgccggtgctctaccaggccggcgcgtcgagtcgtggcaagcgcttcgccgccgagcacgccgagtgcgtgttcgtcgccgcgccatcgaagaccgtgctcaagcaggcggtcgccgacatccgccagcgcgtcgccgaggccggccgcgatccgcgcaaggtactggtgttcaacctgcagacggtggtgctgggcgaaaccgacgccaaggccagggccaagttcgacgaataccgcgccttcgtcagctacgaaggggccctggcgctgatctccggctggaccgggatcgacttcggccagtatcggccggaccaggtgctgcggcacatccacaccaatgcgatccaatcggcggtggaagcgttttccagcgccgatccgacgcgcacctggacggtccgcgagctggccgactgggtcggtatcggcggcttcggcccgctgttcgtcggcagcccggcgaccgtcgccgacctgttgcaggagtgggtggaggacaccgacgtggatggcttcaacctggcctatgcgctggcccacgaaaccttcagcgacgtggtcgaattgctggtgccggagttgcagaagcgcggggtgtacaagaccgaatatgcgccggggactctgcgcgagaagttgttcggcgacggcccgcgtctgccggattcccatccggcggccggctatcgcgacctgcgggcgctctgggagaaggaggccgggcgcaacgcgctgccggcctga

SEQ ID NO: 365140 - DNA, 765 bp, Pseudomonas aeruginosa
gtgaggcagacgctgcgccagggcgcgctaggcgtcgccgggctgctggcgctgttcgccctgtggtggctcggcgtggccctgttcggcgccgccgacggcctttcggcacgcttctcgccgcaggcgacgttgctcagcctgggtgaactgctggaacgccgcgaactctacgagcacgtgctggtgagcctgaaacgggtcctgctgggcttgttcctggcgctgctggtgggagtgccgctggggctgctggtgggcgcctcgcgcaacctggaagcggcgaccactccggcgttccagttcctgcggatgatctcgccgctgtcgtggatgcccatcgcggtgatgctgatgggcgtgggcgaccagccgatctatttcctgctggccttcgccgcgctctggccgatcctgctgaataccgccgccggcgtgcgccagctcgacccgcgctggctgcaactgagccgcagcctcgccgccacgccctgggaaaccctgcgccgggtgatcctgccgggcatcctcggccatgtgctgaccggcgtgcgcctggccatcggcatcctctggatcgtcctggtgccttgcgagatgctcggcgtcagcgccgggctcggctactacatcctcgacacccgcgaccgcctggcgtactccgagctgatggcgatggtgctgctgatcggcctgctcggctacctgctcgacgcggcggcgcgcggactctaccggcgctgggcgcacggggcgctcgggtag

SEQ ID NO: 365141 - DNA, 1200 bp, Pseudomonas aeruginosa
atgtgcctggacgacccgacccattcccgacgtgacatcctcaagctcgccgcgctgctcagcgctgccggcgcgttgccgctgctgagcagcctgcaggcgcgtgccgccgccgaacccgacgcgccggtgcgcatcggctacctgccgatcaccgacgccacgcccttgctggtggcccatgccaacggcctgttcgaggccgagggcatccaggccgaacggccggtgctgttgcgtagctgggcgcaggtgatcgaggcgttcatctccggccaggtcaacgtcatccacctgctgtcgccgatgaccgtctgggcccgctacggcagcaaggtgccggccaaggtggtggcctggaaccacgtcggcggctcggggctcacggtggctccggagatcgccgacgtgcgccagctcggcggcaagagcgtggcgatcccgttctggtactcgatccacaacgtggtgttgcagcaattgctgcgcgacaacagcctgcgcgcggtgagccgtgcggtgggcgcggcgctggccgccgacgaggtcaacctggtggtgctgccgccttcggacatgccaccggcgctggccagcaagcgcatccacggctacatcgtcgccgagccgttcaacgccctggcggagaacctcaaggtcggccgggtacagcgcttcaccggcgatgtctggcgcaaccacgcctgctgcgtggtgttcatgcacgaacacgacctggagcggcggccgcagtggtcgcaaaaggtggtcaacgccatcgtcaaggcccagctatggactcgcgggcaccgcgccgaggccgcacagttgctgtccaaggccggagccaaccgctacacgccgcacgcaccggaggtcctcggccgggtgctggcgccgggcgccgaggagcagcaggcctatctcgccagcggcgcgatccgccacgccgactggcaggagcggcgcatcgacttccagccctatccctatccgagctataccgaggaactggtgcggcggctgaaggacaccctgatcgaaggcaataatgccttcctcgccagcctcgatccgcgccaggtggccagtgacctggtggacgaccgcttcgtccgccaggccctggcagaggtcggcgggttgcaggcgttcggcctcgccgagggcttccagcgcagcgaggagatcagcccgtga

SEQ ID NO: 365142 - DNA, 561 bp, Pseudomonas aeruginosa
atgtcacgcgttcccgtgctcaccctggaaaacgcccccgaggcggcgcgtccgttcctccagaccgcgctgaacaactcgggttatatcccgaatctgctcggcgtgctggccaatgcgccggccgccctggaaacctacctcaccgtgtccgggctgaacgccaaggccagcctcggcctgcccgagcgggaagtggtgcaactggtggcggccaccacccatggctgcgacttctgcgttgccgggcacaccgcggtggcgcgcaacaaggcgcgcctgccggagccggtgatcgaggccctgcgcgcccgcggcgaactgcccgatgcccgctacgaagccctggccgacttcacccgcgcggtgatcgccagccgcggtgcggtcaccgacgagcagttcgaagccttccgcgccgccggtttcgaccaggcccaggccctggaagtgatcctcggggtaagcctggcgacgctctgcaacttcgccaacgtgttcgcccgcacgccgctcaatgccgagctggagcaatatcgctggaccaacccgcaggcctga

SEQ ID NO: 365143 - DNA, 906 bp, Pseudomonas aeruginosa
atgaattcgtccaacccccttgtcgattggttattagacagcctcgaagtcgacaccagcctgttccatgtcggtcgctactgcggcggctggcatgcctccacccacggtctggcgcgtgccagcttccacctggtggtgcagggacactgctgggcgcacgtcgccggaagcgcccggggctggcgactggacagcggcgacgcgctgttcttcctgcgcgacgtcgagttccgcctgtccagcgaggccaccgccgaggcagcgcgctgccagccgcgtagcgaaatgcacgcgctggagtggaacgcggcggacggtgccggcctggtctgcgggttcttccacttccattcgggattgtccgggctgatcgtcgacgccctgcccgactggctgatcctgcgcgccggcgatccggcgctggacgcggcgcgacgcctgttcgccctgatcgtcgacgagtgccgccgccagccggcgccgtcgccggttctgctggagcgcctcagccacctgctgttcctctacgtgttgcgccagcaggtgctcgacaacccgaccctcggcggcctggtggcactggcacgccagccgcagttcgccggcctgctggaagcgctgatcgaggcacccgaacagccctggagcctggaacaaatggccgaacgcaccggactctcgcgctcggccttcttcaagcgcttcaacgaactcagcggtcagtcgccggggcaggtcctgctggccctgcgcatgcaccgcgcctgcgccctgctgcgcgccgacgccagcgtcgccgaggtcgcggcggcggtcggctaccagtccaccgccgccttcacccgtgccttccacaaggccaccgggcagcagccgggggcctatcgcaaggccagccgctga

SEQ ID NO: 365144 - DNA, 912 bp, Pseudomonas aeruginosa
atgcatatcgatctccgccagctccgccacttcatcgcccttcacgagcaccgcagcttcgtcgccgcggcgctggcggttaacctttcgcaatcggccttcagccgcagcatccaggcgctcgaacacagcgctggctgccgcctggtggaccgcgcggccaaggacctgcgtccgaccaagcagggcctgatcgtcctcgaacatgcgcgccggctggtcagcggcgcgcacaacctggccaacgagatcgccctgttcaacggcctggaggccggcgaactgcgcttcggcgccggaccggctcccgccacctggctggtgccgcgtgcggtggggcgcttcaacgtgcgttatccgaaggcgcgggtgagtttccaggtcgaacactggcaggcgctgaaccgccgcctgcaggccgaggagttcgagttcttcgtcgccgacacccggcatttcgaggccgacccgcaataccggacctcgcgcctgcgtccccggcgctggcatttctgctgccgcgaggggcatccactggccgctcgcgagagcgtttccgccgaggagctgttgagcttcccgctggcgaccaacatcagcccgccgaacatccgcaaggtgctggtggacctcagcgggcgtcccgacttccgcccggccatcgagtgcgagaacggccatagcctgctcggcgtggttctcgcctcggatgccatcggcatcagcagcggcctcggcgacctggcgccgccgggacagggaggcctgcgtccgctgcgggtgcgcgagctgcccgacgacctcgacgaactgcacacccgctacggcatcgtcagccgcgccggctacagcctgtcgccgctggcggaggcgatgatcgacgaactgaagcgggtcgacgacgccacctga

SEQ ID NO: 365145 - DNA, 2370 bp, Pseudomonas aeruginosa
atgaatcgccgacccgcgtaccgctccatcccgtcgtcccgcagcgcaccgttccgccgtcgcctgctgcccctgtcgatctgcctggcctgcgccggaggggcgcaactggccggcgccgacgacacccccgcgggcaccgaagaggcgcgccaggcgcagccggccaccaccctgcagaccgtcacggtgacctcgcggcgacgggtggaaaactcccaggatgtgcccaccgcgatgagcgtgctcggcggcgaaaccctggagagccagcgcatctaccgggtgcaggacctgcagcaactggtgccgagcaccaacgtcgcctacgtccacgcgcgccagtccagcgtgtcgatccgcggcctaggcaacaacccggccagcgacggcctggaaggcagcgtcgggctgtacctcgacaacgtctacctcggccgccccggcatggcctcgttcgaccttctcgacatcgagcagctggaggtcttgcgcggcccgcagggcaccctgttcggcaagaacaccacggccggggtgatcaacatcggcacccgtgcgccgagcttcactccggagcgcagcgttgagatatccggcggcgaggacggctacttccaggccaggggcacgatttccggaccgctcggcgagaccctcgccgggcgcctgtcggcctaccgcacccgcgacgacggctacgtgaagaacctccacgacggcaacaccctcaacggcggcgcacgccagggtttccgcgggcagttgctgttcaagccgaacgacgacttcagcctgcgctggatcggcgactacaacgaggaagactccgacaatggtgtccttaccctgttcagcagcggccccacggtgaacggcgtgaaccgctacgaacagcgcgccgccgcggccggcgcgacgctggtggacggccatcggcgcaaggtcaacttcgactcggaccagcaggtcacggtgttccagggcggaacctcggtggaagccaactggaagctggccaacgacttcaccctcacttccatcagcgcctaccgctggtgggatttcacgccgcgcaacgacgacggcctggacgtaccggcggcctataacgccggagtctcggtgcgcgacaagcagtggtcgcaggaaatccgcctggcttcgcccagcggcggcttcttcgactacgtgctcggcgcctactacttcggccaggacctcgacaacaagtccttcaccgactacgggcccagggcagacatctggaacggaacccccgccggcgccctgagcgacgtcagcacccgcggtcgcgggcacatcgacaccgacagctacgcgctgttcgcccagggcacctggcacctaaccgagcgcctggacctcaccgccggcgtgcgcggcacctacgaggaaaagtccgcctgggtcgaacgctacgccccgctcggcggcgccgcggtgagcggcgcggcggcggccgcgcgcaacggcagggtcggcgcctacgacagcggcgacatcggcctgcacagcgtcagtccgtccgctctgctcagcctcagctaccgcttcagcgaccaggttctgggctacgcctcgctgtcccacggcgagaaatccggcggcgtcaacctgaccgtggccagcgctcccagcgccggtgccgactcgctgctgattggcaccgagcgcgccaacgatgccgagctggggttgaagaccaccctcctcgacaaccgcctgatcctcaacggcaacctgttctggaccgtggtccacggctaccaggccaatgcctacgacgaggccaaccgcacccagtacctgaccaatgccggcgatgtgcgctcgcgcggcctggagttcgaagcgacggccctgccgatccgcggcctgaccctgaatttcaatgcgtcctacaacgacgttcgctacctgtcctacaagaacgccccgtgcgcccccgaggtggccttccaggccggcgccccggcgtcctgcgacctcagcgggcaccaggtggtcggtgcctcgaagtacatcgccaacttcaatggcgagtatcgctggaagctcgacgatggcctggagccctacctcaccgccagctacgcgttccgctccagggcggtgggcaccatcgacgattccgcatacggacagatccccagctacgccctggtcaacgcctccgccggcctgcgcggcgactacggggacggccagtgggacctgtccctgtggctgaagaacgctttcgacaagacctacttcaccagcctctggaattccgccaacggcggctacgccggcgtgctcggcacgccgcgcaccctgggcgtgaccgcccgctacgacttctga

SEQ ID NO: 365146 - DNA, 1341 bp, Pseudomonas aeruginosa
atgcccagattcccgatgctcctgctcagcgccgcgctgctcgccgccggcgcccatgccgcgcccagcgtctaccccaccggagtgacccgctacgacccgcagaaggccttcaaccagtacgtgatcttcagcggcgcagaccgcaagacccacctgatcgacatgaacggcaacgaggtgaagcgctgggactaccccggcttccccgccgccgtgatcgacccggccctgaacggcggcaagcgcggccatgtgctgctgcaactggccgacctggccgctccggacaagctggcctcgcccggcaacggcctggccaaccaggccctcggcgagctggactgggatggcaaggaggtctggcgctggggtgaccaggcgccgggcggcgccgcccatcagcaccacgaccagcgccggctggccaacggcaacactctactgctggcgaacaaggtccacgcggtgaagggcttcgccgtgccccgggtaatcgatgacgtgatctacgaggtcacgccgcagggcaagctggcctggagctggaccgcttcggagcatctcgacgaattcggattcaccgccgaccagttgaagcgggtgcgggccagcgagaaccccgactacctgcacatcaacaacctcgccccgctcggcgagaaccgctggcacgctgccggcgaccggcgcttcgccccggacaacctgctgctcgactcacgcaacgccaacttcatagcgatcgtcgacaaggccagcggcaaggtgatctggcgcctcggcccgaaccttccgccgatcgacccgaagagcgcccgtaagctgccgcgcccggtggaccagatcagtggccagcacgacgcccacctcattcccgagggcctgccgggcgccggcaacctgctggtgttcgacaaccagggtgacgccggttacccctcggtacagcgcgggctggtctccggctcgcgggtactggaaatcgacccgctgaagaagcagatcgtctggcaatacactgccgaggactcgcagcagcccggctgggccttctacagcgccttcatcagcagcgcgcggcgcctgcccaacggcaatacgctgatcgacgaagggcagaacggacgcttcttccaggtaacgcccggcggcgagatcgtctgggagtacgtcagcccctacttcggcaaggcgccgcgcggcgacgcccggagcaactgggtctaccgcgcgctgccggtggcctacgcctgggtgcccgaaggtacgccgcgcgaggagaaggcggtgaacctggcggttcccggcgccacgccgcaggtcacggcgcggcgttga

SEQ ID NO: 365147 - DNA, 906 bp, Pseudomonas aeruginosa
atgcccagagccagcaaagtcaccgatccgtcctacgagctgatggacgaccacgaaggccattcgctgatctaccgccagcacggcttccccagcccgctggtgcgctggcacttccacaaggagtacgagctgcacctgatcgtcgccagctccggcaaggtattcatcggcgactacatcggcaacttcgcccccgacaccctgttcctcaccggtcccaacctgccgcacaactggatcagccaggtggagcccgacgaggtggtggcccggcgcgacatgctggtgaacttcaccgacgaggtgctggaggacggcagcggcgtattctccgagctgaaccgcctggccccgctgctggcgcgggcgcgctacggcatcgagttccgcgacccggcgctgatcggcgaaagccggcgactgttgcaacgcatcgccgacagcggcggcatgacccgcctgggatacttttttatcctcatggaacagctcgccgaatgcgaggactaccagttgctctctaccgtcacttcctcgcaactggccgacgagcacaacgtcgaacggatcaaccgggcggtggactacatcttccagcactacgcccaggacctcacccaggagcaggtcgccgcccacctgggcatgacccccacctacttctcgcgcttcttcaagcaggccgccgggcgcggcttcgtcgagttcgtcaaccgcctgcgcatcagcaagtcctgcgagctgctggcccgcagcgagctgccggtgaccgaggtgtgcttcgagtcgggcttcagcaacctgtccaatttcaatcggcgcttccagcagctcaagggcatgacgcccaccggctaccggcgcctggtgacccagcggctgaccgagcagaacctgctctga

SEQ ID NO: 365148 - DNA, 1311 bp, Pseudomonas aeruginosa
atgaacgactcgatcaaggcctgcctggccgccgcctgcctcgccctgcccctgctggcccagggcgccgagaccctgaccatcgccacggtcaacaacaacgacatgatccgcatgcaacgcctgtccaaggtgttcgaggaaagccacccggacatcgcgctgaaatgggtggtgctcgaagagaacgtcctgcgccagcgcctgaccaccgacatcgccacccagggcggacagttcgacctgctcaccatcggcatgtacgaagccgcgctttggggcgccaagggctggctggagccgatgagcgggctgcccgccgactacgccctggacgacctgttgccctcggtgcgcgacggtctctccgtcaagggcacgctgtacgccctgccgttctacgccgaagcctcgatcacctactaccgcaaggacctgttccagcaggccgggctgcggatgcccgagcaaccgacctggacccagctcggcgaattcgccgccaggctcaaccgcccggaccagggccaatacggcatctgcctgcgcggcaaggccggctggggcgagaacatggcgttgatcggcaccctggccaacgccttcggcgcacgctggttcgacgagcgatggcagcccgaattcagcggcggcgaatggaagaaggctctcgacttctatgtctccaccctcaagcggtacggcccgcccggcgcctccagcaacggattcaacgagaacctggcgctgttcaacagcggcaagtgcgcgatctgggtggacgccagcgtcgccggttcgttcgtcaccgacaagagccagagcaaggtcgccgacgccaccggcttcgccttcgccccccgggaagtcaccgacaagggcgcctcctggctgtattcctgggccctggcgattcccgccagctcgcgcgccaaggacgcggcgaaggccttcgccacctgggccacctcgcaggcgtacggcaagctggtggcggacagggaaggcgtggccaacgtgccgcccggcacccgcgcctcgacctacagcgaggcctacctggccgccgcgccgttcgcgcgggtcaccctggaatcgctgaagcgcgtcgatcccaaccatccgacgctgaagccggtgccctatgtcggcatccagttggtcaccatccccgagttccaggccatcggcacccaggtcggcaagctgttctccgccgccctcaccgggcagatgagcagcgaccaggcgctcgccgccgcgcagcagagcaccgcccgcgagatgaagcgcgccggctatccgaagtag

SEQ ID NO: 365149 - DNA, 933 bp, Pseudomonas aeruginosa
atgaacacctcggccctcgataccccgctcccggcccgttccgcccgccgccgtctccagcgccgccggcgcggccctggctggctcctggtcagcccctcggtggcgctgctgctgttgtggatgatcgtgcccctgggcatgaccctgtatttctcgctgatccgctacaacctgctgtatcccggcgagaatgccttcgtcggcctggagaacttcaccttcttcgtcaccgacgccggcttcctgcccggcgcgctgaataccctgctgctggtgggcagcgtgctggcgatcagcgtggcgttcggcgtgctcatcgccgcgctgctggaggccggcgagttcttcggccgcggcgcggtgcgggtgttgctgatctcgccgttcttcatcatgccgacggtgagcgcgctgctctggaagaacctgatcttccacccggtctcgggcatcctcgccgccgtctggcgcctgttcggcgccgagccggtggattggctggcgcactatccgctgctgtcgatcatcctcatcgtctcctggcaatggctgcccttcgccatcctgatcctgatgaccgccatgcagtccctcgaccaggagcagaaggaggctgcccgcctcgacggcgccggtccgctggcgattttctggcacctgaccctgccgcacctggcgcggcccatcgcggtggtgctgatgatcgagacgatcttcctgctctcggtgttcgccgagatcttcaccaccaccagcggcggccccggctacgaatcgaccaacctcgcctacctgatctacaaccaggcgctgctgcagttcgatgtcggcatggcctcggccgggggcctgatcgcggtgctgatcgccaatatcgccgccatcgtgctggtgcggatgatcggcaagaaccttaccgagcgcagctga

SEQ ID NO: 365150 - DNA, 834 bp, Pseudomonas aeruginosa
atgctgacactcaagcaatcccgccgcctgcgcaatgccctgctcggcctgctctgctggggcatcgccctgctgctgttcttcccgatcttctggatgctgctgaccagcttcaagagcgagatcgacgccttcgccacgccgccgcagttcatcttccagccgaccctggagaactacctgcacatcaacgagcgcagcgactacttcgcctacgcctggaactcgttgctgatctcctcctcggcgactctcctgtgcatgctcgtcgcggtgccggcggcctactccatggccttcttcgagacccgccacaccaagcgcacgctgctctggatgctgtcgaccaagatgcttccgccggtcggcgtactgatgccgatctacctgctggccaagcagttcggcctgctcgattcgcggctggcgctgatcatcgtctacaccctgatcaacctgccgatcgtggtctggatggtgtacacctacttcaaggacatccccgtggacatcctcgaagcagcgcgcctggacggcgccggcacctggcaggagatcgtccgcgtactgctgccgatcgcccgcggcgggctcgcctcgaccctgctgctgtcgctgatcctgtgttggaacgaggccttctggtcgctcaacctgacctcctcgaccgccgccccgctgaccgccctggtcgcctcctattccagccccgaaggactgttctgggccaagctctcggccgtctccactctcgcctgcgcgccgatcctggtcttcggctggatcagccagaagcagctggtacgcggcctttccttcggcgccgtgaaatga

SEQ ID NO: 365151 - DNA, 1113 bp, Pseudomonas aeruginosa
atggctgatctcaagatccgcaacctgcagaaaggcttcgacggccaggccatcatcaagggcatcgacctcgacgtccgcgaccgcgagttcgtagtcttcgtcggcccctccggctgcggcaagtcgaccctgctgcgcctgatcgccggcctcgaagaggccagcggcggcagcatcgccctcgacggcacggacatcaccgacaccccgccggcgaaacgcgacctggcgatggtcttccagacctacgcgctgtacccgcacatgacggtgcgcaggaacctctccttcgcccttgacctggccggcgtcgacaagcgcgaggtcgccgccaaggtcgacgccgccgcacgcatcctcgaactgcaagcgctgctggagcgcaagccgcgccagctctccggcggccaacggcagcgggtggcgatcggccgggcgatcgtgcgcaacccgaagatattcctcttcgacgaaccgctgtccaacctcgacgccgccctgcgcgtgcagatgcgcctggaactggcgcggctgcaccaggaactggcggcgaccatgatctacgtgacccatgaccaggtcgaggcgatgaccctggcggacaaggtcgtggtgctcaacggcgggcgcgtcgagcaggtcggctcgccgctggagctttaccaccatccggccaacctgttcgtcgccggcttcctcggcacgccgaagatgggcttcctgcgcggccatctcagccgcaaccagggcgagcgctgcgaggtcgccctcgaatgcggcgcgcgcgtcggcctgccgctatgcgccggcgagctggccaccggcagccccgtgaccctcggcatccgcccggaacacctgaacatcgcccgcccgggccatgccttccagggcctgctgcgggtcgccgccgacgtcagcgagcgcctgggcagcgacagcttctgccatgtccgcgccgactcgggggaaatgctcaccctgcgcgtgcgcggcgatttcgcaccggactacggcgcccccctggagctgggcttcgatccggcgcactgccacctgttcgacagcaacggccaggccctcgacaaacgactgcaacaggcggcctga

SEQ ID NO: 365152 - DNA, 1476 bp, Pseudomonas aeruginosa
atgaaactcaaccggcagcacctccccctgctggcgaccgctgtcgcccgcccgtcctacgaccccgcgcaactgcgccagggcatcgtccacatcggcgtcggcggcttccaccgcgcgcaccaggcggcctacaccgacgccctgatgaaccgcggcgaagccctcgactgggcgatctgcggcgccggcctgcgcagcgacgaccgcgccatgcacgacgccctggccgcccaggactacctctacaccctctacgagctgggcgaccaaccggacaccgaggtccgcgtgatcggcgccatcagcggcatgctgctcgccgaggacggcgccgaggcgctgctggaaaaacttgccgagccggccatccgcatcgtctcgctgaccatcaccgaaggcggctactgcatcgacgatggcagcggcgagttcctcgccgagttgccgctggtgcgccacgacctggccaacccgcggaccccgcgcggggtcttcggctttctctgcgaggctctgcggcggcgccgcgacacaggcgtgccggcgttcaccgtgatgtcctgcgacaacctcccgcataacggcgaggtggcgcgcaaggcgctgctggccttcgccgaacggctcgacccggggctggcgcgctggatcgcgacgcaagtcagctttcccaacgccatggtcgaccgcatcaccccgatgaccagccccgcccaccgccgccaactggcccaacggcacgacgtggaagacgcctggccggtggtctgcgaacccttcgtgcaatgggtgctggaagatcgtttcagcgctgggcgcccagcctgggaaaaggtcggcgtgcagttcaccgacgacgtcacgccctacgaggagatgaagatcggcctgctcaacggcagccacctggcgctcacctacctgggcttcctgcgcggctaccgcttcgtccacgagaccctcggcgacccgctgctgcgtcgctacgtgcgggccttcatggaccgcgacgtggccccgctgctggcaccggtaccggggatcgacctggaacgctacaaggacagcctggtcgagcgcttcgccaaccgcgccatcgccgaccaactggaacgggtctgctcggacggctcgtcgaagtttcccaagttcatcgtccccaccgccaatcggctgatcgccgccggccggccgctggaacgggtggccctggtggtggcggcctgggcgctgtacctgggcggggtcgacgagcatggcgaacgctacccgattcccgatccgcgcgccgccgaatgccaggcgctggttgccgaacgccacggcctgggccggcgcctgctcggcgtggagaccgtgttcggcccggcgatcccggcctcggcggccttcgtcgaggccttcgagcggctctacgacagcctgcgccgacacggcgtcagcgaaaccctgcgccaggtactcggcgaatga

SEQ ID NO: 365153 - DNA, 1491 bp, Pseudomonas aeruginosa
atgcacggattgttcctcggcatcgattgcggcacccagggtagcaaggcgctgctgctcgacgccggcagcggccgcacgctgggcctgggcagcgccgcgcagcgcccgccggaaggccgcgacggacgccgcgagcaggacccggcggactggctggaagccatggccagcgcggtacgcatggccctggaagaagccgcggtggacggccgcgaggtccgcgccctggcggtttccgcccagcagcatgggctgctcctgctcgacgccgagggccgggcgctgcgcccggccaagctctggtgcgacaccgagagcgcggcggagaaccgcgagctgctggaagccctcggcggcccggccggctcgctggaacgcctggggctggtgctcgcgccgggctacacgctgtccaagctgctctggagcaggcgccgctttcccgagctgttcgcccgcgtcgcgcacatcctcctgccccacgactacctcaaccactggctcaccggccgcgtctgcagcgaagcgggagacgcctccggcagcggctacttcgacgtgcgccggcgcacctgggccagcgacgtgctggagctggtcgagccgggcggacgcctggcggcggcgctgccggagctgatcgagcccggcgcctgcatcggcaacctgcgccccgaagcggccgccgccctcggcctggctccccacacgcgggtcgcctgcggcggcggcgacaacatgctcgccgccatcggcaccggcaacatccgccccggcctgctcaccgccagcctgggcacctccggcaccctgagcgcctatgccgagcggccgctggtcagtccgcacggcgagctggcgaccttctgcgcctcgtccggcggttggctgccgctggcctgcacgatgaacctcaccggcgcctgcggcctggtacaggacctgctgcacctcgacctcgacgaattctcccggctggccgcccaggcgccggtcggcgccgagggtctgctgatgctgccgttcttcgacggcgagcgggttccggcgctaccgcacgccagcgccagcctgcatggcatgaccgcggccaacctgagccgcgccaatctttgccgggcggtgctcgaaggcaccgccttcggcctgcgctacggcctcgacctgctgcgcgccagcggcctgccgggcgaggaaatccgcctggtcggcggcgcggcgaagaacccgctgtggcggcggacgctcgccgacctgctcggcctgccgctggtctgtccgcggcagaccgaggccgccgcccttggcgcggcgctccaggcggcctggagcctgggccgcgaaagcggcgccggtgaaagcctggaagccctgtgccggcgctgcgtggcgctcgacgagtcgacccgcacccagccccaggcgcgacaacaggcggcctacgaacaggcctaccggcgttacctggagcacctgcctccgcgataa

SEQ ID NO: 365154 - DNA, 933 bp, Pseudomonas aeruginosa
atgtacctggtgtgtggcgaggcccttttcgatgtcttcagcctggaaagcgctgcgcgcagcaacgagctgggcttcaccgcgatcgccggcggctcgccgttcaacgtcgccgtcggcctgcgccggctgggcgtggaggcggcgctgttcggcgggctgtccagcgactacctgggcacgcggctgcgccgggtgctcgaagaagaaggcgtggactgcggcttcctggtgcccagcgacgccccgaccaccctggcgatggtcggcctcgacgccagcggctcggcgcaataccagttccgcggcgacggctgcgccgaccgccaggtgcgcctggaacacctgccgacgctggatgggcggatacgcggtttgcacgtcggctcctataccctggtggtgacaccggtggccgacaccctgctggcgctggtccggcgcgagagcggccggcgcctggtcagcctggatcccaacgtgcgcctcgacccgcagccggacatcgacctctggcggcgccgggtcgaggccttcgccagtcatgcgcacctgatcaaggccagcgaggaagacctggccctgctctaccccggccgcgaccccggcgaggtggcccgcggctggctgaacccgcgctgccggctggtcttcgtcacccacggcggggccggcgccagcgtgcactgcacccacggcagctggagtcgcccggcggataccgccctgccactgcgcgatacggtcggcgccggcgataccttccaggcggcgaccctcgcctacctccgccgcctcgacgccgacagcccggccgggctagccgcgctgtcgcgggaagagatcgacgcgatgctcgccttcgccatccgcgcggcggcggtcacctgctcgcgggtggggccggacctgccgttcgcccacgagctttga

SEQ ID NO: 365155 - DNA, 1236 bp, Pseudomonas aeruginosa
atgcagagcgctaacgcttcagaactcaccaccgacatcgccgtgatcggcggcggcgcggccggcatcggcgtgatcgccagcctgctgaaacgttcgccggggttgcgtatcagcctgatcgagccggcggacacccactactaccaaccgggctggaccctggtcggtggcggcgcctacgcacagggcgacaccgcgcggccgatggccgggctggtcccgcccggcgtggagtggttgcgcacccgcgtcgagcgggtcgaccccgaggcgcgccgactgttgctggagggcggcgacagcctggaataccgcaacctgatcgtctgccccggcctgcgcctggcctgggagcgcatcgagggcctggaggagaccctggggcgcaacggcgtcacctccaactaccgctacgacctggcgccctacacctgggagctggtgcgcggcctgcgcggcggcaaggcgctgttcacccagccggcgatgccgatcaagtgcgccggggcgccgcagaaagccatgtacctgtcctgcgaccactggctgcgggagggcgtgctgcaggacatcgaggtcgagttcgacctggccggcgcggcgttgttcggtgtcgccgatttcgttccgccgctgatggagtacgtgcgcaagtattcggccgagctggcgttcaattccaacctggtgaaggtcgacggcgcggcgcgcaaggcctggttcgaggtgaaggacgccgacggcaacaccaatctggcggaaaaggacttcgacctgctgcacgtggtgccgccgcagctgccgccgaccttcgtcgccgccagcggcctgggcgacgcggccggctggtgcgaagtcgacccggcgaccctgcaacatgtccgccatggcgagatcttcgccctcggcgatgtctgcggcaccgccaacgcgaagaccgcggcggcggcgcgcaagcagatcgtggtggtggccgagaaccttctcggcctgcgcagcggccgtggcctgccgctgcgctacgacggctacggcggttgtccgctgaccgtcgagcgcggccgggtggtgctggcggagttcggctatgccggcaagctgctgccgaccttcccgctggagcccaccgcggccagccgcttcgcctggctgctcaagcgccacgtactgccctgggtgtactggaacgccatgctcaagggccgggagtggctggcgcggccggggcgctag

SEQ ID NO: 365156 - DNA, 1236 bp, Pseudomonas aeruginosa
atgaccgacgaaaccgcacccaaggatcttcgtgaccaggcgccccggctactcccggcacgcctcatcgagaacgacgcccaggcgttgcaggccgcccacgaggtagccggactggcccgtcgcgaagcggcgctacgcgaccgcgaacgacgcctgccctggcaggaactggaactcttcacccgcctcggcctgggcggcatcggcattccccgcgcccatggcggcgcgcaggtttcccatgtgaccctggccgaggtgttccgtgtcatctgtgccgccgacccggccctcggacagattccgcagaaccagttcggcctgctcagcgtgatcgacaacgtcgccagcccggcgcagaaacgcaagctgttccgtggcatcctcgacggccgccggctggccaacgccggcccggagcgcaatacccgccacaccctggagctgaaggcgcgggtccgtcgcgacggcgacggctaccgggtcagcggcgagaagttctactccaccggcgccttgttcgcccactgggtggcggtcaaggccatcgacgaggaagagcgcgcggtgatgctcttcgtcgagcgcggcgctcccggcctgcgcatcgtcgacgactggtccggcttcggccagcgcaccaccgccagcggcacggtactgctggacgaggttccggtagccggcgacatgctgatccacaacggcctgctggccgagatcccgagcctccagggcgccgtctcgcaactgatccaggccgccatcgacgccggcatcgcccaggcggcgctggacgacgcccaggctttcgtccgcgaacgcagccggccctggatcgacgcccaggtcgaacgcgccagcgatgagctctacagcatcgccgaggtcggccgcctgcaaatcgagctgcacgctgccaacgccctgctggagaaggccggccaggtcctcgacgaagtggccgcgcggccggtggacgccgagtcggcggcacgcgcctcgatcgccgtggccgaggccaaggtgctgagcaccgagatcagcctggccgccagcgagaagctcttcgaactggccggcagccgtgccacgctcgccgagttcaacctcgaccggcactggcgcaacgcccgcacccataccctgcacgacccggtgcgctggaaagtccacgcggtcggcgactactacctgaacggcgcccgtccggcgcgtcactcatggatctga

SEQ ID NO: 365157 - DNA, 1218 bp, Pseudomonas aeruginosa
atgagcctcgcacacgctacgcgcgacaatcccacggccgctgcccatcgcatcggcagcgacgacgaagccctggaaacggcccgcgagctggccgccctgttcgcccgcgaaagcatccagcgcgaccgcgagcggcgcctgccgctggaagaactggaactgttctcccgctccggcctgtggggcatcgcggtgccccgcgaatacggcggggccggcgtctcgcgggtgaccctggcgaaggtggtggcgatcgtcagcgccgccgacagttccctggggcagattccgcagaaccatttctacgccctcgaagtgctgcgggtgaacggctcgccggcgcagaaaggtcgcctgttcggcgccgccctggccggcgagcgtttcggcaacgccctggccgagatcggcacgcgtaccgccagcgagcgccgcacccgcctgcgcgccgacggcgacggctaccgcctggacgggcgcaagttctactgcaccggcgcactctacgcgcagcgggtgccgaccctggcggtagacgacgagggccgccagcaactggccttcgtcccgcgcgacagcgccgggctggaaatcgtcgacgactggtccggcttcggtcaacgcaccaccggcagcggttcggcgctgttcgaccgggtagcggtggccgccgaggacgtggtctcgttccaggatgccttcgagcgcccgaccaccgtcggcccgctggcacagatcctccacgcggcgatcgacgccgggatcgcccgcggcgccttcgaggacaccctgcgtttcgtccgcgagcgcgcccggccctgggtcgactccggcgtcgacaaggccagcgacgacccactgaccatccatgagatcggccgcctggcgatccgcctgcacgccgccgaagcgctgctggagcgtgccgggcgggtgctcgaccgggccaccgccgagccggacgcggaaagcgtggcggccgcctcgatcgccgtcgccgaagcccgcgcgctgaccaccgaggtcgccctgctggccggcagcaagctgatcgagcttggcggcagccgcgcctgtctcgccgaactcggtctcgaccgccactggcgcaacgcccgcgtacacaccctgcacgacccggtgcgctggaagtaccacgcggtcggcgactactacctcaacggccgcctgccgccacgccgcggcacgctctga

SEQ ID NO: 365158 - DNA, 1389 bp, Pseudomonas aeruginosa
atgagcaagaagcagattctcctaaacgccttcagcatgaattgcgtcggccatatcaaccacggcctctggacccacccgcgcgaccgctccagcgactaccgcaaactgcgccactggaccgagctggcccggctgctggagcgcggcctgttcgacggcctgttcatcgccgatatcctcggcgtctacgacgtctaccagggcggcatcgaggtgaccgcccgcgaagccgtccagttgccggtgaacgacccgctgatgctggtctcggccatggccggggtcaccgagcacctgggtttcggcgtcaccgccaacctcacctacgaggcgccctacccgttcgcccggcggctctcgaccctcgaccacctgagcgacgggcggatcggctggaacatcgtcaccggctacctggaaagcgcggccaaggccatgggccagtccgcgcagatcgagcacgaccgccgctacgaccgcgccgacgagtacctggaggtcctctacaagctctgggagggcagctgggaagacgacgcggtgctcgccgaccgccagcgacgggtctacgcgcggccggagaagatccacaagatccgccaccatggcgagttctaccaggtcgagggctaccacctcgccgagccctctccacagcgcaccccggtgctgttccaggccggctcctcggagcgtggcctggccttcgccgcgcgccacgccgaatgcgtgttcgtctccggacagacccgcgaggccacccgccaactggtgcagcgcatccgcgcggcggtggtcggcgccggccgtcgcgccgaggacatcaggatcttcatgggcatcaacgtgatcgtcgccgccaccgcggccgaggcccgcgacaagcatgccgagtaccgccgctacgccagccccgaggccggcctggcgcacttcgccagctccagcggcatcgacctgtcgcgctacggactcgacgagccgatccgctacgagaagaacaacgccatcgagtcggtggtgaagaacctcaccgtggcgcgcaccgactccaccgtgcgcaagctcctcgaccagttggccctgggcggccgctacgtgaccctggtaggcgacccgcgccaggtcgccgacgacctcgaaggctggatcgccgataccggcctggacggcttcaacctgacccgcaccgtggagccggagagctacgccgacttcatcgacctggtggtgcccgagttgcaggcacgcggcagctacaagaccgcctacgctcccggcaccctgcgggagaagctcttcggcggcggccgcgcgcgcctgcaggcggaacacgccggcgccgccttccgccagcccccggccgcgcgccagcgccaggcctga

SEQ ID NO: 365159 - DNA, 795 bp, Pseudomonas aeruginosa
atgctgaacaccctgaaaaccctgagcctggccgtcctcctcggcagcggcccggcccaggccgccgacgccccgctgaagatcggcaccaccgccgccttcgccccgccgctggaagtcgccgtgagcgaagccggcaagcagggactgaaggtcgaactggtcgagttcagcgactggaacgcccccaacatcaccctcgcccagggcgacatcgacgccaactacttccagcacgtgcccttcctggaaaacgccaaccgcgaaggcggcttccagttgaagccgttcgcgccggggatcatcaacaacgtcgggctctattcgaagcgctacgccagcctcgcagagttgccggaaggcgccagcgtggccatcgccaacgacccgatcaatggcggccgcggcctgcaactgctacagaaggccggcctgctgaagctcagggacggcgtcggctacaacgcgaccctcgacgatatcgtcgacaacccgaaggacatccgcatcaccgagctggaggcggtgcaactggcgcgcgccctcgacgatttcgacctggcccagggttacccgcactacctgcgcctggccgggaccatcgacccgacccgggcactgctgttcgacgggatcgacaaccgggaatacgtgatccagttcgtcacccgcggcgactatcaggaccgcgatggccgcctggcgcacttcgtcgacatctaccagcattcaccggtggtccgcgccgcgctggacaaggcccatggcacgctgtaccagccgggctgggagtga

SEQ ID NO: 365160 - DNA, 1101 bp, Pseudomonas aeruginosa
atgaccgttcccccgagcctgctgcccctcgaaccgttcccgacggcgcccgacacgcgcacctccacgccgcacatccgtctccacggcctgggcaagcgctaccccggtggagtccaggccctgcgggagatcgacctggaaatccgccgcggcgaagtgttcggcatcatcggccgcagcggcgccggaaagtcctcgctgatccgcaccctcaatcgcctggagcgtcccagcgaggggcaggtgctgatcgacgacgaagacatcggcggctacgacggccagcgcctggtcgccctgcgccgacgcatcggcatgatcttccagcacttcaacctgatgtcggccaagaccgtgtggcagaacatcgccctgccgctgcgggtggccggggtgccccgggcacggatcgaggagcgggtcgccgggctgctgcaactggtcggcctggaggaaaaacgcgacgcctatccggcgcagctctccggcgggcagaaacagcgcgtcggcatcgcccgcgcgctggtgcaccagccgcagatactgctctgcgacgaagccacctcggcgctggacccggagagcacccaggcgatcctcgcgctgctgcgcgacatcaaccgccggctgggcctgaccatcgtcctgatcacccacgagatggcggtcatccgcgagatctgcgaccgcgtggtggtcctcgaatgcggccgcatcgtcgaacagggcgaagtctgggaagtcttcggcgatccgcgccatgccgtcacccgaagcctgctcggcagcctgcgcgccgccctcccggccgacctccaggcgcgcctgcgccaggctgccggcgccggcgacccggtgctgctcgatctccagtacaccggcgccagccgacgggtgccggacctgctggccatcgccagggccatcggccagcgcgtcgacctgctccacggcggcatagagcgtatccagggccgcgccctggggcgcctgctgctacaggtcggcgcgccgcccggcgagcttcccggcgtgctggccaaggccgcgctggtggcggacaaggtggaggtgctcggccatgtcgcccatgcttga

SEQ ID NO: 365161 - DNA, 654 bp, Pseudomonas aeruginosa; identical to SEQ ID NO: 323855

SEQ ID NO: 365162 - DNA, 1128 bp, Pseudomonas aeruginosa
atgcggcaaagattctggcaaggaacattcaagaccctgggcctcctcggcctgacggcggggctcgccgcccaggccgcggagccgtccggcaaggccctcagcgccgccgccggcgtgccctggccggcggtcatcgcccaccgcggcgcctcgtacgacgcccccgaggaaaccgccgcggcctacctgctggcccgcgacctcggcgccgactatctggaagccgacgtgcagcgcagccgcgacggcgtgctggtcgccctccacgacgacaccctggagcgcaccaccgacgtcgccgaggtcttcccggagcgcgccaaggacccggtgagcagcttcactctcgccgaactcaagcgcctggacgccggctcctggttcaatcgcgccttccccgagcgcgcccggcccggcttcgtcggcctgcgcatcctcaccctcgacgagatgctcgacatcgccgagggcggcgccaacaagccgggcctgtacctggagaccaaggtaccggcgcaattccccggcatcgaagacgacctgcgcaagctgctggaacgccgcggctggctgcaaccccgcgagcgcgccgccgccgggcatgtcgatgtggcccacggcaatggccgggtgatcctgcagaccttcgagaagagcagcctggaactgctgcaagaaagcatgccgcaagtgccgaagattctcctgctgtggctcggcgacggttacctggaagcccgttcgccagtgaccttcaaggaatccggggaaaccgacaaggcggccttctatgccaggcaggaagtgaagtccgaagccgagttcggcgcctggctggactgggccaaggcccacggcgcgctgggcaccgggccctcggcgaccctcagcgaacgcggcgaacagagctacgccgacctggtgaaaccctggatgaaccgcatgacccacgcgcgcgggttgttcatccatgcctactcggtggactcggcggaagacttcaaggccctaggcgcggccggcgtcgacggtttcttcaccaaccgcacctcggaactgctgaagttccagggccgcccggcggcgcaagacatggacgcgctgctgcgccggcacggctactga

SEQ ID NO: 365163 - DNA, 1155 bp, Pseudomonas aeruginosa
atgcccgatacctctcccgatctgccggccatgtcgccgctcgccgtctatcgccaggccgtggaacagcgcggtttcgctcccgacgaggcgcagcggcgcgccgccgaggcgctggagcgttgtttccaggccctgcatgaagctcaccgccacggcgcgatccagggcgtctacctgtggggaccggtaggacgcggcaagacctggctgatggatcacttctaccagtgcctgcgcgtgcccgcgcggcgccagcacttccaccacttcatgcaatgggtgcaccagcgccagttcgaactgaccggtacagccgacccgttgcgcgccctggcccgcgagttggcgcgggacgtgcgggtgctgtgcttcgacgagctgttcgtcagcgatatcggcgatgccatcctgctcggcagcctgctgcgcatcatgttcgaggagggcgtggtgctggtggccacttccaaccagccaccggagcagttgtacgccgacggtttcaaccgcgaacgcttcctcccggcgatcgaggcgatccagcggcacatggcggtggtcgcggtggatggcggccaggaccaccgcctgcatcccggccgggccgagcaacgctactgggtggtggaggcggggcaggcgagcggtttcgccgaactcttcgcgcgcctgagtgccggcgaagcggcatccacgcagcccatcgaactggggcaccgcccgctggcggtgcaccggcacagcgaatcggtgctctggtgcagctatgcgcagctctgcgaggcgccgctgtcggcgctggacttcatccgcctttgcgaccgctaccgggcgatcctgatggacgacctgccgtgcctgagcgccagccagcgcgaaggccgcatagcccgtggcaccgaggacggcgcgcaactggtggaggcgggggatcgcgaattgccgcagttgtcggtgcacgacgacggcgtgcggcgcttcatcgccctggtggacgaatgctacgaccgcaaggtgccgctctacctggaggccagggtgccgttggaggcactttataccgagggctacctggccttcgccttccgtcgcaccctcagccggctgcgcgagatgcagctggcacgcttcggcagcgacagcgccggctag

SEQ ID NO: 365164 - DNA, 1131 bp, Pseudomonas aeruginosa
atgaacgcttctacccgtactcccgaccggctgctgacgctgccacgttcgccgaacctggcgacctcgatccgcgccaccgcccaggtcttcgaggatccgaagtcccaggccctgctcgaacacctgcgccaggtggcgccgagcgaggccagcgtgctggtgatcggcgagaccggcaccggcaaggaactggtggcgcggcatatccacaacctcagcgcgcggcgcaacggcccgttcgtggcggtcaactgcggggccttctccgagtcactggtggaagccgagctgttcggccacgagaagggcgccttcaccggcgccctggcggccaaggccggctggttcgaggaggccaacggcggcaccctgttcctcgacgagatcggcgacctgccgatgccgatccaggtcaagttgctgcgcgtgttgcaggagcgcgaggtggtgcgcctggggtcgcgcaagagcatccccatcgacgtgcgcgtgctggcggcgaccaacgtgcaactggagcgggcgatcaatgccgggcacttccgcgaggacctgtactaccggctcaatgtcgtcagtctcgaactgtcgccgttgcgcgagcgacccggcgacatcctgccgctgacccgccacttcatcgccgaatacagccgtcgcctgggctacggccagagccagttgagcccggaggcggcgcagaagttgcgtgcctattcctggccggggaacatccgcgagctggagaacgtcatccaccataccttgctgatctgccgcgacgggctgatccgcgcggatgacctgcacctgtccaacctgcgcctggagcgtggcgaggagctggcgcgcgggggcccggcgagcggcgccgccgagcacttgttgcagcaggctttccagcgtctgttcgaagagcagggcgagaacctccatgggcgggtcgaagatgccctactgcgcgcggcgtaccgtttctgccacggcaaccaggtgcataccgccaacctgctgggactcagccgcaacgtcacgcgcacgcggctgatcgccatcggcgaactggtggtgaacaagcgcggtggtcagcggatcgatggcgagcgggcggtgcggttgtcgatctga

SEQ ID NO: 365165 - DNA, 1185 bp, Pseudomonas aeruginosa
gtgaatgcgaagacccgccccgaggcgcaaacgccgttgcagatcgcccggcgcctggccgccgatttcgccgagaacgccgccgagcgcgacgttgccggcggtaccccgaaggccgagcgcgacgcgttgcgccgcagcggcctgttgtcgctgatcatcccgcgcgaatacggcggcctgggggcgagctggagcgaaaccctgcaaaccgtgcgcgaactggcccgggtcgacagctcgatcgcccacgtctatggcttccagcacctgatgctggccaccgtgcgcctgttctcgcggcccgagcaatggcagccgtggttcgagctgaccgcgcgcaaccgctggttctggggcaacgcgctgaacccgctggacaaccgtaccgtggcccggcgcttcgacggctggcgcgagttctccgggaagaagagcttctgctccggcgcccgcgattcggagatgctcatcgcctcggcactggacggcgagggcggggcgctgctgattgccgccatccccaccgcgcgcagcggtatcagcctgggccaggattgggacaacatgggccagcggcagaccgacagcggcagcgcgatcttcgagcgggtgcgggtggaggagagcgagttgctgctcgatcccgggccgctgagcacgccgttcgcctgcctgcggccgctgatcgcccagttgatcttcaccgaggtgttcctcggcatcgccgaaggcgccttcgaggaggctcgccagtacacccggcgcgaagcgcgaccgtggttccgctccgaggtcgccgaggccaatgccgacccctatgtgctggcgcgctacggcgaattctgggtcggcctggaaagcacccgggcgctggtcgagcgcgccgcgcagcgcctcgacgccgcctggtccaagggcccggcgctggacgccagcgagcgcggccagttggccctggccatcgccgccgccaaggtcgccgcgacgcgcaacggcctcgacctgtgcaaccgcatgttcgaagtcaccggcgcccgctccactcacgccgccctgcgcctggaccgctactggcgcaacctgcgcacccagaccctgcacgacccgctggactacaagatccgcgagctgggcgactgggcgctgaaccagacaccgccgcaaccgaccttctactcatga

SEQ ID NO: 365166 - DNA, 1146 bp, Pseudomonas aeruginosa
atgaacgtgttctggttcctcccgacccacggcgatggccacttcctcggcaccagccagggcgcgcggccggtctcgctgccttacctgaagcaggtggcacaggcggccgacagccttggctatcacggcgtgctgatccccaccggacgctcctgcgaggactcctgggtggtggcctcggcgctggcgccgctgaccgagcgcctgcgcttcctggtggcgatccgtccgggaatcgtttcgccgaccgtctcggcgcggatggcggcgaccctcgaccgcctgtccggcgggcgcctgctgatcaacgtggtcaccggcggcgatcccgacgagaaccgcggcgacggcatccatctcggccacgccgagcgctacgaggtcaccgacgagttccttcgggtctggcggcgcgtcctgcagggcgaggcggtggacttccacggcaagcacatccacgtggagaacgccaaggcgctctatccgccgctgcaacggccgtatccgccgctgtacttcggcggttcctcggaggccgcccacgaactggccggcgaacaggtggacgtctacctgacctggggcgagccgttgccggcggtggcggcgaaaatcgccgacgtgcgccagcgagcggctcgccatgggcgtacggtgaagttcggcatccgcctgcatgtgatcgtccgcgaaaccgccgaagaagcctggcgcgccgcggacaggctgatcgaacacatctccgacgagaccatcgccgccgcgcagcagtccttcgcccgtttcgactccgaaggccagcgacgcatggccgcgctgcacggcggccgccgcgatcgcctggagatccagccgaacctctgggccggggtcggcctggtgcgcggcggcgccggcaccgcgctggtcggcgatccgcggcaggtggcggagcgcatcggggaatacgccgagctcggcatcgacagcttcatcttctccggctatccgcacctggaagaggcttaccgcttcgccgaactggtcttcccgctgctgcccgaaccctacgccagcctggccggccgtgggctgaccaacctgaccgggccgttcggcgaaatgatcgccaacgacgtgctgccggctcgcgccggcgcttga

SEQ ID NO: 365167 - DNA, 561 bp, Pseudomonas aeruginosa
atgaccagccccttcaaagtcgtcgccgtctccggcggcacctatcgcccgtcccgcaccctggtactcacccaggccctgatcgccgagcttggccagtcgctgccgatcgacagccgagtcatcgagctgaccgacatcgccgcgccgctgggcgctaccctggcgcgcaaccaggcgccggcggaactgcaggcggtgctcgacgagatcgaaagcgctgacctgctgctggtcgcctcgccggtctaccgtggctcctatccgggcctgctcaagcacctgttcgacctgatcgacctcaacgccttgatcgacaccccggtgctgctcgccgccactggcggcaccgagcgccacgcgctggtcctcgaccaccagttgcgcccgctgttcagcttcttccaggcgatcaccctgcccatcggggtctacgccagcgaggccgacttcgacaactaccggatcgtcagcgagccgctgaaggcgcgcatccgcctcgccgccgagcgcgccgcgccgctgttcggcggacgctccgaactgttgaagatcgcctga

SEQ ID NO: 365168 - DNA, 267 bp, Pseudomonas aeruginosa; identical to SEQ ID NO: 360743

SEQ ID NO: 365169 - DNA, 1086 bp, Pseudomonas aeruginosa
atgtccgtcatcacccatccccacgcccgcgagctgaccaaatcggtgcgcgccaccgtgctggtgttcaacgacccccgttcccgcgagctgctggagcgcatcgagcgcctggcgcccagcgaggccaacgcgctggtcatcggcgagaccggcaccggcaaggagctggtggcgcgccatatccatgccctcagcggacgcagcggcggcccgttcgtcgcggtcaactgcggtgcattcgccgagagcctggtggagagcgagctgttcggccacgagaagggcgcctttaccggtgcgttgcagagcaaggccggctggttcgaggcggccaacggcggcaccttgttcctcgacgagatcggcgacctgccgccgagcatccaggtcaagctgctgcgcgtgctgcaggagcgcgaggtggtgcggctcggttcgcgccggccgatccccatcgacgtgcggctggtggcggcgaccaacgttgacctggccgacgcggtggtcgccggacacttccgcgaggacctgttctaccgcctgcacgtggcgaccatccaactgccgccgttgcgcgagcgccgcggcgatatcctgccgctggccgagtacttcatcgtcgagcactgccggcgcctcggctacaccagcgcgagcctgagcccggaagccgagcgcaagctgctcgggcattcctgggcgggcaatatccgcgagctggagaacgccatccaccacgcgctgctggtctgccgcaaccgtctgatccagccggccgacctgcacctcatcgacatgcgtgcgcgccaggagccgaacggcttgcgccgcgctcccgaaagcgccgccggctcggcgctggaagcggcgctgcaggcgctgttcgaggaaaaccgcgaggatctctacgagcacatcgaggaaaccgtgttccgtgccgcctatcgcttctgccacggcaaccagttgcagaccggacgcctgctggggatcagccgcaacatcgtgcgcgcccgcctggagaagatcggcgagctggaaacctcgccacgacacaacgtggtctcgctggtgggcaagtga

SEQ ID NO: 365170 - DNA, 3816 bp, Pseudomonas aeruginosa
atgagcggcgcgaccctgttcatgctggttctcctcctggtgctgctggcgctgctgttgggggcgctgggctggtggtggcgaacccgcggtggtacggagatccgcagcttctacgcggcggtccggcagatggagcgcgagcagggctggcagggccgctacgaagcgccgtggctgctgatgctcggcaacgagaccgagggcgagcagttgtgctccacctggcgtctgctgccggtggcgcgcccggcctggttcggccgctggtggtcggacggcgagggggcgatcctgctggtgcccgagtcggtgttcctgcccgacgagggcctgcgccggcaaagcggcgcctggctgcgcctgttgcgtctgttcctgcgcctgcgcggcaggcgcgcgctggacggggtggtctggaacattccgctggcgcggttgcaggatggcgagcaggcggccaacctcggcctcgccgcgcgccgtcgctacgtggaactgacccagcgccttggcctgagcctgccggtttacgtggtgatcactggcctggaagacctgcctggcttccaggaacttctcgcggcgctgcccgaggaggcgcgcgagcgcgccctcggctggtcctcgccgttcgccgccgaagcggcctggcagtcgcgctggtgcgagcaggcgctggaggaaatcaccgccaccctgaccgagtcgatcgtcgaactcggtaccttgcgcggccaggtggacaatgagctgtattgcctgccgccacgcctggaaagcctccgcggttcgttgcaggcgctgctcgaaccggtcttccagggcaacgccaggggcgaggcgccgcgctttcgcggtctctacctgagcggcagcgaggcggcgggcgcggcagccgacgaagtcctgccggcggtcgacgcgccgcgtcggcgcagcagcttcgccagccaactgtgggcacggcggatccttgccgaggaaggcctggcccaggcggtgccgcgcatcctccagctgcgtcagcgctggcagcgcgggatcggcctcgccgcgttgtgcctgtgcctgctctggggcggcctgatgacctgggtctggcgcgacgcgctgcgcgacgccggtgaactgtcgcaactgctgcatggcgccagtgagcgctaccagccgctcgacgaggacactcggcgcgccgcccaggtccggcagaacgtccaggcctggtggcaactggtgtcacaggcgccgcgctggcgcttcacttcgctggcgtttcccagttcctggttttcctccctggatgcacgtatcgacaacgcgtatcgccgcgtttccgagcgcctgctggtgcgaccgctgcgcagcctgctggaaggcgaggcgagcgacctgcgggcgatccgcagcgatggccaacccggcctgaaggagggcgacgaccccagccagtggaaggactacctggcggcgaaggacctggtcgcccgcgccactacgctggagcgccacaatcgcttgttcgcccaggccatcgacaaccgcaggacgccgctcgacgaccttctgcaactgagtaacgatgccttgggcagcagctacaacgccggcagcctggcgcgcctggcctattacaaccgcacgctgttcgccgagcgtccggccgatctcgccgccctcgacctgggccgggtcgccgccacggcggcggataacttccatgacctgatggcacgctggctgaacgcctacttcctcaccgacagcctggaacgcaccggcaatgccctgacccaggaactcgcgcagctcggccaggaacgagacgccacggcggcccagttgctggggatcggcgaattgatcaaccacctgcagcaacaggtcaaccgcatcaacctgatctggggcaatggcgtcggccaggatctcgtccctggctaccagaacctgctcaagagcgcccagcaaagcagcgtgctgggaaaccgcgtggaggaactgcagaacctcaccgtgcagttgcagcagcagtttcgcagcgaatggatcgcgcctccggaggctgccggcgacggcctgctggtgaaacagggggcgacgctcaagctggccgatgacctgctcggtctgaaacgcgccatcgatgacctgaagaccaaggacttcgtctccgtggccctggcggacaagacactggcggaccactccttgctgagcatcgacgatatcggcgtgactcaggcgttgagcttcttcaacgacttcaccggctactacgagagcaccctgccatcgctcaacccgcgctatcgctattcggtcctgcacgccgccgccagcgcggcgaccgaggccatgtggcaaagcctcgggccgcgcagtcgtagcctggccagtcgcaatgcctcgcgtttcgacgtgcaggtcaagcaggtccaggtgttgcaggcggcgctgctggagttgcaggacctgcaggccggcgcgcgcctgctgctcagcctcaacgcgctggccgtggccgatatcggccaggccctgcgcgacatcgacgagcaggcggtgctgcgcgagccggtcgatttcagccgctggtcgggcgcgccgaatttcggcctgcagatgttccgcgcccaggacagtgccgagctgaagcaaagcctgaacagccagttcaatgccatggcggccgtcgccgaacgccacgccccggcgctggagtggttgcaggcgcagcaatccagcctggccaccgccgactacaacgcgttcgtgcgcttcagcgcgctcaacgccgaactgcggaaattcaaggccgacaacccggcgagcaccgcggcgcagttggcgaagctggtgggtaacgatttcaaccagatggacatcggcagttgcgccgacattctcaacggcgtgctcctgccgtccagccgcagcgacctggcgacgcgcctggtggacctgcgccagggcgcgctcgggcgctgccagtcgttgcaacagcagcaggcggcgcaggcctggaaggacctcgccgactacttcaaccagtacctcgccggacgcttcccgttcgcctacagcctggaagcggccgatgccgagccggggcgggtgcggcacctgctgaaactgatggagacgcgcttgccgcaggtgcgcgaagggctggcccaggttcgctcgccggacctgccggccgccgaggacttcgtccgccgcctggagcaggcgcagcgctggctcggcccgctgttcgagcgcgacaagtcgggcctgctcggcgtcgccctggacatcgactggcgcagcgaccgcagcctggaacacggcgccgaccaggtgatcgcctggagcctgtactcgggcgaccaggaaagccgtttccccggcgcgcaggacaagggcctgacctggaatgtcggcgatccgctgaaaatcatgctgcgctgggcgaagaacggctcgcagcgtccggcagacgacccgcgccaggccagcctggcggtggccgacctcgaggccggctggagctaccagggctcctgggcgctgttgcgcatgatgcgcgcgcacttctcccggcagcgcccgccgaacgtcgactacacggagtttccgctggtcctgcaactgccggtgtatgcgccttacagcccggaaaacgaggcgcggatgttcctccgcctgtcgttgatgagcctgggcggcaagaccccgctgtccatccagccgctgccggtgcgcgcgccgcaatcgccgttcgcgacgctgttgccggccaccgtcgccagcaccggaggtaccccatga

SEQ ID NO: 365171 - DNA, 1332 bp, Pseudomonas aeruginosa
atgagtgttctgcctgacgcggtgtgctggcacgaagggatgcaactgcttccccagcatttccagttgcagggattgcgtgccgaggcgctggcggcgcgcatcggacaggcctgcaacccttggttctggggagtcaccgccctggaactggacccctcggcgttgtgcgccggccaagtgcgggtcctgcacctcgaagcgatcctgcccgacggcctgccggtgagcgtgcaggctggtgtcgacgcgccgctggagttcgatctggaaacagcgctggcggccgccgaagggccgctgctgaacgtccacctggcggtcagtccgctgtggcgggcgggtcagttgctgccgctgaagggccgtctgcaatcgcgggtcggcgcgccgctgccggacctggccagcggcgagcaccccgagccgatcaccgtctggcgagcgtcgctgcggctggtcggcgacgacggcaaggccgactccgtgtgcctgccgttgctgcgcgtggcgaaggagggcggcgcctacgtcagcctgccctacgtcccgccgacgccactgatcctgccggagtcgcccctgggcagacgcgtgcagtcactctgcgcgcgggcccgggagaaggcgctgttcctcggcgggcgcctgcgcctggcgcagcaggcgggcaaccaggacgacgcggtggaaatccgtcgccagcttgccgcgctctggacccgcctgccggaggtcgaaggcctgctggcaagccgtgcggcctcgccgctggccctgcacggcagcctgctgggcctggccggtgcctgggcggcgctcgatccgctggccggcgtgccggccttcgaagcgctcgacttcctcgacctgcggcgtggctacgagccgctgctggactggttggagcgcgccatcgagtcgatccgcgcgggctaccgctgcctgccgttcgagcaggaggaacaggtattttccgtgcgcctgcccgatccggcgccgcgtcagcgcctggtggtcggcctgcggatgcccgccggcgccggcgaacaggcggcggctgactggctggagcgcgccatcgtcgcctccgacccgcacctgccgttgctcgcccggcaacgcatgagcgggctgccgcggcagccgatgaatcgccaggaacaggtggcctacagcgttggcgacgacacccgtttgttcgtcgtgcagggtgccggcgactggttcgatgccggccagccgctgcgcatcgtcgcgccggtcagcggggtcgccagcagtccctggcagatcgtgctgttcgtcgccgacggcagcgacaacacctag

SEQ ID NO: 365172 - DNA, 477 bp, Pseudomonas aeruginosa
atgaagcacggatgtttcaccatatgtcggaaactctccctggcgctggcgatcctggcgctggccggctgctcgtatttcttcgcgccacgggtcgagttgcagcggctgaccctggatgtcgccgcgcgcgccaacgacgactcgccgatcgccgtggatttcgtcgcggtgaaggatgcggaactgttcaaggaactggccggactgccggccagccagtggttcgccaatcgcgagcagtaccgccgcgactaccggcagcagttcgcggtgtggagcctggagctggtgccggggcagttcatcgagtcggagtccttccccttgcgcggcgaccgcgcaactggacttttggtcttcgccggctataacacacccggcgcgcaccgcttgcgcctcgaccagcagcagcgcgtctggctgcgtctggatacccgggaaatgcgactggtcaacgatcccgccacgcgctag

SEQ ID NO: 365173 - DNA, 546 bp, Pseudomonas aeruginosa; identical to SEQ ID NO: 321189

SEQ ID NO: 365174 - DNA, 1485 bp, Pseudomonas aeruginosa
atgcccaagtcatccgccgccgaacaatccggcgagagttcgacccagaccctgtccctgctcgacgagatcatcgccaagggccgcatggcccacgacgacagccagcaggactatgcccgcgacatgctcgcggaattcgccacccaggtcctcgacgagggcatggccgtcgacaaggacaccgtggcgatgatcaacgaccgcatcagccagatcgatgcgctgatcagcgaccagctcaaccagatcatccaccaccccgagttgcagaagctggaagcctcctggcgcggcctgcaccaactggtgagcaacaccgagaccagcgcgcggctcaagctgcgcctgctgaacgtcggcaagaacgaactgcagaacgacctggagaaggcggtcgaattcgaccagagcgcactgttcaagaagatctacgaagaggaatacggcaccttcggcggacaccccttcagcctgctgatcggcgacttcaccttcggtcgccatccgcaggacatcggcctgctggagaagctgtcgaacgtcgccgcggctgcccacgcgccgttcatcgccgccgccagcccacgcctgttcgacatgaacagcttcaccgaactggccgtgccacgcgacctgaccaagatcttcgagagcctggagctgatcaagtggcgcgccttccgcgagagcgaggactcgcgctacgtgtcgctggtgctgccgaacttcctcttgcgcctgccctacggcccggagacgcgaccggtggaaggcatgaactatgtcgaggacgtcaacggcaccgaccactccaagtacctctggggcaacgccgcctgggtcctggcgcagcgcatcaccgaggccttcgccaagtacggctggtgcgcggcgatccgcggcgcggaaggcggcggcgcggtcgagggcctaccggcgcacacgttccgcaccaactccggcgacctgtcgctgaagtgcccgaccgaggtggcgatcaccgaccgccgcgagaaggaactcaacgatctcggcttcatttccctgtgccacaagaagaacagcgacgtggcggtgttcttcggcggccagaccaccaacaaggccaggctctacaacaccaacgaggccaacgccaacgcgcgcctgtcggcgatgctgccgtacgtgctggcggcatcgcgcttcgcccactacctgaaggtgatcatgcgcgacaaggtcggcagcttcatgacccgcgacaacgtgcagacctacctgaacaactggatcgccgactacgtgctgatcaacgacaacgcaccgcaggaaatcaaggcgcagtacccgctgcgcgaggcgcgggtagatgtcagcgaggtggccggcaaaccgggggcctaccgcgccacggtgttcctccggccgcacttccagctcgaggaactcagcgcgtcgatccgcctggtcgccaacctgccgccgccggtagcggcgtga

SEQ ID NO: 365175 - DNA, 498 bp, Pseudomonas aeruginosa
atggatgcgatcattctcgatttcggcagcgacatcaaaggcgacagcctgctcgtcggctacgaaaacaagatcgaaatcatgtcctacagccacaacgtggcgatgcaggtcaccaacgacgtcagcaactcggagcgcacctccggcaaaccccacgtcggcgaattcaccctcaccaagttcatcgacacctcgaccccgaccctcaacgagtattgctgcgccggcaagccgatcgccgaggcgaccatcaccatcggccgcaacgccgccgagggcaacgggcagatcatgcccttcatcgtctacaccctgaacaacgtggtgctctccaacgtcagcgtcagcggcggcgccggcggcaagccggtagagaccctgtcgctgaacttcaccaagatcaagtgggagctgaccgcgcagaaggacgacggcaccaaggaaggcacggccgcctcgacctgggacctggccgccaaccagctggtcaagtga

SEQ ID NO: 365176 - DNA, 426 bp, Pseudomonas aeruginosa
atgtccggagccctgccgccgctgttcgagcgcctcagcgccgaggccgacgaacgtcccgcgttcgacgaccgggcgctggccgagtcggtccgcggcgagctgctgcgcctgctcaacacacggcgcccggcgaatgcgcgcagcggcatcctcgcctacgggctcgccgactggaccgccgtgcaacgcctgcgcgccgaggaccggcgccagctggcgcgcgaggtgcgggcggcggtcgagcatttcgagccgcgcctgcaactggccgaggtcgaggtcgaacctgacccgggcaatccgcagcgcctgcgtatccagctcggcggcagcctgcgcagcgggtcgcgcctgacgcctgcgctattcgtcatcgaacagggcagcgatggcctcgaggtgcgccatgagcgattcgattga

SEQ ID NO: 365177 - DNA, 1794 bp, Pseudomonas aeruginosa
atgagcgattcgattgatgccgacctgctcgactactaccagcgcgagctgacctggctacggcacgccggcggcgccttcgccgagcgctatccgaaggtcgcccggcgcctgcaactggctcccggcgaatgccccgacccgcacgtcgagcgtctgctggaaggtttctcgctgctcaccgcgcgcctgcaacggcgcctcgacgacgactacgcagagttcagcgacgccctcctcgaacagctctaccccctggcgctgcgcccgctgccgtcctgcgcgatcgtccagttcgaaccggacccgacccagggcagcctcgccgagggctaccggctgccacgcgacaccgcgctgttcgtcaccacccgtggcggcgacagcgtgcatttccgcagcagcgccgaggcgaccctgtggccgctggcgatcgacgaggcgaacctcctcggcggcgaggaggcgcaagccctgaccggagtcggcgccgcccgctcggcgttgcgcctgagcctgcgctgcctgggcgagtaccgctgggacgaactgtcgatcgagcgcctgcgcatccacctggcggcttcgccgatgggctgcgcgatcctctacgacctgctcgccgcgcataccgtgcaggtcatggcgggggcgcccggcacgccgccggcggcgctccgcggactgccggagatcgtcggcttcgccgccgacgaggcgctgctgccggaggaagacggcggacatccgggcctgcgcctgctcgccgagtacttcgccttccccgacaagttccacttcttcgacctgccactgtccggcgcgctcgccgacggacagacgctctacctgtacctggtcttcgatcgcgcaccgacggcacgcctgcatttgcaggcggaagacttccagctcggctgcgcgccggcgatcaacctctttccgcggacctcggagccgctgcgcccggacggcacccgcagcgagtaccgcctggtcgccgacagtcaccgcgagaacagcgtggaaatccatagcatccgcgccgtgcgctcggtggccgggagcaccgtgcagccagtcccggcctactatggctgccgccacgacagccacctcggcacgctctactggcacgcccggcgcatcgccgggctgaccccgaaccggctgggcagcgacctgctgctgagcctggtggataccggcttcgacccgttacgcgaagccccggccttcagcctgaccgccgagctgctatgcaccaatcgctatctggccgagcgcctgggtgccggcaccgcgctgggcttcgaacggcccgggccggtcgccgccgcacgcctgcgcaacgcgcccagcgcgcagagccagccgcgcctggacggccagtcgcgctggagactggtctcgcagctgaccctcaaccacctctcgctggtggaaggcccgcgcgccctcgaagccctgcgggaaatcctcgccctgcacaacctgcgcgacgacgccagcgcccgccggcagatagaagggctgaggcaactcgactgccagcgggtggtggcgcacgtcggcgaggatgcctggcgcggctggcgcaatggcctggaaatccgcctgcgtctcgatccgcaacacttcgtcggcgccagcggcgtgctgttctccgccgtgctggcgcagttcttctcgctgtatgccaccgccaaccgtttcgtgcgcacggtcctggtggaagccgacaaggaggtgaagacatggcaaccccaggccggctcgccgctctccctctga

SEQ ID NO: 365178 - DNA, 1017 bp, Pseudomonas aeruginosa
atggcaaccccaggccggctcgccgctctccctctgagtcagcggctgcgccgcacgccgcagcgcttcgaactgttgcaggcgctgctgctgctcgaacgcgagcgtccccaggcgttgccgctgggcaccggcaacgcgccgcgggcggaggccctgcgcctgcgcgggccgctgctgccgctgttcgcctcgagcgaggtggaaagcctgctcgacgacccgcagcaaccggtgctgtccaccccggtgttcggcctcggcggccccgacggcccgttgccctatgcctaccaggaatggctgcaacagcgtgcccggcagaaggaccatgcccccgccgagttcctcgacctgttccagcaccgcctgctcagcctgctctaccgggtgctgcgcaagcatcgcgtggcgctcggtttcgcggtgccggcggcgaccccggtgcaggcgcagctacgcgccctcagcggcctgttgccgaaagccctgcaagagcgcctggcgctgccggacagcgcggtactggcacgcaccgcgctgttcgccggcgggcgtcgctccctggccggcttcgccggcctggtgcgccagcatttcggcgtggaggcacggctggacgcctaccagggcgcctggaaggaaatccccgcggccagccgcagccggctgcaacgcggcggacgcaacctgcgcctgggtcgcgacgccatagccggcacgcgcacctgggacgagcacgccggcatcaccctcagtctcggtccgctggatgcccgcgaagccgcccgcttcttccccgacggcgacgcccatggccagttggccagcctcgccgcgctgtacttcggccccgacctggattgtcgcctgagcctactggtgagcggcggcgcgccgctgcgcctggagcgcggtgcaccgcccaggctgagctggaacaccggcctgcggcgcgtcgaagacagccagcggcagcgcatcgatctcgacctgcggcagccggaggtagcctga

SEQ ID NO: 365179 - DNA, 2550 bp, Pseudomonas aeruginosa
atggaactcgccgccctgatcggccgcctcaacccggactgtcgccgcgccctggagcgcgccgcgcaacgctgcctgcaacgcacccatcattacgtagagatcgagcacctgctgctggaactgctggacatcgacggcggcgacttcgcctgcctgctgccgcgcttcggcctggagcgcgacgccctggtcgccgagatcaacctgtcgctggagctgttcaaggccggcaatacccgcactccggcgctgtccgcgcacaccatcggcctgctcgaagacgccgtggtccacgccagcgtgctcggccaggcgcagatccgttccggcctgctgctgctcgccctgctcgaccgcgaggagcgccgcgccctgctgctgaacagcgcgtcgtcgctgctgcggattccccacgaggccttgcaggccaacctgctggagtggatccagacctcccgcgaacagccggccgcgccgaaccgcccggcggcaggcggcgacaagccgaaaagcgcccaggacccgctgctcgaccagtacacccaggacctcaccgccgaagcccgcgccgggcgcatcgaccccatagtcgggcgcgacggggagatccgccagtgcgtcgacatcctcctgcgccggcggcagaacaacccgatcctggtcggcgcgccgggcgtcggcaagaccgcggtggtcgagggcctggccctgcgcatcgccgccggcgaggtgccgccgtcgttgcaggaggtgatcctgcgagtgctcgacctcggcctgttgcaggccggcgccagcatgaagggcgagttcgagcagcgcctcaagggcgtgatcgacgccgtgcgcaacagcgcgcagccgatcatcctgttcatcgacgaggcgcacacgctgatcggcgccggcggcgcggaaggcggcagcgacgccgccaacctgctcaagccggccctggcgcgcggcgagttgcgcaccctggcggccaccacctggctggaatacaagaaatacttcgagaaggacccggcgctgacccggcgcttccagctggtccaggtcgaggagccggacgaggccaccgccgtggagatgctgcgcggcgtcgccggcaagctggaactgcatcacggcgtgcagatcatggacgcggccatcgtcgatgcggtgaagctgtcgcatcgctacatctccggccgccagttgccggacaaggcgatcagcgtgctcgacaccgcctgcgcgcgggtcgccctcggccagcacgacgtgccgccgccgctggaaagcctgcgccatcgcgagcaggcgctggaagaggaattgcagcggctgcgccgggaacaggccaccggcctcgaccacagcgcgcgtatcaccgccctggaaagcgagtcgggcgataaccgccggaccatccgcgagctggagacccgctgggacgaggaacgcgaagcggtgcgcgaactgctcgacatccgccgcgaactgctggccctcagcgaaagcgccgacgcggccaagcccgacgaggaactggacggtcgcatcgaccacctggccgccgaactggcgcgcctggcggccggcctcgaagccatccgccaggacgacccgctggttcccgagcaggtggactcgcgtaccgtggccgcggtgatcgccggctggaccggcatcccggtgggcaagatgctcgccgacgaagcccacgccatccgttccctggcgcaacgaatgggccagcgggtgatgggccaggaggccgccctgggcgccatcgcccagcgcatccaggcctatcgcgccggactcagcgacccggccaagccggtcggcgtattcctcctgcccggccccaccggcgtgggcaagaccgagaccgcctacgccctggccgacgccctttacggcggcgaacgcaacctgatcagcatcaacctctccgagtaccaggaggcccacaccgtcagccagctcaagggcgccccgcccggctacgtcggctacggcagcggtggcgtgctcaccgaagcggtgcgccgcaagccctattcggtggtgctgctggacgagatcgagaaagcccatccggacgtgctggaagccttctacaacgtgttcgacaagggcgtgatggaagacggcaccggcctggtggtggacttcaggaacaccgtgatcctcgccaccagcaacgtcggcgccgaactgctgctggacagcccagccgaacaggtcgccaccccggccttcgacgagcgcctgcgcaaagtcctgctgcaaaccttccgcccggcgttcctcgcgcgcatgaccgtggtgccttaccggccgctggaggaagccaccctggaaggcatcgtcgtggccaagctggaaaaactgcgggaacgctacaaggccgctaccggcaaacagttcgacttcgacccggccatcgtcaaggccgtgctcgccaagtgcagcgcggcgggcgcgcgggatatcgagaacgtgctgatggcgcaggtgacggggaagttggcggagtgggtactcgaatga

SEQ ID NO: 365180 - DNA, 426 bp, Pseudomonas aeruginosa
atgcccaacggcgcgacgctgaccgccatgatgaacgctgccgacgccctacgtctgaccgaggccccgaggaccaggcgcggtggtgtgtccgacggtatttccttccacatcgcccaatacgtgcccggtggcgcgtctctgaccatcaccagccagttcgtcggtcagaaagccggctccgccgtttgctacgagaacacactgttcaacgatgccctggtcggtcgcatcaacgccatcgttggcaacatcatcgtgcgccagagcgtcgcaccctgtacgcgctgccgcgccggctaccgccagctcgcccagaacggaccacgtactatcgtcgtctccagcgatgacggctacgacggcgcccccgacaacaccatcttcctcttcgcacccaccgggctggtgttctaccgacgctga

SEQ ID NO: 365181 - DNA, 1068 bp, Pseudomonas aeruginosa
atgccccgaaccatcgaatactggcgccccacgaacggcctgtatcatgcgaccccacccggaatcgccgtgctgacccaggacagcgattgggaggtgctcaacgaagccaccggcttctacgaggaaagcccgtatccctccgccttcaagggacaggtgtatcgcgcgctgaactacataaacgctacgccgacgggcgcatcgctgctctggaacctctacacgacgaacaatttcgtcgacatcaccccctcgtcgctgggcaacaatgtccagtccaccaatcagcccatggcgctcaatcaggtcgccagagaaatcatcgtaggaaccggtcccggcccccagacccagatcgcgctcaatcagacaggcatcgctccgcaggcgcagacccagtggctgacctatgtcatcaacagttcgccgcattgggccctggacggcgtgccgggcaacggtggtggcctttacggctatctagagcgcgcccgccagtatgccaaccgctggatgctgctgttcgaccaccgctacttccgctggagcgacagcaatgaaggctatttcaatgagcagagctacagcggtcatttcggtatctccgcccacaacatcgccatcaccaaccacgaagtagcggcctggcttgccggacagccgctaccccaccgcctcagcgatgcccagcagaaccatgcgcggcttgcgaccatagttgcccttaaggacgtttcgccgccttcggctggctgttccgcccatgtgagatggaatcccacagcgaccaacccgctgaaccggatacgtcctccggcaatcggcctggctcatgagctgctgcatgcctactacagttgccgaggcgcacaacccggctacgacgacaaccactactccacggtactgttcgaataccgctgcgtcggcctcggcccctgggacgaagcaccattgtcggaaaatgccctacgcaaggaatggtggagctatgcctgccagcaggtgcccggaagcgacccagagaacaggaaggccatcggcaaacgcatcagttacatgtag

SEQ ID NO: 365182 - DNA, 1983 bp, Pseudomonas aeruginosa
atgccccgtcccaccgatagcactaccagcctctccctgaccgcctcggcgctggcagccctgttcccggagcgtctggccggggaagaacgcctgaacgcactgcccggttgggaactgctgggctacagcgccagccccttagccctggacggcgcaatcgccacccatctcaccgccaccctgcacaacgacgccgaccagcgtccgctcgacggcctggtcgcggagatccgccaactccccggcgatgccagcgccgagcgctaccaggtgctgttgcgcccctggctctggtggctgacgctggccagcaacaaccgggtgttccagaacctggccaccagcgacatcgtcacccaggtcttcgaccagcacggcttcagcgactaccagttgcagctcagcggcagctaccagccccgcgaatactgcgtgcagtacggagagagcgatctcgccttcgtttcgcggctgctggaggaagacggcatcttctggttcttcacccatgccgccggcaagcacaccctggtgctggccgacagcaacgacgccttcccgccgattcccaacggcccgcaagtggcctacctgggccaaggaatcggcgtgcgcgagttgcagggcgtgcgttcggcgcagtacagcctccaggcggtatccgggacctacagcgccaccgactacgagttcaccaccccgggcacctcgctgtactcccaggccgaggcggtttccggcgccgccggcgtctaccagcaccccggcggctacaccgccaaggcccagggcgacagcctgaccaagcaacgcatcgacggcctgcgcagccaggagacgcgcctgatcggcgagagcgactgccgctggctggtgcccggccactggttcaccctcagcgggcatgacgacgattcgctgaatatcgactgggtgctgacctcggtcacccatgacgccagtcacgcgcactaccgcaaccgcttcgaggcgatccccaaggccaccgcctaccgccccgcgcgggtcacgcccaagccgcgcatgcacacccagaccgccctggtggtgggcaaggccggcgaggagatctggaccgaccagtacggccggatcaagatccagttcccctgggaccgcgacggcaagaacgacgagacctcctcctgctgggtgcgcgtggtgctgccctggagcggcaagggcttcggcatgcagttcgtgccgcgcatcggccaggaagtgatcgtcaccttcatcgacggcgacccggaccgcccgctggtcaccggctgcgtctacaacggcgacaacgccctgccctacgcgctgccggacaaccagacgcagtccgggatcaagaccaactcgtcgaagggcggcggcggtttcaacgagctgcgcttcgaggacaagaaggacgccgaggaagtcttcctccaggcgcagaaggacctcaacgtcaacgtgctcaacgacagcaccgccagcatcggccacgacgagaccctgacggtgcagaacgcccgcacccgcacggtgaaggaaggcgacgagaccgtcaccctggagaaaggcaagcgcacggtgaccatccagaccggcagcgacagtctggatgtgaaggacacgcgcacggtgacggtgggcgccgaccagacccacagcaccggcggcaactacagccacaaggtcagcggcaacttcgagctgacggtggacggcaacctgaccatcaaggtcagcggcaccctcgccctgcagagcggcggcagcctgaccctgaagagcgacgccgacctcgccgcccaggctggcacctcgctgaccagcaaggccggcacctccctcaccaacaaggccggcaccagcctgaccaacgatgccggcgtcagcctgaccaacaaggccggcgccgaacagacggtggacggcggcggcatgctgaccatcaagggcggcctggtaaaggtcaactga

SEQ ID NO: 365183 - DNA, 537 bp, Pseudomonas aeruginosa; identical to SEQ ID NO: 321199

SEQ ID NO: 365184 - DNA, 396 bp, Pseudomonas aeruginosa
atgggctgcccgcaggtctgcgccggcgccaccctgcaatgcagcttcggggcggcgccgacggtgctcaacgtgttgccgcagaatcgcaccctgaccagcgggatgccggcggcgaacatcatggaccacatcccgctgctgaacattcccaccttcggtctctgccagagtccggccaaccccgtggtggccgccgccaccgccgccgccctcggcgtactgacgccgatgccgtgcattcccgccaccgccagcccgtggatccccggcggcccgccgaccctgctgctgggcgggatgcccgcgctggacgccaatggcacgctgatctgcacctggggcggggtgatcaagatcagcgtgccgggacaggtgcagatgctgattccctga

SEQ ID NO: 365185 - DNA, 642 bp, Pseudomonas aeruginosa
atgcctagcacaagaagcctccccgcacgggtcatcgtcgccgatgactatcccctgttccgcgatggcctgagacgggtcgtccgccgctacctcccgcaagccgccgtaagcgaagcgggcagcttcgacgaggtgctgcgcctggcctcgagcgtctcgccggaacctcccgccctcttcgtcctcgacctgctgcttcccggcttcgccgcctcccagtccatcgagcgcttgcgtcgcgcctatcggcacagcgcaatcgtcatcgtctcgatgctcgacgacccgcgtctggtggacgaggtgctggccgccggcgccgacggctacctcggcaaatccctggaggccggggagatcggcacggcgttgcagacgctcggcagcggcgaaccggtggtgcgcctgcgcggcgggtcgagcgccggcagtcggcaacgcgccctcctggacgccctgaccccacggcagcaagcggtactgcggctgatcgccgatggcctgtcgaacaaggaaatcggccgcgcgctgtcgatctctccgttcaccgtgcgcgtgcacgtttcctcgctactgcgcgccctggaagtgaacacgcggacggccgccgcggcgctggcggtgaaggccggcttctag

SEQ ID NO: 365186 - DNA, 1206 bp, Pseudomonas aeruginosa
atgatcgacagggtgaagccgctgatggcggcatgggttctggtcttcgcatcttcttcgttcgccagcgaaacggcgggaaaattgccacgaaagccagctctagggccggaaaccgcgggggcgaccctggtcattcccggcgagaccgacaggctcgcttcgctctacgcccgcgcactgggcgaaggcggcaaggtggtgctctgggccggcggcgacgcgccgaaccagatggactggttgaagacggccttcgagagccgctttcccggcgtgatcctggacgtcacggtggacctttccaagttccacgacctgcgcatcgaccaggaactcgccgccggcaccctgacgccggacgtggcgatgctgcaaaccaccttcgatttcgacagatggaaggcccgcgacgtgctgctgcgctacaagccggtcggcttcgcccggcagaagaaaggctacgccgatcccgacggcgcctatgtcacggcctacaacaacgccttcgtgccgacctacgcttccgtccggctgccagcggagcgctatccgacgcgcttcgccgattacctgaagccggccttcaagggcaagctggtgctgacctatccccatgacgacgatgcggtgctgtacgtctacgacaagctggaacggcgctacggcagcggtttcctgcgcgccctggcggcgcagaagccgaacttcctgcgcggcacggcggcgccggcggcctcggtgggcaccgactccatcggttcgctgggcaacctgaccggctatgcgaccgacagcgatacgccggccggctacttcatcccgaccgacgagccgttcatcgtctggaaccagcgcgcggcgatcttcaaggccgcccgtcatccggccacggccaagctgctgctgtcctacctgggctcggccgagttccagtccagctacggcggctggcgcgcccgcgccgacgtcggcgaagcgcctgggctgccgccactggagtcgctgaagaacgtcgacgtgcacgatttcacccgctggatggccgatcgccaacgggtggccagcctgcgcaggcacatggcgcaaatcttcggcccggtacgcggcgagtcgccgttgcgcgacccggcgctgatgagcctgctggggctgacggcgaacgacatcgtcgccctgcccgaaccggacctgccgatctactga

SEQ ID NO: 365187 - DNA, 2316 bp, Pseudomonas aeruginosa
atgaagcgctcgtaccccgacgatctggtcatcggcaatctcagccgccgcggtttcctcaagggcgtcggcgccaccggcgtgctgctggtggctgccaactggggctggcgcgacgccctggccgccgagaagaaggccttcggcgccgacgccatgccccacggctgggtggacaacccgaagatctacgtgagcatcgaccgggacggcacggtcggcatcgtctgcaaccgctcggaaatgggccagggcgtgcgcaccagcctggcgatggtggtggccgacgagctggaggccgactggagccgggtcaaggtgatccaggcgcccggcgacgaagcgcgctacggcaaccaggacaccgatggctcgcgcagcatgcgccattggttcgaacccatgcgccgctgcggtgcggcggcgcgacagatgctcgaacaggccgcggccaaccagtggaaggtcccgctgggcgagtgccgcgccgaacagaacaaggtgctgcatgcgcccagcggccgttcgctgtccttcggcgaactggccgaggccgccgcgggtctcgaagtgccggcgcgcgacaagctgctgctgaagaaacccgagcagttccgctacatcggcaaggacgtggcgcgcgccatcgacggcgccgatatcgtcaatggccgcgccggcttcggcttcgacgcgcgcttcgacgacatgctctacgccgtggtcgcccggccgccggtctacggcggcaagctcaagcgctacgacgccgccgcggcgctgaaggtgccgggggtggtcaaggtgatcgagatcgagggccggccgatcccgtccgagttccagccgctgggcggggtcgccgtggtggcgcagaacacctgggcggcgatcaaggggcgcgaggcgctggtggtcgagtgggacgccggggtcaacggcggctacgactcggtggcctaccgcaagcaactggaagaggccgcgcgcaagccgggcaaggtggtgcgcgacagcggcgatgccgcggcgctgttcgccaggggtggggatatcgtcgaggccgagtactacctgccgcacctggcccaggcgccgatggaaccgccggtctccaccgcctggtacaaggacggcgcctgcgaggtctgggccccgacccaggcgccgcaagtgacccgcgagcgcatcgccgagcgcctgaagctgccgttcgacaaggtcacggtcaacgtgaccctgctcggcggcggtttcggccgcaagtccaagcccgacttcgtgctggaagcggcgatcctggccaaggcgttccccggtcgccacctgcgcgtgcagtggacccgcgaggacgacctgcatttctcctatttccacacggtctcggtggagcgcctgcaggccgtgctcggcgccgacgggctgccgcaggcttggctgcatcgctcggtggcgccgagcatcaccgcactgttcggcccggacagcaagcaccagggcgccttcgaactgggcatgggcctgaccaacctgccgttcgccatccccaacgtgcgcctggagaaccccgaggccccggcgcacacccgggtcggctggttccgctcggtctccaacatcccccacgccttcgccatccagagcttcgtcggcgaactggcggcgaaggccggccaggacccgaaggactacctgctcaagctgctcggcccggcgcggcgaatcgacaccgccgaactcggcgacagctggaactacggcgagtcgccggagcgctacccgctcgatgtcggccgcctgcgcggggtgatcgaggaggcggcgcgccagtccggctggggcggcgagctgcccaggggcagggcgcggggaatcgccgcgcactacagcttcgtcacctacgtggcggtggtgatcgaggtggaggtgaaggacgacggcgcgctgctggtgcacaaggccaccatcgccgccgactgcggtccgcagatcaaccccgagcgcatccgctcgcagctcgaaggcgcctgcgtgatgggcctgggcctggcggcgctgggcgagatcagcttcaaggatggcaaggtccagcaggacaacttccaccagtacgagctggcgcgcatgccgctggcgcccaaggcggtgtcggtgcatctgctcaagccggatggcgacctgccgttgggcggggtcggcgagcccggcgtgccgccgatagcgccggcgctgtgcaacgcgatcttcgccgccaccggcaagcgcatccgcgagttgccgatccgcaatcagttgcaggggtggcggaaggcctag

SEQ ID NO: 365188 - DNA, 471 bp, Pseudomonas aeruginosa
atgattaccctgaacctcaatggcaaggatcatcagctcgatgtcaccgaggatatgcccttgctctgggccatccgcgacgtcgtcggctataccgggaccaagttcggctgcggcatgggcctgtgcggctcctgcaccatccatatcgacggccaggccacccgttcctgcatcacgccggtgagcctggcgcagggcaggaaggtcaccaccatcgaccacctgcacaccgacaaggtcggcgaagtcgtccagcaggcctggctggacatcggcgtggcgcagtgcggctactgccagggcgggcagatcatgtcggccacggcgttgctgaagagcaaccccgcgcccagcgacgagcagatcgaggcggccatggccggcaacatctgccgctgcggcacctacaaccggatcaagacggcgatccacaacgcctccgccaagttgcaggaggccaaggcatga

SEQ ID NO: 365189 - DNA, 237 bp, Pseudomonas aeruginosa; identical to SEQ ID NO: 321205

SEQ ID NO: 365190 - DNA, 243 bp, Pseudomonas aeruginosa
atgaaccacactgcatcgatccccgccctgcccacggcctatgacctgctgaacacccgcatccagcgcatcatccacgccccggctgcgcaacaggcctgccaggcctgcatttcccgattgcccggcgaagacgagggcgactgggcccacctgctggaaagcttcgaccgttccaaccagtggctgctcgacccgcagcgcgacggcagcatcgtcctgcgctggagttccgccgcctga

SEQ ID NO: 365191 - DNA, 1152 bp, Pseudomonas aeruginosa
atgagcgtcatcaccgatatcgaagacctgcgccgcctggcgcgcaagcgcgtgccgcggatgttctacgactacgccgactccggttcctggagcgaaggcacctaccgcgccaaccaggacgacttcgccgcgatcaagctgcgccagcgggtcgcgcggaatatcgagaaccgctcgctgcgcacccgcatgctcggccaggagatggccatgccggtggccatcgcgcccaccgggctggccggcatgcagcatgccgacggcgagatcctcgccgcccgcgccgccgccgagttcggcgtgcgctacaccctgtcgaccatgagcatctgttccctggaggacatcgccacggaagtcggccagccgttctggttccagctctacgtgatgcgcgaccgcgatttcatcgaacgcctgatcgaccgtgccaaggccgccggctgcgacgcgctggtgctgaccctcgacctgcagatcatcggccagcgccacaaggacctgaagaacggtctctcggcgccgccgcggccgaccctggccaacctgctgaacatcgccaccaagccgcgctgggcgctgggcatgctcggcacccggcgtcgcggtttcggcaacatcgtcgggcacgtcaagggcgtcgacgacatgggctcactgtccgagtggaccgcccgccagttcgacccgcggctgaactggggcgacgtcgaatggatcaagcggcgctggggcggcaagctggtgctcaagggcattctcgatgccgaggatgcgcggttggccgccgactccggcgccgatgcgctggtcgtcagcaaccatggcggacgccaactggacggcgcgccctcgaccatcagcgcgctgccggcgatcgtcgaggcggtgggcgagcgcatcgaggtctggctcgacagcggcatccgttccgggcaggacgtgctcaaggccatcgccctcggtgcgcgcgggaccatgatcggccgtccctatctctatgggctgggcgcgctggggcaggccggagtgacgcgggcgctggagatcatagcccgtgagctggacctgaccatggccttctgcggccataccgacatccgcgaggtcggccgggacatcctgttgccgggaagctacccgcgatag

SEQ ID NO: 365192 - DNA, 921 bp, Pseudomonas aeruginosa; identical to SEQ ID NO: 321208

SEQ ID NO: 365193 - DNA, 324 bp, Pseudomonas aeruginosa; identical to SEQ ID NO: 321209

SEQ ID NO: 365194 - DNA, 2289 bp, Pseudomonas aeruginosa
atggggatgcgtaccgtactgaccggcctggccggcatgctgttgggttcgatgatgccggtccaggccgatatgccgcggccgaccgggctggccgcggacatccgctggaccgcctatggcgtgccgcacatccgggccaaggatgagcgcggcctgggctatggcatcggctacgcctacgcgcgcgacaacgcctgcctgctggccgaggagatcgtcaccgcgcgcggcgagcgggcgcgctatttcggcagcgagggcaagtcgtcggccgagctggacaacctgccgtccgacattttctacgcctggctcaaccaacccgaggcgctgcaagccttctggcaggcgcagacgcccgcggtgcgccagttgctcgaaggctacgccgccggtttcaaccgcttcctccgcgaggccgacggcaagaccaccagttgccttggccagccctggctgcgggccatcgcgaccgatgacctgctgcgcctgacccggcgcctgctggtcgaaggcggggtcggccagttcgccgacgcgctggtggccgccgcgccgcccggcacggagaaggtcgccctgagcggcgagcaggcgttccaggtcgccgagcagcggcgccagcgcttccgcctggagcgcggcagcaacgccattgccgttggcagcgaacgttcggcggacggcaagggcatgctcctggccaacccgcacttcccctggaacggcgcgatgcgtttctaccagatgcacctgaccattcccggccggctcgacgtgatgggagcctcgctgcccggtctgccggtggtcaacatcggcttcagccgccacctggcctggacccacacggtggatacctccagccacttcaccctgtatcgcctggcgctggacccgaaggacccgcggcgctacctggtcgacggtcgttcgctgccgctggaggagaagtccgtcgcgatcgaggtacgcggcgccgacggcaagctgtcgcgcgtcgagcacaaggtctaccagtcgatctacggcccgctggtggtctggcccggcaagctggactggaaccgcagcgaggcctatgcgctgcgtgacgccaacctggagaacacccgggtactgcaacagtggtactcgatcaaccaggccagcgacgtcgccgacctgcgccggcgcgtcgaggcgctacaggggatcccctgggtcaacaccctggccgcggacgagcagggcaacgccctgtacatgaaccagtcggtggtgccctacctgaagccggaactgattcccgcctgcgccattccgcaactggtcgccgaaggcctgccggccctccaggggcaggacagccgctgtgcctggagccgcgacccggccgcggcccaggctggtataaccccggcggcgcaactgccggtgctgttgcgcagggacttcgtgcagaactccaacgacagcgcctggctgaccaacccggcgagcccgctgcagggcttttcgcccctggtcagccaggagaagcccatcggtccgcgggcgcgctacgccctgagccggctacagggcaagcagccgctggaggcgaagacgctcgaggaaatggtcaccgccaaccatgtcttcagcgccgaccaggtgctgccggacctgctccgcctgtgccgcgacaaccagggcgagaattcccttgcccgtgcctgcgcggccctggcgcagtgggaccgtggcgccaacctcgacagcggcagcggcttcgtctacttccagcgcttcatgcaacgcttcgccgaactcgacggcgcgtggaaggaaccgttcgatgcgcaacgtcccctggatacgccgcaaggcatcgccctcgaccggccgcaggtggcgacccaggtgcgccaggcgctggcggacgcggcggcggaggtggagaagagcgggattcccgacggcgcgcgctggggcgacctgcaagtgagcacccgtggccaggaacgcatcgcgattcccggcggcgatggccatttcggggtctacaacgcgatccagagcgtccgcaagggcgaccacctggaggtggtcggcggtaccagctacatccagctggtgaccttccccgaggaagggcccaaggctcgcgggttgctggctttctcccagtccagcgatccgcgctcgccgcactaccgcgaccagaccgagctgttttcccgccagcaatggcagaccttgccgttcagcgacaggcagatcgacgccgacccgcaactgcaacggctaagcattcgcgaatga

SEQ ID NO: 365195 - DNA, 1332 bp, Pseudomonas aeruginosa
atgacccaggctacagcaaccgccgtcgttcacgaccttatcggtatcggcttcggcccctcgaacatcgccctggcgatcgcccttgaggaacgcgcgaggacccagggggaactgcaagtcctgttcctcgacaaacaggccgactatcgctggcacggcaataccctggtcagccagagcgagttgcagatttccttcctcaaggacctggtatccctgcgcaatccaaccagtccctattccttcgtcaactacctgcacaaacatgggcgcctggtggacttcatcaacctgggcaccttctacccctgccgcatggagttcaacgactatctgcgctgggtcgccggccacttcgccgagcagagccgttacggcgaggaagtgctgtcggtcgagccgatgctggtcgagcgcaaggtcgaggcgctgcgggtgacttcgcgcaacgccgaaggcgaggagcttgtgcggaccactcgctcggtggtggtcagcgccggcggtacgccgcgaattcccctggcgttccgccacctgaaggacgatggcagggtcttccaccattcgcagtatctggagcgcatgctcaagcagccctgtgtcaacggccagccgatgaaagtcgcgatcatcggcggcggacagagtgccgccgaagccttcatcgatctcaacgacagctatccatcggtacaggtcgacctgatcctgcgcggttcggcgctgaagccggcggacgacagtccgttcgtcaacgaagtattcgcgcccgagttcaccgacctgatctacaaccaggaaggcgcggagcgtgagcgcctggtgcgcgagtaccacaacaccaactattcagtggtggatatcgacctgatcgagcgtatttacggcatcttctatcgccagaaggtttccggagtcccgcgccacgccttccgtagcctgcgctcggttgagaaggccacggcaggcgccgagggtatcgagctggcgctgcgtaataccgccaatggcgaactgagcgtgcagcgctacgacctggtaatcctcgccaccggttatgagcggcagttgcatcgtcaactgctggagccgatggccgactacctcggggacttcgaggtcgaccgcaactatcgtctgatcaccgaccagcgttgccaggcgtcgatctacatgcagggcttctgccaggccagccatggcctcagcgacaccctgctgtcggtgctgccggtgcgtgccgaggaaatctccggctccctgtaccagcacctgaagcccggcgctccggcccgcgccctgcacgagcacgccctggccagctga

SEQ ID NO: 365196 - DNA, 480 bp, Pseudomonas aeruginosa
ttggaaaaccattatcgggagctgttgcgctttctcagcgccaggctcggagaccgacaggcggcggccgacgttgctcacgacgcgtatttgcgcgtgctggaacgctccagtcaagcgcgaatcgagcatccgcgggcgttcctgtaccggacggcgctcaatctcgcggtcgacgagcatcgccgcagccgggtgcgcaaggccgagcccttgcacgtcctcgacgaggaggagggtatgtccgagccttccccccaggtactcgaggaccagcgccagcgcctcgacctcctgaccctggcgctgaacgaactgccgccgctgtgccgcgagtccttcctcctgcgcaagctggaaggtctttcccacaacgagatagcggcgcacctgaatatctcccgcagtctcgtggaaaagcacatcgtcaatgcgatgaggcactgccgcctgcgcatgcaagcctgggagtccagttga

SEQ ID NO: 365197 - DNA, 996 bp, Pseudomonas aeruginosa
atgaagacacccctccccgccgacagcgacaccttggtccaggacgccgcacactggtgcatgcgcctgcatgccgaggactgtagcgaggaagagcgtgccgagttccgtcgctggctggcgagcgatccgaggcacgccgacgaatacgcagcaatggaagaaatctggcaactcagcgaattgctgccccgccgctccgacaccccggcggccgcctcggcctggccgtgcccgcgtactacccgcaggcgccactggagaaaccaggcgcgagctgccgcgctcgctctgttcctgctccccgcctcggcctacctgggctggttgcagggctggattccctccagctatcaacgctacacggcgcaggacaatatccgccacgtcaccctccccgacggcagcgaggtagaactggatctcaagacccacctcagcttcgccaacttcagggacatccgccgcgtcgtactggacaacggcgaggcctatttccatgtcacccacgatacggcccaccccttcgtggtcagggccggcaagggttcgatcaccgtcaccgggacccgcttcaacgtctggaagtaccaggacaacgtcgtcgtcaccgtgaccgaaggctcggtgaaggtccgcagcgaaggctcgggcaacgacagcagcctgaccccgggcatgcaggccagctactaccccgggctgctgcaaccgctggtcgaggcggtcgatacccgtcaggcactggcctggcgcgaaggccgcctgattctcgacgacctgccgctggctcaggccctaccgctgatcaaccgctacctggagcatccgctggtcctcaccgacaagaccagcgccgaactgcgcatcggcggcatctacagcacccgtgagatacgcaacctggtggaggccctgccgaaggtcctgccggtggatctcgagcaccgcgacgacggcagcatccgcatcagcagccgttacgcccagctctga

SEQ ID NO: 365198 - DNA, 1176 bp, Pseudomonas aeruginosa
atgagacgaacccgtagtactcgtcgcgcactgctcgtcgcagtctgcctcagccccctgatcgccctggccgcctggcaggcctatccgttccgcagcaacagcttcgataccgtgagcgtcagccgcggcagcatcgagagcagcgtctcggcgctcggcaccctgcaaccgcggcgctacgtcgacgtcggcgcccaggcctccgggcagatccgcaagttgcacgtcgaggccggggacgatgtgacggaaggccagttgctggtcgagatcgacccctccacccagcaggccaaggtcgatgccggccgctattcgatcgagatgctcaaggcccagctggccgagcaacgtgcccagtacaccctcgcccgccagcagtaccagcgccagcagcggctggccgccggcggcgcgacgcgtaccgaggacgtgcagagcgcccaggcgcagatgctcgccacccaggcacggatcgagatgtaccaggcgcagatccgccaggcccaggcctcgttgcgcagcgacgaagccgaactcggctatacccgcatctacgcgccgatgtccggcacagtggtggcggtcgatgcgcgcgaaggccagaccctcaatgcccagcagcagaccccgttgatcctgcggatcgccaaattgtcgccgatgaccgtctgggcccaggtttcagaagccgacatcggccgggtcaagcctggcatgccggcctacttcacgaccctcagcggcgaaggccggcgctggaccggcaaggtccggcagatcctcccggtgccgcccaagccgctggaccagagcaaccagggcggcggcagccccaccagcggcagcggcgggcagagcggcagcggccgggtggtgctgtataccgtgctggtcgacgtggacaacggcgaccaccaactgatggcggaaatgaccgcccaggtgttcttcgtcgccgccaccgcggaaaacatcctcaccgcaccggtcgccgccatccacgacgacggcaagggcggccaggtcgcctgggtggtcggcagcaacggcaagccgcagagccgccagatcaggaccggcatcagcgaccgcctgcgggtacaggtgcttgccggcctggaggaaggcgaccgcctgttgatggccgctcccgacggcagcgacagctga

SEQ ID NO: 365199 - DNA, 1992 bp, Pseudomonas aeruginosa
atggaaaacgccacgcaccccgtccccctgatcgaactgcgcgacatccgcaagcgctacggcggcaatggcactccggaagtcgaggtactcaagggcgtatcgctgtcgatccacgccggcgagttcgtcgccatcgtcggcgcctccggctccggcaagtcgaccctgatgaacatcctcggctgcctcgaccggcccagctccggcagctaccacttcgccggccacgacgtcgccgaactggacagcgacgagcaggcctggctgcgccgcgaggcattcggcttcgtgttccagggctatcacctgatcccctccgcctcggcccaggaaaacgtcgagatgccggcgatctacgccggcaccccggcgagcgagcggcacacccgcgcgcgggccctgctcgagcgcctgggcctggcagagcgcactgccaaccgtccgcaccagttgtccggcggccagcagcagcgggtatcgatcgcccgggcgctgatgaacggcggccatatcatcctcgccgacgaacccaccggcgccctcgacagccacagcggcgcggaagtcatggcgctgctcgacgagctggccagccagggccacgtggtgatcctgatcacccacgaccgcgacgtcgccgcccgcgccaagcgcatcatcgaggtgcgtgacggcgagatcgtcagcgacagcgccaacgacgagcgcccggcgcacccgagcgccggcgtcgagcgccacctgcaggccgacgatctcagccagcgcctcgccgagggcagcagcgaaccctcgggggcctggcgcgccgaactgctggaggcggtgcgcgccgcctggcgggtgatgtggatcaatcggttccgcaccgcgctgaccctgctcgggatcatcatcggcgtcgcctcggtggtggtcatgctcgccgtcggcgagggcagcaagcgccaggtgatggcgcagatgggcgcgttcggctcgaacatcatctatctcagcggctactcgccgaacccgcgcgcgccgatgggcatcgtcagcagcgacgacgtcgccgccatcgccaccctgccccaggtgaagaaggtcatgccggtgaacggcggcgagctggtggtgcgctacggcaacatcgactaccacgcctacgtcggcggcaacaacaccgacttcccggaaatcctcaactggccggtggccgagggcagctacttcaccgagcgcgacgaagacgccgccaccacggtcgcggtgatcggctacaaggtgcgcaagaagctgttcggcagcgccaacccgatcggccgctacatcctcatcgagaacgtgccgttccaggtcatcggcgtgctcgccgagaaaggctccagctccggcgacaaggatgccgacaaccgcatcgccatcccctactccgctgccagcatccgcctgttcggcacgcgcaaccccgagtacgtgatcatcgccgccgccgacgcccagcgcgtgcaccaggccgaacgcgccatcgaccagttgatgctgcgcctgcaccgcggtcagcgcgactacgagctgaccaacaacgcggcgatgatccaggccgaggcgaagacccagaacaccctgtcgctgatgctcggctcgatcgccgcgatctccctgctggtaggcgggatcggcgtgatgaacatcatgctcatgaccgtgcgcgaacgcacccgcgagatcggcatccgcatggccaccggcgcccgccagggcgatatcctccgccagttcctcaccgaggcggcgatgctctcggtggtcggcggcctggccgggatcgccctggccctgtgcatcggcggcgtactgctgctcggccaggtcgcggtggccttttccctgtcggccatcgtcggcgccttcagttgcgcgctggtcaccggcctggtgttcggcttcatgccggcgcgcaaggccgcccagttggacccggtggccgccctggccagccaatga

SEQ ID NO: 365200 - DNA, 1419 bp, Pseudomonas aeruginosa
atgaagaatctctccctgatttccgcctgcctgctgctcggcgcctgcggcagcacgccggcgcccctcgacagcggcctggccgcgcccagccagtggcgctacctggcggccgggcgcagcgatgccagcgacatccgccagtggtggaaggccttcggcgcgccggaactggacagcctgttgcaacgcgccctgctgaacagccaggacctcggcgcggcggtggcccgcgtgcgccaggcccaggcctcggcggtgatcgccggcgcgccgttgctgccggagctgaatgcgacgctcggcgccagccggcagaaactcctgcgcggctcgggctacagcggtaccgacgcgacctccgacaacgatgccgtcgactccttctccgccggcctcagcgccagctacgaagtggacttctggggcggtcgccgggctgcctaccgcagtgccctggaaagcctcaaggccagcgagtacgaccgcgccacggtagagctgaccctgctctccggcgtcgccaacagctacctgcaggtattggcgctgcgcgaacagcagcgcatcgccaggctcaacctggacaacgccgagcacgtcctgcgcctggtggagacccgccatgccgcgggctcggccaccgccctggaggtcgcccagcagagcagcctggtcgccagccagcgcaagcagctgccgctactcgagcagcaggcccatgaggcgctgattaccctggccaccctgatcggcgagccggtgcaggcgctacaggtggccgagcggcctttcgacagcctgcgctggccggagaccggagcgggcctgccgagcgaactgctcggccgccgtcccgatatcgccaacgccgaagctcaactggccgcggcccaggccgacgtgcaggtggcgcgcgcggcgctgttccccaagctgaccctgagcgcctcgctgtcgtccggcgccaaccgcgccgccgacactttccgcaacccctattacaacctgggcgccaacctgctcgccccgatcttcaaccacggccgcctgcgcgccgagcgcgaccgcagccaggcgcgccaggaagaactgctggaaacctaccgcaaggcgatcctcaccgcctttgccgacaccgaacgctcgctgaacagcatcgacggcctcgaccgccagctgcactggcagcagcaggagctggagcaggcgcagcgcgccttcgatctctccgacagccgctaccaggccggcgcggaaaccctgctgacggtcctcgaaacgcaacgcacgctgtacgcggcgcaggatgccgccgtgcaactgcgactggcccgcctgcaggcctcggtcggcctgtacaaggccctcggcggcggctggcagagcgaccgccagggtctcgcgcggaaagactga

SEQ ID NO: 365201 - DNA, 1647 bp, Pseudomonas aeruginosa
atgacggtttctcgacgcggattcatggcgggtttggcgctcaccggagcggctgccctgccggtggcttactacacacatcgtcatctggtccgcctgcgcgaagacgaggagcacccggccacgcccggcgaagcgacgctggacctggccgccaccgaggccatgcgcctgggcgaccgcctgcgcggtatctgggacctgcgcctgctcggcgccgacgccggcctgccggggttaccgctggaggggttggagctggtgctcgacgtggcgcccagggggctgggcctgatcggatacctggatactccggagcgcctgagagggccgcaggaaccgcgcttccgcctgcttggcgacctggtcggtgcgcgctccgcgcgcatccgctggcgcctggtggacggcaacaccgcatcgatgaccccgagctacgattgctcggcggtcttcgacgaggtctgggacaacctggccaatgccggcgacggcaccctcagcggtcgcatcgagcgcctcgagcgctcgccactgcaagcgcaggaggatttccgcttcgtggcggtcaagcgcccgtttccgctggctcgcgagcgcatcggcctcaacgaacgcttgctcgcctggctgatctcgccgcagcatcgcctcttccaccagctctggcatgcctcgcgggacaagtggcatcggctttccgagaagcagcgcaacgccctgcgcggcgtcggctggcagcccggcccactggaccgcgaacgtgacgcccgtggtcgtcacaaggaccgcaatgcttccggtatcgacttcttcttcatgcaccggcacatgctgcataccgcgcgctcgatgcaggacctgccgtcctggcggcgcctgccgctgccgggcgtaccgctggcccacgaccgggtcggcttcctgcgctacttcgacaaccctgacggctgttccgtcccgccggcctgggtcgcggtggacgacgacgaatacaccgagtggctgcgtgggctgaaaagcgacgagggctatcacgcaaatttcctggtctgggagtcgcaataccaggacccggaatacctggcgaaactgacgctcggtcagttcggctcggagatggagctgggcatgcacgactggctgcatatgcgctgggcttcggtgactcgcgatccttccaacggcgcgccggtgatgagcgaccgggtaccatcggacttttccccgcgctggttccgcccggagaacgacttcctcggcgacccgttttcctcccatgtgaatccggtgttctggtcgttccacggctggatcgacgaccgcatcgaggactggtatcgcgcccacgagcgtttccatcctggcgaagtgcagcgccgcgaagtggagggcatccaatggttcgcgcccggtcgatgggtcgaggtcggcgatccctggctgggcccggcgacccatggatgcgggctttcggatgtccaggcgagcagcaactcggtggagctggacgtggaaaccatgaagctggctttgcgcatcatcttcagcgaagaagatcaactgagcggctggctcaagcgtgcgccgcggcggccctggtacgcgcgcaacctgaagctggcgcgcgaccagctcaggcgctga

SEQ ID NO: 365202 - DNA, 1347 bp, Pseudomonas aeruginosa
atgactagaactcgcaaaagaacggcgctttacctcggcctgccactgctcatcgtcctgctggccgccggcggctggctggcctggacccagtggctgggcagcgccggctacccgcgcaaggtcatgcaacacgcagaggagttgcacgaacgcatcctctccttcgacagccggatcaccgtgccgctggacttcggcaccaccggcaacgaggtggacaaggacggaccgggccagttggatctggtcaaggcgggccgcgggcgcctgtccggcgctgccctggcgatcttcggctggccggagatgtggaacggccccgacgcgccacacaagccgaccccgggattcgtcgacgaggctcgtcaccagcaggaaattcgttacaagattctcaccggcatggtccgcgactaccccaaccaggtcggcatcgcctactcccccgaggacttccgccgcctggccatggaaggcaagttcgccatcgtcatgagcatgctcaacgcctacccgctgggcgacgacctgtcccagctggacaaatgggccgcccgcggcgtgcgcatgttcggcttcaattatgtcggcaacaacgactggtccgactcttcccgtcccttgccgttcttcaacgacacggcggatgccctgggcggcctctccccgctaggcaagcaggcggtcgaacggctcaacgatctcggggtgatcatcgacgtctcgcagatgtcgaccaaggccctggaacaggtcgccgccctcagccgcgcgcccatcgtcgcctcgcactccgcgccgcgtgccctggtggacatcaagcgcaacctcagcgaccacgagatgcaactgatcaaggacagcggcggcgtgatccaggtggtcggcttccccgcctacctgcgtccgctgagcaaaccgaccctggacaagctcaacgccctgcgcgcgcgcttcgacctgccacccctggaaggcctggactatgcgctgatgccgggcgatccgatcatcaccatctggccggaacaacgcttcggtgaatacgccagcgccctctacggcatcctggaggaggagcccaaggccggcctcaaggaactggtggacgccatcgactacacggtgaagaaggtcggcatcgaccacgtgggcatcagctcggacttcaacgacggtggcggcgtggacggctggaaggatgtcagcgaaatccgcaacgtcactgccgaactgatcacccgcggttattccgatgccgacatcgccaagctctggggaggcaacttcctgcgcgcctggggcgaagtgcaaaaacgcgccaagccgacagctaccccctga

SEQ ID NO: 365203 - DNA, 1284 bp, Pseudomonas aeruginosa
atgaacgaccgtcgtacctttctcaagcaggccggcattctcgccgccggcctgccgctgctttccgctgcccagtcgctccgcgccgaaggcgcaccgagcgacgccggcaataagtggaaagcgctgcgccagcaattcgatctcgacccgcagtatctgcacttcgccaacttcctcctcacctcacaccctcggccggtgcgggaggccatcgagcgcctgcgggtccgcttcgaccgcaacccgggcgaagcggtggactggcatcgcgaggaaatctggaaatacgaggacgaggctcgcgcctgggcaggtcgctacttcgccgtgcaacctggccaggtggcgctcaccggcagcaccaccgacggcctggcggcgatctacggcggcctgctggtgcagccgggcaaggagatcctgacctcctcccacgagcactactccacctacaccaccctggaataccggcacaagcgcatgggtacccaggtccgcgagttcccgctgttcaaggacccgcatcgggtttccgccgacgagatcctgtccagcatcgccgctcagatccgcccgcagacccgggtgctgggcatgacctgggtgcagtcgggcagcggcgtgaagctgccgatccgcgagatcggcaagctggtgcgcgaactcaaccagaagcgcgacgaacaggaccggatcatctacgtggtcgacggcgtgcatggtttcggtgtggaagacgtcagcttcgccgacttcgactgcgactacttcatcgccggcacccacaagtggctgttcggtccgcgtggcaccggggtcatcatcgcccgctcggaacagctccaggagcacctggtgccgagcatcccgaccttctcccgcgccgacaacttcggcaccctgatgacccctggcggctaccacgccttcgaacatcgcctggccctgggcacggccttcgagctgcacctgcagttgggcaaggccgaggtccaggcgcgtatccaccagctcaacgcctacctcaagcagcgcctgggcgagcatcccaaggtccgcctggtcacgccgaccagccccgagctgtcttcgggcttcaccttcttccgcgtcgaaggccgcgattgcgaggcggtcgccaaacacctgatggcgcaccgggtaatcagcgacgccgtggatcgcgatgtcggcccggtggtgcgcctggcgccgagcctgctgaacgacgaggcggagatcgaccgggtgctggaaatcctcgccccgcaactcgcctga

SEQ ID NO: 365204 - DNA, 924 bp, Pseudomonas aeruginosa
atgtcagctcctcaaatgattgagcgtttcaagggaaaggaaggccgccccttgctgatcgaagtgctacaagaacaacgtttgattttggggaacgaggacctcgcctgcaggttcgccgaggtcggggaactcgttgagtttgatgctggttgccagttcatcacgcaaggagatcgcgattccgaggtgtacttcattatcactggccaagtggaggtgagggttcatgatcgggcggtcgcagttcgtggtccgcaggaccatgtaggggaaatgtctgcgctggtgccaacggcgactcgatctgcaacggtcatcgcgaccgagcctaccttggcaatcaaagtggctgctgcggatttcaaagtcgccgcggacaaatacccgtcactgtggcgtcatgtgaccaagcagctcgtcgagcggcttaggcaacgcaatcagcatgttcgtcccacccatgaagctgcgctggtattcctcatctgctcgacggaggcgctcccggttgcgcgcgagattcagaatcaatttgcgcacgacaagttcttcgtgaagatctggacagaggggacgttcagggcctctcagtaccctcttgatagcctcgaagatcagctcgacgaaagcgacttcgctatcgcgatcgtgacccccgatgacctggttgaaagccgggatcagcagcagggggctccgcgtgacaacgtcatcttcgagctgggcatgtttgtaggccggcttgggcgcgctcgttccttcctagttgaacctcggggtgatgaagtccggctgccatcggatctgaaaggtatcaccacgattggttattcaacgaggccgggacaggacttggcatctcgtcttggtccggcctgcaaccagatgcgtgacatcttcaaccaaatgggcccgaagtga

SEQ ID NO: 365205 - DNA, 1551 bp, Pseudomonas aeruginosa
atgagtaagagctggaatcatgatcgggcacttcagcacatcgacaagaagctgaaggatgttgagacggtcacaatcaaaaactacgcccgcgatatgtcgctggagtccatcccgacgaacgttgcctatcgggttgatggcgtccacctttacgccgagattcagaacctggacgacatgttgaacatcacggcagttgaaggaaccgactgccataagcgcactctgcgatttctggatcaacactaccgggcggtgaaacgcatcttggaccgcgtggatggtcgacgtgtcgacttccacagccagcgccttcatgcgcttttcactaagccctacaacagtgagaacgacgcggagaaaaaacgggtgcagcgcgccgttgccacgggccagttgatcattgatgtcctggcagagactggtgacgacgacgcgcaaattcctgcggcgaaagttcgcattgggatcgatacgggcttggcgcttgctgttaacaatggccgcggtgggtaccgtgagccactgtttttgggcgatccggcaaaccacgcggctaagctcgcgagtaacaacaccccccgcgggatctatctgaccaatgctgccagagctgtaatcggtctggaagaaaaggattcacccgaaaagtctccccttaccaaggctgaggtgcaggcatgtcaggtcgcagcgaagctggacgtaacggcggatgaaatcgtcgaagagtggcgtgaggatctgaagaacaatcccatcgggagcttccagttcacacgccaaacgccaccgctctgcgacatggacatcatggcactgacgcctgctaactctaagcgtcaggagatgatcagcctttacgcggacatcgacggcttcacggcgtacgtcgcggacaacatcgacgaaaacgctgaggacgtagtccgcacgttgcacgtgcttcgtgccgaaatggaacgggtagtgacctccgacttcgaaggtcgccgtgtgcggtttatcggtgattgcatccaggcgctctcttgtgacggaacggtgcataacaccgatgaagagaagtccgtatcagaggcgacccggcttgctggtgcgattcgtagcagcttcaacctcagcattacgagactgaaggagtctgactacgaaacaggcagcctcggattggctattgggttcgatcttgggcccgtatccgtgactcgtctggggcgtcatggtgaccgcgtccgctgtgcaatcggccgaaaggttatcgagtctgagaaccgccagtgcgcatgtaagggtgatgaaactgctattggacaggctgcgtacgatgcagcgtctgccgctgtgaaaaagctattcggcgctcgcaggaaggttacaaatctcgattacgtggaggctaccgaggccctggccgacgacggcgataattcggctaagaaggcacgttctgctgcatacgttggggctccagcaatcatcaagtcagatgagcgtgcagttgaaccctatgcggcaggggcccctggtgtagagggctcgcgttga

SEQ ID NO: 365206 - DNA, 783 bp, Pseudomonas aeruginosa
ttgagcgcagctctgaagctgctggcccagatcgctccggagtttggagcgatctgtgttcataccggcgacaggaccggcaggttgaacctgccaatccggcttgttgatggccggacgattccttacagcttggcgctccgggaaagcgccggcgaagtgtctgtgcgcgaggaggtgccagagcacttgcccgcattttgtcccgaacggcacatcaattcagacggtactttctgcctgagctactcgccggttcaaccactgaagattgaggacgaagagactgctcgcgcatggatggaaacgacctacaagttcctgaagcttcaggagcgggcgcgggcgcagcgtagatggccgaatgacagagcttgggcccatggcggtgccgcagagcatcaattacgagcgctagaggcagtcgttggcttaggagacaagctggtagaggcgcaatcatcgcggcagctagtcgttcgacggcggcattcgaagaaccgaccagtgctggagttgatgcatcatggcaaatgcctctacagggtttgggaaactgaaaaaagagtcgctaatcagagaaagcgatgcttttgctgtagctctggtcgacaacgacccaagacgctccgcaagtgtgctgatcatggtgcgcgggcggctgagctggtgcttgcgctttatgaatgggagcgcgaggaaaagcactattgggacaccatgcgtggaaaggattgttgtgggacctgcgatgcctgtcctcttgctaactctatatcctag

SEQ ID NO: 365207 - DNA, 1011 bp, Pseudomonas aeruginosa
atgaacggcgtgcaggacaacgacaagacggatgccgagatcgtccaggacgcgctcgagaaactgctcgacaagtcaccactggggaaattcgtcaagctcacaatccggtccgaggatccggcaactccactgacgaccttgatgcatatagggttcaaggaaaatctcggtaacacgctggcgctagcagactttctttggacacaggcgctgaactacgcactgacgagaaggcggcgcgagcagattcgggccaggctggaggatgcaccgcctggagacatcagcgcgatcgcagcccctgtcaacgccgcgcgcgacgcctttatacaattccacaaagactaccccagccgcgccagtgaagtaggagaggtgctggcctactgcatcgccgttaacgatctcggtgctgctcaggtggcggcgaagatgtcactaaagacctcagggaacatgcccgtgcacggactcgatggtatccatgccaaggtcgaggcaggggcgctctatgtattctttctggagtcgaagctaagtcaaagcgcgaacgcaggagtcaaagattacgctgaatcggttgcaggattcggcagcaacctcaagcagtatctcttggaatactcgattgtcagggatttgggcaacctagattcgcttactggcgccgagcgcgacttagcgcttgcttgcttcgacgtgatggacagtccggacaccgtcgagcggcgagagcgatccgtaggcgtgattctgtataaagaaaatcagttcgaaaaactctctcccgtaaagcaggggcagccagtcggattccacgaggccgagttcgtagcggcatatgcctcgcagctggcccaccaccaaaacgcggcactgaaacacctcgccgctggaaacgtggatactaacaagtgccaggtgtatttcgtagccgtccccgacgtcgacgaactgcgtgagcagttctaccagcgtatgggctacatacccaaggtcaaggaatga

SEQ ID NO: 365208 - DNA, 2607 bp, Pseudomonas aeruginosa
atgagtacgttcgcccaagacttgtctagacgactgaccggtcacgcgtccttttggacctatcttggacagcttcagggagctggagctgcccgcacactggccagaccgttggacgatgctccgaccttagatatcgataaggtactcaaactgctctactgcgcatcggtcttcgtgcagaccgatgcggacgaactaaagcggctcgctcaggcaatcgttctcaacacactgttgctacacgaggacggcgaactgcgcgaacggagcctccatgtcctcacagaactgggaaacttcccggggttgtcctatgccgaacgcgcctatggtacgggcgaccagacgctgctcggcagaatgaaccgtcaggtatcgcaggcattgaatacggtagccataaatgggttacccgtggcgctcaccgactatcagaaacaggtttgggacagactgcctattacccgagcgcttgccatatcggctcccacttcggcaggaaagtcatacgttgttatcgagcatctttgtcagcaggccgagaagcaccaacactttacagccgtctacatcgcgccgacccgtgcacttctgtcggaggtgcagcagaagatccaactccgcctcaagggccgggacgaaatccgaatatcgaccgtaccatcgctggacccactccagcgcacctgtcaggtcttcgtcctaacacaggagaggctgcaggtactcctatctatatatggcgcagcattcaacgtcgtagtcgtggacgaggcccagaacctgtcggaccacgcgcgaggaatgatcttgcaagactgcctccagacgttgatgtcgcgaagcagcacaacgcaattggtaatgctcgctcccggcgccaccggccttccggaaattgccaaggcgattggcgtagatgcactgcgccccgagttcactggtgtctctccggtacttcagaaccgtatcgtcgtaagcaaagttaaaggcagtcctaacgagatgcgattgcagttactacgcggtcctgaggagcgcgtagagatcggtaatctagtgtcctctctcggcctggacaataaggccacaaggctggcagccattgcgctcgagcttggcggcggcgaaggctcgctcgtttatgagacaggccctcgggaggctgagaagaccgctctgcagctaatgaacgagcttcgtcgaagacccccagatccccaggatcaggcgctgctggatctgtccgagttcattaaggaacatatccatcctgagtatcagctcgcggcaatggtcacccacggagtcgcttaccactatggccgaatgccaagcctgctgcgcgaggcgatcgagtcatcattcaagcagacgcgaactggactgcattatctcgtttgcactacgaccctcgcacaaggaatcaatctaccggcacggaatgttttcatcgacacgcccaagcgcgggcggggagaaaacctcgatccagcgttactctggaatttcgcgggtcgagctggccgtctaagtcaggacatcgtcggcaacgtattcctactggactacgacgaatgggacaccaggcccatggacgatttcgttccgttcgaggtgaagtcagccatcacgactactctctcccagcagttcgaccgtgtgatgggagctgtacgaggcaacatgccagtagcgcttccgtggaatgccgaggccactcggataaaagcatgtgcgggcctacttatcgcaaaagctgccgagggaatatctgacaagttcctcgcatcggtccttcctccggaccggcaggactccgctgctgaggtctcagagtccgccgtcggcgcggcacaaagtattggcctacccgcatcacttctccatgctaactggaccatcgacccgtatggcctgcgacgactgtatgaccgactgctggagaagatcgacagtgatgatctaagcgatgtaattccgctaaacccccgtgaggctcccgaaggcctttaccagagtatcttcaagcgcatactacggacggtcgataaacagcagggaaactttggagcgttggtagcgggcctcgcgatccagtggatgaaagggatgccatatcccgtaatactgaaatactgggtgaaaagggcacgtttagcagaagagcgcgatgctcagaaagccgccgaagcagggacacgccctaagcgtcccaggaccgtcgatgcgctgatacgagaggccttcgacctcatcgaggatgtggtccgcttccgcttcgtccagctaggaaaggcctatcgcgacctgcttgtgctggcgctacaggagaaaggcctacataagcgcgtcccagaggtctacgacttcgcactcgcacttgagctcggcgtctcgacggagactggcaccgcctttgtcgaactgggcctttcacggatcgctgcatcggcgctggaagatctgttcccgagctcaagcatgacagttgccgaagcacgccaagctctgcgtacactcgatgttgtagcgaacaaacttaaccccatcatcgtgggcgagctcgacaggctaggtcttcgagatccaattgagggataa

SEQ ID NO: 365209 - DNA, 198 bp, Pseudomonas aeruginosa
atggacttccttgaagacttcatactcaaccatctggcacaccgcattggtgtccgcgtattgcgcttactgagcggtggccggttcaggggagaaagaggctttgcctggggctgggcagtcgttgtcggtggcttgattctgttcgccccgttcgtagcattcattacctggctgattcatcgcagcgcccattga

SEQ ID NO: 365210 - DNA, 534 bp, Pseudomonas aeruginosa
atgactcgggttcctccaagcgcggagctgattggcgcgctggctctgcattacgacgatctcgtcgacttcatccgccggcgttttcagggcagccaattcgcgcgcgacgtcgtgcatgatgtctgcgttcaagtcctggagaaaccgccgaaggagcgcatcaagttaccgctggcgttcctgcgccgcgcttcgttcaacaaggccatcgatcgcagccgggcggacaatactcgcaatgcgtatttcgagttgtccgccgaggtgcccgactggcacgtgcacgaggtcgatggtgcctgcgccctggatttcgagcagcagttggaagccctgctcgccattatcgaagcgttgccaacgcgcgcgcggcagatattcctgttgcatcgcattcacgacatgtctcgccaggacattgcccgcgaactgggtatcaccctgaacatggtgggaaagcatctttcccgcgccatgatcgctatcgctcgtgattgggaaccggcgcgacaggcgctggcgggccgatga

SEQ ID NO: 365211 - DNA, 843 bp, Pseudomonas aeruginosa
atgatgcaccaagatcctgcacgcaatcgacaagacaacgattcactacagccctacgaggaggccctcaagactcgtgtgccttcgcgcaatgaattgctcgccgaagccaaggccttcagcgcgcgtcagcgccggcgcaagcagaccctggcggggggcctttccgtgctggcgctagccgtgggattgtgggtcgccgatcctgcatggcgcagcgaggaacagcggacggcagtcgggcaaagcaagagcctgctgttggcggacggcagccgggttgttctcaacagcgccaccgttctgcaggtagagagtcgcctgcgcagtcggcagatcgaactggtggaaggggaggcgacctttaccgtggcgcatgggccgaagccattcaccgtgcgcagccagggcgtttccgtccgggacatcggcactgccttcaatgtgcgcagcgaccggcgtggtgtctcggtgacggtactcgaaggcgccgtcgcggtaggcaatgcgacttcgccggagcagcgcctggaggcgggccagcaaatgacctcaacccgctcgagtctgggtctggtgcaggcggtagacgcggatcgcgccatcgcctggcagcacggcaagctccgcttcgacggcaccccgctacaggatgtgctggtggatatccagcgctaccgcacggcgtcaatccgcctggcggaccctcgcgtgacgggcttgcgtgtgtcaggcgaattcgacagtcaggcggttgaagcgctgatcgatctgctgccgtcgatcctgccggtgcaggtgaatcgccggccggatggcagcgtcgaagtcggcgcgcgctga

SEQ ID NO: 365212 - DNA, 2400 bp, Pseudomonas aeruginosa
atggacactaaagtactctcgcgccgcttcggtttcgcgcgcctttcgctactggcaggcggcctgttgctcgcttccaccctgcaggcgcaggaagcgcgctatgcgtttacgctgctgccgcaaccgctggatcgggcgctcaacgagttggcccggcagactggcacccgcatcctcttcgccacggacgcaactgcgggtctgcaggctccggcgctcagcggcgaactgagcgtgcagcaggccttgcgacacctgctgcggggaacgcggctgcggctggagcagaccgccgatggcagttacctggtggctgcgccgcagactgatgcggtgttggaaatggatgccactcaggtgctcggacagcagctgggggaagtcaccgagcacagcgggtcctacaccaccgggagcatgagcgtgggtaccaagctggcctcctcgctgcgcgagacgccgcaatcggtcaccgtggtaagccgccagcgcatggacgaccagaacctgcagaagctggaagacatcgccacctacacgccgggcctgaccctgcgcaagaccggaggggaacgcccggagttctactcccgtggcgcggccatcgacaacatcatgatcgacggcttgccggtagcctatgacagcgacaccctcggtacctcgacgctggccatgtacgaccgcgtggaggtggtgcgcggtgcctccggcctgatggtcggcgcgggcaatccttcaggcaccctcaacctggtgcgaaagcgcccgaccttggcgccacagctgactttcaccgggagtgccggacgctgggacgattaccggggcgaagtcgatgtcagcggcaagctgagcgacagcggcgacctgcgcggccgcttcgtcggcgcctaccaggatcgcaacagcttcgtcgacgcttacggcaaccagcgccaactgttctacggtatcggcgagtacgatctcaacgaagccacgaccctcacgctgggggcctggtacaaccgcgaagacaatcccggcgccgactggaacggtctgcccacgcgccccgatggcagcttcttcgacttctcacgctccgcgcgcacggcgccggactggacctactgggacaaggaaaaccgcagcgcttttgccgaagtagagcaccgtttcgataacgactggaagctgcggctcaacgcgacctggctgcgtggcgacatggacatgctcggcggcagcctctacaccgacgagaacgatgcctaccacctgaacatcggccgctatacgtaccagcacacccagaagagtatcgatacgtacgccagcgggcctttcagcctgttcggcgccacccacgaactggtggtcggcgccagttggcggcgtgacgaaaccaacgatggccccggcggccccggcatcgattcggacgtgatcgtcgatccgcagcacttcgaccccaaggcctatcccaagccggccatcgacaacaactggtcgcgcgatggccatgagcagcagtcgagcacatacgccacagcgcgcttcaacctgcgtgaggatgtgcacctgatcctcggctcgcgcctggactggtacgaatatgagcagctcacccattcgggcgaatacagctttggcgacgactacaaggcgactcgcgagtacaccccttatgccggagtcatctacgacctgaacgacacctattcggtctacgccagctggactcgcatcttcaaaccccaggcagcccagagcgtgagcggcagcctgctggagccggtgaccggcaccaactacgaaaccgggatcaagggtgagtatttcggtggggcgctcaatgcgagtgcggcgctgtttcaactggtgcaggaaaatctcgccaagtcgctgccatccgcacaatgcgccccgggagtcagcgcctgctacgaggccagtggcgaagtgcgtacccgcggtgtggagctggaagtgggtggcgagctggtgccaggctggcagatgtccgccggctacacctatgccggagccgagtacaccaagtccagcgactcggcagagaagggcgagcgctttgacagcgatacgccctacaacctgttcaaggtcttcaccacctatcgattgcccggtgagctggatcgctggacagtaggcggtggcttccgtacccagagcagcgcctacaccagcttcggcgtgaagcagggcggctacagcgtcagcgacttcatgctggcctaccagcccgccgcggagtggcagctgcaggccaatctgaacaacgcctttgacaagcgctactaccagaacataagcaacagctggggcgccaacagcttcggtgacccgcgcaatctgatgttgacggtgcgctacagccctggcttctga

SEQ ID NO: 365213 - DNA, 168 bp, Pseudomonas aeruginosa
atgagcagacgtttgccgagcactgccgcactgcttgcgctggaagcagccgcccgtcaccaaagcttcgccaaggcggcacaggagctgacacgcccggatatggagacctcttcagctctggagaaattcgagcgctggctgctggaagaagctatggcggaatag

SEQ ID NO: 365214 - DNA, 753 bp, Pseudomonas aeruginosa
atgcgcaagctggcttgcaaaaaaattggtaacgcgaagacgaatcccctccttagcatgcagcgactaaaagatggagttcctcaacacatgacaagggagtgccgtaccgtgaagaccactgaccgtacgtttctggggctggggctgttgattcctctctggctgctcgctggcgtggcgctgacctcgctgggatatccgggttatagccatattgaccaggcgatgagccagttgggagcggtgggagcacccacgcaatactattcagcatgggttaataacttccccctgggggtgctctttgtgctgttcgcggtaggtgtggcgcggcggtttggaatgtcgcgtctggcactgctaagcgcggtcttgatcctgcttcacggtctggcgagcttcgcgaccggcctgttctcttgcgaccagggatgtgcgccggcacagccgtcggtctcgcagcaggtgcacaatctggcaggactagtgatgttcctctcgctgacgctagccagcgcgttgtggatctttcttggcgagaaactactgtcatcaccatggttcgggtggttctcgttgttctgcgtgatcctcgccatcgtcacagtcgcaatgatggccaaggcattcggcgacggacatgggtttggcttgtatcagcgactcaattacgcagtttcggttgtctgggtggctgcactttcatggatggcacttagaggcgagtcagcgtctgcgagtgtccgttaa

SEQ ID NO: 365215 - DNA, 384 bp, Pseudomonas aeruginosa; identical to SEQ ID NO: 341389

SEQ ID NO: 365216 - DNA, 360 bp, Pseudomonas aeruginosa
atggaccgtttcgatgcgatgcaggcctttgcccgtgtggtggagaccggcagcttcaccaaggcggcggagacgctgcacgtgagccgcaccagcgtcacccagttggtccagcaactggaagcgcggctgcgggtacgcctgctcaaccgcaccacgcgcaagctcaacctgaccgccgacggcgccgcctactacgagcgggtggtacgcctgctggcggaactggacgatgccgagaccagcctctccagcgccgccctggcgccccgcgggcgtctccggatcgacgtaccgagcccgctggcgcggctgctgctgatcccggcgttgcccgagttccatgcgcgctatccgtaa

SEQ ID NO: 365217 - DNA, 747 bp, Pseudomonas aeruginosa
atgtatacgacgcaacggacggcgctggtgacgggaggcaaccgggggttgggcgctgcgatcgcccgtgccctgcacgatgccggccaacgcgtaatcgtcacgcatacccccggcaacaccacgattggccagtggcagcaagcgcaagcgacacagggctacacatttgctgcctacggggtggatgtatcggactacgaatcaacgcaggaactggcgcggcgcatccacgccgacggttatcggatcgacatcctggtgaacaacgccggcatcacccgcgatgcaacgctgcgcaagctcgacaaggccggttgggatgccgtactgcgcaccaacctggactccatgttcaacgtcaccaagccgttcatcgatccgatggtcgagcgcggctggggtcgcatcgtcaacatctcgtcgatcaacggcagcaagggccagttcgggcagaccaattattcggcggccaaggccggcgtgcacgggttcacgaaggcgctggcgcaggaggtggcgcgcaagggtgtgacggtcaacaccgtgtcgccgggttatctggccaccgagatggtgatggcagtgcgggaggacatgcgccagaagatcatcgatgcgattccggttggccgtctcggtcagccggacgagattgcggcacttgtcgccttcatcgccagcgaagccgccgccttcatgaccggcagcaacgtggcgatgaacggcggccagcatatgtattga

SEQ ID NO: 365218 - DNA, 444 bp, Pseudomonas aeruginosa
atgagcaacgaactgccaatccatctctacaaagccaatgccgagctgcaactgcagatcacgcgcttgctgcaggagagcagccatcactggctcgaagccatgcaacagctcagcgctggcggcgtgatggagacgacctcgcgcatccagggcctccaacaggcggccgactggcaagcgctcgcgaccttgccgtccgaggtgttctggcgtctgtgtcaaggccgcatgggcaatgcccaagcggtcgggcaagtagcagccaagagccagacggcctttgccaatggactgcgccaggcgctcacgacttggcaggagtctgtctccgaggcattcggcgccagtggcgacgcagcctctttcacgcagctttgccagcgctgggcgcagccctggaccgccccaagcgccgtaccccaaggcaagaccaagaaatga

SEQ ID NO: 365219 - DNA, 1761 bp, Pseudomonas aeruginosa
atggacacccttgccatacctgacaagcccgcgccggcaccgtccgaagtcgtctgtcgccccgatgtcttggatacgcttgcgaacgcgtgccgggcacgcggcactggcgggttgtcaccggcggcgggtttgctggcttggtacgactgggcgctgcacctgagcctttcaccgggcaagcagcgcagcctgatggaaaagggattgcacaagcagcgacgcttggcgcgttacgtcgcgcacgctgcaagtgcccacggctgccccacgtgcatcgagccgttggagcaggatcggcgcttcgaggcgccggcctggcagcaatggccgttcaacgtgatccaccagggctttttgctgcagcagcagtggtggcacaacgccaccaccggcgtgcgcggcgtgtcgcgccatcacgagaacatggtcactttcgccgggcggcagtggctggacatgtggtcgccatcgaatttcatctggaccaacccggaagtgctggaagccatcagaaccagcggcggcgccaacctgtggcgcggcgcgatgaacttcctcgacgatgcacagcgtcttgcgcttgacgatgaaccggccggtgtcgaaggcttcaaagtcggccaggacgtggcggtcacgccaggaaaggtggtgtttcgcaaccacctgatcgagctgatccagtacacacccacgacccccgatgtgtatgccgagccggtgctgatcgtgccctcctggatcatgaagtactacatcctcgacctgtcaccgcacaactcgatggtgaagtacctggtcgaccaggggcatacggtgttcatcctttcctggaagaacccgaccgcggccgatcgcgacctcggcctcgaggattaccggtggctgggggtcatggatgcactggacgcggtcacggccatcgtgcccgagcgcaaggtgcaggcggttggctattgcctgggcggcaccttgctgacgatcgccgcagccgcgatggcgcgcgatggcgacgaacggctgcacagtttgacgctgctggcgtcggagaccgacttccgcgagtcgggcgaaatcgcgcttttcatcgacgacagtcaactcgcctggctggaagccgggatgtgggacaaaggctatctcgacggcaagcagatggccgcctctttccagatgctcaactcgcgcgacctgatctggtcgcgccgcgtgcgcgagtacctgctgggcgaacggcaggagttcaatgacctgatggcatggaatgccgacgtgacgcgcatgccgtatcgcatgcacagcgagtacctgcggcgtttgtatctgaacaacgatctggccgagggacgctaccaggtcggcggacggccggtggcgatcgccgacatcgaagtgccgatgctcatcgtcggcacggtgcgcgaccacgttgccccctggccatccgtgtacaagatgcatctgctcagtgatgcggagctgaccttcgtactgaccagcggcgggcacaacgccggcgtggtcagcgagccggggcacccccggcgcagctaccagattgcgacccgcagcgtcggcgctcgctacgtcgatccgcaaacgtggcgtaccgaaaccccgctgaacgagggctcctggtggccagcctggcagcagtggctggcacgacattcgaccgagcgggtatcgccgcccgccatgggcggcacgcaggtcccgcttggtgatgcaccgggaacctatgtggcaatgcgctga

SEQ ID NO: 365220 - DNA, 609 bp, Pseudomonas aeruginosa
gtgagcgaacgtcctcaacatctgtccgctgaagagcggcgtgctgccacagtgcaagcggtggtggacttggccgcggagcaaaacccggccgagatcacgaccacggccatcgctgatcgaatgggtttgacgcagggcgcgctgtttcgcgccttccccaccaaggacgcgatcctggaggcaacgatgacctgggtcggtgagcgcctgctggtgcgcgtggacaaggcggccgaaggcgccgcgtcgcctgccgcggcgctcgaagccatgttcatgacgcacatcgacttcgtggcaaagcatcccggcgtgccgcgcatgctgttcggagaactgcagcgctctggcgagacgctcgccaagcggatggtgcagaccttgctccgtcaatacgaacagcgcctgcgccgcctgatggaagccggcaaggcgcagggcgacctggatgcggaactggacgtagatgccgccgccgtgttgttcatcggcacgatccagggactggtcatgcagtcgctgttggccggcaaggtcagtcgcatccgtcgtgacgcgccagccgtgtttgccatctatctccgtggcatcacgcacacccgatga

SEQ ID NO: 365221 - DNA, 306 bp, Pseudomonas aeruginosa
atgaaaactccaaacctcctattcaagaagacccgttgggtcgtgatcgccgtcgtcgtgctcgctcttggcggcgcactggcgttctggctgtcgcgcgaccatggacaacaagatgcattacgcctctacggcaacgtcgacatccgcgaggtgcaactggccttccgtcagcccgggcgcgtgatgcaaatggctttcgatgagggcgatgccgtcagcgccggcgagcgcctggcggcgctcgatgcgcaaccctatcgggaagcccttgcagcagcgcaggcccaggtgcaggtggcgtag

SEQ ID NO: 365222 - DNA, 1155 bp, Pseudomonas aeruginosa; identical to SEQ ID NO: 324069

SEQ ID NO: 365223 - DNA, 3348 bp, Pseudomonas aeruginosa
atggcgatctaccacttgaacacgcacacgataggacgggcggccgggcatagtgccgtggccgctgccgcctatcgttccgcgtcgtcgctggtagatgagcgcaccggcgaagtgttcgacttcaccagaaaaggcggcgtgttgtcgtccgagatcgtcacgcccgcaggcgtgccggttcccgaacgcgccgccctatggaatgccgccgaggccgccgagaaacgaaaagatgcgcgagtggcccgagagtggcgggcagccctgccgcatgagctgaacgaagccgaccgtaaagagctggcaacgcagatggggcaggccatcgccgaccgctacggcgtggccgtggatgtgtgcattcacgcgccagacaaggagggcgacgaccggaattttcacgttcatatgctggcgaccacgcgaaccattggtgcggatggaacgctaggcgcgaaggccgtcattgagctggcgaacaaagacaggcagaaggctggcattcctggcacaagccagggcgacatcatcgagattcgccaacagtgggccgagctaacaaacgaggcgctagagcgggctggaatcagcgcccgcgtagatcatcgcagctatgcagatcagggcgtggaactcacgccaaccaagcacatcggcagcgatgccgtggcgatggataggcgcggcctggaagccgaccgcatcgacattcacaacgccgaccggcaggagcaggcgcggcagattgtcgagcggccggagatcatcctagacaagctcacggccacgcaagcggtattcacgcgccgcgatattgccgcagagctgaaccgctacattgacgatgccgaccagttccagggcttgcttgccaggctggaacaatcgccgctgcttgtcgagctggaaccggccagcggacgcgacccggcgaagttctccacccgcgaaatgatcgacaccgagcgcggcatggtggacagtgccgagcgcctggcgagaaccggcaggcatggcgtttctagctccatcacgaacgcggcaattgacggcgcaggcaccctatcggcagagcagcaaaacgccgttcggcacgttctcaagccgggcagcctggccgtggtcatcggcgacgccggcacaggcaaatcgttctcgatgaaggttgcacgcgaggcatggcaagcgcagggcttcaacgtgcgcggcgcggccctggcgggcaaggcggccgacgaattgcaggcgggcagcggcatcgacagccgcacgcttgcatcccttgaatttgcttggaagaacggaaaggacaaactcacttcccgcgatgttctggtgatcgacgaagcgggcatgatcggcagccgccagcttggccgcgtcctgaaagccgccgagcaggccggggcaaaagtcgtcctgctgggcgacgacaagcagcttgccgccatcgaggcgggcgcggctttccgtggcgtggtgcagcatgtcggcgcggcagaaatcaccgaggttcgacgccagaaagaggcatgggcgcgtgccgccggccaggagcttgcgcgcggttctgttgccgatggcttggcggcctatgccgagcgcggctacgtcaaaatccacgatagccgggacgccgcccgcgacagcctggcggccgcttatgtcggcgaccagggcaagggtagccagatcatccttgcgcacagcaataaggacgtgcaggcgctcaatgaagccgtgcgccaggcccgcaaagaacgtggcgagctgcgcggcacggcccgctttatgaccgagcgcggcggccgggagtttgccccaggcgaccgcatcgtgttcctgaaaaacgaccgcgaccttggcgtgaagaacggcactcttggcaccgtcgagcattcggaagatggaagcctggccgtgcgcctggacagcggcgaagcccgccggttccaggccgcgcaatatgccgccgtcgatcatggttacgccgtcaccatccacaaggcccagggcgtcacggtcgatagggcctacctgctggcgacccccggcatggatagaagccttgcctatgtcggcatgactcggcaccgcgaggcggcgaccttgtttgcaggagccgacgacttcaccgaccgccgcgtcggccgcctggtcgatcatggcgcagcgccctacgagaacaagccggagaaccgagccagctactttgccactctggaaaacgacaagggcgaacggcacaccatttggggcgtcgatcttgaacgcgccattgcggccagcggcgcgaagcgaggcgaccgtatcggcctggaacatggcggctctgaaaccgtccgcctgccagacggcaccacggccgagcgcaacacctggcacgttcgcggcgcggccgagctggccgccggcaagctggcccaggtgctaggccgtgagcgtccgaaggaaagcactttggactttgccgaccggcgcggcttcgacggcgagagcgtcatgcgccgttggctggaacgcggccgggcgaaggtggccgagctggccgggaagatgcgcgacggcctgcgccgcaacctggaacgccacggccgccccgacctcatgcccgcgaccgacattgccggcacgccgaccgtgcagcggccgcagcagatcgagcgcacgccagaggacgagaagaagcgccgggcggccgagatcgcggcgaagttccggcagcaggtcagcgaggaacgcggcgagcaggtagcgccgcagcagcggccccaggccgaacgcccggcacccgacccgctggccggattccgcgccggtgtcgagcgtgccgaggcggcaggcggcggcctggccctggacgtggcgaaggcacagcttgccgtcgcccaggagttccacgcggccgggaaagacccccggcaccattcggcggccatcatgcaggaaggccagcagcgggcctttgcgggcctggcgcagccgtcccaggccaaggccgagccggagcgcccggcggccgtccaggtcagcgaacaagaccgcaagcgggccgaggcgcacgccaagatggaagtcagccagttccgggcgctggcggtgaagcggcaggcaggctttgcgggctactccgaccgcaacccgagcgcctggcgcgagctgccggacgagctgcgcgggcgcatcgagaggttcaacgcaatgcccaaggagcgccaggccgtcgagctggacaagatgcagcgcgagcttgccgacaggtatgcacgcaatccgcaggaaatcacgcgcagccgacagcggcagcgtgagcaggaacgcggccgcgatggtttcagcagatga

SEQ ID NO: 365224 - DNA, 909 bp, Pseudomonas aeruginosa
atgaacgaagccgaaatcgcctcaggcctgccaagcacaccgaactatcagtacgcgcagcgcgtggggagccagctcttccttgcaggccaggtgccgcaggccgccgatggctcgatcgtggcacctggagatccgagcgcccaggcatcgcagtgcctggcgaaggtgaaggcgacgggtctctcgcctactggcttgagggccatcgacggtacttcgagcaggagtgcgccagagccgggcgacagtttgacgagaggatgttgctcgcctgtgagaaattcaaagtcatctatcaacctcagccccgcacggcctagcccgtcgttgggcaacacggagtccgttttcatgagtaccaaccatggctcagtcacactgcgcctcatgaccgagcaggaccttcccatgctccatgactggctgaaccggcctcacatcgtggagtggtggggcggagaagaagcacggccgacactcgctgaagtgcagcaggagtacctgccaaacgctctggcgaaagagtctgtcacgccatacatcgccatgctggacaacgaaccgatggggtacgcgcagtcatatgtcgcacttggaagtggtagcgggtggtgggaagaagaaaccgatcctggagtccgtggaatagaccaattcctggcagatccatcgcagttggggaaaggccttggaaccaagctggttcgggcgcttgttgagatgctgttcaacgaccctgaggtaaccaagattcagaccgacccgtctccggacaacctgcgagccatccgctgctacgagaaggcggggttcgtgccgcaacggacgataaacacccccgatgggccagctgtgtacatggttcaaacacggcgggcattcgagctggcgcgcggtgctgtctag

SEQ ID NO: 365225 - DNA, 237 bp, Pseudomonas aeruginosa
atgaggacgatcagcttccagggcgacggcctgtcggctagccagtaccggtcgatccagcttcgccagcgtgccatggcggcggtgaatcagtccgtgttgcaacagcaagttgtggccacgctccaggccctggagcagcacaaagagcagggcggcaagcctgagcgcgtctggaccactgtcaccaacgaaaagggcacgccgttcctgggcgacgtgttcgggtggccgtga

SEQ ID NO: 365226 - DNA, 297 bp, Pseudomonas aeruginosa
atgacgaacgaaaccaagacagaccgccagcgccgcctggcgcgggaacgccaacgggcgaagcgcgagcgcgatgccctgcgccgcgctgcgctgggcggccgccgcttcaacatggacatgtaccagggaacggctgatgcactcgatctgatctgcgcagccgggggcttcgccgagccggccgaggcggtcactttgctcctacacaacgttgccgaaattgctgagcgtgacgcatcacgttttgccgaattgatccaaaagagaagccatccagggaggaccaagcgatga

SEQ ID NO: 365227 - DNA, 969 bp, Pseudomonas aeruginosa
gtggccgaggcgtaccacgttgacgacgcggcccggaccttcgccgtcgagccgacccacgcccaggaactcaatgaccagatcacagagcgcgtggacttcctgggccgcatcaacgtgattccggtcagtgaggtcaagggcgagaaagtcatgctcggtctgtccggcccggccaccagtcgcaccgacaccaacgcccgagaccgcgagccgcgccacctgctggacctgaagaacaacacctacgaacccgcgcacacggaaaccgacgtggcgctgtccttcgccaccatcgacgcctgggccaagttcccggacttcgtagaccgctacttgacggcggtgcagaagcgcatcgccctggaccgtatcctggtcggctggtcggggacgcacgccgccactcagaccgacccggcgaaatatccccagctcgaagacgtgaacaagggctggctccagatcgctcgcgagcagattcccgaacaggtgctcaggtccgaagacccggccaagaaaatcacccttggcccaggcggcgactacgccaacctggatgccctggtgcatgacgtgaaacagatgatcgacccggtactgcgcgatgaaggcgacctggtggcgatcatcggttccgacctgctggcagcggagaagagcacgctgtacgccgcccagggccagaagccgaccgagaaggagcgaatcgaagaggtcaaggtcactgagacctatggcggcctgccctcgctgctggtgccgttcttcccggtgatgggcgttgtcgtcaccagcctggacaacttgtcgatctactaccaggacagcagttggcggcgtcatctgctggagaaccccaagcgctcccgcgccgaggacttcaacgggcgtaacgaaggctacgtgatcgagcagcttggcaagttcgccgcgctggaaggatcgtcgctggaactggtgcgctga

SEQ ID NO: 365228 - DNA, 783 bp, Pseudomonas aeruginosa
atgtcagcggcatatcgaccaaattcgggcggctcatgttgtctccagcgctgcgcgcatccatttcggcattctgcaggccactattttgctcaggtcttcggggctgagagcttttttgattacagcaacacactccggcgtagtaccgcctttgccgagataaaacaaagcgctgatggtcatccccactttggttcctgcgcattgcatcaccatcggagcagcatgcacgagcctgatctcggccttccccacaaatatcgatcggctggggccactcgtgtagtagatcggaatgaccggcatttgtgtactcagcccgaatcgcctcacggcatcagcgccgtggatctgcagcttccaacggttctgcctggcaatcagattcaccaagtcccaaggcccaggacgatgaacccgaccagtgtactgactgtatttcggccgcatgtagatgccacgatacacacgctcaagctcgccacggcgaacaagctgggcgactgccttggagatggccgagctcgaaccaagccctgcaaggcacctgatgctgaaaggcctccccttgcgcagatgcttcagccgctgcgcgacgaggtgagacaccggcggttcaaaatttgggcggggcatcgctatcgagtcgactccagcgacgagcagagcagcggctggtggagggcgattacccgccgtcggtattcatcttcaagcgcttcgtttaccagacattcctcaaggcgccccagcgagaaaatctggtcggcagatggatag

SEQ ID NO: 365229 - DNA, 1266 bp, Pseudomonas aeruginosa
atgagagtcgcaggagagctagttactcaaggttttttttggaaagccggcgaagaagaaaggtcatctggtggagtattaagaatctatgatggtggagcatttgagctggagctagttagaaagcttggcatggatgaactatctgaagagctaatgtcttcagatattgagaaaaagagatttaacatttgcggcgaaataaacaaaggctcatacgtaacattagaaggctgttattacaaaaaaaagagccatagcctcacaaacaatatcgccaactatataattcgcggaaagagggctatattaggcgcagcactagaaactaccgaagaagcctttaagtacagatctgctactttcaaccttgaggaaatagaaatttggattggggagagtggtttcaaaaaacaatatctcgatgaccttgagtcatttaaaatctcttacacccctccttcggctgtttcggcgaatattgaggacatgggagcactactcatacgctcctccgctattcaaaaaaatcatacccccactaagatagactattgccagacaactagctttattctaaagccagagcaaccgctagaaataagacccattacagagctaattagcagaatccagcattttataatattttctacccagcaacccatcatactaaaaaatgtaaaggccgccttagatgtgccagaaaaaaacccttataaagttgatatatactatgaaagccttccctttaattccaatctccaaaaacttaaagaggacaacattctttttactttgcaagacataaaaaacgatcttccacggctcataaaaaattggctggatatttttgagaaagctaaacctgctatgggcctttatttctcagcaataatggagacacataaatacctagacactacctgcctagctgtatgccaagcggccgagacctatcaacggcgaatctctggcgaagaggcgacattcaaaaacagaataaaaaagctcttttatcctttttctccatattgcaaaattgatgcggaaaaattctttgaagacgtaaaaacaacaagaaattacctaacgcactatagagaagacctagccgataagtcttgcaaaggcttagatttatacatattaaaccgaaatataagaaatcttattacagctaatataatgaaagacataggcattgacatgcccacaatagaaaaggcattacaagaaagcatcaaaatctcaagcgatttttag

SEQ ID NO: 365230 - DNA, 684 bp, Pseudomonas aeruginosa
ttgcggcggaagcggctggaggaggggatatccgggaagaccctgaacaacgaactgggatatatccgcgcggtgttcaatgagctgaaggtcctgggccagatcgactacgacaacccgctggccggggtgaagctgctcaagctgcaagagcgtgaactgtcgtggctgatgaccgagcagatcggcgaacttctcgaatcaatccgcagccgttgcgacaacccgcatacggagctggtgacactgctctgcctggctacgggggctagatggtccgaggcggaaaagctccccgcgcaacgactccagggcaacgtcgtgacctatgcgggaaccaagtcagggaaggttcgccacgtaccgattccagcagagctggctgaccgggtgagggcgcactggcggatgcatggtccgttcacgtcctgcatcacatccttccgccgcgccctggagcgcaccacgattcaattacctcaaggccaggctagccacgctctccggcacaccttcgccagccacttcatgatgaatggcgggaacatcctcacgcttcagaaggtcctggggcattcgacgccagccatgacgatgcgctacgctcacctttcaccggagcatctgaaggatgccttgcggtttggccctctcgctacctggcgtgacaatttggtggtgtga

SEQ ID NO: 365231 - DNA, 444 bp, Pseudomonas aeruginosa; identical to SEQ ID NO: 337940

SEQ ID NO: 365232 - DNA, 270 bp, Pseudomonas aeruginosa
atgcgcgaaatgtacccaaacccaaaaatacagaacgccatcatcagcgctaacgcgagcagcggtttcgtcgccaccacccgagacggcaagcctctacgcatggctctggtggacgaagaagacaacatcatcgaggcaggagataccgtgcgctgggcagcttggcgaatctgcaccgaggcgttagaaaacctatggcgagggcaaggacatctaatcatccacagctctccgcccggcgtgaagatacctccggaagcagcttaa

SEQ ID NO: 365233 - DNA, 210 bp, Pseudomonas aeruginosa
atgaaaaagaagcgcatggtcgagatcgaagaaaccttctgcgatgtttgtggtgaaaagtgcttcaaccacacagtcttcacgctctccgacggtagcgaacagcacgcctgccacggtaacaacgaaacctacggcaagcagtgccgggcggtgcttgatgagcgcctattgactgaggcgattgccaagcggcagccgatcaaatag

SEQ ID NO: 365234 - DNA, 540 bp, Pseudomonas aeruginosa; identical to SEQ ID NO: 334809

SEQ ID NO: 365235 - DNA, 159 bp, Pseudomonas aeruginosa
atgacacttcaccgctttgcgacattcagcatccatttaacacagcaggccgaacatgccctgtcccaatggattgaaccctgcctcggttgcgacctaatcagtgcaggagccatacgcgagctacgcagcgaccggatggcgtggaatccgcagtga

SEQ ID NO: 365236 - DNA, 903 bp, Pseudomonas aeruginosa
gtgaaggctctgcttctggcccataccaatgcggtttcggtttcggtggagatagaaatcgaatgggctgtcagcgcggcctcgatcacccgccagaccctcccgggcgtcaaacacatgatcgcggtcgcctcgggcaagggcggcgtgggcaaatccaccaccgcggtcaatctggcgctggccctggctgccgacggcgcccgcgtcggcatgctcgatgcagacctctatgggcccagccaaccgcggctactgggtcttagcggtctaccagatactcgcgacggaaagttgcaacccatgatcggccacggtgtgcaatgcatgtcgatcggctttctcgtcgatgaggagtcgccggtcatctggcgaggtccgatgatcacccaggcattgacccgcctgctgcaggaaacccactgggagaatctcgactacctcatcgtcgacctgccgccgggcaccggcgacatccatctgacactggcgcagcggatgccggtatccgccgcgctgattgttactacgccgcaggacttggcgctgttggatgctcgcaaggggctgcgcatgttcgagaaagtcaacgtgccggtgctcgggatcatcgagaacatgagcctgcatgtctgcagcgagtgcggtcatgaagagcacatcttcggcagcggtggggcacaacgcatggccgaccagtacggtagcgagctacttggtgaattgccgctggatatgcgtattcgcgtgggcgcagacgacggcgtgccggttgtcatcgcggaaccgacggcgactctggcacggacgtaccagacgatcgctcggcgggcggcagcacggttgtcgctacgagcgcagcatgcggcatctaccgtattgccagcagtgattgaagcctga

SEQ ID NO: 365237 - DNA, 732 bp, Pseudomonas aeruginosa
gtgcttaacgaaggaagctcgccgacaggccctcgcaaagctcgtagcacgggccagattcttggtactgcagataagcgagatagcatttacgaacgcatccttaatgcggtgatggaacaccgtttaatgccgggtactaaattggttgaggaaaagcttgcgcgcgttttcgaggtgaatcgcacacgcgtacgcgaagtactggcgcgactcgcttatgagggggtagttattaccatccccaaccgtggggcttacgttgctagcccctccgttgaggaggccagacacgtttttgaagcgcgccgcattcttgagcccgctctgattcgtacgttggttgccaaggctgacggcggtacattcaaacgtctgtatgaccatgtggccctagaacgggccgcccgtgaggatggcgacaagcgggcagtaattcgcttatccggggaatttcatacgctgatcgcccaaatggttggtagtccgccattgatcaggctaatgcgtgaactggcgtccctgacatgcttgataattttgctctacgactcacccaacgttccggcctgtcccaaccatgagcactccgacatcattgcagcgatggaagagggtaatcccgatagagctattgcattgatgctcagccatcttaatcacgttgaggctactctggatctttcgcttcccgaggactcggaggcggacctcgaggcgatcttcggctga

SEQ ID NO: 365238 - DNA, 1704 bp, Pseudomonas aeruginosa
atgaaagccaacgatgtcccgcaggcgttacctgcaaggcacccccagcttttcgaaggcttaatccaaaccacatgcgaagtgacctacgtaatgaaaaataaactgatgcacgtcttcaagaggccgacagctgttgcccttacgtttttttcgctcttcagcatggcgatagttccgaacgcgcttgctcaggaaagaaattcgattctggtagtggcggggccgcgaactccagaatcgctcgaccaggaatatccgccaactgaagcgactcacgaagccaaaaggaatatttacgagcgcctgttggcctatgcaccaaaagagatggacggcgttcagaccgagaactttgacaagctcgtcggagccttggctgaaagctgggaagtctctgatgacatgaccagcatcgtctttcacctgcgtgacggggttaagagcccagcaggcaacacgatgacggctgacgatgtcatgtggtcgttcgagcgcggctggaacaagaacgccaacttccgctggtatatgggccagatcctcggcatccagaattacaacgacgcgttcgaaaagatcgacgacatgacggttaaggtcacggtgcctaaaccctcgccgctgatcgaacggatctgggtcaacaatgacctgggtattctggacgctgaagctgtcaagcaacatgtcactgaggatgacccctgggcttccagctggctgtcgacccactctgcttcgttcgccccctatcaagtgaccaagtttcgttccggacaagaggtcgtttatgaggccaacccgaactactaccgcggagcaccacgcctcgaaaaagtcatcttccgcgagatgccgacctctgcgaatcgcctggccgcgcttcaagctggagcggtcgacgtagcggaatggctttctccccgagagctcaccatgctggaaaagaacccccagttaaagatctggcaggtgttcggcaactacatccagcgtgtggagatgaacaatacgacgccgcctttcgacaaccccaaggtacgacaggcgctgaactatctagtaccacgcgaagacatcttaaaggccgtctattacaacaaggcacgccagaccaaaagccctatctcggagatctacccgtcctacaccgacgagtactttgcatatgaacaggacgtcgaaaaggcaaagactttactgaaagaagctggactagaatcaggctttaaaactcaacttggttaccgcaccggtgatcagatcgaggaagaaatagccgtcattctgaaaactgcctttgcccgcgcaaacgtcgacctggagctcgtgaagttaccggcttccacgctcgtcgagaagtactccacgggaaccatccccatgtacttctatcgtgacatggccattgttccggatgccgcgtacgtcgcaaacctctggttaaacagcgcctctcttatcaactactcgaagttcaagagcgaggaagtcgatcagctcatcaacgaggcattgtccagtaccgatgaagcgaagcgtgatgccggcatgaagcgtgttcagcaaatagtcatggatcaagcgccctggatattcctgatgaaccctggttatcaactcgcaacccgagccaacgtggccggcttcagctggtacacaccaaacagcaacagctggtacgacttctacaaagaataa

SEQ ID NO: 365239 - DNA, 1041 bp, Pseudomonas aeruginosa
atgaaatttggcatgttgatgaggtcactaccgcgcccgctacgtatcgttctggggagaataggcatactcgttccgcagatgttcggcgttctgctcgcaacgtttctgctcatccgcctattaccgggagacccggccctgctgatgcttggcaacatggccactcccgatcagatcgaaagtctgcgagaaaaactcggactgaatgccagtgtctggacgcagttcaccagttacctgtccatggttatccaaggtgatcttggaacatccatgtttacctccaacccggtggtggtagacctgctcgatcgggttccagcgacgcttgagctgatcacttatgcaatgctcgtcaccattattatcgccgtctcgctcgcggtagtttctgtaatcaagcccaaggggctggttagcaagttcagtaaagtatatgggcttgccgcgggtgcagtgcctgacttctgggtcgggctgttgctcatttacttcctcttttatgtagccggcatcgcccctgcaccattcgggcgcctggacccaataatttcagcccctcctccggttaccggcttcctgaccatagatacgttgttagcaggcgacaccgaggcgtttgcctccgcagtgggtcggctgtttctgcctgtgcttacgttggccaccgtcaacgcaggcgcattgatgaaaatgacgcagatggtctttgcagacagctatcgcagcgaatacatccggcacgcacgtgcaagtggattatccgagtggaagctggttcgtattgcattgcgcaatagcctgccgccgatcattacgatggtcgggttcctcttcggcttcctgctaggcgccgctgtacttgtagaaacgatcttcgcctggggcggccttgggcagtatgccgtctccgctgtaatgaacagtgactatccagcattgcaaggattcgtcctggtagcggccgcattcatccttattgtttacacggtcgtggatgtcctctacggcatcgccgacccgaggattgaagtatga

SEQ ID NO: 365240 - DNA, 846 bp, Pseudomonas aeruginosa
atgaaaatagctcctggaccacgcagggcaacagccagggcaaccctgacgatcggcttgatattgctcgccatgcagttcctggcaattgtgttcgctccctggatcgcgccgtattcgcctgtagatgcaaatccgatcaacgcgcttcaagaaccatccctgaagcatctgttcggcaccgatgtgtcgggcatggatatcttctcgcgcgttgttttcgctactcgcatcaacctgctgattagcgtaacggccgttgccatcgcattcgctatcggcgtcccgattggtctcgcgatcggatactacaagggctggatcagttctttagcgatgcgcatattcgactttgtgcagtcattcccggtattcgtactgggcatggttctggtgtcggttatgggccaggaaatctggaacgttgccatcgtcctggccgttcttttcacaccggtgttcgctcggttgatccgcgcggaagttttgtcacttcgtgaccgccccttcatagcggccgcgcggtgcagtggcgcgacagaccagacgatcatgttcaaacacatcctgcccaatgcactcactcccgcgattgtacaaatctcgatcagcatcggtatggccattttgctgacagcgggtctctccttcgtcggcgccggggtacggatgccaacgcctgaatgggggctcatggtgagcaacggtgctcagcatatgattctcggaatctggtgggtcgctttgttccccggtcttgccatcgtcttctcagtactgactttcgcgctgcttggagacgctgcgaagcaaatattcgaccctcagaacaggagcatttcatga

SEQ ID NO: 365241 - DNA, 1659 bp, Pseudomonas aeruginosa
atgatggacgccacggaactgctgctggacgtacgcaatctctccgtccgctttgataaccctgcaaaaccgccggcattgagtgatgtgagcttcacgctaggcaaaggcgagatcctgggcattgtgggcgaaacgggcgcagggaagtctctgctggccagagccattatcgatatgctccccgcggaagcgcgtatcaccgagggcgaagtcctggtgaatggccaatcaatctccaggatgactgatgagcagaaaagagggtttcgcgggggtgaagtcgcgctcatcggcacaaatgccaaggcccttctagacccggtagtaacggttggcgaacagatcgccagagtcctgcgcgcacaccgaggcatcggtaaagccgaagcctggaacgagtcgatccgtctgttcgagcaggtggggattgttaatcccgaaagaagagcccatgcctacccacacgaactctcgggtggcatggcacagcgcgtagtcattgccatggcgctgatcgcgcagccgaaaatactgcttgccgacgatgcaacactcggcctggacgcaaccatacagctgcaagtgctggacttgctggtgcaaaaaggccgcgagctcgggctggctgtcgtattgattacgcatgatctcggcatggtcgcgagctactgcgatcgcgtagggatcatgaagtcaggccagttgcttgagctcgaaagcattcgctcattcctgaccgatggcccgaaacacccttacagccgcgagctactcgaagctgcgaaagtccggcctcttcccatgagcacaaagcatgtgcatagcgaggtggatacagcaccgttgctcgaggttacagacctcgtgaagacattccatatcaaggggacatcggaggtcgttcgtgcggtcgaccacgtgtctctttcgatccgacgtggtgagacgctggcgcttgtcggcgaaagcggatcgggcaagacgaccatggggcaatgcctggttcgcctgttgcagcccgattcgggatcaatccgattcgacggtaccgaaacgtctacctactcagacaagcagttcagggcggtacgccgtcgcatgcagatggtcttccaggaaccctacgtggccctgaacccgaggtggcgtgttcgcgatctcgtggccgagcccctgaacctcggagagcctttgacgcgctcacaaaaagcgacgcgtgtgctggaattgctggatctggtcggcatcgccagatcgaaagctgaggtttatccgcacgagctgacagccggcgaacagaagcgcgtcggcgtcgccagagcgttagcggtcaaccctgattttgtgattttcgatgagccgacaaccgctctggacatccgtgtacgagcccagatcatcgagctggtgcgcgatcttcaagaacgcatggggctatccgcccttttcattactcatgacctcaactctgttcgctctctggcacattacgtcgcggtaatgcgtcacggcaaaattgtcgaacaagggccgaccgagcaaattttcgctaacccgagggaatcgtacacacgcaagctccttgatgcagagctgcccatcgaacttccgtcaggcgcaggggttcgtagcgctgaaatcgcggaggtgctatga

SEQ ID NO: 365242 - DNA, 939 bp, Pseudomonas aeruginosa
atgaatcgaaaccactcatcggacaaaccgatccttgtgaccggtgcgggagggttagttgggcgccagttagtgcgccgcctatccgagcagcagcgttccgttctggcaatcgaccggttttcttcggtaactgaagaggggatcgagatccaggaatgcgacctcggtgatgtacaccgactacacgctatagcccaacagggcatcgactcggtcgtacactgcgccgcttattcgggcccgatggttgcgcgtgatgcgccctattcaatggtgcaggtgaacatcgttggcactgccaacatgcttgagcttgcacgcattcataatgctcgaaggttcgtttactgctcctcgaccagcgcctatggcgtcaccgaacggccacctgttatggaagacagcacgcttagaccagccagcctctacggtgccagtaaagtcgcttctgaatatataaccaccgcctacgccaatcagtatgggctttccgctgcgagcattcggctctcctgggtatacggacctggtcggaccactccctgcgttatccgcaccatgattgaggatgcccttgcgaagcgccccaccaagatgccttttggttcggactttcctcgtcaatttatctacgtcgacgatgcggttgatgggctggtgaaggcactcgacgcccccaccttgccaaggtcgacatacaacgtcaccggcgacacccggacgacgctcgagcaagtcgcagctgtggtgcgcgctgtgttcaaggatgctgatatcgagttgcagcctggcccggatccagtcgatgaattccaggaaaaattcagcattgaagctgcgcggcgagatcttggatacgagcccagagtcgctcttgagcaaggcatacgcgcttacgctaactggattgcgatggctcagaggaaggaatcctga

SEQ ID NO: 365243 - DNA, 909 bp, Pseudomonas aeruginosa
atgaacgattctgaaagagatttcgtcggctatggccgcaatccaccagaccccaaatggcctggcggagcacgcctcgctttgaatttcgtactcaattatgaggaagggtcggagccgtcgatacaagacggcgagagctccactgaaacctggtttaccgaaagcagcggactcaacaccggcgttctgggccgtgatctcgctgccgagggtttattcgagtacggaagtcgcgtcggcttttggagggtcatgcggcttttccaggagcgttcgatgatggcaacgatattcggctgtgcgctcgccctagagcgaaatccggatgcctgcgtagccatcagagaatcgggctttgatgtctgttcgcacggctggcgttggatcaagcattacgggttatccgaagaggaagagaaagagcatatccgccgcgctatcgactctcttgaacgaacaatcggcactcgccctcaaggctggtattgccgttactcgccgagcaccaacacacgacgtttgctcgtggaggaaggaggctttctctatgactcggattattacggagacgaactgcccttctggactcaagtcggcgggaaaccacatctcgttgttccttactctttgaccaataacgacgggcagtttgccgcaggcgtcagtaccggagatcaatggttttccttcctcaaggatgccttcgacatgctctacaaagaaggccggacgcaacccaagatgatgtctgtcggccttcatctcagacttgtgggccacccagcccgagcagcagcgctcgagcgcttcctcgactatgtctcgaccttccccgacgtctggatcacgcggcgcattgatattgccaagcattggatgagcgttcatcccgcacctcacaactaa

SEQ ID NO: 365244 - DNA, 762 bp, Pseudomonas aeruginosa
atgactaacgtatttgatctgacgggccgcaaggccgttgtgaccggtggtagccgaggtattggcggtgcgatagcggaactgttcctggagcacggcgcggaggttgcgatctgccatctcgatgaccacgacaatgctgaaagcttcaaagatcggctgaaaaccagggggcttgagcttcattccaccgaatgcgatgtatcggatcccgcagcggtagcggccttcgccgaatgggcgcaggagcgcatgggcagcgtggatatcgtcgtcaactcggcaggtctgggtggcggcgaccgcccgttctcgatgacaggcgacagcgattgggaccgaatcgttggagtgaacctccgcggaaccatgttagtcaccaaagccttcttcggagcgatggtttcacgcaactatggccgcatcatcaacgtcgcgtctcaattggcctataaaggcgcccccggccttgcccactattgcgcggctaaagctggggtcgtgggcttcacgcgagcgctcgcctatgaaggggcgccatacaacgtgatggtgaacgccattgccccgggcccggtagacaccgaactcctgcgcaaccacagcaaggaatggcttgaggccaagaaggcgcaattgccaatcggacgcttcgggcatgtagccgaaatagccccaaccgccctcctgctggcgtctgcagcgggcgcgttctatgccggccagacactgtcaccaaatggtggcgatgtgatgctttga

SEQ ID NO: 365245 - DNA, 1440 bp, Pseudomonas aeruginosa
atgaatacattcgacacagttatccgcaatgcccgcgtagtcaccgcggcagatatttttactagcgacattggcattcgcgacgggcgcattgcggcgctgggaattgacctgccgactggcctcaaggaaatcgacgccaaaggccgacacgtgacgccaggtggaatcgacagccatgtgcacctggaccagccgaccggagacggttcgatcatggctgacgactttctcagcggcacagtctccgcagcctgcggcggcaccactacggtgatcccgtttgcctgtcagcaaaaaggcaagagcctgcgcgccgccgtggaggactaccaccgccgcgccggtcagaagccggtgatcgactatgccttccacatgatcgttaccgacccgacgccggaaatcctgcgcgacgagttaccggcgctgatcgctgagggttatacctctttcaagatctatatgacctacgacgccctgaaactcagcgaccgcgagattctggataccctgtcggtcgcccgcagcgaaggtgcgatggtcatgttgcatgcggagaacgccgactgcatcgcctggctcaccgagcgcctgctcgccgccggccacaccgcgccgcgctaccacgcgacctcgcgaccgatgctggtagaacgtgaggcgacacaccgcgccattgccctggctgagctggtcgacgtgccaatactgatcgtccacgtttccgggcgagaagctgtcgagcagattcgctgggcgcaaagcaacggcctcaaggtgtacgccgaaacttgcccgcagtacctgtttctgaccgccgactcgatgggttgcgacgacagcttcgagggcgccaagtgtatctgcagcccgccgccgcgagacaaggccaatcaacaggtcatatgggacgggttggaaaatggttcattcgaggtgttctcctcggatcacgcacctttccgctacgatggcccggacggcaagaaagcacacggcgaacaggtgtccttcgacaaagtcgctaacggcattcccggtatcgaaacgcgcatggccctgctttggtccgaaggcgtacgcaccgggcggatcactccccagagcttcgtagcgctgacctcgaccaatgccgccaagctctatggcttgtacccgcgcaagggcagcatcgccatcggttcggacgcagacctggtgatctgggacgaagatcaaaccttccacctggacaacaatcgccttcaccacaatgtcgattacaccccctatgaaggcatgcacctcagcgcctggccagcaatgacgctatcgcgtggcgatgtcgtgtgggatggcgaacagccgtgcggcgatgcgggccgtggtcagttcctaccctgtgctcggccagacccggccaagccgcgtcgccgccagacggagattccgctgtga

SEQ ID NO: 365246 - DNA, 753 bp, Pseudomonas aeruginosa
gtgagcgagacgctgatcaagtccgtggccgatcgactgatcgacagctggcacagcggccggcggcagcctgtgtcagggctctcgctgccggacgcgaatgctgcctatgccgtacaacggctggtcactgaaagtcttggctggttcgagggcacccgcccatgtgcttggaaactcggcggcgcgccgggcggactggtcagctgcgccgccataccgagcaactcgatccatccatcggggtggcaggtccctgcgcgttatgctgtgggactcgggatcgaaggcgaactggcgatccggctgggacgggacctgtcagatacgccggacatagttgagattcgtgctgccatcgacgcttggctgccagcaatcgagctgtgcgacacccgcctggaggaagacgccagggtcgatcctctgctgcggttagccgaccagcagctcaaccgcgcgctaattctgggtgagcctttcctgctagttgatctccccgaatggacacggcaaccggttgtgttggaggtaaatggtcacaaacagctcgcagccaccggctcgcatcccttcgtcgatccactggcctcgttgccctggctggcccgacacgctgccgagcaaaatacgcctttgcgtgccggcgacctgattgccaccggcagttggacaggcctctactgggcgagctgggggcagcgcatcgatgtcggctttggcaaattcggaaaagccactctactgacctga

SEQ ID NO: 365247 - DNA, 597 bp, Pseudomonas aeruginosa
  misc_feature (572)..(581): n is a, c, g, or t
atggcacttcaaaaactcgtccgtctctatcatacgcttcggtacctgaggctcaagcagataatatttcgagtgtattatcgctttgcccaggtccgagttcatatttatcgaaatgttgctgtgcgtcgttggcgtagggactggtctgcgccctcttggaggaatttgtcaacgaatgatgctgtggagttcacctttctcgggataacagggaaagtgcagtgccccgaggactggcaagctgataggagcagtaaattatggctctataatctgcactatttggatgatctgaacgctagggacattggcagtcagcctgggctagccgataaactaattcaaagttggatccaggctaatccaccggtatccggtgaaggttgggagccttatcctctttccttgcgtatcgttaatcttgtgaaatggcttgctcgccatgatgagcgttcgacctttctggcggacagtctagctgtacaagcggacgcgctggtgcaacaagtagaatatcatatcttgggaaatcatctattcgctaatgggaaggcgttggtgtttgccgnnnnnnnnnnatgtgcgacctggtga

SEQ ID NO: 365248 - DNA, 927 bp, Pseudomonas aeruginosa
gtgatcgatccggccaacttgcagctcctggacgtgtccgcgtcgtaccttgccgccttggccgaggcgccgaccagcctgtcgcagagctacaccttgaccgaccgcgtcggcagttctggcgcgttcgtggatcgcggaaccggcgactggtgcccgaccggcctgctcgccgctgagctgccgctggcggccggtccgaacgtcgtcacgttgacgaacgccagccggctggaggacgtcgctgtcggccaggcggccgtggtggatgacgaaatcgtccgggtcgatgcggtcaattacgccagcggtactgtcaccctggcgcgcggctgcgccgataccgttccggccaagcacttggccggggctcgggtctggttctacgacacgttcgaagcggtggacgaaacggtatacagccagggcgtgacgctccatgcccggctgctgacgaacaccagcgagggccaactggccccggcgctggctgccaccgacagcctcaccctgaccgggcgccagggcaagccgtatccgcccggccagttccgcatcaacggcagcgcgtacccaacgaaagtctacggggcgctgtcggtgagctgggcgaagcgcgaccgcattgggcaggccgaccagctgatcgataccactgtcggcaacatcggcccggaagctggagcgacggtgacgctcctggtctacagcggcacgacgctgaagcgcacctacgccggcctcacatccagtagctggtcctatccgctggccgaggacatggcggatggcccgctccaggacatgcgccttgtcctgcgcagtgtccgcgacggcatcgattcttggcagcagcacgaaatcacgattgaacgccacggcctcggtttccggctgggcgaagaactaggaggcgtttccgcatga

SEQ ID NO: 365249 - DNA, 288 bp, Pseudomonas aeruginosa; identical to SEQ ID NO: 327670

SEQ ID NO: 365250 - DNA, 225 bp, Pseudomonas aeruginosa; identical to SEQ ID NO: 327671

SEQ ID NO: 365251 - DNA, 330 bp, Pseudomonas aeruginosa
atgtaccgaatcgagcactacctcacggccgacggccagaaggatctctacaccgactggctacggcgcttgcgtgatgcccaagccaaggtggcggtcatccgtcgcgtggcccgtgtcgagcaaggcaacttcggtgaccacaagttttgccgcgatggcgtgtgggagctacgcatcgacgtggggccaggctatcgggtgtattacggcttggcgggccagcggctggtgctgctgctgtgcggtggcgacaagcgcacgcaggatgcggacattgaccgggcggtggactattggcaggactggcaacggagaaccgacgaatga

SEQ ID NO: 365252 - DNA, 318 bp, Pseudomonas aeruginosa
atgagaagcagaccccatgacgaggcgatggccgagctgtaccgcagcgatccagcgctcgcactggaagtcatcaacaacatcttagccgatggcgaccaggccgagctgatgaccgtgctgcgccagcttgcacaggcagtcggtggcgtgcaggcggtggccgaacaggctcacctgaacccgactcagctttaccgcacgctgtcgccgaagggcaatcccgccctgaacagcctgaccgccatcctcaaggcgatgggcctgcgcttggcggtgcagccgctgccttcgcctccgtccgcgcacgtgacttga

SEQ ID NO: 365253 - DNA, 1746 bp, Pseudomonas aeruginosa
atgagtaccgcgcttgacgtcaccgacgcttttccgcgcggattgctccgaccggagttgtatgttggccagttgtgctccgtttccgcccaggtggtgaagttcaacctcaacgaggcgggctcgcccagcggttcccactttctgggtggccgatacggaaaaggtgaggtaggagagttcgtcctgatcgagggacagatcaacctcctgcttggacgggtggtcgagatccatttgccagatgccgacaggcgcctgatcgacacctcgcatggcagggtgccggatctggacggcatcgggacgatccaactgctgggctccatcgcaatggactcacttcgaatctcggcgggcgttgactcctatcctcgcttgggcgaccgcgtctacgctgcgccgcacagcttcatcgccaacttgccgaagttcatggaggcggcggaggccgaagcgagccacgtccttctcaagctgggctcgatcgatgtcgcgcctgaaagctacgtgtcggtcaagccggagaaactgttcggtcggcactgcgcgattctgggcgccactggcggcggcaagagttggacgaccgctcggatcattgaagaatgcctgcgctacaagaccaagatcatcctcttggacgcgacgggggaatatcgcgggttcgacggagaacacgtctcaaatcttcacctgggtgcgccggtcagcactgcgaagtcttctgcttcttgttcgttgccgcacacgtccttcatggagtcggactttatcgcgctgttcgagcctgctggcaaggttcaggggccgaaactgcgtgcggcgattcgcagccttcgactcgccactctcgctcctcatgttgcgacaggcgggattatcaagaagatcgatcagtctaaggtcccgatcctgaccgaagaagccaaggctggcatcgcggagaaacttgatgatccacagcaagcgttcgacgtttggaagctcgtttctcagatcgagcaggagtgcgtttacccggacggattcggcgtggcccggggatcaaaggacaccacaaaatggggtggcgactcgggcgaggtctcgtactgcctgtccttgatgtcgcgcattagcggcattctcagttcatcgtccttcgattgtgtcttcaagtcgaaggctcctgcattgacggaaagcatctcgtccttcgtctccaacgaagatcggttgcttcggatatgcctgagcggcgttgcctttgagttcaaggcgcgcgagatcatcgcgaacgtgatcggacggcatcttctcaacatggcacgcgatggcgcattcaagagttgccctgttgtcgtcatcgtcgatgaggcacacaactttctcgggcggcatatcggagccgatgacgcggttgcccgcctggacgcattcgagttgatcgccaaagagggccgtaagtacggactcaatatctgtctgtcaactcagcgcccacgcgacataacggaaggtgttctgagccagatgggaacactcgtggtacatcggctcacgaatgatcgggaccgcgaggttgtcgaacgcgcctgcggcgaaatcgaccgatcggcatcgtcgtttctgcccaatctgaagcccggcgaggctgcgatcatcggcgccgatttccccatcccgttgaccattcaagtcttcccgccgagcgcgaagcctctttctgacggtcccaactaccagacccactggaaggtatag

SEQ ID NO: 365254 - DNA, 1137 bp, Pseudomonas aeruginosa
atgctgtcggaggccgccgcagcgcgcgaagaactgaaagcggtattgctgtcctcgcttcagatgcagcatgtggttgcactcgcaggaagtggaacatctctgggagagatcaacggtccttcgatgtggacgctgtgggaccactgcgtgaactcgaatcccgacactggaaaggatgagcggaagccgaccgagcaggctgaagctgtcatttctgagatcggttatgagactgccgtcgaacatgagaacatcgaggcccttctttcgcggtgtgacgcataccttcagatcaagaagagcgagcaggtcgaaaaattcgtatccgcctcaaaggccgtgatcctgaagaagtgctccgcttttctcaatggagccgacgattcaaagttggcgagccatcgcacgttcctacatcgactgtctcgtcgccgcgtccgcgactcgcggatgaagttgttcacgacgaactacgatctgtgctttgagcgcgctgctggcaagcaggggctggtcttgctcgacggtttctcgttcacgcagcccaggcaatttgacccgcggtttttcctatacgacatagtccgccgaccttcgaccggcgatgaggtcggcaatccgctggagggtgtgtttcacctctacaaattgcatggttcggtcaactgggatcagtccagttcgggcgatatcgagatcaagaccgatccaacaccggaaacggcctgtctcatctatcccgccaaaggaaaataccaacagtcctacgtacaaccgcacctggaactgatctcccagtacctggcggcgctgcgtgaaccgaatacctgcctcattgtctcggggttcggcttcaatgacgatcacttgtctgaacctattgtcgcggcggtccgcaccaacccgcatttgcggttgatcatcgtcaatccatcggcggacgacctgacctcccggcccaaggagaaaaatcgatactgggatgcgctctacagcctcgccaaacagggcgaggacgtgtggctgatcaatgccacgttcagcgagttcgccgagatgattccggacctcaaatcgctgacgcccgcgcagcggctcacgcgcgacatcaagtcgctggtaaaaccgacatga

SEQ ID NO: 365255 - DNA, 282 bp, Pseudomonas aeruginosa
atggacgaattgaagcgtctcatcgggcgtaccgagcctctcaatgaagcacgcaatcacgttgcccatgggatgcttggattggtcggtgcgcctgaaggcgcaccgcgcggcgcgtcgttcgtgatgacccgctatcacaagaagaaagtgcacgaaatcaccttcgatatgctggtagaacgaacgaaagaggcgatgcaattaagtgatgactactcccaattctgcgcaatgtgccggttgcacgcggagttcattgccccgtatccgcgtagctag

SEQ ID NO: 365256 - DNA, 669 bp, Pseudomonas aeruginosa
atgaagatgatgcacgccaacgagattcgcgcaggcgacgttctgctttgctataaagatgcaaaaatcgacccggttgggaagggcatcactcgcgttacggacagcgaatacacgcacgccgcaatttgtatcgggccttgtgttgcggcagaagcaacggtttcaggtggtgtaggcaaggttaagattgaagacctaatcaaacgctacgatcatgtcgcagtgttccgccaacccgatgcgtggcgaccgccagagcgcgttcaagccatgaacgcgtttgtagattccatcgtggcgtctggggcgaaatacaacctgcgcgacgtggtgactttcaagaagagaagcgacgttcaccagctttcgctcactgaacagctccatgcgttcttcaatggaacgtacacatccgcacctatcgagaaaggtcgctatttttgttccgagcttgtggcgaactgctttgtcgtcactggattcatagacccgagcgcggcagtgatttacaagtcgaatgtcacgtcgccgggtgcgttggggcgagatcccacgttcggaacattctgcgggtatgtttcgagtgtgccgaattactcggtgccggctacggatgagtttttcaatcactcgacattcgatgaaatatttggcgatggcgcatag

SEQ ID NO: 365257 - DNA, 591 bp, Pseudomonas aeruginosa; identical to SEQ ID NO: 362609

SEQ ID NO: 365258 - DNA, 321 bp, Pseudomonas aeruginosa
atgcgatgcgtcctcgtcctgtgtgctgtgctgctggccgcgtgcagcgagcagccggccgaccaccttgccgatgccctggccgccgatcccgtgcggctcaaggcattgcgcgcgcaatgcgcggccgaccggcaggccacgggcgaggacgcttgccgcgccgccgccgaagccttccggcggcgcttcttctccggcgaggccgggccggatgaataccagacgctggccgacctgccgccgatcccgccgagcttcgaggaaccggccgatggcgcagcgccggccttgcccgccgcaccggaggacacgccatga

SEQ ID NO: 365259 - DNA, 642 bp, Pseudomonas aeruginosa
atgaatgccgcgcagtctccccgtcgcccgatcactgccgtgatgttgcagagcctgatgtggctctggctgatcggcctcagcgttttcgtcgctctcggctaccaggcggtgaacgagcaggccgaccaggagcggctaaatttccgcctgcaacgtctcgaagcgcaggcgacgagcctggccgaggccattgaggccatccagcagcgtccggccgtcgcaacggcggcagacctcaaagacacccgtgaactcctggaagcacgcgctgctcaggtcgaggacacgctgagcggctatgccgccgccgagagccttcaggcgcttcgtgtggaagtcgagcagatcaaggcacggcagagcgcccagcgtgccgcagcgcccgcccagccgcgcgcaccgagcaggcccaccgccaagcgggaaccgccgccactgccatttcgcatcgtcggtgccgagcttcgcgctggtcaacgcagcctgtccgttgcgccgagcgccgggtcttacacgtcagaccagcttgaggtgctgctgcccggtgatgcggtcggcccatggcgcttgcaggcgatcgagggcaacgccgcggtgttccaggccggcgaccagacccgccgcgtggcgatcccctga

SEQ ID NO: 365260 - DNA, 225 bp, Pseudomonas aeruginosa
ttgctgttcgaccaagacgagtggcaggtgacgtacgtgctcaacaagaaaaagccgcccaaggaggctccggcgctgaacacggtggtgcgccggattgctaagcctggaggtttcctaggccgcaagggcgatgacgagcccggagccaagacgctgtggctgagcatgcgcgatgtggccgtgttcgtgcaggggctgcgatttgctcggatggcgctttga

SEQ ID NO: 365261 - DNA, 195 bp, Pseudomonas aeruginosa
gtgcagcggacggtcggctttatacccgcagagatcaaggaggaactcgacgatttcgcggcgtgtaaatacggcaccgcgcgcctcgatgcctgcgtcggttgcaagtacttcgacagcctgcgcgaccgggcaaagtcccggcaaggacgactgccgggcggcaagtcccctggcactctgctgggcaactag

SEQ ID NO: 365262 - DNA, 1443 bp, Pseudomonas aeruginosa
atgtccgtgaaggctctggcaggcgctattcgtgcggtcgagcttcatcgggagaccttcacgcaaacgcgcggccaggtcatcgacttgctgtcccgaagcggctttacggcttcgcaatccatcgcgctggctgatgcgtggctggtcaatgacgatttcctgctggcagatcttcctgaacccttcgatgtcgtgatcggcaaccccccttatgtgcggcaggaacgggttcccgatgtcctgctgacagaataccgctcgcgctacacaacgatctacgaccgggccgatctctacatcccgtttatcgaacggtcgctgcggtcgctgacgaatggcggcgttctcggatttatctgtgcggaccgctggatgaagaaccgctatggcgggccgcttaggaacctcgtttccgagcagttccatctgaaagtctacgtcgatatggtcgatacgccggcctttcattcggaggtgatcgcctatccggccatcaccgtcattgcgcgtgagcgcggcaaaagtacgcggatcgcccatcgtccgcccgtggaggccaaggcgttacacgcgcttgcgttggatctgacttcatcgcatctccctgaaaagggcagtgccgtgcagttgattgacggtgtggcgagcggcgcggagccgtggattctcgattcatccgatcagatcgccatcatccggcgtcttgaggcagcctttcctcttcttgaggatacgggctgcaaagtcggaatcggcgttgcgaccggagcggataaagccttcatcgggccgatggacgaactcactgtcgaagaggaccgcaagctgccgctcgcgatgacgaaggacattgcggacggcaccgtgaagtggcgcggcctgggcgtcatcaacccattcaccgacgacggcaagcttgtcgatctcgcgcgctatccgctgctcaaacgctatctggagttgcggagggaacagatcgctgggcggcattgcgcgcagaaagtgcctgccaactggtatcgcaccatcgaccggatcacgccgtccatttccgaaacgccgaaactcctgatccccgacatcaaggggcaggcccacatcgtttttgaggatggcaagctctaccctcatcacaatctctactacatcacggcaagccagtgggacttgaaggcgttgcaagccgtccttctttcgtccgtgacccggctgtttatcgcaacatactcaaccaagatgcacggcggcttcctgcgctttcaagcgcagtatctgcgtcgtctgcgtctgccgcgctggagcgatgtgccgcaggccctcaagactgcgcttatcaacgcagccgacgtgcgcgacctcgcggcatgcaatgccgcaacatttcaactgtacggattgagccgccaggaaaaggcggcgctcggcggaaacggggactaa

SEQ ID NO: 365263 - DNA, 690 bp, Pseudomonas aeruginosa
atggcgttctggggaaatcgagagaaggcgcgacagaagcaagtcgaagctggggtcgtcgatcagggcgagcgcgccagtgtcaccggtggcaagaacatggatggattcgtcgcgctgataaaggacatcgtgcgcgccaacggccttgctcatgcacaactccatttggaacgtcgcgtcctcacactgcccggatatttccggccaacaaagctctgggacttactcgtcatgaatcaaggtcgtctcatcgcggccttcgagttcaagagtcaagtcgggccgtccttcggcaacaacttcaacaatcgcactgaagaagccatcggtacggcgcatgatctgtggacggcttaccgcgaaggcgcattcggggaacagaccaagccctttatcggctggctgatgctgctggaggattgcccgaaatctgccacgccggttcgggacacgtcgccgcacttcccggtcttcccggatttcagggatgcgtcctacgctcagcgctacaacgtcctttgccgaaagctgatgcaggagcagctttacacggtagcgtgcatcctgacatcaccgcgcactgctactacgaccggcgactatgcggagctttccgaaatgacggggctgcgcaccttcgtaacggagttcgctgggcacgtcgcagccgaagcgtcgcggacctaa

SEQ ID NO: 365264 - DNA, 2193 bp, Pseudomonas aeruginosa
ttgcctatcgtcctaaacgctttccctctcaaaactcccgagctggagcttgaagcccgccaagttccctatgacaaagagacgctggacggctttcgcgcgacgcacggatcgacccactcgttccgccggcagggcgacaatatcctgatcttctcgggggacggcaccttccccgtgtccggcacccagcaggccatcgcgctcaaggacaatttcggcatcttcttttcgctggtgaaggacggtctgacgcggcactttgcgggtctgggccgcaatccctccggcttcaaccctatcgaactggtaagcaccaggccggaagacaatcttctggttccgattctgggcgatgcttaccccttcaaggtctgcgctaaatacgccatcgacacgcgcaccattctgggccagccgtaccttgtcattgattgcacaacgcgccgggtggtcaaggagaatggcctgttcttcctcaatgccgggttcgatctcacaggccgttacgtggtcacgcagcaggacgacggatgcaggaaactcttgggctcggtgaacgcccgcaagggcgaaacgctcttcatcacgcggcctgacggcgaggtcgttcaggccgaggcgaaagacgtttatctggaggccagccgcgagaacttcgatgcctacatcctgcatacgcacgccacgaagaaagacgctatcgtcgagggtatccggcaatccgtctccatctttaatggaggtgagaacaagaaagcgcgcatcgacacgcttaagaagtacatccagtcgaagaacattactctgatcgacggaactcgcattgagatcgaagattcgcccaacattcagaaggattgcgggcagatgccaaagccggtgttcgtattcaacgacaacggcgaagcggattgggccgaaaagggcctgacccagagcggcccgtatacgaagcgaaccttcgatagaaacgatccctctatctgtgtgatctgcgcccagcatgacaagggtcgcgtcgagcagttcgtccgcaagcttctcaaaggtatctcgaacagcaaatatttcagcaacggccttgaaggcaagttcacgctcggaacaagccgcgttgaagtgttttcgacggcgactgacagcgtggaggcgtataagaacgccatcgaaaccgcggttcggaagaaagcggatgacggcgggcggtgggacttggcgctcgttcaagtccggcagtccttcaagaagctcaaggtcacggagaatccgtactatctcggcaagagcctcttcttcctgcatcaggttccggtacaggacttcaccatcgagcttctatcgcagtccgattactcgctcggctactcgctcaataatatggcgctggcctgctacgccaagatgggcggcgttccgtggctgctcaaatcctcgccgacgctttcccatgaactcgtcatcggcatcggcagcgcgaatatcgggcaggagcgcggggccgataaccagcggatcatgggcatcaccactgtcttctccggcgacggcagctacatcgtctcgaacacatccaaggccgtcgtgccggacgcctactgcgatgcgctgacctcggtgctcagtgaaaccatcgagaaaatccagaagcgcatgaactggcagaaaggcgacacgatccgcctgatctttcacgcgcaggtcaagaaattcaacaaggacgagatcgcagccgtgcgtgccgtgatcgacaagtaccgcgaatatcaaatcgaatacgccttcgtgaaaatctcggaagatcacgggctgcatatgttcgactcggcgacagcgggcgtgcagaaggggcggctcgctccctcgcgcgggaagaccttcaaactctccaaacatgaaatgttggtctatctgatcggccagcgggaattgcggcaggacacggacgggcatccgcgcggtgtgatccttgatgttcataaggactcgactttcaaggacatcaagtatctgagcgcgcagctctacagcttcgcctcgcattcctggcgcagctatttcccgaatcccatgccggtgacgatcagctattccgacctgattgcccggaatcttggatggctcaaccagcttcctggctggaacgactcggtgatgatcgggaagatcgggcaatcccaatggttcctgtag

SEQ ID NO: 365265 - DNA, 1158 bp, Pseudomonas aeruginosa
atggttcctgtagaaaaagacaatgcgtaccagttgcgcgagcacctgcacctcaaggttattgagagtgcgcacgctgatccgttcaaagcctgctttctgcatttcctaggattgtcgaaggacgacccgtcatccttcgacttttcggcgctctccttgtatcaccgctgcgcgatttcgggcctcggcgttctcaacgaaaccgtctccagcccagatgtctcgcgcctgctcgggcaggccgcaaagatcgactccacgccgcgcccatgggtttcggacgtattcggtgtcatggccgtgaaatggctggtagggcggatgaacgatgcgcgtgttgcccgcgagttcgagaattggatatccggtttccttgcgcagcaggcgggcggtgaccatctcaatctcttcgagaaagatatcgcggcgtatgtcctccgcggcgaatcctctatctatgccagcgcgtgcgtaccgctctttcttcactaccggacgatacggcggatcgacgatcaccagaaccgcatggccctgatcggccgtttcatgggcgagttccgggcgcaggcgcaaggcggcgcctcaacggcgctcttgagtttgatggtttacgttttcgaccaagtaaatcaggacgtggctgccgtgccgccaaaaggctggagtctcgatgacctcttggagtttctggagcatatccctgttggcctcaaacgatggacgtgggaggatgcgggccgcaccaggggcgcggaacccgtcaagtggccggtagagaacgaataccacgtccagaatcttctttattttctgctcgggccgatcttcaacgacatcgcagacgaagtgaacctccagcccgtcggacagaagaatccgcgcattgatctttacctgccctcgctccacacgatcattgaggtcaaataccggaaggacgtgaagaagtccttccaatcgcttatcggcgagattgccgaagacgcttcgctttatcgcgccgacgcgaaatacaaagacgcgcggatcgtcagtattctgtgggactgcacgcgcgcgacacaagaacatgccaaattcaaggaaggcgtcttaaagatcgacggaattgatgggtgtgtagtaactaacgcgccctcaactatgaactag

SEQ ID NO: 365266 - DNA, 144 bp, Pseudomonas aeruginosa
atggccttctacgacggcaagcaaaccgccgaacagaccctggacgccatccgcgccggcctcgaatccctcgcttggcaccacggcaacgtcgcccaggcagaaaccccgcaactggactttggagtggctgacgatgagtga

SEQ ID NO: 365267 - DNA, 303 bp, Pseudomonas aeruginosa
atgaaagacaaaagagcgcgcagggcgtttgacgcagccttcaagctacaagtggtcaagatggtccgagaacagaatctgagcgtggctcaggtcagcaaggatctggatctggttgacagcgcggtgcgccgctggctggcgcagtacgacgaagaggcggccggacgtccgggtattggcaagccgttgacggccgagcagcaacgcattcggcaattggagtcgcaggtcaggcaactgcaatcggacaatgaactcctaaaaaaagcgtcggccttcttcgcccgggaaatgaaatga

SEQ ID NO: 365268 - DNA, 876 bp, Pseudomonas aeruginosa
atgattcaggacctgatgagtgcgcaagcacaggcgcagaaggccccagtaagccagtggtgcagggtgttgggcatgagccgctcgggctggtacgcggcgcgcaagcgcgccaccacaaaggctgcagtgagcccactgagccttcaggccaaagcagtcttccatgccagtgggagcagctacggcagtcgccgcctgagtgcacagctgaaattgcaaggctgggctgttgggcgctacaaagcacgcactttgatggccgcgcacggactgcgagcacgctggcggcgcaagttcacgcacaccaccgacagccgccatggcttgcctgttgcagacaatgtgctgcagcgccagttcaaacctgaaaagcccaaccagacatgggccagcgacatcacctacgttcgcacacgcagtggctggctctatctggcggtggtgctggacctgttctccagaaaagtagtgggctgggccatggccccgagcatgccagcacagctggtgtgcgaggcgctgcgcatggccatcacaagccgccgccccaagccaggattgctggttcattcggaccgaggcagtcagtacgccagcgaactgcacatggggttgctggagagccatggcctggtgtgcagcatgagtcgcaagggcaactgctgggacaacgcagtgatggagagattcttcctgaacttgaagatggagcgtgtctggcagcgcgactatgcaaaccatgctgaggcccaggcggacatcgcggactacatcgtgggcttctacaaccctatcaggttgcactccacgctgggataccagtcacccaatgactacgagatgcagcaggcgttggcagctcactcagcttga

SEQ ID NO: 365269 - DNA, 465 bp, Pseudomonas aeruginosa; identical to SEQ ID NO: 323972

SEQ ID NO: 365270 - DNA, 822 bp, Pseudomonas aeruginosa; identical to SEQ ID NO: 345819

SEQ ID NO: 365271 - DNA, 504 bp, Pseudomonas aeruginosa
gtgaagggtgacacctacaaggacaaggtccgcaagaccgaattcaccgaagacgaagacggcaacatcaccgaggtgaggatcctcacagaccgtttcatcccgatcatccgggcatgggaaatgacaccctcctcggtcaatcagggccgcgtgctgaccatcagctcgtcggctgcgaccacggaagaggctgaagagccccaacctgagccggcccccgaaccgctgctgttcagccctggccaagtcgtaatgaccgctgccgtgagccacctggtggaaaccggtcaactcaacccagcgcctttgctgaaccgccatctggcgggagattgggggacgctggaccaggaagactggaacaccaaccagagagccctgaagttcggcgataggctgctgtcgtcctacgacatcgacgccggcggcgaatccaggctctggatcatcactgaggcagaccgcagctcaaccacgcttttgcttcctagcgattactga

SEQ ID NO: 365272 - DNA, 207 bp, Pseudomonas aeruginosa; identical to SEQ ID NO: 332728

SEQ ID NO: 365273 - DNA, 150 bp, Pseudomonas aeruginosa
atggcgcggccctccaagctggaaagccttgcttcgagtcgcctgcaaaacctgatttctggcggcttggattgcctgccgtttgtggccgcgtggcggttgtccaccgcagcggcgcttctctacaacaagttagagaaattaagttag

SEQ ID NO: 365274 - DNA, 141 bp, Pseudomonas aeruginosa
atgaagatccacccgctcacgctgctgacgctggcctatgcgggcgacagtccgcgcaaggccgacgagctgctggcgcaagtgcgccgggagctggaggcggtggccaaggaacgcgactcggcgaagcctcgtgcgtga

SEQ ID NO: 365275 - DNA, 381 bp, Pseudomonas aeruginosa
atgagcacgcacttcgtcggcgagggcaacatcggttctgcgccggactaccgcgaatttccgaacggcaacgaggagccgcgtcggctgctgcgcctgaacgtctacttcgacaatccagtgcagacgaaggacggctacgaagaccgcggcggctattgggcgcccgtggagctgtggcaccgcgacgccgaacgctgggcgggcctgtaccagaagggtatgcgtgtgctggtggatggccgcacggtgaaggacgaatgggaagacgccgacgataacgagcgcacgacgttcaagatcgaagcccgccgcgtgggcatcctgccgtaccgcatcgagtcggtggcgctcagcgtcaagccgtcgaccgagcagtag

SEQ ID NO: 365276 - DNA, 846 bp, Pseudomonas aeruginosa
atgagcgacgaacgtcaggttgacgacgatcagaagaaactctggaacggtccggccggccgtgcctgggtcgaggcgcaggatgtgctcgacgggatgttccagccgttcgaggactgcctggtcgaggcggccaccgccgcttccgatggccgggtactcgatgtcggttgcggcacaggcagcaccacgctcgccatcgcacggcggctcgggtcgcaaggccgtgcggtgggcatcgacctgtcggcgccgatgctggccgtcgctcaggcgcgcgccgaacgggaaggcgtacgcgccgacttcatccgtgccgacgcgcaggcccatgccttcgagccggccagcttcgacaggatcgtgtcgcgcttcggcgtcatgttcttcgacgatcccggcatcgccttcgccaacctgcgccgcgcggccaggggcggtgccgggttgcgcttcgtcgcctggcgcagcgccgccgagaattcgttcatgaccacggccgagcgcgcggcggcgccggcgctgccacagcttcccgcacgccggccgggcgcacccgggcagttcgccttcgcggacgcaaaccggattcaggccatcctcgaaaaaaggggctggtccagcatcgacatccagcctatcgacgtgacctgcacgctgccagagcaggatctgattcgctacttgagctggctcggcccagttggcgtgatgctgcaacaggcggacgagcaaacgcgcagctcggtgatcgccaccgtgcgtgctgccttcgagccgtacgtgcatggcacggaggttcgcttcaccgcggcctgctggctggtgggcgcccacgcatcgtga

SEQ ID NO: 365277 - DNA, 432 bp, Pseudomonas aeruginosa
gtgagagagctggatattgccgaggtggtgcagcgtgccggcatccccgcctcgacgctgcgctactacgaagagaagggcttgatcgtctcggtcggcaggcggggacttcgccgcctgttcggtgagcaggtgctggagcggttggcgttgatcggcctggggcgtgccgcgggcctgtcgctcgacgagatcggactgatgttcgcgccggacggacagccgcgcatcgaccgacacgtgctcgcagccaaggcggacgagttggatcagaccatccgcaagctgagcgccatgcgcgacggactgcggcatgctgccgcctgtcccgcgccgagccacatggaatgcccgaccttccgccgcctgctgcacgctgccgcatccggggccatcggcaggcgcggcaagaaagtcacgccactcccctga

SEQ ID NO: 365278 - DNA, 843 bp, Pseudomonas aeruginosa
atgatcggacaaagaacccgccattcgtttgcgcagttcctggagctgcaggagcccatgatctccatcgtgctcctgggcaagtacggcgtgcatcacctttcgttgtcccaagggcaactgctctacgagctgctgaatacgctgcgcggtctcgatgaccgcaccatcatgctggcgctgtccgaagtggttgcgacctcgggcgatctgcgcgccagggtcaatccgaagtatcggttcgatgaacgcatgcacgacctggcgcaatgcctgctgctggacggctacatcattcaggacaagaagctggttcagaccgacccgtcgattgccgatgccgtgcccctcgaggacgacctgatcacggccttgcggacctcgggcgcaccgcgcgcgcaggacatcatcaccaagatcaacgattcggcagaggctttccgggcgacaccacccgactacaacgcatcgctcgtgaatgcccgcgtggcactggagacgttggcgggcgacgtggccgccgacgttgcttcacggttgcaaggtcccacgatctacaacccctcgaagtggggcgaggtgctttcgttcctgcgcaccagcggcgagatcacgaccgaggaggagaagggacttgccggcgtgttcggttttctgagccctggcgcgcatcgtccggttggcatcccggaagaccagatggacgcgccttggccgctccttcgcgctgaatatgtgctggttcctgctcaagaaccatctggcgtcgaggtagctacgtccatgcagcggctgggcgtgattgtcaccggcggcgcaagtgccgccggtgactcaaactga

SEQ ID NO: 365279 - DNA, 222 bp, Pseudomonas aeruginosa
atgggcgatgtcgaacgaaagaccgagacggtgaacctgcggttttctccaaggatgaaggagctgctgcggatcgcggccgagcgggagcaccggacactgtcgaacatgatcgagacactcgtgatcaattactgcgagagcaggggaataccagtggaaccgggcgcgaaaggcgcctcccgagcaaaaaaaagaactacaaccacgacagacgagtga

SEQ ID NO: 365280 - DNA, 1035 bp, Pseudomonas aeruginosa
atgaaaaagaagtccaatatgcgcatggccatagatttattttcgggttgcggcggcctgacccaaggcctccgtgatgcgggcttcaccgtgggcgcggccgtggagattgatgcactcgccgcggaaacgtatgccgccaatcaccccgaggtgaggcttttcaatgccgatatccgcaacatctcggcttctgagatcttggacgcctgcggcatcgcgacgggggaactcgacctgctggccggctgccccccatgccagggtttttcccgcatccgactcaacaacaagagagagcgaatggacgatccccgtaaccggcttattgatgaggttctccgggtggtgggcgaaatgcggccgaaagtcgtgatgctggagaatgtgcccaatctctcacgctatacccgctatctggatttcaagagggatctgcgcaagcttggttacgaaatctccgatcagatccttgatgtcgctgatttcggtgtgccccagcgtcgcaagcgactcgttgtcctcgcgtcacggctgggtcgaatctcacacatcgaaccggtgaaagggcgtaagacggtaagagatacgatcgggaagctgccggatcatatcctgaaaaatgaccctctccacagcctgggtgagcagcgcagcgaacgcgtgcgtcagttgatcaaggccatcccgaaggacggcggcagcaggacggctctatccccaggactggtcctcaaatgccacgaaaaacaggacgggttctacgacgtctacggtcgtatgcgatgggacgacgttgcgcccactatcaccggcggctgcatcaacccctcgaaggggcggtttcttcatcccacggaggaccgcgccatcacccttcgcgaggcggcgctcctgcagagctttccgcctggctatgtgttctcgctgcgccggggcaagtacgccgccgccgagatgatcgggaatgccctccctccgcttttttcgcgcatgcaggctgaggcgataaagagccatttggccgggcagtga

SEQ ID NO: 365281 - DNA, 1770 bp, Pseudomonas aeruginosa
atgtcaaagaatgaagaaatcatcgcgcttgtcgatacgctcaagaacttcgccccgggcaagccgcttaagcactacataactcacgcgacattccccaggttcaaaaacattgagtcgggaacacgggtcgatttcgagttccccctcaccgcgcttgtcggcgctaacgggatcggcaagagctcgctgctacatgcgctatgggggatgccgtacggacactcgacgtccaaattttggttctccaccgacttagatcccatcgaggatagcaatagggaccctcagcgttatttctacggctactggcacgagggcttcggcggggttgttgaaactcggaaagcacgtatcgggaaaaagcaggactattgggagccataccgttggagcaagagcgacggaatggcacccatgccggagggtgacttcgaggggaaggcaaaggatcgctggaatcctgttcgaagaaaggtcgtctacatcaatttcagggcgttgtttggttccttcgaccgctacttttacttcgatgacgaccttggcggaggaaacaagcgcgatgtgatgctgcgagcggcgcgtcgactcaagacggtgaaggatgatatcaagcagtcgtacaagatggggcgccgcgagcgcatattcgagaaccgcgtgcttaagccttatgagctcaccgaggcatccagaattctcggccgttcctatgattcagctcacctcattcggcattccctttaccccggcaatagaggtagagatctgagcgtcgttttcaaacgcggggcggaatactccgaagcgtttgcggggagcggcgagattgctgccgtgagcgcggttgtcgacgtcctggccgcagatgagtactcacttattctgctcgatgaaccggaaacgtctctccaccccggagcccagcggtctatgctcagatttttgctggatcagatcaagctgaagaagcaccagataattatctcgactcactcgagcgagtttttaaccggcctaccgcatgaagcaatcaaggtgttcgaggataacggaaaaacccaatcccgcattctcccccgtagctctcccgcagcggcattgaaccgccttggaagaccgccgcagaacaagcgtcgagtgcttgtggaggattccttggcagagcaacttgttctccatgcggccaagggccttgatcccggcgaccgcgagacactcgaggtcaaggtggctccgggtggcgccgagtccattctcaagtacttggggccggctgccatggtttccggtgatgaagttttcgtcttgctcgacggcgaccagaagaaagtggaggaattcagcgatcctgcccagatagcgcccgccgagcatgcgcaattggatagccgaatcaagcaggagctcggatttgagcctcaataccatatccagggcggacgcgatgaggctgctcacaagaaagcgaaaatcaaggcccaactcagctatctggcttggctacgcaaacatctggactttttccctagacagctgccggaacacataattttggaggcgtttgaacctactcgacgccattccgatgcgggctcgatcgacgcgaaggccgcactcaagaagctactgtccggtagtgcagagattgagcctagcgccgaggaggttaccactcttgcgcgattcaagatcgccgaaatcccgcaggacaatgccgacctcactacaatccgcgaatgtctgcaaaaatggttgcatggctga

SEQ ID NO: 365282 - DNA, 1227 bp, Pseudomonas aeruginosa
atggacgccccagagaccgataccgggttcctcgcttcactgttccaagatccttcggacgacgatatacgcacggtaattgccattatcgccgcgcgcttcccgaacgatggcgccgtggcggcggaactggcgacgatcctggctgcttcaggcgaatgcataaccgtagacggggcagtttccgccgacgtcgcatccacgggcggtcctgcgtcgctaagtacgcttctgacgccgctatatctccgtgcggcaggagcgatcgttccgaaactcggcgtaccgggtcggccagccggtgggatcgattgccttggtcagatccccggctatcggactgaactatccgttcgagagatacttcagattatcgacgcttccggatacgcccacttcctcgccaagggccggatggcgccgcttgacgggcggatgttcaaattacggcaggccatgaatgcgcaaaccattccgtctttggtggccggcagtcttttgtcgaagaagcttgccgtcggcgtcaagcatgcaggtctcgacatccgggtcgctcctcatggcaattttggcaacaacaaaaccatcgctgcagcaaatgcacggttgtttgtacaggctgcacggactctcggcataaaggcgtcaccggttctgaccgatgcccggtacccataccagccctatctcggaaggcgggaatccctgctcgcgcttgacgatgtcttccgtggaacatgctccccctggctgggaagccatgtcgagacctgccgaacgctcgccttggcctgccttcccgccgaccttcgcgcgagggtcgcagaggcatcccccgcagcgctccgccggcacttcgacgacaacctcatcgcccaaggcgcagatccagacgacttcgatgcgcttgtacgcgacacgagaaaggcccacaccggacatgtcccggcggcacacgatggattctgcttctaccacttggacctgcttcgcgaccgacttgtcgaatggcagggcatgttcatatcggaacaggaaccttttccggatccggttggactcgttcttctcatccctccgggacaatgggttcccggcggcactccgatcgcgacggttagggcgcccgaatcattgatgccggacgttattcacaggctcgacgaggtagtcggcactccgagccgtctcccgcacggacccgatttcgaggcaatcaatggctaa

SEQ ID NO: 365283 - DNA, 1878 bp, Pseudomonas aeruginosa
atggctaaatactgctgcttcttttgtccttcaaaggactatgcggaaagggaattgggtgacaagtgcccatcctgcgggcgcacctacggcctcgtcctggaccatccgccgaccaagataggcaactaccggatcacgaagcatctcggaaggggattctacggcgccgcatacgtcgcggaagccggattcgtcgggaagaagtacgtcatcaagatatcgcctgtcgccttttatagttttgcgccgttcaagaagacaccgtttctagacgaggtccgattgcacgccgaactggcggccagcgcgacgcatgcagtcgacatcatcgacgcgatccctgatgagaccgtcgtctttactgatgacgccgcgaccagtatcccgtgccacgtcaccgtgctcgactacgtcgaaggcgatcttctaaaggacttcgtcaacagcaggacaccgcctagtgccgcgtcgatctgtcaggtcgcaatcgatctgttgcagcttcgtgccgaactggaggctaacaaacttaaccacaacgacctgcactccgaaaacctcatcgtcgagagactccgccctgaatcgcgacgacctgacgcgattgatcccatgctgcaggtcatggcaatcgacctcggcagtgtctccgacgagagcaagagtaccgacgaccgacagggggatttggggttcatcgcagagcacgtcaacacccttctcgccgggctgctcgcaaggccggatcaaatggaggaccgggattttcgggttgcgctggcgctgcaaggcatcatcggcaatctgcgcgcggacccccagaaccttcgccttccaaatccggccgacatggtcgctcaggttcgagaatctttctacagagcatcacaccactggcgaccgtggatgaatccgctcaccttgaagggattcgctgaccactacaacgcccagacactggaatcgtgggatgtccccaagctgctggttgacccggccaaccgctggctgaccgagatcacccgccccggcccgcagatcatcaccggcatgcggggatgcggcaagacgatgctgctccgcgcgctggacatccacgcccgcgcaacacaacggaaggacgaaacggccgaggcggtcatccagcgcatccggaatgatcgctttgtcggactctttgtttccgcccaaaggttgctggatttacgggagcagtcgctcctcaagcttgaatatcgtctaactcggctcttcgtcgcctacgctctgcaggccgcccgcgcactgatgcacctccgtgatgtcgactcaacagccatcgcacccggagcacacacgcgtttggcttcggccgtcgctgattacctggagggggtcgatgacttgcgagactccatttcccttgacgatctcgagcaacgattgcaacggattgccgttctcacagtcagcggcgacgagaagcatcttgtcaagcaagcccccgccgaggtgttcaaccatctggcgagcagcctcagggaatgctcggaggtgtttgagtctgcctcgatcttctatctcctggatgacgtatcaactcgatatcttgagctcgacaagatcgaggcgctcctttccgcgctccttttccagagcccgatctgcgcgttcaagttcacatccgaatggcagacgatcgaactcggcctccgatcacctggaagaaaccacccgattcgaatcgatcgcgacctgacggtgttcgaccttggtgaggatgtcttcaaaaccatcagtgctcccggctccgcaggcaaggacttcattgccaggattcttcaattgcgtgccgacctccacgcacagcatcccaggcagcgggtccgcgggtga

SEQ ID NO: 365284 - DNA, 1866 bp, Pseudomonas aeruginosa
gtgattctcggcgacgtacccttggaacaggttgccagagagatcgcctcctcaagcgaaggggcgggccagaaaaagcgcgtatacaggggcctgtcctgccttaccagtgtctgcgtcggtgacatcggcgatgtcatcaaactctacgaagaaatccttcgccgaggcagtaacgccaacgcatatcccattgaggaccaaactcagtccgagtgcttccaagagatgagtgcacgccggctctacgatctcaaccggcgcgccacctactcaaggaatctcaagaaccacgccctcgcgttcgcacaaacggcgcacgacctgctggtgcggtcatatcgcaatgcgccgaaggaaggaaaatcgaaagcacgcctgaggcaatactcttcgatctacgtcagggtcaccgccgaggatgagaacagccagaagcagcagatcgacagacttcgtgacctcatcgatgccggcgtctttgttttcgctggcggagcgccgcgcaccaagacgaaggactccgacccgatcctgcagtttattctgagctatcgaaagatctatggcctggccgcattcatcggccttgccgacagggatcgcttcgagttgtccggagacgacttgagcaggtggctagaattggacgatgtggccgccgccaaggagatcctgttgcgcaaccagatcaacgacgaagttgacgaaaccggcgccctgggcagcggccaacccagccaggaatccgaagtcgctattcaggaacagcctgttgtaactccccccgcgccggtacaagcttccgtccgcaggacggcgccagggcaagccgatctgttcggcgcattcgagagcgacacaaagtctccggatcagaaggcgtgggccgacaaggtgtcggtctcgatccgccaaatttccgagaacgagcttgccacactcccggtgagttcggccctggtgggattggggtttgaagaccgcacgcttgcgtcgaacagattcctctcgggagcactccatccgcagaccgtacacgcgattaggtacccggtggaagggcgttcacaggatatcctcaatgcgtggagcaaatcggggacaacggtggtagaggccgcttatgacgaggcgctcgccgccctcccgcgtctagacggccttgcgctcgtggacatatccggtctcgcgaagcccttgatcttcaaggcggtccgcagtgagctgatcgccaaagggcgagtcctcgtatgtcacgcgtcggccgagcgacactatccgctccaagaagacctcgagaaactattcgccgccgaacgatcggacgatcctgtcgcctttcttgacagcctggcggagttgttgactggagaagacggaccgtacaaggacatcaagctgcttaatgatgtctccgatccgtcccgaaaccgcgccctgcttgcattcgcatcgccgaagcacgaacgcctcttctccctgctggatcgccgcgagttcgatcaaatcgagatcgtcactccggagggagacccaccgcacgccaaggtggccgcatacgctgcggagttcatttgtcagaattatccaaatgcatccgtcaccagattcggaaacgatgatctgctcgggcttgtcgagtatctcgacgcgaagtatctggaaatctacggtacgggcggagccaacttcgaacttggcctgacgggcacgaaaatgcaggcgcttgcttccgccatactgagttcggttcgaaaggtttcacagacttggtatctgagtccgaagagattcgacgagaagcggttctcgagcggcgtcggttcgattcgggtgtacgacatccgaattccggggaagtaa

SEQ ID NO: 365285 - DNA, 531 bp, Pseudomonas aeruginosa
atgcagggcacctatgtaatgagcgcccggcgtgtcgatcgagtgcttgggttgtcccgctcggcgcggcattaccgtccacgccaacgcgatgacggcccgctgatcgaggcgatggaaatgcacttgaaggacaatcccggccatggctttggcctgctcatggactgcgccctgcggccgcagggctggggcaagacgcgcgcctggcggatttacagggcgctcaagctcaaccttccacgtcgcggcaagcgccggcttccagatcgcatccgcgagccgctggaggtcccgcagatcgcgaaccacacctggtcggccgacttcatggccgatgctttgtggtccgggcgccgcttccgcaccttcaacgtcaacgacgacttcaaccgtgaatcgatgaagatcgaaatcgataccagcctgccctcggcccgagtgatccgcgcactggacgaactggtcgagttgcgcggcgcgccaagacgcctgtctgaacgaagaaggcaagcaaccccgctattttaa

SEQ ID NO: 365286 - DNA, 267 bp, Pseudomonas aeruginosa
atgaagaagtcgaaattcaccgaagaacagatggtccggatcctcaaagaggtcgagtccggcgcgaaagttggggagacctgccgcaagcacgggatcagcgagccgacgtattacgtctggaagtccaagtacgccgggatggaggtgtcgcagctgcggcacctgaaggacgtcgaggccgaactggcgcggctcaagcgcatgtacgccgagctggcactggaccaccacgtgctcaaggatgtgctgtcgcgaaaagactga

SEQ ID NO: 365287 - DNA, 294 bp, Pseudomonas aeruginosa
gtgttctttggcagccaagggatcattgccgagaacgtccaacacgagcagcgcaagatcatcaagtacagtcagctggtggccaacatgatcatcctccacaacgtggaaggcatgagccggaccttggccgaaatgcagaaggaggggattgaactgacgcccgagattctggccggcctgtcgccttaccgaaccagccacatcaatcgcttcggcgattaccacttggatcttgaaagggaagtggcgccgctgagctatgccgccaaagtccttgaacaggccccatag

SEQ ID NO: 365288 - DNA, 2325 bp, Pseudomonas aeruginosa
gtggccaccggagcagcccagaccaagcacaccatcccggacatcgtgaacgtcctgctcgaagagctggtgcaccatcgctacgaactgcccggtttccgcaccctggaactggccgccatcggcgcgcgtgagcgggtcaatctgggctactaccgcagcatcagccacgcgctgacgcctaccacgcgcacgctcattgacgacttgctgcgcgcaccggaaaactccaggttcaccggctggcaatcgctcaagcgcgagcctggtcggcccaccaacaaggaagtccggttctatctgcagcacatccgcatgctgcagcagttggctgagcagctgcctccgatcgatgtgccggtccctaagcttaagcaattccgtgcaatggcccgggcctatgacgccagcgagctggccgaattggctccggacaagcgctatgcgctggccaccatcttcattcgcgcccagcatgccaaaacgctggatgatgcagccgagttgttcattaaacaggtgcgcgggctggagaacacggcccagcagaagctgctggcctaccagctcgaacatgccaagcgggccgacttcctcatcggccagctcaaggaaatcctgcaggcctatcagctcgacggcagcgatagtcagcgcgtggatgccatcgacaacagcctggaagcggaagtgtcgaccctgctggccgaatgcgaagaacatatggcctacgcggggaagaactacctgcctttcatgttgcagccctatggcgcggtcaggccactgctgttcaacgggctggagctgatgaatttgcgggcaaccagccacgatgccggcatggagccattgatcgcagcggtgctgtcgctgcgcaaccaacgccgtgagctgatcgaagtcgcatccctcggcctggatccggaaaaggacttcgattggatgtccaagctctggcgtcagcacgtgtttggcaaacgggccagcgcggcaggcgccggctggatgcaccgcaagtacttcgagctggcggtactggtgcaggtcaaggacgaactgaagtccggcgatctcttcattcccagcagcgaacggtttgatgactaccgcgagcagctggtcgatgaagccaccttggcccaagagctggaagcctatggccaggtgtcaggcctgcccaccgacgccgagtcgttcgtggcagggttgcgcgcacaattgacctccctggccgacgaggtcgacgcgcgtttcccggagaacgtgcatgcggacatcctggaggggcgcctggtgctgcggaaggggcaacgcgccgaagtctccagcgcgattaccacggtggatcgcctcatcgccgaacggctcccagagtccagcatcgtcgatgtgctgatcgacgccagccaatggctggatctgcaccgcttcttccgtccgatcgccggcaccgagagccaggttgaagatctgccccggcgggtgatcaccacgctgttttgctatggctgcaacttgggtccgacgcagacggcgcggtcgatcaagggcttcagccgtcgccaggtcgcttggctcaacctcaaatacgtgaccgaggatgtccttgagaaggccatcgtggaggtcgttaatacctacaacaaatttgacctgccgggctattggggcagcggcaagagcgcgtcagcagatggcaccaagtggagcgtctacgaagacaacctgctgtcggagtaccacatccgctacggcggctatggcggcatcggctactaccacgtgtccgacaaatacgtggctctgttcagccacttcattccctgtggcgtgcacgagggcatctacatcttggacggcctgttggccaacacttccgacatccagcctgagatcgtccatggtgacacgcaggcgcaaagctatccggtcttcggcctggcccacatgctgggcatccagctgatgcccaggatccgaaacatcaaagatctgacgttcttccggcctgaaccgggaagggcctacaagaacatccaggccctgtttggggacagcatcgactggcaactgatcgccacccatctccacgacatgctgcgggtggtgatctccatccgattgggcaagatcaccgcgtcctcgatcctgcgccgattgggcacctacagccgaaagaacaaactgtactttgccttccgggagctgggcaaggccgtcagaacgctgttcttgctgcgctacattgatgaccacgagatccgcaaaacgatcaatgccgcgaccaacaagagcgaggaatacaacggtttcgtgaagtga

SEQ ID NO: 365289 - DNA, 366 bp, Pseudomonas aeruginosa
atggctacccttcacgagaccgcctacccgcgactgaagcctgatcccaccgccaaggaactggaggagatctataccccgaccgccgctgagattgcatttgcaaaacagctgaccacccagccgggtccgcaattggcggtactgattcatctcaagctcttccagcgtttgggctacttcacactgttggccgacgtacccgagcggatccggcagcacatcgccaaggccgcccgactcgggcgcgtattggataccgaccagctcgaacgctacgacgcctccggcagcaagcgccggcacatgccgcagcttcggcagttcatcggtgtacgtcccctggataaatcaggcttggcctag

SEQ ID NO: 365290 - DNA, 1272 bp, Pseudomonas aeruginosa
gtgaccgaactggaccgctacctcgatgcggccacgcgccagaacacggtgcgcagctatgcgtcggcgctgcggcactttgaagtcgagtggcaaggccacctcccagcgacaccggacagcgtggcccggtacctggccgcgtatgcgcagaccctggccaccagcacccttcgccacaggctggccgccattgcctcctggcaccgcgaccacggctttgtcgacccgacccggtcgccgctggtgcgcaaggtactcaaaggcatccagaccctgcacccgggccaggtcaagcaagccgcgccgctccagattcggcggctggtcgagctcgatgactggttggctgcggcgattgccgcggcgcatgtccggggcgacggagcagcggcgctgcgccatcaacgcgaccgagcgctggtgctgctcgggttctggcgaggcttccgtggcgatgaactgttgcgtctggaagtgacccatctcacgctggtgcccggacaggggatgacctgcttcctgccgcgcagcaagggtgatcggcaggcggccggcgtcacctacaaggtgccggcgttatcgcggttgtgtccggtggaggcgacccaagcgtggctgcaggcggctgacgtgcaagcagggccggtgtttcgggcggtcagccaatggggccaggtgagcgccgaaggcctccatcccaacagcttggtacgcctgctgcgcgatttgctggccagtgccggctttgccgatgcggggctccacagcagtcattccctgcgccgcggctttgccagctgggccaacgaccaaggctgggacatgaaagcgctgatggagtacgtgggctggcgcgatgtgcagtcggccatgcgttacctggacgggcgtgacccgttcgcccgggatcgcattgaagcgagcctgcccagcccagccgcgccagctccgacgatggcgctgccggcgcccgagggcaaatctgccctgcagctgcgcctacgcatgatgctgaccccgtttgcccgcgccggccgtggcgcggccaaggcccgggggcgaatcgaagagatctgcttggctccgttccaagctgtgcggctgaacaccgccagcagcgagtaccggttgactgctcccaccgatcccgaccgggatctggatgaaattttggctacgttgctcgatgacatgcaccgcatggccgatacgcaccagtgtttcctggaagcgtctctcagtacagacgacggccgccactgggattga

SEQ ID NO: 365291 - DNA, 414 bp, Pseudomonas aeruginosa
atgaaaatcagtgaggctgccgacgccagcgggtgccatctggagaccatccgctattacgagcggatcggactgctgccgcgcccggggcgctcgggcaatggctaccgggtctatggcccggccgacatcgagcgactgcgcttcattgcccgcggccgggacctgggcttcagcctagaggaggtccgcagcctgctgcagttggcgggcgatgaagagctttcgtgcgaggacgtggatcggctggcccgcagccatctgaccgacgtgcgggcgcgcatggccgacctgcagcgcatggccagcgagctggaacgggtgattgccagttgccacggtgggcagcgggctgaatgcaccatcctgtcaacgctgcggcagccggcctcggtggaggccacgcgccagtga

SEQ ID NO: 365292 - DNA, 618 bp, Pseudomonas aeruginosa
atgagtgattgcggctgccaccacgaggccaagaacgcgcaggagcggcgcgtgctctggatcgcccttgccctgaatgcggcaatggccgtgatcggcggcatcgccggctggatcgcccattccaccggcctgctggccgacgcgctggacatgctgtccgacgccaccgcctacgccattggcctggtcgccatcgggcgcacggcccgcttcaaggccaatgccgcgtgggtcagcggcagcgtattgctggtgctgggcgtgggtgtgctggtggaggtcggccgtcgcgtgatgtacggcgccgagccggtcagtggctggatgatcggcacggcgctgctgtcgctggtggtcaatatgactgttttgcgcatgctggcgccgctgaagtccggcgaagtgcatctgcgggcgacctggttgttcacccgcgccgatgtggtggccaatgttggggtgatcctggccggcctgttggtgtggtggttggctagcccctacccggatttcgtgatcggcgccctgatcggtctgtatgtgatcaaggaagccttcgagattctgggtgatgctcgccgggcacgtgccgacgcgcgcaagacccctgcatga

SEQ ID NO: 365293 - DNA, 357 bp, Pseudomonas aeruginosa
atgaccgcccgtggccagctgcggacgggcctacgctggctgctgctggcgcagctggcggtgggtttgctggtccagccggtcttgggtctggcgagcgaactgcacgttcacacccatccgaccattgccgcccatgcgccggcagtggccgcaccggcacctgagcgtggcatcggcgccgccttgcaccgccttcagcagctggcgctgtgctgcagccaggccgcacagcccgctgagatcctgctaaccgttgcggacatcggccggcatttgccggtgatgcaagtcaacacgcgcccgtatccgcacgagcatccggtcgcgccgttccggcctccgatcgcagggtga

SEQ ID NO: 365294 - DNA, 1278 bp, Pseudomonas aeruginosa
atgcatgtgcgattggcggccttggccgcatggctgctgctgactgcggcgacaacgccggcggcagcggccgaactgatgaccttggacgacgcgttcgcgcgcgtggcccaaacccaccccgagctgcgcctggtcggtgcgcgcgccacggtgctcgctgccgagcgtgaccaagcggtgcagcgcgccccgtgggcgctcggtgtcgaggtcgaaaatgcgctgggcactggcgcggcccgtggcctggacagcgccgagctgaccttgagcctgagctcggtgctggagcgcggcggcaagctcgacgcccggcgcaccttggcccaaagccggattgatgcactggccgtgcagcgcgagaccgggcggctggacttgctcgccgagacggcgcagcgctatctggccgttgtcggtgctgaccggcaacgcagcctggcggagatggatattggccagcgccagcgaaccgtggtcgccgcccggcaacgcctgcaggccggcgcctcacccgaatcggtgctgctcaccgcacaggcagcgttggcgcgggccgagctgacccgtgatcgcgccgagcaacagcgactggccgcccgtcagcatctggccgcgctgtggggcgaacgtagtcccaactttgaggtggccccggccgatccgatggccctgccggcgatcgcctccatgcagacgctggccgatgagctggagcggacgccggaactggcccagtttgccgactcccgccggatcgcgcaggcacgactgcagctggcacgttcagcggcctcaccagacctgtcctggcagctcggtgtgcgccgactgcaggagaccgacgacaccgcgctggtcgccagcgtgtccatgccgctgggcagccgcagccgcgcacagccagagatccgcgccggcgaagccgagctggaggtcctgacgatcgagcgcgaggccaagggtctgtcgctgtattccacgctggtcgaagcccatggccgctacaccgtcgcacaagccgaggtggcgcgcctgcacagcgacgtgttgccgaagctggcccgagccgagcaggccgctgagcgtgcctatcgcgccggagcgatcagttacctggaatgggctcagttgcagtccgaacgcacggccatggcccagcagcagttggacgtggccttggatgcgcagcgcgccctgatcgaaattcaacgactgaccggtcaggcccttgtaacgccgccggcggccgcttcacttggagatagcccatga

SEQ ID NO: 365295 - DNA, 951 bp, Pseudomonas aeruginosa
atgagccgtttttcctggaccgcactgggcatggccctgttgctgaccgcctgcaatgcgtccgcccccaacgaagcatccgagggcggccccgccgctgagggcgaggagcacggcgagcacgaggaagcgccgctggaaaccaagattgccgccaaggctgcgcaggcggcaggaatccaggtcgcgccggctgggcctggtgagattgctgacgagcatgaggtgcaaggtctgctcaccccgatcgatgggcgcatcgcacaggtcacggcacgcttccccggaccggtccgctctgtgcgagcgggcgtgggtgatcaggtgcgtgccggccaggcactggccacagtagagagcaacctgagcctgaccacctataccgtcaccgcgccgatcagtggcgtggtgatggcgcgtacggccgccgtgggcatggcggcagctgagggggcgccgctgttcgaggtcgccgacctgtccacgctatgggtggacctgcacatcttcggcgccgacgtccagcacatcggtgccggcgtgccggtgacggtcacccgcttgagcgatggcgtcacggcgcagaccaccttggagcgcgtcctgcccggcaccgccaccgccagccaaagcaccattgcgcgcgccaccgtggccaacaccgatggcctgtggcggccgggttcggcggtcaaggcgcgggtcaccgtggatcgccaatcggcggcgctggtggtgccaatcaccgcgctgcagaccgcagaagaccaggacgtggtctacgtgcagcagggagagacctaccacacccgcccggtcaagctgggtcgccgcgacgctgagcgcgccgaagtgctggaagggctcaaggccggtgaacaggtggtggtggcccagagcttcctgatcaaggccgacatcgaaaaatccaccgtcgaagaagaccattga

SEQ ID NO: 365296 - DNA, 3198 bp, Pseudomonas aeruginosa
atgctcgaacgcctcattgggctgtccatccgccatcgctggctgacgctggtgctcaccgctgcgctggttgcgttgggcgtgtggagctaccgtcacctatccatcgacgccacaccggacatcaccaacgtccaggtccagatcaacacccaggccccgggctactcgccgctggaggccgagcaacgggtcacctttgctatcgaaacggccatggccggcctacccaagctggattacagccgctccttatcgcgctacgggctttcgcaggtcaccgtcgtattcaaggatggcaccgacctgtactttgcccgccagcaggtcgccgaacggctgcagcagatcgcctcccagctgcccgaaggattggatccggagatgggccccatctccaccgggctgggcgagatcttcatgtacaccgtggaggccgagcccgacgctcgcaagcccgacggcacaccctacacggccacggacctgcgcaccctgcaggactgggtgatccgcccgcagctgcgcaccacgcccggcgtcaccgaggtcaacaccatcggcggcttcgagcggcagatccacatcactccagatccggcccagctggtggcgctgggcttcacgttgaacgacgtggtcgcggcggtcatgcgcaacaaccagaacattggcgccggctacatcgagcgcaatgggcagcaattcctggtgcgcgtgcccggccagctggccaatctggaggcgatcggcaacatcgtgctggaccggcgcgatggcgtgcccattcgggtgcgcgatgtcgccagcgtcggcgaaggcaaggagctgcgcacgggcgcggccacccagaacggccatgaggtcgtggtcggcaccgctttcatgctgttcggcgccaacagccgggaggtctcccaggcggctgcggccaagctggacgccgccaacgccagcttgcccccgggcgtgcatgccaaggccgtgtatgaccgcaccgcgctggtggaccgcaccatcggcacggtatccaagaacctgatcgagggcgcgctgctggtggtggtggtgctgttcctgctgctgggcaatgtgcgcgcctcgttgatcactgcggcggtgattccgctggcgatgctgttcaccatcatcggcatggtgcgtggcggcgtatcgggcaacctgatgagtctgggtgcgctggacttcggcctgatcgtggacggggcggtgatcatcatcgagaactgtctgcgccggtttggggaggcgcagcacgcgctgggccgccagctcaacgatgaagagcgctatgacctgaccgcctcggccaccgccgaggtgatccgtcccagcctgtttggcctgggcatcatcgcggcggtctacctgccgatcttcgcgctgtccggggtggaaggaaaaatgttccacccgatggcgatcacggtggtgctcgccctgaccggcgccatggtgttgtcgctgaccttcgtgccggcggcgatcgccaccttcctgcgcggccgcgtggccgagcacgacaaccgcctgatgcgctggtcacgcgctcgctacacgccgctgctggattgggcgctgcgtcggcgggtcgtggtgctgacaggcgcggccgtgctggtggtggggtgtggcgtgctggctacccgcctgggctcggagttcgtaccgagcctggatgaaggcgacatcactttgcagccaatgcgcattcccggcaccagtctggagcagtcggtggccatgcaggaaacgctggagaagcgcctggcccagttcccggaggtggccaacatcttctccaagatcggcaccgccgaggtggccaccgatcctatgccgccgtcgatggccgacaccttcctgatgctcaaaccccgcgaccagtggcccgatccgcgcaagcccaaggccgagctggtggaagagctggagacggcggctaaggaaattccgggcagcaactacgagttcacccagcccatccagatgcgcaccaacgagttgatctccggcgtccgttcggacgtggcagtcaaggtctacggcgacaacctggaccaactgacgcgcctggccagccgggtcgagcgggtcatgcgcagcgtccccggcgccgaagacgtcaaggccgagcaggtctcgggcctgccgctgttgaccatcacgccagatccggcggcattggcacggtatggcctgaacccgggcgacgtgcaggaaacggtggccaccgccattgggggcagtgtcgccggccagctgatcgagggcgaccgccgcttcgacttggtcgtgcgcctgcccgaatcgcagcgccaagaccccgccgtgctggcagatctgcccattccgctgccggcaaacaccagtatcgatgagtcaagccgcctggccaccggcgccaatggtgggcctcgcacggtgccgctgcgggaagtggcgaagatccaggtggagcgcgggcccaatcagatcaatcgcgagaacggcaagcgacgcgtggtgatcaccgccaacgtgcgcgagcgcgatctgggcgggttcgtcggcgagttgcgcacgcgcatcggccaagatgtcacgcttccagagggctactggatcgattacggcggcaccttcgagcagctgatctcggccacccaacgcctgggggtggtggttccggtgacactggcgttgatcttcgccctgctgttcatggccttcggctcggccaaggatgcggccatcgtgttcagtggcgtaccactggcgctgaccggcggtgtgctggcgctggccctacgcgggattccgctgtcgatctccgccggcgtgggcttcatcgcgctgtcgggcgtggctgtgctcaacgggctggtcatgatcgccttcatccgccgcctgcgcgaacagggcgatccgctggacgacgctgtccgtgacggcgcccttggccgcctgcgcccggtgttgatgaccgccctggtggcctcgctgggcttcctgcccatggccttgaatgtcggcgccggctcggaggtgcagcgcccgctggccactgtcgtcatcggggggattgtgtcatccaccgcattgaccttgttggtgctgccggtgctctatcgttggctgcatcgcgaccgagctccccgcgccggtggcagtgccttggagtcttcgacaccatga

SEQ ID NO: 365297 - DNA, 279 bp, Pseudomonas aeruginosa
atgaacgagatcaacttggaacaggtgcgtgcggcgatgtttaccgaccccggcgtgaaagcggtggatgacctgcgcctggtccccaccaaagagcgcggtcgtgcgatcgcggccaccatcaccgtggctgcgccgtcggtcgacctggacttggtgcacgcggtgaccgcccgcgtgctcgccgaccaattcggcatcgatcaggtcatgctgtgcttcaacgacccgggaccggtgccgccgccccccaccgcggcacccttgaagaagatgtga

SEQ ID NO: 365298 - DNA, 1305 bp, Pseudomonas aeruginosa
atgcttgcccttgcgattttcatcgtcactcttgtattcgtcatttggcagccgcgagggttcggtatcggttggtcggcactggccggcgccgcagtagcgttggccaccggcgtcgtcgggtggggtgacgtcgccacggtgtgggggattgtctgggatgcgacgtttactttcgtcgcactcatcatcatctcgctcatcctagacgcggccggcttcttcgcatgggcggcgctgcacgtggcgcgctggggcggcggcagtggtcggaaactctttccgctgatcgtcttgcttggcgctgcgatcgcggcagtgttcgccaacgatggcgcggctctcctgttgacgccgattgttcttgccattctgttgcgcttgaactttccacccgcgagtgcgctcgcgtttactgtggcctgcggtttcatcgctgatacggccagcctgccgctggttgtctcgaacttggtcaacatcgtcaccgcgaacttttttgacgtctcgttcgggcgctacgcagcggtcatggtgccggtgaatctggtgtcggtcggcgccacgctgatcgtcctgtggctctggttccgccgcgacattccccgcacctacccggtccacgatcttgaagcgccgcatgaggcgatccgcgacaaggcggtcttccgcgccgccttgcccctgctcgcatcactgctccttgcctacttcgtgaccgggccgctgggcgtcccgatcgccttggtgacgggtgtggctgcgctggtgctgatggcaattgcaggtcgctgggcgacaggcggccgaggcgccaccatggccgtgaccaagattctgcgtggcgcgccctggcagatcgtgctgttctcggttggcatgtatctggtggtttatgggcttggcaacgcctggctgacaaaggctgcaagtgcggtgcttgagtggctggcggcgcagggaacctttgtggccacgatcggcaccggcttcgcagtggcgggcctcgcttcgatcatgaacaacatgccggcgacgctggtgggcgcactggccatcgacggggccaatcttccggccgccacccgcgaattgatgatctatgccaacgtcgtgggcaacgaccttggccccaagctcactccgattgggtcgctcgcgaccctgctgtggctgcacgtcctcgccggcaagggccaacggatcacgtggggacagtacatgaaggtagggctaatcctcacgcccccggtcctgttggccacgctcgtcgccctctggatttggctgccgctcgctcaatga

SEQ ID NO: 365299 - DNA, 726 bp, Pseudomonas aeruginosa
gtgatcgatcgcattgccgcagatctgccgagcatcgacgcaacgcaacttgcaccgatcgacgttgatgcactagctgggcccggcgaccccaggcacccgccccggatcctcatcctctatggctcgctgcgggaacgctcttattcccggctgctggcagaggaagccggccgactcttgcgctggtacggctgcgacgtgcgaatcttcgatccgcatgacttgccactgcctgacggagccaccccggatcatccgaaggtgggtgagctgcgcgagctcgcgtactggtccgaaggcatggtttgggtcagcccggaacgccacggcgccatgaccggaatcatgaaggcgcagatcgactggattccgctggccgacggggccaagcgcccgacacaaggcaaaaccttggcggtgatgcaggtgtctggcggctcgcagagcttcaacgcagtaaaccagctgcgcgtactcggccgttggatgcgcatggtcaccatcccgaaccagtcctcggtggccaaggccttccagcaatttgatgaggctgggcgcatgaagccgtctgcgtactatcagcgcgttgctgacgtatgcgaggagttggtgaagttcacctggctggtgcgtggtcgctcagcgtacctgaccgatcgctattccgaacgtgttgagagcgccgaagaactgtccaagcgcgtgaatcagcgctccatctaa

SEQ ID NO: 365300 - DNA, 414 bp, Pseudomonas aeruginosa
atgacgctgacgatctaccataaccctgcctgcggcacgtctcggaataccctggaaatgatgcgccagtcaggtgaagacccggtggtcatcgagtacctgcaggcgccgcccacgcgcgagaagctggtcgagctgctcgccgcgatgggcatgtcccctcgtgagctcctgcgccagaagggaacaccttacgcggagctgggcttggacaatcccgcgctcaccaacgagcaactggtggacgcgatgatggcgcatccgatcctgatcaaccgtcccatcgtcgtttccggccggggcgcggccctgtgccgaccgtccgaaaaggtgctcgcgctgctggacaagccggtgtcctccttcaccaaggaagacggcgaaaccgtgacggttgccggagcgtctacgtga

SEQ ID NO: 365301 - DNA, 531 bp, Pseudomonas aeruginosa
atgagcttccctcagccgtttaacgtcctgttcctatgcaccggcaattcagcccgctcgatcctggccgagagcgtccttcgcaagatcggcgatggccgtttcaatgcgttctccgccggcagccaccccaagggtgaggtccacccgctggcaatcgagacgctgcgtcaggccgactacccagtcgaggggctgcgctccaaggcgtgggacgagttcgccgtgccagacgccccggccatggatttcgtttttaccgtctgtgaccaggcagccggcgaggcctgcccactgtggccaggacaaccgatcactgcgcattggggcatcgaagacccgagccgagaagcgcgcggggacatgtggcagcgcgccgcctttcggcaggcgctggtgtacatggagaaccgcatcaaggcgttcgtcgcacttccgatccacacgctaacccggacgagcttggccgcgcaggtgggcgaaatcgggaagttcgagggcaccacgtcgccccgacccgacgtggcttga

SEQ ID NO: 365302 - DNA, 726 bp, Pseudomonas aeruginosa
atgcaggtctacggtgcggacaaggtctggcggcagctggcacgcgaggggatggctgtagcgcggtgcacggtcgaacgcttgatgcggcgacaaggcttgcgcggtgtgaggcgcggcaaggtggtgcgcacgacggtcagcgatggcaaggcgtcgtgcccactggaccgggtcaatcggcagttccgtgccgagcgaccgaaccagctctgggtctcggatttcacctacgtctcaacctggcagggctggctctatgtggccttcgtcattgatgtgtttgccaggcgcatcgtgggctggcgtgtcagccgttcgatgcacacggacttcgtgctcgacgcgttggagcaggcgctctacgcacgtcagcctgagcgtgacagcagcctgattcaccatagcgaccgcgggtcgcaatatgtctccattcgctacagcgagcgtctggccgaagccggcatcgaaccgtcggtgggcagcaaaggcgacagctacgacaacgcgctcgcggagaccatcaacggcctctacaaagccgagctgatccaccgccgagtaccttggaaaaccgaggaggcggtggagcttgccacgctggaatgggtagcctggttcaaccaccaccgactgctcgaacctatcggctatatcccgccggccgaggccgaggcaaactactaccggcaactcgccagtcaggcagccatgacggatgcctga

SEQ ID NO: 365303 - DNA, 324 bp, Pseudomonas aeruginosa
atgaacaagtccaccaagttttcccccgaagtccgtgagcgtgcggtgcgcatggtgcaggagcaccgcggagagtatccatcgctgtgggccgcggtggagtcgatagcgccgaagatcggctgtgtgccgcagacattgctgggctgggtccagcagcacgaggtcgacaccggtgttcgcggcggcgtgaccaccgccgaagcgcagcgcgtgaaagagctcgagcgtgaggtcaaggagctgcgtcgggccaacgagatcctgaagctggccagcgcgttttttgcccaggcggagctcgaccgccgactcaagtcctaa

SEQ ID NO: 365304 - DNA, 3054 bp, Pseudomonas aeruginosa
atgaaactgcacttcgagcccaacctcgactaccagctgcaggccatcgaggcggtctgcgatctgttccgcggccaagaggtgtgccgtaccgagttcacggtgaccatgaaggcgccgccgccggctgccgacgacatgtttccgggcaccaagccggagcaactgaccctcggcgtggccgaatcggacctgggcgtcggcaaccgcctcacgttgctggacgacgagctgcaccagaatctggccgacatccagttgcgtggggggttgccgccttccggcgcgttggtctcgggcgatttcaccgtcgagatggaaaccggtactggcaagacctacgtctacctgcgcagcatcttcgagctgaacaagcgctacggattcagcaagttcgtcatcgtggtgccgtcggtggcgatcaaggagggcgtctacaagaccctgcagatcacggaggagcacttcaaggggctctatgccggcgtgcccttcgactacttcctgtatgactccaacaagcttgggcaggtgcgcaatttcgccaccagctcgaacatccagatcatggtggtcacggtcggcgccatcaacaagaaggacgttaacaacctgtacaaggacagcgagaagaccggcggcgagaagcccatcgatctgatcaaggcgacgcggccggtcgtgatcgtggacgagccgcaaagcgtggacggcggtctgaccggggcaggcaagactgcactcgatgcgatgaatccgctgtgcaccctgcgctattccgcgacccatgtggacaagcaccacatggtgttccgcctcgacgccgtggatgcctacgagcgcaagctggtcaagcaaatcgaggtggcatcggccacggtggaagatgcccacaacaagccgttcgttcggctggtgtcggtcgccaaccgccgcggcacgatctctgcccgtgtggagctcgatgtggcaactgccaacggcgtgagacggcaagaggtgacggtctccgacggtgacgacctggagcaggccgccgagcgcgccatctacgccgattttcgcgtcggtgagatcaataccgccaagggtgaagagttcctggagctgcgctaccccggcggcgaaacctttctcagggtggggcaagcgcatggtgatgtcgatgccctggccgtgcagcgcgagatgatccgccgcaccatcaaggagcacctcgataaggaaaagcgcctgcgcccactgggcatcaaggtgctatcgctgttcttcatcgatgcggtggacaagtaccgccagtacgacgccgacggcaacccggtcaagggcgactacgcgcgcatcttcgaagaggagtatcgccgcgcggccaagctgcccgcctatcagagtttgttcggcgaaatcgacctggcgagtgccgccgaggaagtccacaacggctacttctccatcgacaagaaaggcggctggacggacaccagtgagaacaccgcgggcaaccgcgagaacgcagagcgtgcctacaacctgatcatgaaggagaaagagaagctgctgtccttcgatacgccgctgaaattcatcttctcccactcagcgctcaaggaaggctgggacaaccccaacgtgttccagatctgcacgctgcgcgacattcagaccgagcgcgagcgccggcagaccatcggccgggggttacgcctcgccgtgaaccagaacggcgagcgcgtgcgcggattcgaggtcaataccctcacggtgattgccaccgagaactacgagcaattcgccgagaacctgcagaaggaaattgaggccgacaccggcatccgctttggcatcgtcgagcagcaccagttcgccgccatcgccgttaccggggccgacggccaaaccgtgcctctgggcatcgatcagtcgaaggtgttgtgggagcacctgaaagctgccggccacatcgatgccaagggcaaggtccaggattcgttgaagacggcgttaaaggatggaaccctggcgctacctgcggagttcgacgcgcagcgcagtcgaatcgccgaggtgctgcgcaaggtgtcgggccgtctggaaatcaagaacgccgacgagcgcaagcaggttgccgtgcgcaagggcgtctatctcagccccgagttcaaggagctgtgggatcgcatcaagcacaagacgacctatcgggtgcagttcgacaatgacaagctgatccagaactgcatcgattcgctccggcaagccccggccatccccaaggcccgcctgcaatggcgcaaggccgacatcgctatcggcaaggccggtgtggaggcgacggagaaagcgggcgcggcaaccgtcgtcctggacgagacggatatcgaactgccggacctgctcaccgacctccaggatcgcacccaactcacccgccggagcatcgccaccatcctgagcggcagcgggcggctggacgacttcaagcgcaacccgcagcagttcatcgagctgagcgccgagaccatcaaccgctgcaagcgcctagccttggtcgacggcatcaagtaccagaagcttggcgatcagcacgtctatgcacaggaactgttcgagcaggaagagctgaccggctacctgaagaacatgctgatggacacgggcaagtccatctacgagcacgtggtctacgactccaccaccgagcgcgacttcgccgacgcgctggaaaagaacgacgccatcaagctctacgccaagctgccaggctggttcaaggtacccacgccgctgggaacctataacccggactgggccgtactggtggaggaaggtggagcgcagcgactgtacttcgtagtcgagaccaagggcagtctcttcatcgacgacctgcgcaacaaggagcgcgcaaaaatcgcctgcggcgaggcgcattttgaggcgctggcggttggcgagaatccggcacgctacgtggtcgagcgttctgtcatcgaccttttggctgaatcggctgcgatcttcagatcatatgaaaaccttggaggtgacaggtga

SEQ ID NO: 365305 - DNA, 126 bp, Pseudomonas aeruginosa
atgaaacctctgctgactgccctgctcctcgtcctgctcggcgccccgacggccgccgccccggcggcacgctggccgaaagccgccccgcgccgccgctggcggccgaggaaaacaaggacctga

SEQ ID NO: 365306 - DNA, 408 bp, Pseudomonas aeruginosa
atggacactttggaaacgaacacagcggttgcggcaccgcccaagcgcagttggcggcggcactctgacgagtttagggcacggatcatcgagttggcacgccagccgaacacgtcggtggccgcggtggcgctggccaacgggctgaatgcgaacatgctgcgccgctgggtgcgcgagtccgaggctgccggcaaagccgccaccgaggtggcgcagccgcgtgatgtggtcacgccggcgttcatgcagttgccgatgtccgcgcagccttcgctgccggcggcgtcgccggagccggcagcggtacgggtcgaggtggagatccagcgcaacggcacgacccttcgagcgagcctgcccatggacagccgcagcgccgcctggctgcgcgaggtcactagttga

SEQ ID NO: 365307 - DNA, 333 bp, Pseudomonas aeruginosa
ttgatccgcgtggacgcggtctggatggctgtgcagccgctggacatgcgcctgggcaccgaagccgcgctggcgcgcgtggtcggtgtcttcggcgccgcgcatccgcatcacgcctatgtcttcgccaaccggcgagccaaccgcatgaaggtcctcgtgcacgacggcatcggcgtgtggctggtcgccaggaggctcaacgcgggcaagttcatctggccaagcgatggcgcgagtaccctgagcctgagccgaacgcagttcgacgcgctggtgctgggcctgccgtggcagcgcctgggagaggccggcatcatccgcgtgatctga

SEQ ID NO: 365308 - DNA, 1599 bp, Pseudomonas aeruginosa
atgatcagcgcgcagcagttggagaccttggacccgcaattgcggcaggccctgctgtcgttgatgtccgaggtggccgcgcgcgacgaacagctgcgcgccaaggatgcgctgctcgagcagcgtgagcgcgacgcggcgttcaagcaggcgctcatcgacaagctcacccacgaagtggcggtgctcaagcgcatgaagttcgccgccacgagcgagaagttcgccggcagcaccgaacagaagagcctgctgcaggagacgctggacgaggacctggccgagctcggccgggagatcaagcggttgggcgtggacgtcgatgccgccggcgacaaggctggcaagaagtccccgaagcggcaggcactgccgccgcacctgccgcggcgcgacgtgcaccatgagcccgagtccacggtgtgcggttgcggctgccagatgcagcgcatcggcgaagacgtggccgagaagctggactaccagccgggcgtgttcacagtggagcgccacgtgcgcggcaagtgggcctgccgcgactgcgagaagctggtgcaagccgctgtgccggcacacgtgatcgacaagggcatcccgaccgcgggcttgcttgcgcaagtgctggtggccaagttcctggaccatctgccgctgtaccgccaggaagcagtcttcgagcgcgccgggcatctgatcgcccgctcgacgctcgcgcagtgggtgggcgagtgcggcgcgcagctgcaaccgctggtgcaggcgctggccgacgaacttcggcgacacgcggtgctgcatgccgatgagacgccggtggcgatgctcaagccgggcaacggcaagacgcaccgcgcgtacatgtggtcgtactgcacgccaagcagcaacccgaccaaggcagtggtgttcgacttcagcgaaacccgtagcggcgagaacgtgcgcgagttcctgcaactggacaccccgagcgcctggatgggcacgctggtcaccgacgggttcagcggttaccgaggctgcgtcgacaagggcgtgacctcggcgcagtgcatggcgcacgccaggaggaagttccacgagctgtgggtcaaccacggcagcgaggtgggccgccaggcgctgcggttccaccagagcctgttccgcatcgagcgcgagatcgaagcactgcctgcagaaggccgacgacgaatgcgacagcgcaagtcgcggcgggtgctcgccgtgttccaccgctggttgattgcgcagcggcagttggtgccgccgggctcggcgacgatgaaggccatcgactacagcttgaagcgctggggcgagctcacgcacttcgtcgacgacggcgacgtgccgatctcgaacaactgggtggagaaccacatcaggcccatcgccctcggaaggtcgaactggttgttcgccggcagcctgcgcgcgggcaagcgcgcagcagcgatcatgagcctgctgcactcggcgcgcatcaacgggcacgagccctatgcgtacctcaaggacgtgctggaacgactgccggcccacccggccagccgcatcgacgaactgctgccgcaccgctggtcgccttccgcttga

SEQ ID NO: 365309 - DNA, 342 bp, Pseudomonas aeruginosa
atgccgcgcattcacaccaaccttattgagatggatgatccaatctctaacatgataacaatgaatgaaaaaagaaataacatcatcatcaaatgcctccttgtcatgacccttcaagcaaaaaacgccagagtaaatgcccttaattctttcaagatatctattcgctctatccagttgctccaattaaatacctccaaaatagactttaaattcccccaagagagcaagcagtcgcacgaccaattgccctcagaagccctactcgaccgcacagctgaagcaaagggaggtgtggccacgctccttgtggcacttcaaaagcagactgacggaccatga

SEQ ID NO: 365310 - DNA, 1578 bp, Pseudomonas aeruginosa
atgcaagccctagagttcttagagcagtttcattataaaacaaacaactcactaagcgaaaaaacacaagaagaagatactaaaagcgtaacggcctctgttggaggccgacgagccgtgctttatgcttccattaaattgggaaagcgctgggttcctgcaggatatatcgatctgcaaatgccactcatgatgtgcaaacccagacaccaggtttttaaccatcccttcgagcacccggagcgcgacattcgctgggagcgctgggatcagcgtgcaatgaaagactatttgaacaccattgttcgcattggtcgagtcgtggtcggccctgagctgcgaggcctaggtattacgcggcgactcatcaaggctgccaaagcattctcagctgagcgctggcacataggcggagtacgcccgattttcatggaaatctcagcagaaatgctgagccatattgattttgtcacatcatcgggctttagttttatcgggaaaactgaaggaaacatttcacgcgtcttgaaagatatgcaatcaatggcgcgcgcaccaggtggtgaatttggaataatgagcttgcagcgcaaatacttcagagtactggaggactattgcaaaacgctgcagatcagcttcgacgaaggccttgaaattctccgccgcaagatcgagcaaagccaagactctctaacaacaggcgaatgggcagttttgcgatcagtcattcgcaatccaatcccatattatctgtgcccgttagatgagtacgcaaccaattatcttcgagcagccctaaaagcgctccccccgagggaagaactaactttcaataaggtcgaattttcagctaagagcactcagattagcatcagcaacctatcgatacgagcggcgtatcgaattccggaaacccgttcgacgaaaattgtaatggatgcgttcggtctaaaaggcgatacagtttatgccgatatagtccagaatgtttcagtaaaagcgtccaatggcaacataatatttgtagttgggactagcggaagcggaaagagtgtctttttaaattcactagacccagataaaacactagatggcaacctgacagttaggcgcacaggaagcatgaagcattcagcaggatggcttcgcccgctacgagacgatgctcccgtattcgaggtcctagcagagaaattcacaccagaaaaggcttttgttgcccttagtcgtgttggtttatcggaggcactggccttcatcaaacctttttggatgttgagccgcggacagcaatatagggctatgatcgccgacctcttgctccgggaggaagaagtttggctcctcgatgagttctgcagtgatctcgacccaattacggcaaaaatcgtcgcgcataacttgcgtaagcaagttatcgcaaccggtcgtattgcctttattgcggcggcgaaccacattcattacctagacgcactgcgcccaacgaaggtcttaatgcttcgctccggcgatgaacccgcatggctatctttcaaggaatatcaggatgagtttctcgagcacgctggctga

SEQ ID NO: 365311 - DNA, 1296 bp, Pseudomonas aeruginosa
atgagtttctcgagcacgctggctgagcggtttggcacagttattgaaaaaagcccctattcagtcgaagatccattagtaaaagttcaatatgtttcaaaaggacaaaatatagtttttggtcgcaccctaaagggcgaaaaccacaacaacctcctctatgttggcaaagtactagagagcactaagggcaagagctacctaggcgcagatgcgtggctggacacgacctttcctcatgttatctatataactggaactcgcggaagcggcaagagttttgaccttggcgtacttgtcgagggcatatcaaaactagcctgcccctcaccaatccaaaacaatgtgaagccaattacctcaattattatcgatacgcagagccagttctggacacttggttatgcaccacgcgagaccattgaggcgaataaaatccagctcgaagagttaaagcgttggaatttgaagccgaacaacttagctgcagcaaaaatcttcacaccaccaggatcaaccacctttctcggcaccgaaaaaactcttcagattaggccccgggatgtgcgagcggaagaatggtgcgcgctgcttaaccaagaagtctacagcccgcaaggccacattattacagcaacacttgaagctttagatgatagggactttgaaatcgcagacatgctcgactatatcgccaatgacaacaattggccgactgtagctgactcctcgcgcaacgccataacctacaaattagacgactatcgacgcactaatctattttcagccaacggcttgcgcatcaaagacttcctggaggacgggacctgcaatattctttcactgcgcgaattacgcaatgaagataaatcactaataacagctgtaattgctcgcaacctttttgatattttgggtcgacatcataatagaaaaaagacggcgagcttctttgatcagccatttgaaaatgatggaacacccgatcgagtatggctggttattgatgaggcacatgtagtggctcctagggatcagatttctccggcacgaggcgcactcgtagagtacgttaaacgtgggcgtgatgccgggctctcgctagtccttgccactcaacagccatctgctcttgacgatcgcatactcagccaagtcaatgttaccttcagtcaccgattgagcttccaaagcgacattaatgcggccgttgatcgaattccgacgaaatctgtaaaagccatgaagtttgcgggcacaaactacgagtgctcgataccggccaatgtttcttag

SEQ ID NO: 365312 - DNA, 1209 bp, Pseudomonas aeruginosa
atggcggctacagcccattctgatccatatgcgatcttgttgcgaaagataggttactctgttggcctagagttcactgcagagcgcattggggatctgacctcacggtatctacaggaccgtgatattactactgccagttggcatgagcttgtcacgggcagcaaaaatgaaggatattggggaagagaccagagtgcagaaaagcacattgcagactttttttactctcttcgcttcatccaacgaactgcaggggatgtgcttgccctcgaaaatcttgatgcactagccatcgcatcggaattgctgagcagtgagcaagaaaaacgtgctgcacgagactttctttttctttggtccatcctgactaatgatggggagatttttgtaaatctcctactagcaggattcgaggagaaggccattaaaagaacgctcacaacaatgatgcttaataagcgaataattgcaagcgaagcattcaaaggaaaaacaaccgaacaacgcattaaccgcgttataacaatcgagcgccaagagaaaaatgtaggcagtagaggaacacgccaatctataacctcgttaaggcgcacagagcatctacattctgagcgtggtggtggacaaggcttaaacgaagactatgagatagtcttctctgaagactatctccgcaaagttccacctcggaggcgagactgggcaatctcgctcgggctgtgggatggagaaaaaggactaacccagaaaggtcatgacttcctcaatagtttacgtcaaagtggctacattgacaaagaagagtgtttcacctactggcccatggactatgaactagttcgatccggtttccgcccggaccttttcggagaagcgaaggggttatgggattgtcttgttgatttttcatcagctttcgccagactccagtccgttccgcaacaggaaaataatcaaaacgctgctgtggatctgattaaagaaatgatgaaagtatttcgcaatttacatgtacgcaagatcatgctaaggcgcgagttgccaattacgattgcctatccggcggccatagccctgtcttacgcgcaaaaccaggcgatactcaacattcctgctaccatcttagcagagcaaaagggagcacagcgccgagtggcactgcggcagtcgagacataccggtggcgctctgagcattaagagataa

SEQ ID NO: 365313 - DNA, 948 bp, Pseudomonas aeruginosa
atgcccgtatttctactacccgatttcattgctgatctgcaagagcacaatgatgcgaattttgccagaagggtccttcagaaaacaatcaagcccgatggaagcttccgtccagattccgatgatcatccttacgagggaattgatggtgcctggatacggtatgtgagccgccaggccacagcgtaccgtgtcattttccttcgcaagggggagaatatttacctattcagggcaggggaacatagtgtcgaagaccatctgaaaaaaccaggtgaaggcgctatgaagtccgccgtgccagttgaggggggagatactgaagtttcagctgtggtagctgctataactgagcagcaagctgatgctactttgcctcaggtcagtcgcttcaaacgtaatatttctccatcccaaatccaccacgaaattttttcacgccgcaatttaccgcataaagatatttggctggtaacgccttcagtggatgaagagctttttgcccccaccaaagcctttggcaagctccttctcgaacaagccgaagacggggcaagtgtcgtaatcataacagctcctcccaaagacaagaatatagaatggatggagaagttggcggaacgaaatattggaatttatttgtatccccgattgaactcgaagctttattgcttccttttcgatgataaccggcgctatgagactggattgatcgaaggcgaaaagtactcctcgctaattcttgtcggctcatctgatctcacagctgcaggagtgaccctgggaagtcaaaattttaatgaggaactctgctactcagccccagaaaacgaagcctgcttcgtggaagagtatgtaacagagctaatgtcaaacggctacgacctgcccgaggttcgccgccttctagctcgagggcaatggcagaaattggagaatagaaaatga

SEQ ID NO: 365314 - DNA, 1170 bp, Pseudomonas aeruginosa
atgactatgagccctggaaactattacgaaaaatcgaacttaagggacaacccttttcgttcaaccccaaactttgcagctgatccacgcgcaaaaatatgggttggctatgaaaaacaaaaaaagcaactcgataaatatttgaagcgctcgctggctgatcaagtgggaaatgccaatttccttatgctctatggagactatggcacaggaaaatctcacgcactgctttgggcgcagaatcgaattctacatgatgaaaaaaaatcatttgattcagtttgttattttattccaaccctccaaaaggggaaaggcaagctcacctttgccggagcttttctagatgacatcatcgccaaatcagacctcatggcgaatgtaagagcataccaaaacttcttaattgaatgtatttcgctttatcgcacagcacacggccttgagcacgatgtagacgcagagaaagttattgagaagctgatccatccagtcgaacttaataacttcgccaaagaaatatatcactgccagaaagaggaagactttctaaaacttgtcgcaccaaaaaccttaacagattatcaggccatgataatattcacccgcctagtaaatctgttcgtgcatgaaatggcggtatcggaaaacaatctaaaaagattcaaaaaaggggcatatcttttcattgatgagctggatgatctggagcgttccagcctcaaagaggctcgtgaagttaatgatatcctccgccacatttatgataattgccccaattgtttctgcatggtaatcgcactttctgccgaaatttcacaactatcagtattatttttcgactacattttaagccgcatccaccgccagattgagctagttgttcttgacaaggatgacgcagtttcttttgtccgtgaaatcttaaacagtaatcgcgttaatccagacggtgagggaggattcttcccatttgacgaggcagccattgaaacaatagcctctcagctcacagaaattacaccacgaaagattgttacaaccatgcaacaggtgatagaagaagcacgtctcgctgggcatgacccagctgtcggccctgtatccgtagattttttggatgaaaatgaaatcttagaagaggttcttggggagggtggtgtttcgtag

SEQ ID NO: 365315 - DNA, 330 bp, Pseudomonas aeruginosa
atgcgtagcgttctcgtgctctcggttgccttgctggcggcttgcggtcggtcgccctgcgaggatctggccgaaacgctggccgccaatcccgcgcggctcaaggcgctgcgtgcggagtgttcggccaactggcagacggtgggcgagggtatctgtagggccgccgccgaggcgtaccggcgccgcttcttcgccggccactccggcccggacgagtacgttgttctggaggcgttaccgccggttccaccgaccttcgatgagcctggcgacgaggtggccgaaagcggtgtgcggctggttgtcgtcaaggaggacgcaccatga

SEQ ID NO: 365316 - DNA, 255 bp, Pseudomonas aeruginosa
atgaacgccattacccaaaccgaagccgtgaccctgaccaccctggaagcggccgacccgaccaagaacctgatactgctgccgctctcgcagctcctgccgcgtcgctccaagcgcaacgtgcgcaccacgccgcgcctgtctatcgacgagttggcgcgagcattttccgcatcggcctgctgcaaaaccttgtcgtcatcttcgccgccgatggcaagcattacgaggtggtggccggcgaccgccgcctga

SEQ ID NO: 365317 - DNA, 273 bp, Pseudomonas aeruginosa
atgcctaagacgcacttgcagcaatcagataaatcagtgaaggtcgagagggcgggcgtgccagtggtcaccccccaggctcgtcaggtccacaaggaagacgaggtcaacatttctgcatacttccctgcagacgtgaaatcgtgcttacgcatggtgcaatctaggaacggcaagaacgtaaaagactgcctggccgaagcgttgctagacctattcataaagcacgatgtgcccgtgccgttatctatgaagatgggtggagaccactga

SEQ ID NO: 365318 - DNA, 1152 bp, Pseudomonas aeruginosa
atggcagacgtaaaggaaggcctgccgattacccccgctgtcgtccaatgggcgcgcgaacgtgccggctattcaatagatgatgctggcctgatctttaagaaaatcgcagcgtgggaagctggagaagcattgccctcctatgcccagattgaggagatggccgacaaattcaaaactcctgtcgccgtatttttcttcccgagcccgccggcactgccctcagttcagcaatccttccgtacgcttccagccgatgatttcgctgcgatcccgcgcaacattcggctactgttgcgtcgtggccaagccatgcaaatcaacttggcggagctgaatgacggcaccaatccgtcgaagagcttgataagccgcgacttgaagttttcgcccaacacttccatcgatgacattgcagcagaagtgagaagctatctcggagtctccatcgaggagcaagctagctggaaaagcgtggacgaggcgctcgataattggcgtgagatatttgcagctcgcgccggggtatacgcctttaaggatgccttccacgccccgaattacttcggattctgcctctacgatgccgagtttccggttgtctacatcaacaacagcgcaacgaagtcgaggcagatatttacgctcttccacgagctagggcatttgcttttccataccagcggcatcgatattcttgatgactcgtatctcaagcacttaggcgatgaagaccgaaagatcgaagtcatctgcaacggcctagccgctcgcgtcttagtccctgacaatgtgcttgacgatatacttgttggagttcaaatcaatcgcgcggccgcagagcagattgccaagcgctttaatgtcagccgcgaggtgatctatcgcaagttccttgatcggaaactggtcagtgctgatgagtactccgccgcagccgatgcatgggcagcgcaggtaaaacccaagacatcatcttccggcaattactacaacagccaccgcgcctacttgggacaacgttacatagacctcgcgtttaccaggtactaccagaatcgcttcgatcaagggcagctagccgagtacttgaatctcaagccgaagagcctgcccacctttgcagaaaaatttgcgtggggtggtctctaa

SEQ ID NO: 365319 - DNA, 774 bp, Pseudomonas aeruginosa
atgacaacatcaaaaacatcaacagcagttagaagaatatgcccgtgcttaacagcaataaataacgaagttcttaaagattttatcgttagtttcaatagcgtttccgctgataaattttcaatcgcaaaggcgttcaaagacttcattatctacgactgcgcaacctatatagtcgtaacaaatgaaagcaattcaatcttgagaaaatacaatcaagcactttctaatacaaccaacaactatactaactacataagaaaaaagcctgaatacaaaacagaagatgctgataaaatagttcgcactttaaggcagtcaagagtagatatttctaaacttcttttcagcactaaaacttttagagcggagccaaacagcaatgcaatttgctttacagaagcatcaccttttgatgatgaaagcaagaagtctaaaaagttaaatctaacttactccgataaagacttcaaccttataaagtcaaaatttaaagcactgaaaaaagaaaatgacagtcttacatttgatgatttattttatcaatttatgcttgaattgaagatttataaactcaaatttgaaactaatttctttactcagcacgccactgaaatcaacgcatttacgaattttgcaagtcagtcacatcaaaattttcaaaatctcaaaatcgaagatttcaacgaatattttctcaatacttttccaagctttcaaagccgtctattagagtctcttgaaactttgaaaagcatgattagcatcgagtga

SEQ ID NO: 365320 - DNA, 1701 bp, Pseudomonas aeruginosa
atgcaccgcaaaacgccagtatacgcctacattcgcatgtccacggtcgagcaagccaagggcgactctgaacgccgtcaattgggccaaattgagcgctttctgcaagagaatgacggcgagctggtagaacccgttttccttgaccgcctatcgtcattcaatggcaagaacatcaaaaaaggcgcaatcaaagactttcttgatagggtcaaaaaaggagaaattgaaaaaggctcaattcttgtaattgaaagttttgacaggatttcacgccaaggtggctacattgcacattctgtaattctcgacattattaacaatggcgtggacattgcgacattatcgccatacaaacgctattcaattgattccgaaaatcaatttattgaaaatattgaaattcaaactttgctttatcgtgctcacgaagagagcagaacgaagtctgaccgtatcactcgccagcatcaaaaccgaagagaaaaagcaaaggataaaaaagtagtttatggttcactgccgttctggcttgaaagaactcctgattggattgagtttcgagaaccagaagcatctgatgtaaaattgtgtctgtcattgctgaaaacatatggcatgtataccgcaaccgctaaaatcaatgagcaaagaaaatcatcaaagattttttcaaaggaaactgtttcgcaccttctaaatcgttcagcagtttgtggtgatttgcaaactcacaaaattgaatatgatgaacatggcaacaaaatcagagtccagggtgaagtcatccatgactattaccctgctttgatttcaagagcagaatttgaagaactgcgtgctgaaattcaaaacagaagaacaaccaaatcaactggtcgagtctctggatttaaaaatatttttcgcaatgttatgacttgcacctactgctttgcaccaatgcgattggcgcatatgaaatggaaaagtggtggtaagaaataccttgtatgcacgaagtcagaaacaaatcagtgtatcgaaaaaggtcgcttatggtatgactatgatgatgttgagcgtgtgtttttcaatgaagtcaatctatcaattctgaaaaaatctttgactcaaaaaaccaaaatcgacgacgcagaaattgaaaaattaagatcgaactttctgaaagcagaagaccaaaaatcaaacattctgaaagcaatcgaaatgggcactgtctcaaaagctcttgtcaatcgacttgaagaacttgaaaaagaatctgatgaaattcagaaaaggattgatgaactcaaagcagaaagtgctttgaagcgttcacagaatgaagctgaaatttttgactatgaacagcttgatgcagcattaaacgatgaagaacagcgtgcaattatcaataagattttgagaacaaaccaagccgatatttcaatttcaaaaggtgaagaaggttgcgattttataattgaaatttcaatcgacgataggcttgaaactgaaatcagttatcacaagcaagatgattttataaacagagttgagcatgatttaccagaaaatcaaacatctgatttagtaattcatgaagaccacactgacccttacgccgatgaaattgaaggtcagatttttgaagtatttgactctgcatctatgcccatcattgaaattaatcagcacaacaaaaaaccggattaa

SEQ ID NO: 365321 - DNA, 651 bp, Pseudomonas aeruginosa
  misc_feature (185)..(194): n is a, c, g, or t
atgactgatgccattagtgctgcacaggatcaaaatatttatgtggcgcctggtgcctcgctaaccacgctgtacaaggggctgtataatatctgcagccctggcgcagtatttcccgaggctgagacgacagaggcttgggatattcctttaaggttgcatccggattttgttcccggtggagnnnnnnnnnngtatgcgacggctcttgctcaggaaacatccaatatcttgctattggggttccagatgtctcaaaataaagatgtggtgtgtggcgatctgattccgctcattcaaagtactagggctaatctggtttctgtgaaagccaaatatggggcaggactacttggggtgttaggtcaaacgacaaatattttgcctaatagtgtctcgataacccccggcacaggaggcggtgcaaccgatagctcaggcctcctagttggctatggtgtgaacttagggacccttacggctgcacagctttcagcaatgaatctgccacaaagtataaagtcgctcatcactcccggggtaggtctgcacttaggtgctgtaaacttcagtgcagtcttcaaccagattcgcgatggaatgcgttatgtgacgggcatggctctaactctggcctaccatgcactctag

SEQ ID NO: 365322 - DNA, 252 bp, Pseudomonas aeruginosa
atgggtatgatgagtccggtatttcgtgagattaattacaaccgcatcaagagcttgaaagaacgcaacttgagcgactcaactgtcgctgggattgtgagtgatgaaactggcgaggaggtctccacgcaagacatcacgagttatctgaagatgaacgcgctggcctccgatcagatgctggtgtcaaaagagaccatgcgagtggtgacgggaggcgcagcagaggatggcgaacctcaaccagcataa

SEQ ID NO: 365323 - DNA, 645 bp, Pseudomonas aeruginosa
atgaactggaacgacctagagaagcacttttcccctgcccgactggggcgctatcgggccgcaagaggtggcgatgtcgccagggcggcggctgactattccagcaacgtcctgctgtccgaagcgatggtgccgctactcaatgtcttggagatcgccttgcgcaacggcatccatgcccgcctgagcaggctctatggccgaacagattggtgggagtcctgggtgggcgatccgacctttagctggcagaacaaggaagtagccaacgccaaagcgaaactggcccgaaggcatgaagcacagaccccggacaaggtgctggcagagttgactttcggcttctggagttcacttttcaatacgcaacttcagacggccctctggaaagaccttcgccttgtgtttgcccgttgcccgaaaccacaacggcagcggcataacatctcggccgcactgaatcagattcgtgacctacgcaaccgtgtctttcatcatgagccgttgttgtggctgacgccaacgctgctcgatcagcacgctgtcggcgtgacagtcatcaactggattgatccccagctcggaaagtggctgggcaaccatgatcgccttcctacgacttgggccgactgggtcgcggcgtaa

SEQ ID NO: 365324 - DNA, 882 bp, Pseudomonas aeruginosa
atgcccgctcttgtcccggaactggtaaatgcggcaattgatgcctcagtctcgcccggcgatttgttacgccgggcgctggttgttgcgcggcgtctggccgtgcctgagctggtcgattggatcagcagcgaattgaacggctactactcaggggaagtgccggactatcgtcgggtacaggggcagttgatggccgagaacccgattcatggcccgatcccgttttttgcgccgccagacatggccgagctgctgtcggacttcgctgtaagacagtcggtgccggagctgatgcagcttgctcagagcacaaccggaatttacagccactttccggccaacatcgaacacacgctgatgcaaatgatgcgcgaggcgaacggtgtgacgatgcgcccggcgcttaggttttccaccgtccaggtgcagggtgtcatcgagaaggttcggagtcgggtgctcgaatgggcgcttgatctggaggccaaaggcgtgctcggggaaggcatgacgttcactcagcaggagaagcagactgtgcagcagcagcattaccacttcggagacgtaagcggctcccaaattcagatcggatcgaatagctctaaccagacccagactcaaacaggcggtgacatggctgcgctgtcagccttgattgagctgctgcgcgatgccatccagcagggacgcatcgaagccgaggtgcgcgatgaattgcaggcagagctggcgacattgcaggctcaggctgcatcgccaaagcccaagtgggccgtcatcaaggcgaccgcagggagcatcaaagccgtgttggaaaacgcggcgggtagcgtgcttgcagcgcaggcgctaccttacctgacggcgctgctgtga

SEQ ID NO: 365325 - DNA, 228 bp, Pseudomonas aeruginosa
atgaaaacgcagatcgacaaccttgtgcgcggcatctgtcatgacctcgcgcagccatccccagccgtgcccgagctggcgaccttctttcaggccatcggtgcagacggtctttccaaggccatcgaacagagggctatcctcggccactgggccgaggacgtgactctgcccccggacatgcgagactacgcacagcggcagctcgccgccctcccagacttctga

SEQ ID NO: 365326 - DNA, 1224 bp, Pseudomonas aeruginosa
atgtaccggctggagctgaactacatatcccgcgacggcggcaagaagggcaaacagcgggatgccgccaaacaaggccacagcttttcggccacagccgctgctgcctaccgcagtggcggcatcgtcacggactaccgcacaggcgtagtacatgactacacgcgcaagcgccggatcggtcacacggaaatcgtcctgccgcccggtgcgccgtcctgggccagccatcgcgaggcgctgtggaatgctgtagaggccgccgaggttcgcaaggacgcgcgactggcgcacgagttcatcgtcgtgctgccatatggactcacgccagagcaagaaatagcgatggtgcgcgatcttgcccaaagtgttgctgaccagcacggattaccggttgatgtcgccatccacggcgacgatccaaaggcatgggatggctccaagaaaggtgccgttggcaagcacgcgcatcttctgatgccgacacgcgaactgacgccagaggggttctcgaagatcaaggggcgcgagttcatcgaccggaaacttgggccagcgacgctccgatattggcgcgagcaatgggcactgatcggcaacaagcacatggagcaggccggactggatgaacgctgggatcaccgcacgctgtcggtgcagcgtgaggatgctttggagcgcggcgatctggagaaggctgccgagctggatcggctgccacaggtcaagcttggagcagcagcggctgcgctcgaacgcaagggagttgatacctactggggcaatctacttcgcggcatccttgcggaaaactcgttgcgcagactgaggcacgaacgcaagcgcattgaagactcgatggcggcaatggagaggcgcatagctgaactacgcgaccttcaggagactgaagaagcgccgccggaatccggctcgaatgattctcgctgggaagttttcgagcgtgaatttatgcgtgctgctcagttcgagcacgacctcagcctgaccgtgctggctgcgccgctcgctggactcaaagcgaagttcgcagcgtacatggataccgctgcggagcaaggcatgacgccggaaatgttcgctcaagcctgcgcaaaaggcatggccgaacaggagcgccgggctatgcaggaagaagcggcgagggatgccgatccccaaccgccacaagaggattcccctgtttctactcctgccccatga

SEQ ID NO: 365327 - DNA, 240 bp, Pseudomonas aeruginosa
atgggagcctcgatccgcgcattcctgctgcgcctcggccgcgagcgtgtcaccaaggcgctctgcatcgtggccaccgtggcggcgttcatctaccaataccggcagctcgacaacccggcgctacacgatctggtggctccgctggctctcgccatcgttgttccgatcctgtacctgacgccgcttgtttggctcctgttccgctatctcacgaggcccgcccatgaaacccgctga

SEQ ID NO: 365328 - DNA, 189 bp, Pseudomonas aeruginosa
atgaaacccgctgacagctatctcgtattgcgcgtgtcgtggctgcgcgagcacgaccaggtcatcggcgagctggtcgatctgtggctcgaccggcaggccaagcagcagcctgaccccaagcccaccaagcccatgcgcatcaggtcgcatcacaacatcgacatcaggagccatgcccatgcgtag

SEQ ID NO: 365329 - DNA, 150 bp, Pseudomonas aeruginosa
atggcaaaactggtaaacgtgctgaattacttgaagttcacgaaaatcaatctttcgattatatgcttcaagttcttgaaccacatacagagcaagaagaccttgataaaattcttggcactaagaaagaacctaaaccaagagttttga

SEQ ID NO: 365330 - DNA, 1317 bp, Pseudomonas aeruginosa
atgagtttactattcaattatagcatttattctaacaatgcaagaccttctacaaattattacaaaaacggctttgaacaaaagacatacgaagttcaggatttggaaaagtctcttgaattatatcgtgatgctgaaaactgctatataacatctaatcaattcagttatggaagaagcgaaaaaagactttgcaatctcgtcatgttgtcttgcgaccttgatacctacaagacagaaatatacaaagacacgacgcacgaaaaattaattaatgatgtgaaagcagtttgtctttctaacggcttgccgtttccaacgattatgtattcagggaacggctattacctaaaatggattttcaaagaaaaacagccagtatttcaactatcaaaaaagaacagaaaagggaaatatagaacgcctttaaatgttgaaaaatggaaaatcgcacagcgagtaatcaataaactatttgaagattttggttctgacacaaaagcgcttgatgttgccagactattgcgcctatgcgggacgataaatggcaaaactggtaaacgtgctgaattacttgaagttcacgaaaatcaatctttcgattatatgcttcaagttcttgaaccacatacagagcaagaagaccttgataaaattcttggcactaagaaagaacctaaaccaagagttttgaaagatgttcaaccagtcatcaaaaaagcaatgtcattgccagttgcgaacgaagaaaaacaaaaacctaacgtcaatttcatagcaaaaaacacaagaagccttgcaaaagcacgctatgaagacctcttgaaattgatcgaaatgagaggcgacgttacaggtgaacgcatcaatttcacgttctggatttgcaactttatgtgtgctactggacgaatgaattacgctgaattccgtgaccaagctgaaaaaataggtcaaaaggttttcagagacaaaaagtggcgatttactgatttaagcactcttgaaaatagagtaagacaatacaatcttgaaatgtcgataagtgctataaagcataacgaatatatacctctttatactccaagaaatacaaaactaatcaatattttcagcatcacagatgaagaacagaagcacctgaaaactatcatttctgatgacgaaaaaagacgtagagacaaggagaaaaaagaattattaaggcgtgagaagggtatgaaaaagcaggaaggggaatcgaaatcacaaccttggattgagttaggtattagtagaagaacttactacactaaaaagaaaaacggcctcatttga

SEQ ID NO: 365331 - DNA, 1365 bp, Pseudomonas aeruginosa
atgctaatcaaagaaattccacgcataagagcaaacacaaaaaaccttgccacctatattttcagtgataaaaaatgttcgctaattggtggcaacattgccattgatgcaaataatttaaagcagtcagcgcaagatattcaagacgatttcaatagcagattaacagcaaggcagaagtctaatgagatgcactatgtcattagtttcgaagaaaaccacaacgagattagcgatgaaaaattgaaatcaattgctgatgaatttgttgaaaaacattttggcagtgatagaaattacgcatttgcaatacatcgagatactgcaaatccgcacattcatctactgatggaaaatcgaaatttcgacaataagccatttttcaagaagaataattatcgagaaatcgaaaaacttgctgacgaattagaaacccaatacggcctaaaaaacgacaaaatcaaacaatccagaacagatgaaaatcgtatcaatctaactgctgatgctaaaaagtatgagcaccatactggtaagcaaagcgatgaatcaaaatataaaaaagaactgaaatcactacttgaaaaatcagtaacagcacgtcagttttttgatttgatgaaacaaaatggttacaccatcaagctgaacaacagcaaaaaagaccctgccaaggcttcgggctattacattacaaaagcgtcaacatcaataaaaccaagctccgcaggcttgcaaatcaaaaaacttttacagcattttaagatcgatgatgaaggtcgtttagtccaattgatgcgcagttacgaagatgccccaccacgaccagaaaccgttgagccttgtggctttggctctaaattgctttatcaaaaattcgactcgccagatggtaagactttcacaagcaataatcctaaattcaaatcaagtttcgtaatttctgacaattcttgcacttttcaaaatccaacggaaatgtctatcaaggctggctttcaagcccttcaagagaagaatggaggcaaaaaatacgatctctttggtgatgatgcgtttagaaaaaaagcgtggcttgtaggctctctaatgggccttgaaattgaaggctacacgccaaagccagatgatttgaaagagttgcttgaaaggtattcactgcatccagagcgctacaaatcctttaaccatgagccgttccaggctcaattggatttgcacagaaagccaaaaccgccagtaattaaagccacgccacccgccgagccggttcagcccgaacgccctcctaatactccggtagacaacactccggcgaaagaagaagcagaaaagaagcgcagaaacttacctaaatataaataa

SEQ ID NO: 365332 - DNA, 1149 bp, Pseudomonas aeruginosa; identical to SEQ ID NO: 327669

SEQ ID NO: 365333 - DNA, 2208 bp, Pseudomonas aeruginosa; identical to SEQ ID NO: 327668

SEQ ID NO: 365334 - DNA, 291 bp, Pseudomonas aeruginosa
atgcgaaaagaaggtgacacaacgatcatcgaggaatctgatttcgaaccaatcaccaaggaagaattcaagagcattatcgagccagtaatggacgcgatcctttcgctcaccaaggtgacaatggagctcagtgccgctggaaaagaggtggaagacgaagaattccgcctagcttcaacgcgagccttcagcgagattggccgaaccatctacatcatgaagcacgtgcgcgaaatgatggagaccctggatatggtgccacccgaggaggatctcacggatgagtga

SEQ ID NO: 365335 - DNA, 345 bp, Pseudomonas aeruginosa
atgagtgagtcgatttccagtattgagtctcggtggaacgaactgcagaagagcgaggcacaacagcgtcgtgacaagaacggcggcggcggcgatactggcagtggaaacccaccaggaggcggcgacgtggaagtgcgggttgcaagacttgagagtgatatcgagtacatcaaacgcgatatcgcagagatcaaggccgatgttcgtcaggcggcgagcgacataggctcaattaagcttctgctcggcacgttcggcggcggccttaccgtggcactggctatccttgcctggatagcaaacaatcgatttgacaccatcattcagatgctcgcgaagtag

SEQ ID NO: 365336 - DNA, 333 bp, Pseudomonas aeruginosa; identical to SEQ ID NO: 341777

SEQ ID NO: 365337 - DNA, 957 bp, Pseudomonas aeruginosa; identical to SEQ ID NO: 327662

SEQ ID NO: 365338 - DNA, 915 bp, Pseudomonas aeruginosa
atgggagccaccgggggatacatctcgaaaaccaacaccagtatcgcccagggcgccgcctggcaggtggccttaagcaatttcggtagcgctcccggcgctggacatctggcgacggcgctgttcttccaggacggcgccatcgccaacgagtacctctaccgcaatgccgtcccgggtcatcctgaactcaaccggatgaataccacgctggacctgggaggcaacaatatcgccgcggccggggcgatcacggccagcggcaacatcaccaccagcgcggacatcagcgcgcgcaacgtgacagccactggcacggtgaaagccggtactgctgacgtcgccggcgagacgtacaccggaggctggttccggacccgtggtgacacgggttggtacaacgagaaatggggcggcggctggtacatgagcgacagcacctgggtgcgctcctggatgaacaagaacgtctacaccggcggcgagatgaaagcgggcaaactcaccgccgagggccggacggaagtcggcgagtacctacagctcaaaggcgtggccactgaaggagccaactgctcgccgaacgggctggcaggcatcaccagcagcggactctggctgtcctgccagaacgggaaatggggacgaaccgctgcctccatgcgcctgaacaccacggccggcgtgatcaaggactggtgtacgttgcatggtcaggatagcgccatggtgaactacgactacgtccgctacgcgatcacctgcggcggccgattctgcgcagtgggcttcaaccagacatttggcaccaactactcgttcgggctaatcactgagatcggcccaggcttcaactacccggaaccctacaagacccccgactcgaccaacgtgaccgttacctgcgtgaactag

SEQ ID NO: 365339 - DNA, 915 bp, Pseudomonas aeruginosa
atgggagccaccgggggctacatctcgaaaaccaacaccagtatcgcccagggcgccgcctggcaggtggccttgagcaatttcggtagcgctcccggcgctggacacctggcgacggcgctgttcttccaggacggcgccattgccaacgagtacctctaccgcaatgccgtcccgggtcatcccgaactcaaccggatgaataccacgctggacatgggaggcaacaatatcgccgcggccggggcgatcacggccagcggcaacatcaccaccagcgcggacatcagcgcacgcaacgtgacagccactggcacggtgaaagccggcactgctgacgtcgccggcgagacgtacaccggaggctggttcaggacccgtggtgacacgggctggtacaacgagaagtggggcggcggctggtacatgagcgacagcacctgggtgcgctcctggatgaacaagaacgtctacaccggcggcgagatgaaggcgggcaaactcaccgccgagggccggacggaagtcggcgaatacctacagctcaaaggcgtggccaccgaaggggccgactgctcgccgaacgggctcgccggcattaccagcaccggactctggttgtcctgccagaacggaaagtgggggcgaaccgccgcctccatgcgcatgaataccactgcgggcgtgatcaaggactggtgtacgttgcacggccaggacagcggcatgatgtactacgactatgtccgctacgcgatcacctgcggcggccgattctgcgcggtgggcttcaaccagacctttggcaccaactactcgttcggcctgatcaccgagatcggcccgggcttcaactatccggagccctacaagacccccgactcgaccaacgtcaccgttacctgcgtgaactag

SEQ ID NO: 365340 - DNA, 471 bp, Pseudomonas aeruginosa
atgcgcacctatccgcaattcgggcagcgctcgcaacggaagcaccaaatgcctgatcccgcatccacctcggccggcagcgccgcgctgctgaaaatgttcggcatccacataagcgcgggcgccctggctgccgccctgggcttccttgtcctgtggccccgaacaatgaaagaggggttcgcccggctgttctgcaccatcgtcgcgtccagcgtcttcggcccaatcctggtggtttacctgcactccaaacgccccgagttgttcgagtcggcccatgtggtggccgggctctaccagctggagccagcggtcggcctgctgttcgtttccgctccgctcctggtgattgccggtctgcctgcctggtggctgatcggtgcggccctgcgcctgtttgagcgggacggcgattcatggctgggcgcgttcgcccagtgggtaaaacgcaaactggagaacaactga

SEQ ID NO: 365341 - DNA, 759 bp, Pseudomonas aeruginosa
gtggccctgctcggttgcctggtaggcgggtcgctaaccgcctactacctatggaatgcccaccagcaagagctcgccagacaagccgcgctcctcgaggagcagaggcgcctcgccgagctggccgagaagaacgcccaggccaagcagccgctggacctggcgtcattgcagaagccttggacgctcatgcctgaccttgaggacatgctacgcgcctgtagcaaggcaacgggggtactgtcgctgtcgatccagggctggctcttcgaatccagcaagtgcgacggcagggtcctggtcgccacctaccaccgtaccggcaacagcacggcagccgacctcacagcggccagccagcacctgttcgccgaccgccccgccttcgtcatcgacaacggcaacaccgcggccctgaaggtcgacctgaaagtcgccatcggtagcgatgagccgctgcagccagccgacgacgcgctgcaggcgctcaccagccatctgtaccgtcagggtgtcgagcccaagctgtcgatcagccaggagacaactccgccccttcctggcgcggaagcggcgagggagcagcaagtggtgttgccctcctggaagaaattcaccttcagcgcccagaccaggctcccggcagacctgaccttccaggggctgcccgctgccggtgtccgcatcaccaacctcgaaaccacgctcaaggacagccagttggactggactgtcacaggagaaatctatgcgaactga

SEQ ID NO: 365342 - DNA, 759 bp, Pseudomonas aeruginosa
gtggccctgctcggttgcgtggtaggtgggtcgctaaccgcctactacctatggaatgcccaccaggaagagctcgccaggcaagccgcgctcctcgaggagcagaggcgcctcgccgagctggccgagaagaacgcccaggccaagcagccgctggacctggcgtcattgcagaagccttggacgcttatgcctgacctcgaggacatgctacgcgcctgtagcaaggcaacgggggtactgtcgctgtcgatccagggctggctcttcgaatccagcaagtgcgacggcagggtcctggtcgccacctaccaccgtaccggcaacagcacagcagccgacctgacagcggccagccagcacctgttcgccgaccgccccgccttcgtcatcgacaacggcaacaccgcggccctgaaggtcgatctgaaggtcgccatcggcagtgatgagccgctactgccggcggacgacgttctgcaggcgctcaccagccacctgtaccgtcaaggtgtcgagcccaagctgtcgatcagccaggaaacaactccgcccctccctggcgcggaagctgtgactgaacagcaagttgtgttgccttcctggaagaaattcaccttcagcgcccagacccgactcccggcagacctgaccttccaggggctgcccgctgccggtgtccgcatcaccaacctcgaaaccacgctcaaggacagccagttggactggactgtcacaggagaaatctatgcgaactga

SEQ ID NO: 365343 - DNA, 234 bp, Pseudomonas aeruginosa
atgcatagtttccttcgcggcgcccgggaaagtgttcgacggctggtggccttcgctcaagccgaaggctggagcgtcgaccgctccgcaggcggccacttgaagctcagcaagatcggctgcgcctcgatcttcatttcttccacgccaagcgacgcacgcggcgagctcaatgcccgcgccctgctccgtcgagccgacaggcagcgtttcctgaaccaggagtctttctga

SEQ ID NO: 365344 - DNA, 324 bp, Pseudomonas aeruginosa
atgcccttccagcatgtcctgcggcgtcacgaccatggtgatgcacagcagcgtgtcctcgggcattcgatcgaacagggcgttgaggccatcgcctttgagcgtctcgccggtgaagtggcctgtcagcggcgccttgttcaattggtcgaccacaatcactcggtgcggcatggcatcgaagagccatacgccttgggtggcatcggaaacaggctgccgatagaacaggttctgggagaagtcagtgccgtcggccagtggcaattcatcctgcaggatcggttcgtccggacggcataccagttcgtagaagcgacgtag

SEQ ID NO: 365345 - DNA, 348 bp, Pseudomonas aeruginosa
atgagcacatctagcccccccacgtctctacgcagcccccgcgactacgccgccgccatcctggccgagcccagccgcgagcgtcgtaacgctctgctggaagcctgcccggtcaactggcagccgctcgttcgggcgcacgtcgaggacgccttcgcgaaggtcaaggcatatcgccagatgatggacagccgcgccgagtcgatccggcgcggcccgcctcctgctccccgcgtcaccgacaccgatttccgcatatccaactacaccaagtccgccccggaggtaggcaatgcgcacctatccgcaattcgggcagcgctcgcaacggaagcaccaaatgcctga

SEQ ID NO: 365346 - DNA, 567 bp, Pseudomonas aeruginosa
ttgttcggcggtggacagagcggcttctcgctggcctatgcccacggccaactcgccatcgactccggcgaagagcggctgctggaccgctacaccatcggtaccgccggcagcttcgacaagatcatgctcaacgccgtacgcctgcagcacctgggcgaccgcctgcagttgttcgcccaactcaacgcccaatggagcggcggcaacctcgacagcgcggaacagttcgacatgggcggcccctacggcgttcgggcgttccccctgggcagctacaagggctacggcgacgaaggctggcaagccagtgcggagctgcgctacagcctggctccgggctggcagctgagttcgttcgtcgaccagggcgcggtgaaattcctcaagcaccccaacaccacggaaggcaatcgcaaccgcatggccgccgtcggcagcggcgcaacctggtacggaacggatcaccaggtcagcctgaccgccgcctggccactgagccaggaaaacaacatcgagcccgagcgcactccccggctgtggttgcaagcgacccgctacttctga

SEQ ID NO: 365347 - DNA, 1044 bp, Pseudomonas aeruginosa
atgaagcgcatagcagtcgatttggccaagtccgtttaccaggttgccgaaagtatccatgtcggccgggtggatcgtcgcaggcggctcgatccggaggcattccggcgatatgtacaggagcaaccggagcctgtcgagtgggtgatggaagcctgcggtacggcgcattactgggggcgggtggcgcaggcgcaggggcatcgggtggtgctgttgcacccgcgctacgtgcggccgtataggcggcgcaacaagaccgaccgtaacgactgcgatgccatcctcgaagcggcgcgttgtgccgatattcacccggtgccggtgaaaagccatgagcagcagcaagtgcagcagctgcataacctgcgcgaggcctggaaaaagacccgggtgcagcacatcaacctgctgcgcggcatcctgcgcgaactgggcgtgacggcgccgagtagcacccaggcctttctacgccaggcctgcgagctgatcgagcgtcccgaagtttgcgccctgcgcagctcgttacagatggtgctagccgaaatcagcctgtgcgaacaggcgatgcgcgacagcgaagaacaactggcgcgctggcatgccgacgatgacatcgtgcacaaactcgacgaagtcagcggtatcggattgctcaccgccagcgccctgaaaaccgccgtcggcaaacccgaacgcttcgccagcggccgacacctgagcgcctggctcggcatgacccccaacgaatacagcagcggcgaacgacgcagactcgggtgcatcagctgcaaaggcaacacctacgtgcgcaccctgctgatccacggcgcccgcgcggcgctgctggccgccaagcgctgccagacgcgaacgcccgagcgcctgacccagctgcagcgctgggccctgcaaacggccgaacgtatcggccacaacaaggcggccgtggcgttagcgaacaaactggtgaggatctgctgggcagtgtggtgccatgagcgacgtttcagcggcgactggcagagtgcaaggcccgcctga

SEQ ID NO: 365348 - DNA, 399 bp, Pseudomonas aeruginosa
gtggtgacggtacaggcagcccagggcaacggcagcgccccggcggacctgctggacatcgtcgacgcatacctcaacgacgccgaccgccggcccgtcgcggaccgcctgacagtccagtccgcccaggtgctcgagtaccgtgtcgacgcgacgctctacctggccaccatcggcccggaatccgagccgatactcgatgccgcccgggcccgcttgacggcatacgtccatcagcgtcgacgcctgggcatggaggtgtccgagtcggcggtgcatgcggccctccacgtggagggcgtgcgcaaggtcacgctcagcaactggtcggacatcgccgctacaccggcccaggcgccctactgcaccggaattacgctgacgctgggggatgagtga

SEQ ID NO: 365349 - DNA, 876 bp, Pseudomonas aeruginosa
atggctgcgcgagctcgccgccgacctcagtcacctgctgcacaacgtcggcgaattcctgaaggccaacccgcaagtcagcaagggcatcgtcatcaccgtcgccgcgttctcagcgctgatggccaccgtcggcagcctggccatcaccctcgccggcatcctcggcccgatgatcgcggtccgcttcatgctcagcaccatcggcattcgcctgcccggtctgatcggcttgctgaaactgctgttcgcaccgatccgcatgctggccggtctgttgatcggcccactggtgaccgccctgcgcgtcgtgagcatcgcgctgtggggcctggcggccaacccggtggtcctggcaattgccgccgtcgtcgcggtgctggccggcgccgcgtacctgatctatcgcaactgggacgccgtcaaggcgtacctactggggctgtgggaagagatcaaggcaggtttcgacggcggcatcgggggcattctttcaaccctgatgaatttcagccccctcggtctgatctaccgtgcgttctccggcgtcctgggctacctgggcatcgatctaccggcacgcttcaccgatttcggcaacatgatcgtccagggcctggtgaacggcctgctcgccggcatcggccagatcaagcgcgcggtccagcgcgtcggcggcgccgcgatcgactggttcaaggacaagctcggcatccattcaccgtcgcgggtgttcgccgatctgggcgggttcaccatggctggcctggctcagggcctcgacgccggccaggccggcccgctgggcgtaattgcgcgtatcggccagggcctggtcaacgcagggcgccaggctgtcgccggcctggacagtga

SEQ ID NO: 365350 - DNA, 516 bp, Pseudomonas aeruginosa; identical to SEQ ID NO: 349578

SEQ ID NO: 365351 - DNA, 273 bp, Pseudomonas aeruginosa
atgtgggcggtcgacaagcccatgcacccgtcgcttgtgcgcgacatcctcgagggcgtgaacgccaagttccgcgagctcaaggggctcggcctgatcatcgacgcccaagcctggtacgaccccaacgtgaacgacaaggacacgctcaaggccggcaagctgcgcatcacctacgactacaccccggtgccgccgctcgaggatctgaccttcttccagaagatcaccgacagctacctcgtcgacttcgccagccgcgtcaacgcctga

SEQ ID NO: 365352 - DNA, 459 bp, Pseudomonas aeruginosa; identical to SEQ ID NO: 332094

SEQ ID NO: 365353 - DNA, 198 bp, Pseudomonas aeruginosa; identical to SEQ ID NO: 328577

SEQ ID NO: 365354 - DNA, 177 bp, Pseudomonas aeruginosa; identical to SEQ ID NO: 335283

SEQ ID NO: 365355 - DNA, 339 bp, Pseudomonas aeruginosa
atgctgatcaaactttctgactttgacgacgatttggccgagcgactgaagagccgcacttgccagaacactggctccaaggctgtgctgcgtgctgctgaggagtatttgccgctgctgctgaagctggagtatcgcgaccggcagattgccgagttggaagagcggttgcgagtggcaagccaggtgatcgagggcgctcgctcggctgctgcgctgctgctggaaaagactgctcagggcgatctgctcgccgctccggcatcgagcaagccgcgcatgacaggtgaagagatgttgaacgaactgcgccgcagtgcgggcttgcgtcagcgctga

SEQ ID NO: 365356 - DNA, 339 bp, Pseudomonas aeruginosa; identical to SEQ ID NO: 332086

SEQ ID NO: 365357 - DNA, 381 bp, Pseudomonas aeruginosa
gtgaaccctcgcccgggcggctatgccggcggcaccgccgagcaccagcgcctggcgaacgctcgccagatcgacgataccgccgccctggagtcggccagttggggcgccttccagatcatggggttccactggcagcgcctgggctacgtcagcgtgcaggccttcgccgagtccatggggcgtagcgagtcggctcagttcgaagcgttcgtccgcttcatcgacaccgacccggcgctacagaaggcgctgaaggctcgcaaatgggccaacttcgcccgcctctacaacggccccgactacaagcggaacctctacgacaccaagctcgcgcgagcctacgagcaacacgccaactgcgccgaggcctgcgcgtga

SEQ ID NO: 365358 - DNA, 171 bp, Pseudomonas aeruginosa
atgatcgagctgcacttgctggactgctcggccgggcaatggggctacaagaccattccagaaagtgccggcccgttctactacggctgtccgctggagttcctggacctggctcacgatgaggtcaaccaggagtggcgtgaacgtctgacgcacgaacaccaagcctga

SEQ ID NO: 365359 - DNA, 171 bp, Pseudomonas aeruginosa; identical to SEQ ID NO: 358051

SEQ ID NO: 365360 - DNA, 747 bp, Pseudomonas aeruginosa
atgataagatcaagattaagtaatgccaaagatcaaaaaggtattttcaatacaataaaatatatcaatagagaaaatgattgcgtcttattagatacaaacattttaatagcgcacatatcaaaagatgatgtaaattctcatctatcaaaatacctttttgattttaaagataaatttcaaactaaaataaaaaatattactcagcacgatactgtttcatattcaaaagatgacaatttaacaccagaacaagcacttcaatacgcaaaagaattatatttaaaaactcataacatagaaaatagaaactatgtcatggctgtacataatgatacagacaacttacatgtccatatagtttggtctaatttagataaaagcggaaaatcttataaagtttctaatgattatagaataattgaaaaagaacttgataagattgaaaataaatataaattaaaaaaaccagaaaacagaaaagcaacatttgaaaaaccaactccaactaattacaaaaaatctaaaaatgaaagaaaacttgaagagcgtggaattaaaacagtaaaagaagaaataagagaaaaaataaatttagcacattctttaaatgaagacggatgggcatttgattttttagaagtattgacacaacaagatattaaaataattccaaatggaaaaaatggcgcttactcaataaaatataaaaatgaaatatttaaagcatcagagtttggaatctaa

SEQ ID NO: 365361 - DNA, 681 bp, Pseudomonas aeruginosa
atgaaatatttaaagcatcagagtttggaatctaaatttagaaaatatcttaatcaaaatgaagatcagttagaagaatgctcgctaactggaggaccatactataacaaaaaagaaaaaataaataaaaatttaattttaaatacaaaattcaaatatattgaaaatagtgaaaaaatatcattcagttttaaatcaagtgaaaaaacagcatttgaatattacaagaatgaaaacagattatccttcaataatacttcaagaacatcagcaaaagcaggtttacaaaaatggatctcaatgaatgaacccggtcctatgattgtaacgggtagtgaagaatttaaaaaaaatctttggttagaatttaaattaatgaaattagatgaaaaaggatattcattagcaggatacgaacctaaaaaagaagatcttgaattacttgaaaaaataaaagcagattacaacaaacttaaagaaaataaaaaacaagaaattactgaaaaattaaaacctgaacaacctaagcaggttgaaagggtaattattaaatacgatgaatttttaaaagaagaagaaaaagaacataaaaaaataattccagaaaataaaaaagaagatcttgaagaaacctttgaagaaccaagcgaaccaataagaagaaataaatttaagatataa

SEQ ID NO: 365362 - DNA, 156 bp, Pseudomonas aeruginosa
atgaagaatttcagtgaattcttcggcattgagactatgccgatttttaatttcattaagatcgttgacaatagcagcgatctttttgttttcttcgctttggctcagtttttcaagttctgcttgaagtttagccattattttaagactttttag

SEQ ID NO: 365363 - DNA, 237 bp, Pseudomonas aeruginosa
atgagagattatgaagataaattaaatagattgagagttgaattagaagaaatagagttgctttcatttgaatatgaaaagtatgttggtattttaaatattgctgaatatatgattgaaagaattgaatttcataaagttcaatatgacaaatatgaagatgatgaaactaaaaatcatataaatctactttttaaggatattcaatcgctttttaataatagtcgtttgaattga

SEQ ID NO: 365364 - DNA, 945 bp, Pseudomonas aeruginosa
atgtcactaaaagaattatcaaataaaaagatttatttaacaaaagaatttatctcttacagttcttcattgctgcatcttcctatttttacctctcttcattcaaaagttgataatgcaaagtattatacttttgaagttgaaagatattggggctttaatgatgtatcaattacagcgccttggctatcaataaaatatgatttcaaggttttttcatacatattgagaatgttttataaaaactatgaattaagcaaaaatccatatgaaatagatttttctattgataactttttgaaggattccgaaattaaaacaaatagaatttactatatagaacaaatgaaggagtcaatagaaaaattaagtaaaatcacaattcattttacaaaagataatgaaaggtattgttgcagaattataaatccaagcgaaaacggctcaatttacaatgttaaacaattaactggatcatttaaaatacacgttgaccataactttataaacttctttaagcacgaccctgatttaatactcaatattgatcaaaaagagttggattcaataaatggtgattttgcaaaaattctttatacattctataaaacaaatcagcaaacaagggtttttgaaaaagacattatcatacaaagattaaagcctgatgcagataaggcttattatagaaaggtttttgatggaataaaatctgctcataaatcactaattgaatgcggatttataaaagatgttaaatataaaaagaattataacataaaagaaataagtcatttcgaaataacattaaatgataaattcattattaaagagacaaagaaagaagaggaagaaaagaaaaagaaagaagcaattaaaccaaaaagacctaatctatttggtgataagaaagatgagccagtagatgacgactatccattttaa

SEQ ID NO: 365365 - DNA, 1704 bp, Pseudomonas aeruginosa
atgcctacggcatacgcatatctacgctattcgtcgaaagcccagggtggcgacgacaaagacagtatcgaccgccaaatggcgtctatacgggctttgacggctcactatggcgttgatctcttaccagagaacatctaccgagatgacggcatatcctcgtttgacgggtcaaacaagaagacaggcaaactcaaagacctaattgatttgatcttaaatcaatcaattaaagagggtgatattgtttttgttgaaagtatagatcgactttcaagacaaaaatttagattgtcaaaagaattagtttattcaatattagataaaggcgtaattctaattacgactattgataatcgtatttatcaaaaaacagatgataattcaaaagaatttgaacaagatttatatctatctttgatagcacaaagagcacacgaagaaagtaaaactaaatctattcgtagaaaatctgcttggaataaagctaaacaaagagcagagaacgaaaataagattttcaatggtcataatcctccctatggaatcatctataacaaagaattagacaaatttgaaattgatgaagataaagccaatgaaattagatttatcttcaaaagtctacaatcaacaggcgtatctaatacaattaaaaaagtaaatgaattttcaataaaaaaatggactaataaaacaattcaaatacttattgaaagtaaatatcctcttggatattacaaggcacaaaagagagatgagaataaaaagaaagtatttgacaggtttattgaaaattattatccggcaataattacatttgaagattacaataatgcagtttcttctatgaaaaacagagcacatagaaagcattatggtaatcaatcagtatcaagtttaaatatttttagacattctttattttgtgatgaatgtaatgcaacaatgttttttgaaactaataaaaatccaaaaggcttgaagttttcttattatcattgttcaagaaagaaagaaacacgacaaggttgtgatgctaaaagattaagatttgagcacgttgtaggattgctttttgaagcaattgaaaaaacttttgaagaatatgaattgattaaagatttcacaaatgaagaactaaaagaattagaaaacgcaattgaaaaagacttggaaaaaggatcagagttttataaatctgttttgtggatgaagcaactcgcagaattgctatcaggaaagaataaaaagaatgatgcagatgataaaattaaaagattaaccaacatattgattaaagaaaaaatgacacttgaaaatctaaataaatccattgaggattttggaggatctattccaaaaattgttctaaaaaatatgattgaagtagaaagtaaaattgaaaaatatgaaattgaattgaacactcttaaaagtcaaaatattagcgaagcagttttaaatatttccagtgttcaagacttcattgaattgctaaaaacagaaggaggtagaattgagataaataattttttcattaaaaataatatctctttttatgcaggtttttcagagttagaagattcaccatatttagaaatccataaagataaccagaggattttttggaacttcaaaaagtttgatttgcataatcctcttaaaaaatatggcttcacaaagataacagattatgaataa

SEQ ID NO: 365366 - DNA, 1266 bp, Pseudomonas aeruginosa; identical to SEQ ID NO: 324724

SEQ ID NO: 365367 - DNA, 177 bp, Pseudomonas aeruginosa; identical to SEQ ID NO: 335283

SEQ ID NO: 365368 - DNA, 369 bp, Pseudomonas aeruginosa
gtgaaagcactgagcattcgccaaccatgggcctggctggtcgccaatggccacaaggacatcgagaaccgcgactgggcgaccaacttccgcggccgctttctgatccacgcagccaagggcatgacacgcgacgagtacgaggaggcccacgacttcgccgcgtacaacggcgtgaccatcccagcgccgcacgaactggagcgcggcgggatagtcggcgaggccagcatcatcggctgcgtcgatcgctgcaactcattgtggttcttcggccgatacgggttcgaactggctgacgccaagccactgccgttccaacccatgaagggccaactggggttcttcgaagttgaggcagcgcaatga

SEQ ID NO: 365369 - DNA, 204 bp, Pseudomonas aeruginosa
atgactgatcgggccaaccgccagcacctgctggtatgcgaagcccggtactggctccggcgtggtgtcaccacgccggagaaggtcgccgagctgagagaaacccttaagcggcgaggggaaagcgccgtcgagcagttgatagcggaaatgcgccgacagtggcaggcacggacagagtggataggtggtgaagatggctga

SEQ ID NO: 365370 - DNA, 414 bp, Pseudomonas aeruginosa
atggaggccttccgcgggggcggcatgaacggcccggtcaaggccgacctcggccacgacgacgacggcatccagttcgagtggaccgtcgggggcctggagctgaccgtcctcaagcagtacggcgcagtcagcgccagcggcgtgatgctgcgtttcgccggcgcctaccagcaggacgataccggcgcggtcacgtccgtcgaaatcgtcgtccgcggccggcacgagaccatcgaaatgggtgacgcccagccaggcgaagacaccgagcacaagatcaccaccacctgcagctactacaagctcgtcgtcaacggcgaggaagtcatcgagatcgacctgctgaacttcgtcgagaaggtcaacggcaaggacctgctcgaggcacagcgcaaggccatcggcctgtaa

SEQ ID NO: 365371 - DNA, 567 bp, Pseudomonas aeruginosa; identical to SEQ ID NO: 365346

SEQ ID NO: 365372 - DNA, 1269 bp, Pseudomonas aeruginosa
atgaaggatctgaaggttgcagttgttgggctaggctatgttggtcttccgcttgctgttgaatttggtaaaaaacgaaccgttgtcggtttcgatatcaatcaggggcgaatcgctgaactgcggcaaggcattgactctactcttgaagtagatgcggctgagttgaaagaagcgtccgaactgagctttactttcaatcttcaggacttgcaaaagtgcaatgttttcattgtgacggttcctacacctattgatgaacataagcaacccgacctcacccctcttgtaaaggcctcggagagcatcggaaaggttctgaagaagggcgatattgtaatttatgagtctaccgtttacccgggagcgacggaagaagactgcgtacctgttctggaaaaattttccgggctgaggtttaacgaggacttcttcgccggttatagccccgagcgcatcaatcccggcgataaggaacatcgggtctcttcgatcaagaaggtcacttccggctctacgccggagatcgcggagttggttgactccctgtatagagaaatcatcactgccggtactcacaaggcgagcagcattaaagtcgctgaggctgccaaggtgatcgaaaatacgcagcgagatctcaatattgctctgatcaacgaactcgccatcattttcaatcgaatgggtatcgataccgaggcggtcctcaaggctgccggcacgaaatggaatttcatgccgttccgcccgggcctagtcggcggtcattgcatcggagtcgatccatattatctgactcataaagcccagagtattggctatcatccagagatcatcctggctggccgccgtttgaatgacggtatgggtgcctacgtcgtttcgcaactggtcaaggctatgctcaagcgtcgtatccacgtggacggtgctcgcgttctgcttatggggcttacattcaaggaaaattgtccagacctccgcaataccaaagtcgtcgatattgtccgtgagttggcggaatacaacatacaggttgatgtttttgatccttgggtgagcgccgaagatgccatgcatgagtatgggattactccagtcggtacgccatcccatggcgcttatgatggaattatccttgcggtcgcgcacagtgaattcaaaaatatgggcgcagaaaatatacgaaagttagggaaggctgagcatgttctctatgatctgaaatatctactcgatgaagatcagtctgatctacgcctgtaa

SEQ ID NO: 365373 - DNA, 231 bp, Pseudomonas aeruginosa; identical to SEQ ID NO: 324727

SEQ ID NO: 365374 - DNA, 171 bp, Pseudomonas aeruginosa; identical to SEQ ID NO: 358051

SEQ ID NO: 365375 - DNA, 504 bp, Pseudomonas aeruginosa
atggctgcacttcctgcggtactcctcggcttcgagcgcgaccgggttgaccggctcgccgtcgaggtcggtgatgaccgtgccgcagtccgggcaggccgccacgtcgccgtggcgggtgagccgctgggtgaagacaggcttccagtggaagcccattcgcatcctcacgcggcccaggacgaagaactcctgacccgtgggctggacatccaactgctcacgcagcttgatgagcttgacgagcgtatccggcccgttgagcacccacactttggcgcccgctaccgtctcctggatctcgcgccgccacttgtaaacaaggtgcggtggcgaaagcaccagggtgcggcggtagccttcggcgttgagcacggcggccgtggcgatgccgacggtcgtcttgccgcagcccatctcgccattgacgatcgcggcgcgctcgccacggtcaatcagcagctccgcggcggcgtggacgacttcggcctgggcctggaatag

SEQ ID NO: 365376 - DNA, 321 bp, Pseudomonas aeruginosa
atgttccccaatccattcaagcggcctgcgccgcgcaagcaacccttgttcgcaccgagtacgttgaagttgagcgagaaggtgcattggctggctcggcgaggcctgatcgaccccttagcctatgtccagcgccatgtgcgcggggactggggcgagatcgatgaggccacccgccaagccaacgacgtcgcaatccaacaggacaacctgatgatctcgcagttcaggatcacgccggacctggcgctgatcgtcaagaccagcgaggaccaccagaccacggtggtccagcttcccgaagagcgggacctgatctga

SEQ ID NO: 365377 - DNA, 1404 bp, Pseudomonas aeruginosa; identical to SEQ ID NO: 321876

SEQ ID NO: 365378 - DNA, 504 bp, Pseudomonas aeruginosa; identical to SEQ ID NO: 365375

SEQ ID NO: 365379 - DNA, 228 bp, Pseudomonas aeruginosa
gtgcccaacgacaagggggacaacgagaaagccccggacttccgcgttcaggccgccagccacgacatcggcgcagcgtggaagaaaaccagcgaggccgggcgggaatacctgtccgtgaccctcgacgatccttcgttcccggcaacggtctatgcccgcctgatcgaaggcgagaacggcacgcacgacctgatctggtcgcgcagcaagccccaggcggcgtga

SEQ ID NO: 365380 - DNA, 1626 bp, Pseudomonas aeruginosa
atgttcagtggcaaaaccgacgacaggggcttgtgggcgggcatccaggccggtgtgctgttctttctcgccgccctggcctgcatctacctgtcgcgccagcctgccaccatcgcggcgatctggctgcccaacgcgatcctcaccgccgccctgctgcgcgcgccgctgcgccagtggccggcgatcctgctctgctccgccgtggccaacctggcggccaaccgcctgtatggcgacagcctgtggatgagcgcggcgttcctgccggccaacctgagcgaagcgatcttcgccgcgatgctgttacgcatcaaccgggtgcgcgaggacttcgagttcaacctgcattcggcggttcgcgtgctctgggccggcgcgctgatcccgcccttgctcggtgcctcggtgggcgcggtgctggtcagcgtcttcggcatggggcgtttcccggaaatgtgggcgcgctggtacgtgggcgatgcgatgggcatgctcgcgctgctgccgttgtgcatggccagcaacctggcggcctggcgtcacgctctgtcggggcgggcgggagtggacaacgcgatgctcctgctggtgaccctggtgatcagcttcgtggccctgacgcgcctgccctacgccttcatctacgtgctcctgccgctgctggtggccgccgccagcaccagcgtgttcggcaccgcgctgatcggctgcctgaacacctgtttcatcgccgtgctgatcgccctcggcgtgttcgtccccgagtcgtcccagcagcgtttcggcgagccgctgctgtacctgccgatggccttgaccctcattcccgccttcctggtctcggtgatcatggagcgcagccgccgcgagcagcatcaggtggccatcggcgaggcgcagttccgcggcgccatggaattctcggcgatcggcatggccctggtgtcgctggaggggcggctgttcaaggtcaacgaggcgctgtgccggatgctcggctattccgccgaacgcttgggcgagctgtcgttccaggagatcacctatgtggacgacctggaactggacctcgacctggtgcgcgacctgctcgccgggcgtatcaactcctatcagatggagaagcgctacctgcgccaggacggcgaaaccttctgggcgcgcatcagcgtgtcgctggtgcgcgatgaggagggagtcgcccagtacttcgtcacccaggtggaggatatcgacagtcgcaagcgtgccgagctggagcgcgagcgcctcgccgaacggatcaagctggccaccgacgccgggcagatcggcatctgggagtgggacctggcgcgcaaccgcctgcactgggatttccgcatgttcgacctgtacggcatccgcagcggtcccggggagaccacggtggagcagtggaaggcgagcctgcatgccgaggatcacgaccgcgtgctgcgcgagctggagcgcgccgtcagcgggttgcagaaattcgactgcgagttccgtatcgtccgccccaaccgcgaggttcgccacctgcgggcgatcgccacgctgacgcgcgacgaggacaaccgtccggtgcggatgatcggcatcaacagcgacatcacctag

SEQ ID NO: 365381 - DNA, 540 bp, Pseudomonas aeruginosa; identical to SEQ ID NO: 332562

SEQ ID NO: 365382 - DNA, 234 bp, Pseudomonas aeruginosa
atgctcaagcttcacgatttttgcaacagagccgacggttataccctgacggcggaaatccgtagcgatccccgcctgcagaaactgcacattctcttgcatacttcgttgtccggggtcttcaaccaggcgatggtgaagaaggtcggtgcggacgacttcctcgccaagttccgtccggacgatctggcggcgcgggtggtggagcggatcaaggcggtggacgcgggctga

SEQ ID NO: 365383 - DNA, 741 bp, Pseudomonas aeruginosa
atggccggtgttttggattcagtcaaccagcgtacgcagttggtcggacagaaccgtctggagctgcttctgttccgcctggacggcaaccagctctacggcatcaacgtgttcaaggtgaaagaggtgttgcagtgcccgcgcctgacggtgatgcccaagtccagcccggtggtgcgcggggtggcgaacatccgcggaggcaccattccgatcctcgacctggcgctggccaccggccgccgcgggttgcaggacctgaccaacagcttcgcgatcatcaccgagtacaacaccaaggtgcagggcttcctggtgcgctcggtggagcgcatcgtcaacatgaactgggaagagatccatccgccacccaagggcgccggccgcgagcattacctgaccgcggtgacccgggtggacaagcagttggtggaaatcatcgacgtggaaaaagtgctcgcggaggtcgcaccgacgtccgaggaagtgtcccacggagtggtggacgccgagacccagagccgcgcggtgaccaagcgggtgctggtggtggacgattcgtcggtggcgcgcaagcaggtaatccgttgcctggaggcggtcggcgtggaaatgaccgcgctcaacgacgggcgccaggccctggagtacctgcagaacatgctctccgagggacggcgtccggaagacgagctgctgatgctgatctccgacatcgaaatgccggaaatggacggttag

SEQ ID NO: 365384 - DNA, 303 bp, Pseudomonas aeruginosa
atgaaaaacaacgagcgcatattgtcccttgcgaaggaggcggagcagtcgggcagggcggttaaatatattctggacttgatggatgcacatccagatcttatcgacttgccgaggatatccatggggcttataaaggcattaaacgcctcggaagtcgaaccaaaatttagtttcgacggtatcgacaaggcgattctgaaaatgagcaagactactatcgattgcttgcgcagctgctatctgtttttcagcgacgaaatacagataggctccaatcgcagcggtacgctgtttttttag

SEQ ID NO: 365385 - DNA, 351 bp, Pseudomonas aeruginosa
atgctcgaccaggtgctgagccaagacggcttgcgtgacgctctgctgcaagccttcaccctgagtcgcgatatttacctgagccaactggacagtctggaacccgtactggcggcccgttgcagcggtcagcgggagcggcaggcgttcatcgcccagggtatctgggaagcctttgccgatgagctgaagcggctatttgcggggacggaaaacggcatgggttcgcctatgctcgccagcctgccatcgcctctgcgcggcgaattgctggccgagacgccgggcgagctgtaccggctccggcaggcgtccgccagtccgctcaatgggcgcaccgcactacgctga

SEQ ID NO: 365386 - DNA, 1563 bp, Pseudomonas aeruginosa
atgaagaaatcagcccatatgactaaacaaaaaaaatctctcattttcatacatgattacacggagcagggaggagatagcttcttcttatgggcaaatggcgaattgacagaggtttcagccaagcaattagtcgatgaagattcagaattagtctgccatgactactggctcatagcccccactttgttcaaggccacaagcacattacctaaaatcatcacggatattgatgacctgagaatatcaacctcaggagaccgctctgacagagagtcaaaggaaaaaatagacatcacgaaatacctagggaaatttgtagatgaaggaacaataaaaaaatacaaggacatattcaacaggaaatcgccaatagccaatgatattttggcaaaaacaggggaggcgctactcagcctttcgacagaaattgaagaaaatgcagtagccgcagatgagtgggagcgcttcactaaaatagaacggccagtcaatgactacctaatccgatccactgcaacaggaatagcaatagacactgaaaaattaagggcacacaaaaataagttagactttgactattacatggctctaaaaaaattctcagccaaacacaacatgccgctagagatcccctcagaagaagaaataatctgtcacttggaacccaaaggatttgacttctctggagtaaccgttgactacattctaaaattcatcccaacgcaggataatttttcagaagacctgcttaatctaatgaaaattgccaagtcccgaagagtactcaattcaataccactgagccaaaaacgaatattcccaatcgctgatagctttggctccataacatccagaatttacttcaaagacccttcgctacagaacctgtcaaagcaacatagagacatattaacccccgatgaaggtaagattttttcatatgtagactatgagcagtatgaagccggaattatggctgcactatctggagacccaatacttaaaaaactttactctgacggcgacctctatgagtttgcagccgaagcgatattcaaaaacaagaataatcgcaagcaagcgaagcgtctcttcctctcctatgcttacggaatgaaaagaaaaagcctatacgacgcggctgtcagctatggcgctgaaagacaagcagtcaagaatttcttcaatcaatttaatgtcttcgaggagtggaagaaggcagttgttttagaataccaagataagggacgcatcagcacaagtctgggcaatcacatgaaacgtactcgctctggaaatattacagagcaagaaaaaaggtcagctgtaagccaactcgtacagggaaccgcatcgctaattttcaagaagacactactcaacctcagcaatgagtcaatgatcgagttaaaagtcccgatgcacgatgcaattctttttcaacatcccgaagcctttgatgccaacattgttgccgatatttttagaagaacaatgacagagcactttgggagcaccattataggcaaagcctccttaagccaatttacagcaatctaa

SEQ ID NO: 365387 - DNA, 1833 bp, Pseudomonas aeruginosa
atgaccacaccaccaaaaaacaccgaagacttacccaccgactctagcgaagacgaagcaatagaacatatcgaggcccttataaaaatcatccaagaaaaaggggaaaagcttaaaggcagcaaagtaaagaagaaactaaaatcactaattcaaaaaagttctgaacaaaaaataataaaagataaagaatcacccaccgaactcctcgcatttaaaattgagacagaggctgttctccagcacttaaaccaagatatgcgggatgactggtttaccgatgtcatccatcatcgtgacctgttttccaacataaataacctacacgaaacactacagagcctattgcttgacggcaatgggaaatatccaggaggccgaagaacaatctacaacattcccaagaaagggattggtgtacgatactccctggaaaccgacttctatgatcgctttatatatcaatcaatttgctcattcctaataccattttacgacccattgctttcacatagagtcttaggccataggtacaacaaaaacagaacctctgaaaaatacatattcaaaagcagaattgatttatggagtacatttgaaggggtaactagaacagcattcccgaatgaccaagcccttctagtgacagatctaataaattactatgaaaacataacaaccgagtcaatcaggtcagcattcgaaaacttgctagataaagtatcagcaagcggacaagaaaaattactaatccgcaacgcaatacagacgctttgcgaacaattaacacgctggggctatagcgaaagtcacggattaccacaaaatcgagacgcttcgtcattcatagccaatgtagtattaaactccgtagatcataccatggtcgaaaaagggtacgactactacagatatgttgatgacatcagaattatctgcgacaacccacgcgctgccagaaaagcactgactgaactaatcaatcagctccgaacaattgggatgaacataaactctggaaaaacaaaaatactcacgaaacacagttcagaagctgaaatcaacgaaagctttcccacaacagatgatcgcagcatcacgattgaaagcatgtggcgatcaagaagcaggagagtgatagcgcgctcagcaaaatatatacatcaactgttgagagagtgtattgaacaaaaagaaactcaatcccgacaatttcgctttgctgtaaatcggcttatccagctagtggaagcaaatctgtttgacatacacaaagcgctagccactgacttaaaaagtctaataataaatacattagaagaccatgcagcttccactgatcagttctgccgcctactaggggcgttcggcttagaccaacaggagctaaaaactataactagctatcttcaagatagcgaacgctccattcactcatggcaaaatttccacctctggcttctcttggcaaaacagaaacacaaaagtgaagagctaattggcctagccctcaaaacaattcagtcagacatcctcctacccgaagtagcagcaattttcatatacttacgcagcattgacgaggccgctaaattaaagccattagtccaagagttcagcagtacctggccttactaccaccaaagaaactttcttcttgctacaagcgaatttgaagcagaagaagttaagccactaatctcaaagctccatacaaagctactacgaacttctagccgagccaggccctactttgaaaacggcatacctttgacagacagagagcctagaaacatattagatctctatgaagaaatcagcccatatgactaa

SEQ ID NO: 365388 - DNA, 642 bp, Pseudomonas aeruginosa
atgcgggccgcaacaccccgttcgccgtcggcgacgaggtcgatccttggcagagtgattcgggccgaatcacccagctcaccgtcggcgccgaggttggttcctggtgaagtgtttcggcccgaaacacccatcttgtcgccggtaccgaagtggatccctggcagactgattccagtggaaccacccagcttgccggcggcaccgagtcctggtcctggcgaagtggtgcgggccgcaccacccagcttgccgtcggcgccgtggcctggtcctagcagagtgttgcgggccgcaacacccagctcaccgtcggcgccgaggttggttcctggcgaagtgtttcggcccgaaacatccatcttgccgccggtaccgaagtggatccctggcagagtgattccagtggaaccacccagcttgccgtcggcgccgaggccaggacctggcgaagtgatgcgggccgcatcaccccgttcgccgtcggcgacgaggtcgatccttggcagagtgattcgggccgaatcacccagctcaccgtcggctccgccccgagggaaaaccaacttgctcgacagtgagtttttcatggctcgtcaccccgttcggatggcacgctcgatccgtgcctgggccgaatga

SEQ ID NO: 365389 - DNA, 294 bp, Pseudomonas aeruginosa
atgaaagaccctctcgccgggaagtaccggaatatctatatgcgcgaatttcagcaggctggaaaggtcatgaaaggccgaggcggctgcctggaatggagccagcacgactaccaagccttcacttacttcgagcccggcgtctcgctcgtcttctatccgcacaagacaacggcaggaaatcaccacctgcgtgttcgcgatcaaggcagcaagaacaagcaactggcagccgagttgatggctgctctcgcaggcaccagccacagttgcacattcagcagcaagggctaa

SEQ ID NO: 365390 - DNA, 549 bp, Pseudomonas aeruginosa
atgagcattgactggagcaaggcaccggagggatgtatcggagcattcgcccgtatcataggtaatcaacgaactgcattctttgtattttctaagcgtccatctgactatatgagcagagaaggatacaagggagaaggcgaggatggttcctatcacgtgttctctgaattttgggaatggctagataaaccatgggacggccagggcctgccgccggtgggcatcgaggccgaggtcatctgggacagcacggatgttgcgtactatcgggtcaagatcctcgctcacgacgagggccgcgtcgtgttccgatggtgcgaaggcgaaagcaaggggcagtacgggtcatatgatgttctgaacttcggaattctcccgactttccgccccatccgcccccccgagcagatcgccgccgaggagcgggagaaggcgattaatcagatgatttctgatgctggatacgtagatccgaagattggcacgtttgtggctatgggcaatctctacgacgccggctaccgccgccaggagtcatccacatga

SEQ ID NO: 365391 - DNA, 288 bp, Pseudomonas aeruginosa
atgaacagcgcggtcagcaccaccttcaggttgccccactgggtgaaggactcgcgcagcggcgccttgctgaccttgccctcggccttcatcttgaggaacgccggcgactcgcgcatggacaggcggatccaggtggagatgcccagcaggacgatggacagcaggaatggcaggcgccagccccaggtctcgaactcgtcgccggtcaactggcggcaggccaggatcaccagcagcgagagcaacaggccgagggtcgcggtggactggatccaactggtgtag

SEQ ID NO: 365392 - DNA, 1269 bp, Pseudomonas aeruginosa
atgagattcattgatgtgtttgcgggatgcggtgggctctcgctaggcctcctaaaagcaggatgccgtggtgttgctgcaatcgaaaagaacccgatggcctttgaaacgctacggcacaaccttatagatgggaagcgctatagatttgaatggccagactggcttcctaaagaagctatgagctgtgagcagttcatcagcgactataaaactcaaatatctaagctggctggcactgtagacctgatggtcgggggaccgccgtgtcaaggcttttcaacagcagggcgaagaaacccagccgacccccgcaacaaaatggccgagcagtatttagagcttgttaagattgttcgccctaactacatagttattgagaacgtcagcggcttcaacagcaagttcaatgaagaaaagaaaacatctgctgcggatgagaaatacattaagaaatcttacgcagaatatattagtgaagagctctcaagactaggatataaagtatctcgagggaaaataaactgcgcttcctttggagtgcctcagaacagacatcgctaccttatcatttgctcaaaacaagagctgaaagagaatctctttgaagagctaattaaaagcgccgtacagttcagaaagagcaaaggtttaaatcctgatcaccctgtaaccgtgcatgacgcaatcgcagatctagaaactgacaacaaacaacgtatccccagcacagattccccagcaaagggattttgggagatcgaatataagaccccagatattctttccccatatttaaaaattatgcgcgacggattctctggtataccaaatagcctgagactgccaaaccataaagtagaaacaatagtacagtttataaaattcaggcaggcctccgagccaggaaaatctctgtcaaaaaaatctcgcgatgcgctgggactaaaaaaacacgcaattacggtattagccagaaacttcccatctcctaccattaccactctcccggacgatatcattcattacagtgagccacgaatcctcaccgcgagagagacagcaagaattcagtccttccctgactggttcgagtttacggggaaatacacaacagggggtaaggctcgcaagctggactgtccccgctatacgcagatcgggaatgctgtgcccccacttctatcagaagctatcgggcaaatgctactagctagaaaaaaagaagaacaaacatacctagagcaagctgcagcagcaaagagctaa

SEQ ID NO: 365393 - DNA, 2319 bp, Pseudomonas aeruginosa
atggaagatttgaactttaaaatcagctcacacctgaaatccgtgattggccgagatctaatcacagatgactttgtagccatatttgaacttgtcaaaaattccttcgacgccaacgcatctgaagtagatatttattttggtgatgaccaaataacaatagtcgacaacggcaagggcatgtccgaatcggacataaagaacaaatggctttttgttgcgtactccgcgaaaagtgatgggacagaagacagcccggctgctgacaccgactatcgagagaacatacaacaccgcaggtatgcaggcagcaaaggtgttggacggttctcatgtgaccgacttggaagtaaattattcctccaaagcaggaaatcaaagaccggagacgttcaacagttaatagtcaattggctaaattttgaagagtccgccaaagaaaatttcattgacatccccgtgcagtacggggtcgccaagagctttcaatcggactcatcaataggtcaccctaatcacggcacaatattagaaataaccgatctgcggtcgtcttggccccgtgagtcgataaaggagctcaaggcctctctcgcaaaattaataaatccctttggtgctaccactgaaggatttacgataaacattcatgcacctgcagagcttgaaagagatgaggagctccgcaaacgagagatcacaactccaaacgaaataatcaacgggccggttgaaaatttcatattccagacgcttcaagataagacaacttggcttcggagctggattgccccagatgaaaatcgcttctatacagagctcatagatcgccagaaattaatctatagaatctcagaagaaaatccttatcccgagctgaccgacacaaactttgagtgcaatattttctatttgaatcgcgcagcaaaactgacctttgccagaaacatgggcattagctcagttaagttcggttcaatcttccttttcaagaatggtttccgctcataccctatcggcgaggagaacgacgatacctttggtattgaccgccggaaacaacagggttacgcgcgatatctcggcacccgagacgttctaggtcggattgatgtctacggagacgagaaaaaattcaaagagtcatcaagccgagacaaaggccttattgagtccaaggcatatctagaattagttgattcattctgggatcgctgtttcttgcgacttgagaactatgtcgtgggcgttagttggcgcctaaaatatgacatggacctagaggacgcgtccttcctaaccggcgatgaagcacgctcgaaagttattgaggttgtagcaaagcttgcaaatacacctacggtaaaagttgaaagctactcagaagacattcttacagttatagacagcaaagtgaaaggctttgacaaagcgattcaaagccttgaaaacctggccattaagattggcaatactgaacttgccaataaagcgaagagcgcggctcaaaactacgaggaaatgcgtcgcgctgaagcagaagcactcaccttcgctgagaatgaacagaaggctcggaaagccgcagaagctgcatcggtacaaaaagatgcggaactcagaattgagcgccagcgaaacctcttccttttgtctcaagggtctagagataaagatattctcgaaaatcttcaccatcaagtgatgatctatgcaagcaatgccgtgcattgcatcgagaagaatttgattttaataaacggcgggagaacgctcactgctgatgaagtgaaagccgagtttgagcagctactacttctaaatcaacaggtgattgcggcgtctcgttttgcgaccacagcgaattttatgcttgaatctagccagatagagactgacctcggcggctacatttatgaatacataacaaaagtttgccctatacacgaaggcaacatagatatcattgcagacaatagggttaagaactttaagttgaagtttagcccaattgagatatctataatcgtagacaacctaatcaataacgcctacaaagctggcgcaggccatataactttttccctttcacaagaagatgttcactctataaaaattctcgtgaatgacaatggtggcggcgtgccgagcgagatccagccaccggagcgtattttcgagaaaggtgtaacaacaacctcaggatcgggtctaggcctatatcacgtcagacaacttcttgagtcaatgcagggaagcatttcgctgcacgacaccaatgaatatggttgtgaatttctaatacggatatataagtaa

SEQ ID NO: 365394 - DNA, 930 bp, Pseudomonas aeruginosa
atggatgcgtcatttcgtgttctttggtttgaagacaatcctagatacgtcggcgaaatagccgagtccgttcaagctcgcatgcatagctacggcatgaagtttgacgtcaccatgatcaataattttgaaaacagcaatatagcaaaaatctgtcgagatctacggcaatcatgctcctacgacttaatcatggtggactatgatcttggaactagagagttacaaggtgatgagctcctaaaaaagctacgccgctcaacctcgattagcatgatcttctacagcgctaaaaatataagggagctacgagagcttcttctggaaaaaggtgtcgacggcgtattctgccttgctcgcgacatgcgattggcgggggaaatctatagcattgtcgaatgcgcactgggccgtgtagtccaaacaaactatatgcgcggaatagtagtttcctccgtgagtcacatggacaggctcttcacagaaataattttgcacgcccttaacgaactaaagctcaaggacgcaactgctgtacttgcggatataaagcaaagattcactgtttatcaggatgaagagcgcgagcagatcgagcgaatcactgaaaaaaccctaagccgatacatatccaaagccaactttcatgtaaagaccaatcttctcatagagcttctaactctagaaggcagcaatttttctgctagttttctctctaaagtagaaagctttatagatgaagttgggaataagagaaataaattcgcacacacgcctaccgaatatattaatggcgagcccaaaattaaaattgataataagatcctagaacataagcacatgaaggagatcctttgcactataagagaacacataacagctgcggaacaggcaattacttattaccgggccgtgccaccgaaggcatga

SEQ ID NO: 365395 - DNA, 1839 bp, Pseudomonas aeruginosa
atgaagaatacagtagcaggattgcatctgttcagcgattcaatgggcgctgatgaagtttatgtgaaagatatttggttattcagttcgaagatctctgatatcgatcctcccattaaatttgattggaataggttgtctactggattggagagctttccaagcttagccgagtcgctaaagagaatagcctggtgctggttgtgtggaggcgaaggagagttcaagaagatttcccccagcactgcaaagttgaagacgaattgcgctaaaagaattctccttaaagtggctgaactggggtatgaggatttagcacttgtttccagcggtcaaattcagcaaataatcgatagtctctataacgaaaagcgcgatagtgcgtcggcgacagtatatgaggctatggctgtggcatcagatatgttcaggttttcacagtatctaaactctgctctaactcatgacccttttcccttgcacactagaagaaagcttataaagggataccgggagggcaggcaatgggaagctccgccagataaagtctgtgtttttctgcttagcacagcaatgaaacttatcgaagaagcggcgaaagacagcctctccgcgtatgagagttatgtgagtgccgttgaaagtgctcgggcacgagggattaagggccgtaagccgttagcaaagattgggaacgaggcaataaaagatgcgcatatttcatgttcggaagagttgcgtgagattttagatggatacaatttaagttgctcgccttctttagctgcactcatccggcggcttcaagatgcctgcttcattgttataacttacaccgtcggaatgcgtgtgagcgagattaggcgtgcatgtgtaaatgggttgaggtcccgcattcatgcaaatggaacgaaatatgactattaccatgcgcccagatcgaaattgaggtatccggagtactcagagggtgagagcgaaaggccctgggtgatctcatcagctgccgctacagcgttcagcatcttggagcagatatcgcggcctatcagaaataagcacaatagcgaaagcctctgggttgcgtactgcgggaatgggctatggccgctaaaagagaagccaatatctccttctgtcttgagtttagggcagtttaataacagattaaattcctttgctagattcataaggttggaggaaaagacgggatggagcggctacttgcatagccatatgggtagaaagcatttagcaaggttcataggtatgcgagacagaacagcactgcaagatctcgcaactcaatattcccacgcatcagtattaactattgattctatgtatgcgaggcctgattccgatttcaagaatttagttgactcagaagtgcgaaaagaggttgaagttgcagtaaaagaaatcgcctatcgttttgatggaagtgtttatcagaatggcgattacgcgattggtaaagatcgactgtccgaatttgtgggcaggttgaagcgtaagagtgaggtgaatcagcttctgtctaagggagtgaatttagttccttgtaactggggagtgtgcctttacgaaagtaaggttagcgcatgcggtgggggtaaagatcatccaaaccaggcattaagatcgcctgaagtatgttacggatgcctgaattttcacgcgactaacgttcataaggactggtgggttagatataaggatgactgccttaaacttctggcaacatcaaatgtcgcacagcagacaaggcttcttttggaatcccgacttcaagaggcaacttctgtgctccatatcatcgctcgcgagggagagtaa

SEQ ID NO: 365396 - DNA, 1620 bp, Pseudomonas aeruginosa
atgacagacgataaatttgtggcttcctttcatgattcatcaaggggtaggcgcgataattatacagtatttagaagcgacattgatgagctagttttgctagatatcaagtccgcctttctagcgcttacggggcactatgcggcgagaagtagaaggcaggcgtggcgatcagtagtgaaatttatggatgtattgagctcaggggtcgatgtgaccaagaaatcgattcttgcgcagttccatgcatatttagaaaactcatccagactgcgaaaaactaatggtgcgcactttaacttcataaggagtatggtgcgatggctttccgagtttggttcccatgagctatggagtgctcaaataataatcgatggaaggttcccaagagaaatcagaaatgtgagagataatgacttaactcaggaagagttgagacggattgccgctatttgcaagagggagatcgatgtgattatgcatcgaatggctatagcagaggcaattagagtaggagggccatttgaggaccctactctttcagctagagacataaagactctgcagaagttaatagaatatgaggccttggatatttggtctcagaaagatttcggcaaggtgaacaaaggaggtctaggtactgtagggctgaggcgctttgcagagtatcgtgaaatgacaatggcctcattcattccggtgtatctgttgcttctaatcgagacggcagggaacccagtatctatcatggaaataagtttaaattgcttggaggagcatcctctagataagcggctggcaaatttaagttggataaagggtagggctgcgaacgagcaatcaatgtcttttcctgtagacggaaaatactctgccccaaatttggtacggctggtgcgtcggatgactgagtctattcgtagaatggcagctgaaccagataagaatcttctatttattacgcgttcggggcgattagcaaaaagaatttcgatccagagtgctcataatagtttagatcgtttcagagttacaaatgagctcagctactttacttttagtgacattaggagggtggtggctggcttgcataaagacacatacagaaataatagccatgtgtctgagttgcttcagcatagaaactcagaaactgtaaggcactatttaaatagggatttgaattctgaaaaggtgtacgaaagaatcaatgtgttccagggcgaaatcatatctagattaagcgatagggcggagggctcagattacgacacgcttttcggaatgaagtgcgtagatcctaaagcaggctacatcaaagggtcgaaaatcggagagccatgcatggcatatttgagctgtgctacatgcaagaatgcaatcgtaatctttgatgatcctgactatgtggcaagaataataaaagcaaaaattttcttagaggaaagagaacggcaaagcatacttaatgcagatgagaccgttcgctttagtgaggcgtatttgcctgtgttgaatgtgattagaaattcaattatacccagaatcccaaagaatataatagccaaggccagtgccctgttagagcggacggctgatctacctcttctatactga

SEQ ID NO: 365397 - DNA, 1119 bp, Pseudomonas aeruginosa
atggacgttctgtggccgaaagagaaagatcaaacacgaattaactgtgttttgaaaaaacacggactgctttcgctttttccgccgcaatacagctatgcccactttaggctgccaataattttgatgagcgatgggtcaataaattatacggcttatatgtttctaagagaaaaaagccagatggccaaatctgtaaggccaacaaggacgataaaaacatatgcagaaagcctgaagagctggtttgtctatcttgatatggtgggtattggctggagggagatgagcgttaggaatttattcatgtacaggcagtacatgatagaaagatctggtctagacagggggcgcacgttaagtccggcaacgataaatcttcgaattacagtcgttgcagagttttatcgatacagttggagtcgttctgggcagttttctgatagctacatttcaggcaagcttaagcagctggatagatttaagtccatccgagttagagggaagcaaaaaagacctagagcgctgtccggcgacgagtgtgcggctatcctgagtaatttaagtggcgtgcataagctgatttttagatgggctctatgcactgggcttagaactagcagcatactctctatagagaaagataattttgtcgggcagagatttattgaggtgcctgtaaagggagggaagattatcgatgtgtatgtcccagaagatcttattagagagacaaatgactatataagaattgagcggctgctatctatttcaaagtttcagggatcgacggttactacggattgcccgttcttgtttataggtcgaaacgggaaggctgttgcgcaaacttcatactacagagcgttcaagagagctgctgctaggtcaaaggttacggcaaatccgcatcaggctagaactactttcgctaccgctgtcagtcaccgccttgaacagctgaaaggccaatcgttgggtgttgatggaataaagataattcaaggacttttagggcatgcaagctcacaaacgacagaaatatatttagagagaatcactactcatagatttgatgtgctcaagcttttagatgaaatgtgtggggctatcaaatga

SEQ ID NO: 365398 - DNA, 750 bp, Pseudomonas aeruginosa
gtgtacagcaagggcggcctggcgaccggcgggctgatcggcaaggcagaaggcaacggcatgctcggaaacctgaaagccagcggcagcgtcacggaccagggcggcgcggatctgggcgggctggtcggcaacaatagccagagcgccatcgagaccgccgaggcgacgggcaaggtcagcggcggcagcaacagtcgcgtcggcgggctgattggacacaacctcggcggttccgtcgcccatgcgatctcgcgcggcgacgtgagcggcggcttcaacagcctggtgggcgggctcgtcggccacaacggcggcgaactgttcaacgtggatgccagcggcagggtcagcgccgctgcgagtgcgtcggttggcggcctggtcggcagcaacgccggttcgatcctgtcggcgcgcagcagcagtaccgtcagcggcggcgggcgcagccgcatcggcggcctggtcggcgagaaccagatccagggacgcatcgtttcgtccatgtcggaaggcaccgtcagtggcgactactacgtctccatgggcgggctggccggcgtcaacctgggatcgatcgagtactccggcgtcagcggcaagatcgacttcaagcctcagtcccattacggccagatctacggtgcgcaggtcggcgagaaccgtggggtcctgggcggcaactacgtgatcggcgaggcggcgctcctgccgcctgccggtatcgactacggcaacatctggtaa

SEQ ID NO: 365399 - DNA, 351 bp, Pseudomonas aeruginosa
atgaccaagtaccgcatctcccataatgcccaagcggacatcgtcgacatcctgcgcttcacccacaaccgattcggcgatgccgcgcgccggcgctaccaggccctcatcggcgccgcgctggacgcggttgcggcagacccaatgcggctcggcagcctcagccgcgaagaagaggggccaggcctacgcagcatccatctcgtctattgccgctcaatgcccaatgtcggtaaggatgttcggcccaggcacttcgtcctctaccggttggcgacagaccaggtgctcgaggtggttcgcgtgcttcacgactccatggatctggatcaacacctgccccaacgatga

SEQ ID NO: 365400 - DNA, 951 bp, Pseudomonas aeruginosa
atgattgacactatgtctatatctatgtatgcactcatagctatgcttgcttttcctttaggctatatcgccaatcaatcagggacgtgcctagttgcagcagcccaagaggtgctgtacttccgtcgtgcttggctgataggcggcatcgctctagccgcaatgtcatctactatgatttttctgctactgccttgggtggtggaatctaagttaatactaataccaacctttccagacaaacttaacttaattataggggctgttctcttaggtgtaggcgcatttataaacgatgcatgtcttctaggttctctagggcgcataggcaatggggagcttcggatgttcgcacttccattcggtttagctataggccttctattgacgaaaaggacattcctagaccctagatcaggccagccgccttacttcagcgaacttacgcagccaactttgacatcctaccttttaacaacactaacctgtgtattcttgttgactgtactcatcaatgctgaaagacatcgcaaaattccgctcggcagcactcttcgagtaaccttatttggtatagctggcggactaatatttaccatcaaaccgaactggactttggcaagcctcgtggatgatttgacttcagagcgtgcattcactatatcgtttatagctgtactagctacactggcaggaagtgtagtttccagccgacgactcggaacatttacgcttaaactaccaacagcacactcgttagtaaaaacaatcatcgccggcgggctaatgggctcaggaattgcgttaatccctggaggaaatgattcgctgttactacaagcattgccaagctcctcttttagcgctctcttagcattaacaactatgtttataacaatcttactaccaataaccatcgtcaaactcatcacaggacatagaatgcattag

SEQ ID NO: 365401 - DNA, 693 bp, Pseudomonas aeruginosa
atgaaagagaaaattactattacaaaaaccatccaagcgttatctttactggcagccgttatactcgcaaccttccttataatccagtcttactcaacaaattttccttcatcttctgtgaacctcacttttaacgaaaaagacgaggcaatacttcccaagggttaccgttcatgggtacacacttattcagcatgggagtcaatcactataacgcccctagacaacactttaactaaaacaccggaattccacaacgtatacgttgaaccaaacgcttacagaacattcctaaaaacgggagcatggcctgaaggaacactcattgctaaagagtttagcatgacaagcataaatactaaaaactgtgatggtccacctgcatatgtttgcaacatcggaggtagtaaagtcatcttctcacatggagcaatagggcttagcctaatgctgaaagatagtaagcgatatccaaacgagcctggtggatgggcgtattttagttttgggcatcagaccccaccgtatgaaaaaacttccccagcacgtgaacgatctcagtgcgcccagtgccatatcgatcatgtggggccccagtatgactacatatggtcgttcaaattgaatcaaccaggatttcaacgacatagcgacacagcgaagctaaatcttgaagctgcattccccagataa

SEQ ID NO: 365402 - DNA, 609 bp, Pseudomonas aeruginosa
atggccaatacgccaaaggttcagattgctcagcaggaaaagaaagctagttcggttccgccgcgtgagagaatattgcgcgctgcgggagatcttttttatcaatatggtattcacgccgtcagtgttgatgcgattgctgcggcagcgcgcagcaataagatgaccttgtaccgccattttccctctaaggaaatattgattgcagcttccatttttgagcaacacaaagctactcaggctatgtgggaatcgttacataataggcatattaatgatccgcttggagagttttatgaatggctggaaatcatgtacaggtatatagagtcgcctgacgaaccaagttgcaagctcatggataaagcaatcgacattagggatgctcagcatccaggtcgattagctcttgaagaagtcaagcggttgcacattaaccatcttacagaaatgtatcgtgccgcgggctttaagaatcatgaagagcttgcgttaagtttacatattctattcgagggtgccagggaaggacgtagtgtagggggagagcggttagcggagttacttcctaaaatggttagcactctatctgcacctcatttaccttga

SEQ ID NO: 365403 - DNA, 270 bp, Pseudomonas aeruginosa
atggacctggtggaccagttgatcaagacggacatcgacactgcacggtcgaacggcattacagcgaccccgaccctggtcatacgggacaaccagacgggacgaagcgtgaagctggagggaatggccgacgaaaccacgttgctgtcggcgatcgattggatagtcaaatactcaaccaagccttcaacaaataacatgttttttgaaattttaaaaaagtgcgatacagaaaattttatagaaaacaaaagtcataccgtaagataa

SEQ ID NO: 365404 - DNA, 141 bp, Pseudomonas aeruginosa
atgacgtcgcagctggagggcgtctccggcatcacctggaagatccgttcgcgggtcaggccgcgcacgttggtgatgatgacgcggcccttcttgatcgcggggatcaggtcatcttggatcgcgccggaggtcttgtag

SEQ ID NO: 365405 - DNA, 291 bp, Pseudomonas aeruginosa; identical to SEQ ID NO: 362541

SEQ ID NO: 365406 - DNA, 1590 bp, Pseudomonas aeruginosa
atgaccaatagaccgaaagcttatagctatgtgcgtttctcaacccctgaacaggcaaagggagatggccgtcggcgtcagtacaaggcggcaattgagtacgccgacaagcatgatttagagctggtgaaggatggcaactacgctttcttggatgcaggggttagcgcgtaccgagggaataacatcaatcgggtttctagtagtctcggtcggttttacgaatatgtaaaagaagggaagatagagcctggttcctatctattagttgagtcgcttgaccgactcagtcgagaacaggtcacggaggcattagtaagatttctggacttgttaaacagcgggatcattgtcgttacgttcggtgatggtactgtttacaaaaagtccgccgaaccgatgcagttggtgatgtctatatcccatatgtcacgtgctcactccgaatcctcggtaaagggacagagagtttcagatgcatggcagcagaaacaagccttggcacgatctgaaggcgtacccctgggggctgcatgccctcaatggttatcgtttgatggtgaggcttacaaggtcattcctgagcgtgtctgtgtagtgaaaagagtgtttgagcttactgtccaaggatatgggcagcgcgcgattgttaagatttttaataacgaaggtgttccggtctttggctctgaaaaaaggaacaaatctggcctgtggggtagcagctctattgccaagattttgggaaatagatcggtgcttggagaatatcaaccaactgtctgggcagaggggcggcgtcggatttctggtgaaccaatcaaagatttctatccggctgtagtcgatgaagaattgtattatgcggctttggagggtagaagctctcggaatgtttcaagggcaacgaagacctcctctaacttcaatgtttgggcgaaggttgcacaatgtgcatattgcaagtcaccaatgcatcttgttaacaaaggcaagccgccaaagggaaggaaatatcttcgatgctccaggtctacgaagggcgcttgcattaatagatcaattaggttggaccaaagcgaaattgtcttcaaagaaattcttgctaagttgaatttggcttctttgattaaagacaatgcgcaggtgttgcgtaagcgtattgttgagcttgatgggcggcttgagtccgccaaggtgaaattgttagaagtttctaatttgttggagtgtcatccgtccagaacgctggcccaaaccgctgtaaatgtcgagggtgagattacacagttggaatctgaacgtgatgaatgtaaggctacgcttgcctcagaacacatcacagacaaaaatgagctctttagaaggcttgacttggattcatacgaggggagatttctagcgaatcaacaaattcagcggttgaaagttagggtcttgcttaagcacgacgaaattcgagttcagtatagtgtgttcgttggcgacctgccaaagttcttctacatgtgtgagcacggagaggaatgtctgtttgtacctatatcatctgagctgctgcgtgccagtatccgacaggatgatatgtga

SEQ ID NO: 365407 - DNA, 618 bp, Pseudomonas aeruginosa
ttgaaatcacatctttacctccgggctagtactaaagaccaagatgcattgagggccaaagcaagcctggaagcattcgcagctgagaaaggtcttcttgttgctggcgtgtattcggaaaatgttagtggcacaaagttagatcgccctgaactaatgcggatgctcgatgaagcgcaaactggtgaatgcatcgtgtgtgaaagcgttgactgtctaagtcgcttgtcccagtcagactgggaaacgctgaaggccaagatcaaagcgaaggggttacgattggtgatagcagacttacctacaagtcacatgctcatcgaagacaaggggatgacaggccagatcatggaagtgatcaacagcatgctgttggacctcatggcaacaatggctcgacttgatcaggaaaagcgggttgaactaattagacaaggcttggaaaacaaacgccttgcggacccaaactggacgccaaagggtaaaggaaagaacgtcgaaaaatggacaagggtgcagatgctgattgaaaaacacccacatatgtccgcgaacgacattgccaagctcgcagatgtcggagttgccacggtctaccggatcaaacgtggagcctaa

SEQ ID NO: 365408 - DNA, 1971 bp, Pseudomonas aeruginosa
atgagcataaacaagccatcacaacgggttcgcaaaaaggattttatgcgcgtactcttaactgagacctgcccctacgaaacacccgtaatcttcgacaactttggattatataaacaaattcaaagactagacgaaagacccgaggacataaaaaagctaattactcatctcctcacagacccgaaagagcctaaattctcgataccatatgtttataacataagaaaggattcagaatccccacgcaccctatctttaatccacccccgctcgcagttacactttgttgagctctacaggaagttcgacaaccaaatattgctttgctgcaccaaaagcaaatttagcttaagagcacctttaaaagtaaccagcaaatattttataaagaaccaacaagagaacataaagaagtacaggtcagacataatcgcctctactgaatcagagttaagcgaccgtcatctcacctcatattttgcgtacggggaaaacacccgccttcataaattttttgaatcttttgactatctgagcctagagaagaaatattcacaattctggtctatggatatttcaaagtgctttgacagcatttatacccactcgatagcgtgggctattaagacgaaggagtacaccaaacgccacataggcatagatggagtgttcggtgatatcttcgacacaaccatgcgctgctcaaactataatgagacggcaggaattccgattggccctgagattagccgaatttttaccgagatcatatttcaagagatagatgaacgagtagaaaagaagctcctctcccgggggtatatagtaaacactcattacaccatccgaagatatgtagacgacttctttatattctccaattcgaacatagtttcaaatcaagttgcccacgctatcgaggcagagtgcaaagcatacaaactcaacataaatgagtccaagacactaaaagccgaaaggccctttattacctctaaaactaaatctctaagatcggtacagcgaagacttgcctctcttaaagagtcattattcgaaggcgaagattatggttcgccgagaaagctgtcaaatcagaaaactcttacactacatttcatcgacgatattaaagcagcctgcagctctgacccagacgcataccagctgattagtagctatgtagtcggatggttgagcaaccgagttatctcagcgaccgacgaaaatataaaccgaatgaacttggaaccaaaacttcaagcatttacgaatttttatagcttcaccattcgtgcaatattccacttttacagcatcaacccaagccaccgatcatctgtcaagctttgcacagccgtaaagcttgcttgcatgttctatgaaaagcacatgccgtacgaagttgataacattaaaaccctagtttaccaactgtgcaaagagttctttaccggaagtggccatttaggcgcattagctacagacagaaatgctagcctgttagaagcgatgaatattctagccttatgcaaagagcttggaccacaatacttcctacccaaagaagcattacatggcatagccaagctttcctcagatgaacacctgaattattttgaaataatcagtctactctattatattggggaagaaccattctatatcgaagccaaaaacaaaatacaagaaagtataaagcatcacttggtttacattgacgatatacgcgtgaactcacacaagattcacctggtactggacttgttgacgtgtccttacttagacatagagcttcggaaagagactgctagccgcctatatgaactagtgcataacagtaagccaggtaaagagaagctaaaaaacttactcacattttttgacgagaacatctggtttgtaaactggcgaagcttcgaccttttaaccgtcctagagaaaaaggaattgctaagcggttactaa

SEQ ID NO: 365409 - DNA, 1275 bp, Pseudomonas aeruginosa
atgagagaacagccgtatacgcccacaaatttgggccgacgaattacattcgctgacaaatgcaaggatgaaagccttaacgatcccaatgctcgacgaaaagctgcgatagcatcatcgcaacgcatattaagcggaaccgcattttgttcaggtattaagtctttccgccttggaaataaatttggctacggtttcggagatatcactgatactcttattgccagacttttggccaaaaatcttcgttcggcctaccccgcttcgcagacaaatagacaatttcttgtcagcaatagcatctcaatcatgcaagagtgcctgggatacaatgtttatcgctacgatatcaaaagtttttatgaaagcattgaccgcaagctactattagaaaaaataataagcgatgggatttgcacgtggcaaaccattttgctaattcaaaaacttttcaaaatactagatatatacgagatacccggcctaccaagaggactgtctattagtggcgccctagctgagctacgcatgctggaatttgatcaatcaatacggcatgataatgatgtatttttttacgggcgattcgtcgatgatgtaattgccatcacatccgacagaaagaataaagacaacttcgatgaattcgttaccgaatgcttaccttcagaattagttctgcatgatggggaaaagcgctccttctatcccatacctccgatacactctgccaaaaagaaaaacgaacccatacaaaagtattacgaactcagctacctcggatatcgaattagaatctcaaacaacagcacaaacgacatgctccttggcgcattccgtcgcgaggtgttagttgatatatcacaaaataaaataattaaacttcagtcaaggcttataaaatcattcactaattatcttggaagcaagagaaaagccagcgactttaaacttttgaaaaatagaattcgcgccataaccggaaattatgaggtgcgcgaccctactacaaagataacaatcaaaaccggtatatattttaactacatccacaaaaacacaagcatcgattgtgcgctattaaagctagaccgcttcttcaggggactcatcttctcaagcgacttccctctctcgaagagaatacaaaaagcgctccccatgcgaagacggaaaatattaatcggctatagtttcaaaactggttttgacaataagcgcttccactctttctcgtacaagagcttcgaaataatcaaaaaggtttggttatga

SEQ ID NO: 365410 - DNA, 891 bp, Pseudomonas aeruginosa
atggagctgcggcaccttcgctgctttgttgctttggccgaggagttgcatttcacgcgtgcagccgaacgcctgcatatcgagcaaccaccattgtcccgggccattagagaactggaggaggagctaggggtcgttctattcgatcgggatcgtcgagggacgaggctaacagcggcaggcgcagccttcttgcaagacgctcgcaggctgttcacggtattggagcaagcgcgagaaaacgtcagggctgtggcagcgggcctacgaggcagcttacgtatcgcagtgtctgacggcgcgatcggccctcgactatcagcgttcttggctcgttgccgcgcggaggaacccgaggttgagattcggctgtctgaagtcccattggccgagcagttacgtggcctacggactggtgacttcatgatcgggttcgcgcacacggcggaagttggtgttggcattgtcgccgagcctctctggcgagatcccttggtcatcgccgtgccggctcggcacgaactactctcccacaaggaggttccactacacgagttgggtggtcacccattggtactgtgcgatccgcaagtatgcgagggttactgccgcgagatcactcgactgctggggcctcttgggcatcagcagaatatcgtcgagcatgtatcttccctggagatgatgctgactctcgtgggtgccggttacggcgtcggctttatctcggcaaccaagataccggccagccagcgccccgatgtggtaattcgccccttggccatggaatcagcggtgatcactacctacctgctccgacccgagggcagtgacttgtcggcttcgttacagcgctttatcgttcgattgcgtgacggtttggacggctga

SEQ ID NO: 365411 - DNA, 1329 bp, Pseudomonas aeruginosa
atgacaacgaagccattactgatcctgattgaagatgacggtgtgcttgggcgctcgctgcaccagcgctttagcctcgaaggttatgcagtgcattgggcaaagacggccaaggaaggagcgacggctcttgccaatcgggccgcgcggatcgtgctgtctgacatccggttgcctgatggcacaggcgaggatgtggttcgcaatgcgtttggtcgcaacggagcgctacctaccatattcatgaccgcctatggtgatattgaacaggcggtacgcctgatcaagctcggcgctcgcgattacattgcaaagcccttcgaccttgatgctttggttgagcgtgtagcagctatcgtagcgattggcgaagacgcaaacggtatatccgaccccttcgcctgtttcggcatctccgaagccacccacggtattcggaagactcttgacaaacttgcgcactcagatttgccggtgctgctgtccggcgaaactgggacaggcaaggagatcggggcgcgttaccttcatcagacgacaactggcggaaccgcaccctttgtggccgtgaactgcgctgcaattcctggagaactattcgagtcggcgatattcgggcacgagcgtggagccttcactggagcggtagcccagcatatcggcttcgctgaacaagctggttcgggcaccttgtttctcgatgaggtcgcagaactcgacctgaatcatcaggcaaagctgttacggctgctggaagcgcgcgaattccaacgcataggctcaaaccaacatttaaagtgccaggcgcgcttcgtgtttgctacgaatcgagaccttcgcaccgcggtgtcccaggggctatttcgggaggatctgctgtttcgcatcaatgtagtcgaatgtgcaatgcccccattgcgcgagcgcaggctagagattgagccgctgctgaggtttcatgcacagcgaatctctaagcgtcggaacgaagaggcaccggccttcgccgaaggcgtagttccatttgcacttcaatacgactggcccggcaatatccgagaacttgtcaatcgtgttgagcgcgcgatcgcactgaaagacaccccagagcttcgattttcggacttgtggccggattatgccgctgatgacaaagtcgctaatgattcattgacattggcaggcgcacgcgattcggccgagcgggagagaattgaacaggtgttacggcttcacgatgggaatctgactgaggcagccaagacgttggacgtttctcggacgaccctctggaacaagatccagaaatatggaatccgatcatcatga

SEQ ID NO: 365412 - DNA, 1428 bp, Pseudomonas aeruginosa
ttgagggacttcattgcatcaaaatggccgttgacaaaggcgctgcctctggcagtgagcgccaccattctggttgtctcgttggcggccagcgtcatcggcgtgttgctgcttcagaactacgtcaatgccaccttagagcagaaagctgctgtgtttctggatggcttcgcagggcacattgcaccgaacggaccgctcgacccgacccagacacaagcagcgctcaggaatgcgctggaataccagtcgatcatgggggaatccagcaccgccataggtcggatgatcgatggccgtctggtcatgcacagttatccgcagcaggaagacccgtctgaactgaatgctacgctccaagttgccttgaatggtggcgctggcacttcgatctttacgttccaggatgggcataaagcacgcctgacgaaggtgtacgagcgcgccggcgtgcctttcgcactatcgacgctgttcgacgcaagtgatgccgtgcgtaccaaccaggtcacgatctggattgcaattgccatcaatggcgcactggctttggtgtcgatcgtcattaccttcttagtgacgcggcgcattgctttttcgttgcgctccctgtctcaccgcctggcaccggacgccgaaaactcattgggcggcggtggtggaagcgaactggccagcctggaaactgcgctcgtcctacgcgaacaaaacgaagccattcgctccaaagccctagaaagcatggcgcaggctgagcgagacgctttacttgggcgggtcgccgcggtcattgcgcacgaagtgcgcaatccactcgctggcatcctgagcgctctctccacgattcgccgttttggcgatgacaaggcagttcgagaagagacactcgatattgtggaaggcgggttgaaatcccttgaacgcattgcaaatgtcacgcttgccacataccggcgtcgaggggggcagaagcggatcaacgtatccgatattcaggacctggagcttctcattgcacctgaagcacgcaagagggagttaaaaatcgcttggtacttggagggcaaggacgccttctattcggacgctgatgcagttcgtcagatcatggtcaatctgctactcaatgcctgcaaagccagccccatccgcgggaccgttgacattgcggttgtcgtaggtttggacgaagcacgattaagcgtttccgaccacgggcccggtctgcctgatgcgattctggattatttgcaggccccgcctgcgtcatcaattttgcctcccacccgagaactcggtatcagcgtgatctgcgcgttggttcaggatatcggcgcgcgtttgagtgttgaaagccgtgccggtgaaggcacaaccatcagcattatcgttcccctcgacaaagaggaggctgtggaccccgtatga

SEQ ID NO: 365413 - DNA, 1212 bp, Pseudomonas aeruginosa
atgagcatgggtttgtccatcctttcgattacgctgaaagtcctcggcgtgatctttctgtttgccgccgcgctcgggctgttgcgattcaaagacccgctccagcgaatgcacgcggccaccaaggcaggcacgatcggtgctggcctggtgcttgctggcgcggtgctgctcatcgacagtaccgagggtcaaataatcggtctgctcgcaatcctctttttgttcctcaccgcgccggtatccggccacttgcttggccgtgccgcgtatgtcagcggcgcggagctgattggaatcgaggagagggatgccctgatgggggtgttggctcgccaagccgattcaccagacccaggctccataccgtcgtacaccgtcataccacctttgacggacgttcggttcgccatcattgctcccaacgaggagcgtatcgcccgccgtgcgcgagacatcgccatcgccaacgatgtagtcgtggaagcgagagcaatcattgacaccaacttggtccagagttccgttctggccgataaggcacgggagtcaatcaaggcacggctggccgacgccgttacgacggtgaaaccgctctttgtccacaacacgcccaagttgtccctgttttataccgagggggacgcagaagcgttgattccagatggacggaatgccggcagtctactaatcctgcccccctcgggctggtgcttgcatggcactgacctgcatccagccgagagcggtacgccccccgccgatgtactgcgcttggcacactttcatgcaggtccggttctgtttacaggcgataaaacgaccccagccacagcagcacaagtggtggtggtggacgacggaaccaatagcatcgtagagggcctaatctggacgttgaaagcccgcctctggaatgcgccccaagtcatgatcgttgtccgatcagacgttggccgcacagccagcatcaagaaagcgctagcggccgctggcctccatactccgttggaagtggtcgaacaccaaagggatggcgtcgcgcttgtgcctgacacgctctctgactgcgatgcagtcattacgtcttccttgccaccgcgcctataccaggaacatgggcactcatggcggaggtttattgctgaaacatggacaggggaagtattggtaatcccgcacagggcgagatccagtagggtacaaagttga

SEQ ID NO: 365414 - DNA, 294 bp, Pseudomonas aeruginosa
atgatcgaccaaattcactcgcttaccaatggtttcgccattggcttgctgatcttcctggcggtcccgctgaccatgaccatcgttcgactactaagcggtccagggtatgccgatcgcttcgttgcgctggacatgctgaccggaatcgccgtggccatgggagccttgacttgcgtggttaccgggcggcgcgaattcctcgacgtcgccttcggcctcgcgttgttcggcttcattggaacctgcgcactggcggcttttcttgagcgcaaaggaggcccgcagccatga

SEQ ID NO: 365415 - DNA, 342 bp, Pseudomonas aeruginosa
gtgagcacatcatttcctaggaggctttgggcgtttgtcgtgctgacggcaatctacttcaaggagttggtgaagtcgtccgtgacggtagcacgcactgcgttcgctcggaatccacaggtgtcgccggcaatcatcgctgtgccgatctcactgcgaaccgacctcgccataacaacccttgccaatctggtctcgctgacaccaggcaccaacgcgctgcatgtcagccaggatcgttcgacgctctacgtccattgtcttgatgcgccggcagccgaccaggtagtcgccgaaatcaaggagacatttgagcgctacttgaaggagatcgagggatga

SEQ ID NO: 365416 - DNA, 1518 bp, Pseudomonas aeruginosa
atgatggcgttgatcacgagccaggttctgttgtggccagtcacggtgccgctgttggcatccgcactctgcgcgaccctgtggacacagccaaggatgcagcgctgggtcagcatggccgcactcgtcctcatggcggtggcatccctcggcctgctggtcgaagtcatggacggcgatgtgctgagcgtgacctttggcggctggtctgcaccgttcggtatcagcttcgttgcagaccggcttggcgccgcaatggttgccatcactggaatactggcgctggccgttggcatttttggactcggtgatattcgccgccgccaggaacatgccggcttctacccgctgctgcacggcatgctcgccgcagtcaatggtgctttcctgaccggcgacatcttcaatctctatgtctggttcgagatcatgctgatcaccgccatgggattgctggtaatcaaccgcacgcgggcacaactcgacggcacgctgaaatatgccgtcctcaacctgttcagcaccttgctgctcttattggccatcgccatcgtctacggggtcagtggcacgctcaacttggccgacttggcgcgtgtgttgcctgacgcgcaggagagcgtcgccttgtctctggctgccgttctgttcctggtcggcttcggcatcaaggccggctactttccattgttcttctggttgcccgcgtcttatcacacggcctcgatcaccgtggcagcgatctttgccggactactcaccaaggttggcgtttatgcctgcttccgggttttcaccctgttgttcgagagcggtgccggcctgcgtgaggtagttgccgtaatggccgcgggaacgatgctgttcggcgtgttcggcgctgcggtccagtgggacatccggcgcatcctgtcctttcacatcattagccagatcggctacatgctgctggggttggcgctagcgacaccgttggcgctggccggagcgatcttctacatcatccatcacatcatcgtgaaggcgaatctcttcctcatcgctggcgcgatctatcgggccacgggcacctatgacctgcgaaaggctggcggactgatgagcagccatccgctgctggcctgcctgtttgccatcccagccctatctctcgctggcattccaccgctatcgggcttttgggcgaagtacatggtgatcgacgcctcgttccaggcgcagagcaattggctggcggctgtcggcctgtttgtcgggctgctcactgtcttttcgatgagcaaaatttggattgaggctttttggaagtcaccgccgttgcagcggaccaatccgcgatcggttcctgccgtcatgttggcgccaatcgcaatgctgggcttgcttacgctctggatcggactgcaacccgaagcgttcgtcttgtatgccaatgcagccggtgatgcgctgttgaaccctcaagcctatgtaggagcagtgtttgaggacactgcaacgccaggagatgcaccgtga

SEQ ID NO: 365417 - DNA, 381 bp, Pseudomonas aeruginosa
atgaacctgatatatgcggcgggtatcgccgccatcatgggctgcgccctgtacctgctgttgtcgcggcatatcctgcgcatcgtcctgggggtcatgctgctatcggcatgcgtcaatctcacactcttcctcgccgggcgcatcggaccaaatccaccgccagtgatgcgcgctggggaaaccgcactcgaagctggtgccgccaatcctcttcctcaagccttagtgctgactgccatcgtgatcggcttctcgctcgtggctttcgtcgccgcgctggcgctgcagacattccgctcgaccggaacgcttgacagccgcgaattggactacgccgagaagctcggctcgcccaaggaccaggaggcgggccgatga

SEQ ID NO: 365418 - DNA, 405 bp, Pseudomonas aeruginosa
atgccgtccatcatcttttccaccatggcccgggtgttcttctggctgatgctggtggcctcgatcctgattctcctgcggggccacaaccaaccaggtggtggctttgtcggcggcctggtcgcggccatggcgatcggcgtagtggccctggccgatggcgttccgagggcacgcgcactgttgcccctgcatcccatcacggtcatcgggctgggcatcctgctcggcatcctgggtggactgccagggctgttgatcacggggaattttctggagcatcagtggttgctgttgggcagcttcaagctcggtacaacgatggtcttcgatctaggtgtttattttgtcgtgctaggaggaatgctggctttgatctttcgtttgtatgaggacgcaccatga

SEQ ID NO: 365419 - DNA, 2310 bp, Pseudomonas aeruginosa
ttgagcctttcaggcatcttgcttttttcgattttcggcacgttcgtcggctatgcactggctcgactacgggggggcgggcgctatttttgcgcggctgttccagcggcattatttgctgcgttcgtcgtccaccttggcgctgtcgccgccggacaacgaattaccgacacattgggctgggtgccatccttgggcgtagaactgcagtttgtgctggatggtttctcgctgatgttcgcgttgttgattaccggcattggcacgttggtgacgatttacacggcagcctatttctcagacgccgcacctgggcagcgagcccgcttcgtctgcctgatcttggtcttcatgaccgccatgctcggtacggtgctgtcggacaacctcatcgccatgttcgtcttctgggaggcgaccagtctgacctcgttcctgctgatcggcttcgaggctgccagggtcgaagcccgccgggcagcattgcagtcgctgctgattaccgcaggcggcgggctggcattgttcggcggcatcttgttgatcggaatgcagctcggcacattctccctgaccgaaatcactgctcgtgcccacgaactgaaagagagtccgcatcttgttgcgatcatcgtcttgattctgctgggagcctttaccaaatccgcacagttcccgtttcacttctggctcccacaagcgatggctgcaccgacccctgcgtcggcttatctgcactcagccacgatggtgaagctgggcatctatctgctcgcacggttcgatggtgtctttgcagatgtacctgcattcggcataacgctagtggcttttggcatggcgacgatgatgatcgcggccctaaacgccatccgtgcaaccagctacaaggcagtattggcgcagtccaccgtcgcttcactcggcattctggtcatgttgattggcctggatggccccatcgcgaatgttgcggtctgtggctttatcctcagccacgcgctatacaaagcagcgctgttcttctgcgccggaactgccatccacgccacccacatccacgagctgcgcaagctcggtgggctcgcccgttttctgccgctgacggctgccgcagccatactggccagcctgtccatggccggcttgccaccgttcataggctttatcgccaaggaatacctattcgaggctcaactcgaaagctcttggaatgtgctgcctgtgattattgccgtcgcagtcaatggcgtcatggtcgccgtggccgcagtggtgtcgttacgccccttctttaatggcaagggaaagatccaccgagtacaccatggcgaaaccccgggcctgctggtcggccccctgacattgagcctgttgggcgtcctgtttggtgtggccccggacatgatggcgcaagcactcatcgtccctgctgcaactgcactgcaaggcgcacctatcaccgttttcttctcgttgtggcatggcgtgacccccatgctcgctctcagcctcatggtggtaactctcggaatcctgatggcttggaagtgggattcgtttcatgccgtcatcaatcgctcacacctagtgcgttgcgtcaacgccgaccgtacctatcaccgttgcgttggcgcgctgctgggccttgctcggggttctacggcctggttgcagagcggcgatcaacgccgctacacgctcatcgtctgcctgagcctcgtgctgctggccagctatacggtggggcgtactggtgatctggcgctggcttggtctggtggttccgtgcagatattccctacgattctgctcgcgctcggcttcgcaggggctgtcgtggccgtaggcacgaaatcgctggttgccggcctgatcggtgttggtgttttcggctatgcgtcagccctgatattcctactcaatggtgcgccggacttggctttgacacagttcgccgtggaaacgctggtgctcgtcgtcctgatggccgtgctcgttcgcttgccgacagcggcgccatcaacccgagcaaggcgtgagagatcggtggatgcagccgtctcaatggcgttcgccgtgctggtcttcttcggcttggccagcatggtggcagacccctttgacaaccgactttccgatttctacgcggcgagcagttacttagaagcctttggccagaacgtggtcaacgtcgtcatcgtggattaccgggcactggacacgctcggcgagatcgcggtggttgggtttgccactctggccgtatgggtgctgttgcgacgtcgcgccccagcaaaaggagcctga

SEQ ID NO: 365420 - DNA, 1170 bp, Pseudomonas aeruginosa
atgtctattgtgctcagcaaaacctctctcaagcagcgcctcttgccactggtccgtggttacgacttgctgttgctgctccctgtgagcatcttatgcggcatcggcttggtgaccatgtattcagcggccttcggccatggcacgcacttcgtcgatcatggccgcaacatgctgctggccgctggcatcctgctggtggtgtctcaggtaccgccgcagcggctggcggcgctagctgtgcccatctatgtggtggcagtggccctgcttgtcatggtggcgttgtttggcatcaccaagaaaggagcgcagcgctggatcaatgtgggcatggtgattcagccgggcgagctgtcgaaaatcgccgtccccatgatgttggcgtggtggttccagtcgcgtgacggtatgccccgatggcccacctttctgggcgcgttcgggctcctgatgctgcccgtcggcttcctgatgaaacagcccgacctgggcacctcattgctcgtgatgggcgcaggcttggcggtcatcttcttcggtggcctgccgtggaagctgcttatccccccggcggtgctgaccgtggtgggcatcttcctactgatctggaacgagcccaggctatgcgccgatggcatgagctggtactttttgcacgactatcagcgcacccgcgtatgcacgctgttggaccccacgcgcgacccgcttggcaagggtttccacatcatccagggcatgattgctatcggttcgggcggcatatacggaaaagggtttatgcgtggcacacagacacacctggacttcatccccgagcgcaccaccgacttcatcttcgccgtctattcggaggaatttggcttcgttggaaacctgatcctgataggcagcttcctgttcctcgtgctccgcgcgctgctgatcagcgtgcgtgcgaattccgtttttggccgtctgctggcgggtggtatggcgaccatgtttttcacctacgccttcgtcaacatgggcatggtcagcggcattctgcccgtggtgggggtgccgttgcccttcgtaagctatggtggcactgcgatggtcacgttgggcctggggctaggcttactcatgtccatcgctcgcgaccgggaacccaagcaacgtccctcgtcgcttggttaa

SEQ ID NO: 365421 - DNA, 1080 bp, Pseudomonas aeruginosa
atgttcgaccacatactcctgctacttctcggtttcgtcatcctcgtcgccggtgctgaccttctggtgcgcggtgcttcgcggttggctgtgtcgatgggcatttccccactggtggttggcctcactgtggtcgctttcggcaccagcgcgccggagctagcagtgtctgtggacgccacgctcgccggctcgtccgatctagctattggcaacgtggtcggcggcaaaatcgccaaactccttcatatcctcggcatatcggcactcatcacccccttggtggtctccgagcaggtcatccgccaagaaatccccatcatgatcggtgcgtccttgctcttggtggtgatgacgctggacggtagtatcagccgtatcgaaagcagttttcttctctcactgatcgtggcctacaccgcgttcctgatccaccagtcacgcagcgtatcgaagatggcgaaaagccagttcaccagcgagatccccacatcgaactgggaccgtcactggagcgttcaaatcgcgctcatcgcggccagcctcgggatgctcgtcctcggcgctgactggctggtagtgagcgcagaggcggtggctaaggcctatggcgtgagtgacttggtgatcggcctaactattgtcgcgatcggcacgtcgatgccggaaatggctgcttcagtggtcgctggcctgcgcggccagggcgacatcgcggtcggtaacgtgctaggcagcaacgtgttcaacatcttcgccgtcatcggagcatctggcctggttgcttcgggcagcctgccagtaccggaaacggcacgcaacttcgacctgtgggtgatgctcgccgtggctttcgcctgcctgccgatcctgacaaccggccgcaacattgcacgctgggaaggtggtttgctcctcgcctactacgcgatctacatcgcttggctggtactgtcgatccagcaggctaccctcctaacggccttctccaacgtgatgcttagctacgtgataccgctgaccgtcattgcgttgctcatgtcggtggtgcgccatttcaggcgtacatcgagaagctag

SEQ ID NO: 365422 - DNA, 297 bp, Pseudomonas aeruginosa
  misc_feature (164)..(173): n is a, c, g, or t
atgggcggctacctgttgcgccgcctggcgctgatcctgccgaccctgctgggcatcctgctgatcaacttcgccatcgtccaggccgcacccggcgggccggtggatcaggccatcgcgcgcctgcagggcgtcgacggcggcggcccgctggggcgtggcgnnnnnnnnnngagggtgggcatggcgctctggaaccgcagcgccacggcgagaccggcatcgatccgcagctggtggccgccctggagcgccagtacggcttcgacaagccgccgctgcaacggctctggctga

SEQ ID NO: 365423 - DNA, 702 bp, Pseudomonas aeruginosa
atggcaaagaaaatcccgccagcaccggccccggcggttcccggggcaatcccgtccgccccccctcttgctaacgctgcgacgtctttggctgctcaagctggtcaggtgctgtcgcctgagcttcagttgaccattgcgcaagccccggcattgaactcaacgcaaaagcaaaagcgcaaaagtaaggcccacaagaacgcgatgacgatgcggagtgagttgtggcccgacttggacgaaggtttgctctggcggcggaatgtaaatgacgggttcacaaccattccccgaactctctccctagtttccagcatcattgatgatctcgcgaagaaggagacagggaagtcgctagcggcgggaaaaacctacttcggtctgtggtgtcgagtgtgggatgagaatttgctaatcatcgaaaatgaaagtgcatatgccattgaggcgggctacccaggtgagcgcaataccacaacatggcgtgcacatatgcgtgtgctccagaagctgggttttatcgatgtgagggatggagtctatggacccttcaactacgtcctgctattcaacccctacctcgttctaaagcgtctcaaggaccaaattccatccaaaacctatgcgtacctgacccagcgagcaatcgaaattggtgcccaagcggacattcttagccagcctacagaggagaaaaagtga

SEQ ID NO: 365424 - DNA, 1218 bp, Pseudomonas aeruginosa
atggcagtagtgatggttgagcacgagaccggggagcgcttgcccatgatcgtggacctagatggactgcctgaaccattcccttgtgagtggctgctgtcgcgaagaggcagtagcaccaacaccttggtgaggaacgcccgtgaactggacatcatgttcaattgggtgtgggagcgcgagatcgatttcctggcacggattcgctcgaaccagatattcactgaagccgagttgaagggcagcttggttgagcgattgcggcactcgatcaaatccgccactgcattgcaggctggcgctacagggctcgtggtccaaaggccagagccggttgcggcggagacttttaatcagcgattgatgactgtgaaagctttcttcgacttcagctttgcagtcgaactcggcgcgctgagcaacgacgatccgatgtggttgcgcatacagggacatagggaacatgtttcggaagtcctcgggcgagcttccgtcgctgaggttggctcgtcaacaacccttgtttctgacctaaatgattcggagttggaacgtttcacagcgattatttcgtaccgcaatccgaatgcctatggagtgaacgagcacgttcgattccggaattacatttgcgcgatgatcatgctccgatacggcttgcgtatgggggaactgcttagtcttcgtgtggaagatatcgttatgggacggatctcggagatccgtgttgtaaggcgccctgatgatcccaaggatccgcgtaaaccccgtcccaaggtcaagagactggcgcgccagttgccaatcgacgaacccaacttcgccaaagagctatcggaatatattgatctccatcgtgaggccatgatggaggccggggatgctgacgatcatgattacctgatcgtctccgatgagggcgccccgctgcatcccaatacgctcggtcagtattttcgtatcttgcgggggcgacatcctaccgacctacctgagaaccttacggcgcacatgctgcgtcacaccttttctacacgtgtcgagcggcacctgcgggagcagggggttaaggagcaaaagcgcaaggaaattctcgcggcattgcggggggactctagcactgagtcgcaggatgtatatgtcaggcaggaggtgattaggcaagggcagaaaagtttgcgtgcctaccatgagaaagtgctgaatccggagttctga

SEQ ID NO: 365425 - DNA, 1575 bp, Pseudomonas aeruginosa
gtggattcttcttccgcgttggcacagttgattgatgataatcaatgggaaagaattcctccctttataacgactgccgaggggtatagcctggatgcacgtttccctgactgggatttcccatacacactggcaagcgggggaactgcctatttttccaagtttaagagtgctcatgctagagttgctttgcagttttattgcatggagcaagctagaaacgtctcttcacatgcggcgtactctagttacaaagatacgtggcgccttttgtttagggatagtgagttctccagtggtgtggattttgaagaagatctcattcggctttttgcggctgcaattgtaaaggcaaggaaggaaaataaactatgggtgatgtatcgccccatacgttggtatgtatggtgcgcggaacattatccagaactagggttttgtgctgcttatgctcttgagcttgactcgatgcgcattccaggaaacccaaaaggggacgcggtcaagagtgaagacccaacgagagggcctctgcatcgtgcgcttgagcttcaactcctaattaacgccttggctgctccttgccctcgtgatttaaaggcattgcaagagcgagctgctgtcgcgctattcattgcgcacggtaggaatccagcaaatctttcactattgttggagactgatttagtaaatatcacgccagaggtggaaaccccaacttgggtgattagatatcctaggattaaaaagcgcctaaaaaacccgcgcgatgatcttcgagaagtgccaattcctactgtttatgctgagcatattcttgacttgatttcttatggtcaatgcattgactgtgaggctgagattgatggtgagttagttcgggctccgcggccactgtttattaatgtattgatgaataagcaggctgtccgcacacgtcaatttaatcagctatttagctacccttcgggttatatcactgacctcgtgcgctcttttgtgcgtcggcatgaattggtttcgccgttgactcggctgccgcttgttgtaaatgcaaggcgcttgcgttacacgctggccacgaatctagtgttggatgggattagtaggcgagagcttgcttacattttggatcattctgatttgcagcatgttgaggtctattttgatctcgcgggggaaatcgttgaacacctagatagggcttattttaggtactattccctgcttgctaagtatttcaagggaaaggttgtttcgcgtgatgagaatgttatcaatgcggatgaggattctaagttgatcccttgtgttgatgttctagaagacatcggtgtgtgtggtctagattcgctgtgtaggttgtatcctccttattcttgctacaagtgccctaaatttcaggcttacatggatgccgatcacgagtctgtttttgagtttctttataagcgccgagagaatgctcttgcagctggtaagagtcggtttgctgttcagttggacgaaattatgcttgccgttcaacaagtcatccagatgtgtaagtctcgcactccggagataaaggcatga

SEQ ID NO: 365426 - DNA, 1977 bp, Pseudomonas aeruginosa
atgaaaagagtcgttccatttatctcgcggcttgagcagagtcgaaggctcaacttagaggaactcattgagcgagcgaaaagtatatcgctggaaggattcgagactgttgaatgggataatcctacctggttgataacatcaggagtactttcccgaagtcccggaaagcgtccgggacccgcagagataaattttttccaccacgagacccttggtggcgccgcgctgatgggcgcttggggtgatttagcaaaggcactcatgcgattgcgttttcatcgcagcggccaagcgatggcgaatcagagaagtttcgttacggcagtcgccttcgtatctcatgcggccaatggtcgagcgccttatcaactcaactcggagatgcttgatcgtgcttgtgattatattggggatctgtattctgaatccacggcttataatctgcacaaggcggtaatcgagttcgctaggtactgcgatgcgaattgtctttgcaatgtggtgctgaaatacaaatacataaaactcaaccgtccagcgaacgcccagtcgaggcagcagcgccgtttagaggacgtggagcatgagattacctcttccgacaagatggtaagtgcggatgttcttcgagtattaggcattctttatcaaaaagtttcctgcggtcacaaatacaggctttatattgtcatgctgaccttcctggcttttttggggaggaggttcagcgaattagcactgatgccccagcaggaaatttccaaattcatcaatggtgaactgtatctccgaatatttcctgggaaggcgaagagaggagattcccccgacccgatggagcgggtagtgatcccgactagggctgagtcgattattgtcgactgtttagttgaatttcgagagctaagtaggctgccaagggaaactgcaattgagatgcgaaaatcaaacggccctgatcttcgctttctaaatgagtttccttcggatcatgttttttataaagaagacttcttgaggttgggttttccagatctcgttggtgttaatggctggataagaaagcagggtttagcctcgccggacccagacaagcttacttcgcagggaatacgtccggcaaaaccgtcacattgcacgactaaagatgcttttgttgcctattgcagaagcctttttgatactgagtatgtcctgcggctcaaagtggatgagcaggcaaggtcttattacccggaagatatgatgattctacgatttatggggacatcttcgggagcgtatacgccgtgcatagcattgcccgttacccacgccatgcttcatcgttttattaagcacgacatggagtcgcttctgaaagagtaccacgtgggagaagagctgagtaagttcacaagccaccagtttcgccacacactcaacaccgtgctcgatgagggcggactcggtgaattgattcaaacaaggtggttcaatcgtaccaatccacgtgacactaaggcttatcagcataccagtccccaaaagaaggcaatgaattaccgtgagcagatcaggctgggagaggtgggaggccccattgctgaggtctatgaggcgttgccggttgaacgccgggaagctttcctaattgctcgtgtcaaggctgtgcatgaccttgggccggggatgtgcacgcatccttttgctcagagcccgtgcccaaagggtttggaatgccagaataattgcgacgagtactcatggctcaaaggtagtgagtctgcacgcgacgaagtcattcgtatgtatcgagttcagatagttcatcgcgcaaccgccaaggaaaagtatgcgtccaagcggaaaggggcgagcgagcaatggctttcggcaattgagcaaaggataaacgtgttggagcggcagttgacggactttcaagtggatatccaagcattgaaagcggaggcactttcccatgctggctga

SEQ ID NO: 365427 - DNA, 1455 bp, Pseudomonas aeruginosa
gtgccagagaatagggatgaaaatttacaccggagcttcatttcgttagtagaaatagagagggatgactcagttgaggggggagggtgggttgtttttgactcttttgccgacgattctgatccctaccgttctatagatccaatgtattccgcgttgttaaccttgcgagcgccgctcgagaaagttctgaagtggtttccagatgcgatgatgctcgatggttcgtgggctcacattacggtggaagctcattgctctcaagacagtgttccagctcaagtcgttctttttggtgacggtgaagaatctcccgtagtaggcattttgagcctgtctgttgttgatggtggatcggcaaatcatctcaccagtttatcaatgttggggcatgcgccgcgtgctcgcgctggtttcatcgcggggattctcgatatcccgcttcaatatgttgaatcgcttgcggtcgcggtctatgacgttgggcaaggtaactgtaatgccatcgtcgatgagtatgagcatcctcgtatctttttcgacttaggttgggcaccgaacttccaccgttcaacccgaccaaccgaaactcctgatctgttcaggtgctcagctcactcattcgcacctgtggtcttatctcattgggatatggaccactggtcatacgctatcgcgaggagcacatacgatccgggtagccttactacaaagcacgagtggaaagacggcgccctgaatcggttttggattgcgcgcgcccccgaggttgaacggcaccaattggggccgctcgcattaagtttctatcgcgcgctgactgagacggagttgatcccaggactcagtgcaatactgctctggccaaatgacactaagcgcattcaattctctgctggttggctagaggcctgttcgcctaaggatggagaaccgggcgacaggaacaatagtggcctggcaatgtttgtgcagccaaatcccaaaactgggcccatcctgctcacgggggatgctgactttccctccattcctagtcttgcgattaagcggcctccagcattggcgggaatggttgctccccatcatggtgcacgcatttcctccgatggcgtacctcgaccaaaaagtgattcgcctgcacaggtagttgtctcggttggcaagggcaatacctatggccaccccaaacaagacgcaattgatgcttatcaagaatgtggctggctgccggtgctcacgcaagatcgtttaaattgccctaggtgcggagggaggcacctgcatggaaatgccttattgaggttcactgtcgactctccagatccacagtgcggttgccggtgtgtccaagcaggaaacttgtgccttctgcccagttcgcttccgaaacccgcaccgagagccggagtgaaaaggacacgttcaagaaagaaaccacctgttggagtctga

SEQ ID NO: 365428 - DNA, 597 bp, Pseudomonas aeruginosa
gtgaatagttttcttgaaaggcgatttgctgcccgctatccggggatgctgcttgaccagactgaggccggcccaaatgtgttcgggtttgaatgccttgatggatgggctgacctcatcgaaggccttctacgtttactgaagaggtactccgaggttagtcagcaggaaatcaggatttcgcaagccaaggagaaatttggccagcttcgcatttacagcagtggtggtgacgagaacgttgatttggcaatcgacctcgtagaggtgatttccggaggtatgtgcgaatgctgtggtcagccaggacgagtttctgtgcttgagggctggatgcaggcacgatgcgaaacgcacattggacgatcaacctcagagtccatcgagccaacaggttgcgacgaagagttcgccaatgtatttgccggcaccctagctcttgttcttgggttcttcaaatcagaggcagtgcactgggttcagaaagagtgcagagcgctaggtggagttaagccagcggaactgctcgcaacaactcaggggtgcagggcggtctatacgcttcttcgccggcttgaactgggggttggagtgtga

SEQ ID NO: 365429 - DNA, 1080 bp, Pseudomonas aeruginosa
atggaccattaccccgtcctgcgtgaagcattgttcacccgctttgctgaagccattcaggaagcgactggagcctcactacaagagatgctctttactgctggggctagagagggtgagccggatgctttcggggtgctagaaacggtcgaaggccgctggactctgcttttctccatcaggaaaactttctatccccgcgatgttcgagatgcgctgtgtatcctggatagcgcgcggaagcgcgataagtaccctagcgatgcagtcttggtgcttcttgctgatcaactgagcacaggggcacgcgaggagctgaggctgcgcggcgcgagcttctttgacttgagtggaaccttatacttcaagcacagaaattggcttatcaacatcgagaaatcgcgcccgcccaaaagggcaatgcctcgacgagtcgacctattcaaaggtgcacgcgagtcagtcgttcatgctgttcttcaaacgaggggcgagtggttcagtgggaaggacatcgccgctagctctgaaacatcagggttctcagtgtcgacggtgctaaaggagctggaacaattagagtgggtacagtcgcaaggccaaggtcggcatcgcctgcgcaggctaattcagcctgggaaacttctcgatgcctgggcgaatgactggatccaacgtcgacaccagaaatcgcgttggtacctctggtgcccgaatccagagcgtctattcgaagcactaggagctattgcagctgagcgcagattgccttgcgcatttacgggagcaatcgttgcgaacagactatctccgctactcactcacgtagactctgtgacattgatcgtgccttcagacgcagcagctatcgctgaagagatgaacctaaagccggcggagaaaggctcaaacgtagtactagtcgagcgacacggtgcgagcctcctgttccttgaacacttggctatcgacggtgcctggatggcgagcccatacgtccagtatttggaccttctcgatgggcgcgggcgaaatgcggaactagcagcgcagttacgaagagatgtgctaaagatctag

SEQ ID NO: 365430 - DNA, 693 bp, Pseudomonas aeruginosa
atgacagatcgcaagcgtatacctaccgaaacgaaactgcggctattttccgaggctgcgggtcattgccaacatcccgactgccttcagcctctttttcccgctgaaatgggcggagagaaacatatagccgaaatggcgcatgtcattccgcacggtgaaacagggccgcgctacgaagagcggcccgccggagagttcgaggcagactcatttgagaacctcatcctgttgtgtccgacctgccatacgatcatcgacaaggcccctgatggatacagccgtggcacattgctagattggaagcgtaaccacctctcggctttggcgcgtaagcaaggcgttcatgcctacgatgagcgctgccaagttagaggcgccgtggccgccgccatggccgaaaacaaggccgtatggaaagagtacgcgcctaccgatggattgagcttcgtgttcgatccggaatctgaagctgctaagacgtgggagctgaggatgcgaggtgtcattctgcctaaccatttccgtattcaatccatcattaaggcaaacctgcacctaatcacggaagctgagcgggagacattcgcccgataccaggaacacgttcgaggcctatcagagcgtcacatttgcggtgtcgcgggcgccgctattcgctatcccgaagaaatggacggaatcttcgtatga

SEQ ID NO: 365431 - DNA, 642 bp, Pseudomonas aeruginosa
atgagctggcaagtgaactacgccctagaaaatattcggaacaaccggcatgttagatcggtgcagcatattagggatgatgctatcaggatcacaattaatgagcagcctgatgtggttgcgattatctcggccagctatgcgatcaccgccgagttggcgatgcaataccatgcagagtttccaagcgcggatttcctctgtggatatcgaagggaatgcgtatgggaaggcggggcgatcagctatctcgaagcccatggaataggctggggaagctccggcacactcaataccgccattcgcgaaggaaacgtgaagactgcgtcccataaggactacttcttctcgtaccgactcatcgggcagatcagaaatgttgtgagtctcgatagagagtttgatcgcgtcttcacgatgatacttgccagtgggcgcagctttagagtgggcatggttatggagtacgatccgacagccgatgccattcgcaccttctgggatcggttcggtcgcatcgatgttgcttggaacatcaaccccaatgggcgtcccactcagaatgccatcgaagcagggcgggaacttggctgtgaggtaatgaaatgggaagagttgaaggcgctgttacggagcaattaa

SEQ ID NO: 365432 - DNA, 1344 bp, Pseudomonas aeruginosa
atgatcattgatctttatgaatctcttatctacatggatgacccttgggacaaggtcgccatttaccgacttgtagaattaacagatgagcattatggcatagttctcaaccatgacatctcaaacagcaacctgaagaaaataccaatcagagaaaaagataagctactaatctacccattatcaatattctccagcgagaaacacaataagctagccgataaaatgttacgcatcggagatctagcttgcgctctactaagcaagcatagagcattaaaactcgaagaccttaataaattaataatggcgcgcaaagagaatagcgagcttagcgaaaaacaaataacatggatacttcgctgcttagtagcagcaaaaataatcctagcaaaacccaacaagaactccatccaattcgagaactctccaattcaaaagcgaagagaaaaacatagaaaattctctgccacgatcgcagtcgaacttgaatacttgagtgagcgaataaagctaattattgatcacggaccgacagtaggcacttacagggaaaacctcctgcaaaattcactaaggaagcacttacccgagcgctatcatgttgcaaccggttttatattcggcgcacacactcaaatcgatatattgatttatgaccgcattgactatgcacccatcttccgagagggcgaccttgtcatcgtccctccagaggcagtacgcgcagccatagaggtgaaaactaatcttacatcggaaaacttggagtcggccttaggaataattaatgaaattgcacacttggacgataacgagcctccattctttaaaggaatattttcatttgacagctcattaaatagcgaattcctatatgaaaaaatctccaaattctacaccgacttagaagcacctgcttatggcaaaccaggagaaataatctgtcagccttttcagcatatgacatgcgcatgtatcaacaaaaaagcttttgcgcacatccgctatgtccgcaacgaaaacaaccgcctagtcccagcgctttactcaaagaatagtgcaaccgaactacccagccagtctagtttctttatccagagcttgctttcccaccttaaatttgggggcgtgaagcaatttaaggtcgattacatggggagaatgctaggtgaagattcatttgaaagaaagattaaagacttgatacccgaaggtgatagctggggggcatatttcagctttgacgaaggagatgcggagcaggatgaggtagacaggatggagcacctcataataaccgcacagcaatggctcgacagcgaagagaacttcgaaacctaa

SEQ ID NO: 365433 - DNA, 2265 bp, Pseudomonas aeruginosa
atgataaaaggaatcatgaagattaaaggcctgggagtttacgaaaattacacaaagcccattggcacccctgaatttggcatcaagaatctgatatatgggtggaattactcagggaaaaccacactttcaagattatttgcacaactagaagccaagaagccaaaccccgatctatccgggtgtgaattcagcttcgagactgaaacccaaacaataacagaaaagaactttgaacaatccaacctaatggtgcgagttttcaactccgacttcatacgggagaacttgcattttgagggcaataactttagtccaatccttcttctagggaaggaatccgaagaggctcagaaaaagattgatcacaagctgaatagaataaaaaagtcgggggaggctcgaaaactaattgaaagccaaatcaccgcacatactcaagcagtagcaagtgccaagacagaggcagcgaagaacatccgtcaactactgaaggtcgacccctataccgctacacagctcagtactgatataacagctgtaggtattctcgactcccaacttctctcagagagcgacctttccgacaaccttgaactcgccctaacacctgacaacaataaaccaagcactgttgatcgggtatctgccacgccgtcgattcgaaatatacacaaagaagcgataacgattcttgctaccactccaaccttttcgaatacgctaaagcatctggaagagaacctggagattgagcgctggattgaagctggccttcacattcacccacaggaaggcaattgtgaattctgcggaagcataattagcgaaagccggctagcgcagtttagagcacatttctcaaaagacttggcggaccataagaaaaaagttgaagacctgctacaacgtgtaaaagctacgaaaatacagttaacgcttcccaaagaggttgagctaaatacgcagtttcgagagcgctattcgctcgccgctgaaccactaccccaagcaatcgatttattcaaccaggcagtagaatcactcatcgacgacgtacaacttaagctagacgcaccccgaaagttgatgactccgaaacctttaaccgagggactggctgaagacatcatctcttccgtagagataatcaatgcggttatcgatgaaaacaacaagctagctgacaatttcactactgttaagaaagaagccgtcaaaagggtaaagtaccactatgttcagcaattcatcgactctcaagctagcattggacacgaacaaaaaaaatcactgctagccaagcgaaaagagcggttacagacattttctaatgcgttgcagggtgaagtcgcggagcttcaagctcagataagcaaagcacagcttggccgtgaaagaataaatgaacgcctcacttctatgctaggaagtgacgccattcagatagtagtcatcaacgatcaaaccagtaatcaagagcgctttaagctagtccgtaaaggcggaaaggccgcaagaaacttaagcgatggggaacgtaccgctattgcattctcttatttccttacgaaacttcaagaactgaggcaagaggattttgcaaaaacagttgtatatattgacgaccccatttcgagccttgacgcgaatcacatatttcaagtcaccgcagcaattcgtgcaatattcttcaaacaagaaaatgaaaacgctccttggacaactacctgtaatcaaatcttcatttcgactcacaactttgagttctttaacctgctgcgagaaattaaaccagaaggccccaagcagggtgctcgcctgtacctcattaagcgaatcaacgagaagtcctccactttctgcgacatgcctgcttcactagctcgatatcaatctgagtatcacttcctatttgacgtcatttaccgcttccaccaagctcccgacaaaacggaccacgccgttcttatgcttctccccaacgcaatgaggagattcattgaactatacacttactccagacttcctggcgtcatgaaggaaactgttgaccagcgagcagaggctctatttggcgctgaaagatcaaagcgaattctaaaaatatttcactacttcagtcacgccaacacaattgacagactggccgggaacaatgaattaattttcaacaccgaacacgccattaaagatttaatcgatgccattacacagacagataagcaacatatggacgcgctaattgcttccatccaagcctga

SEQ ID NO: 365434 - DNA, 669 bp, Pseudomonas aeruginosa
atgccagcctcttctttcggtgagtcctcggcgcatatcagacggagacgcgttgcccactatctacgcacggagtctggcgctgcggtgctgctggtgatcgtcacggttgtggcgctcgtgtgggcgaactcgccgctatctaacgcctatttcgagttgtggcacctagacgtcgggttcaacttcgggccactgcgcctacacatggatctgcatcactgggtcaacgacggcctgatggtcgtcttcttcttcctgatcggactggaggtgcgtcaggagttcgcccacggatcgctccgtgaccgcagccgtgcccgcctcgccctgatcgcgggggtcacgggagtcgtgcttcccgcgctggtgtatgtcctgatcgtgaaactagccggaagtgagggcctgcacgggtggggtgcggtggtcggcaccgatacggcgttcatgctgggcaccttggcgatcgtcggcccgcggctatcgggtcagttgcgcgtgttcctgctcaccctgaccgtggtcgatgacttcctcgcagtgtccatcatcggcatcgtctataggagatccggatcgtcccgttgcttatcgccctcgccagcctcgttggattgtggttgttggggcgcacccgccagtggcgggcgacgccgtatgtgttga

SEQ ID NO: 365435 - DNA, 330 bp, Pseudomonas aeruginosa
gtggccctcggcggcgaactcttcgtgcagttgctggccagccagccgcaggtcgacggggtgttcttctgcaacgacgacctggcccagggcgcgctgctggaggccctgcgccgtggggtcaaggtgccggagcagatcgccgtgctcggtttcaacgacctgccgggttcggactgcacggtcccgcgcctgagcagcatccgcaccccgcgcgaagccatcggccggcgcgcggcggagcagttgctggcgctgatcgccggcaaggaggtgcgcgatagcgcgctggacatggggttcgagctgatggcgcgggagagcacctga

SEQ ID NO: 365436 - DNA, 705 bp, Pseudomonas aeruginosa
atgactaccatggctaatgctattcgtcggtacgtagagaccaagcccgaaggcgcaacatcccgcgacatcagggagcacataaacagtgcatatcaggaccagtggcgtcctggaacactgagtgcccacctttacgcctgcgtagtcaacaacccgaaatcgtacattcaccacaaatcggcggacaggttcctcttcaaggacagcaacgaacgattctacatctacgacgaagatacccacggtccaaatgtctgggagccagtacctctggaaactggcgaatcagacgagctgaacagcagcgatacgattgaacagctcgtagaggcatcgattagctttgagcgggacgtcgaagaacacttgatccgtaacctaagctcggtcgagaaagggctcgtatttgtcgacagacaagtccgcattgatgtgggccgcgtcgatatccttgccaaggacgcgaatgggcgacgagtagttatcgagctgaaggttggtgaggcaaaagaccccgcagttgggcaaatagctcgttaccttggctggtacgcccgccatgacggcacgcccccgcgcggactgctcattgcaagcgaatttccagaagccgtccgctacgcagcagaagcggtcaaaggcctatcactcgtacaatatagagttcaattcgctttcaatccaataacagtggaagactag

SEQ ID NO: 365437 - DNA, 225 bp, Pseudomonas aeruginosa
atgagccggcgctaccgactctccaaaccatttactaatagcctgttcgacttgcctgcgtggcagatactcctgctcaaggcgcccccgctcctgtgcaaggagataccgatagaaatcagcttcgtcggtcatcaatccttcgggagccaattcctgagctttagctggctcgacgaccgcgcttcccaaggagtgctggtcaaacagctcccggtccattag

SEQ ID NO: 365438 - DNA, 381 bp, Pseudomonas aeruginosa
atggagttccatgtacacggcgactatatgccgaccacagtggcgagggatttttactggcacttccatgtgcgcatgttcgagcgcctgaccggcaagccggcatccagcattctccgtgggctagaactggcccgagaaagtccccctgaccgtagtgcctgggacagcctgaaggtgccggtgcagttcgccttgccggtgagcgccatggtgtttcgcatggatatatgggaactgcccttatccggtgccaacccacgtttgctggccaacgtggaacggccgatcctgcaatacctcgcccagcaccgcatgccgcttccccttagtgccttacgcccccaactgtccgatcagttgccacccgtagttccctga

SEQ ID NO: 365439 - DNA, 390 bp, Pseudomonas aeruginosa
atgccgaccccttccttgcgtatcctgattgtcgaaagtgagcatctgcaatgcctgagtatcgagaagatgcttaaccaatgcggttatcaccggatatcccccgtttcctccttcgaggagttgctggcaatcgtcgagtgcgcgctcgagccttttgatctgttggtgatcaactgtgtgttgacggtcgatagtggtgtccgcctcgaggatttctgccgttattgcccaagcatccgccatgcgctgatttatgaaggcgtccccgggccgcatgtactgtccgaagaggcacccggccccatgatcagaaagctatccggtgttcctgatagcgaatccatcaaggacctgatgcgctgtatcgatcccgaggaccgttcctaa

SEQ ID NO: 365440 - DNA, 4500 bp, Pseudomonas aeruginosa
atggcaaacgtgtttgtgttcgacaaaaaaaatctgacccagaggttggttgccggtcctgagattgtgcttgagtccgcgtccgtcattgtgctcgaagtgtctagggcctcgatcaagcagatgacccgcagcgggcagtcgctggtggttcagtttgtcggaaaagaaaagctggtgataaagcatttctttgacaagttcgaagggcaggacaactccctgacgcttgatgagaacgggcagttggtcgaggtgaccaccagcgagtcgggcagcctgggtgagtcgttggtggtgagctataagccgcttcaacaaggggtggtcgaggcagcgggagaaaactctattctgggaaaaatgggcgcggcctttgacggtctttcaccactgggcaaaggattactgctgggtggttcagcactaggcatctttgctttgatccaaactggtagtaaaagtagttccagcaaacgcagtggcgtccctgcagtagccgataccaccgctcccgacgctccgctggttaaggtgagcactaagagcgatggctctcttgcggttatagggacttccgagccaggcagtagggtggactttactttccccgatgggtcgaagaagagtgtcactgttggtgctggcggcagtttcagttttgccagcgatgtgccacaacctaatggttcctatagagcaacagcaacagatgcggcgaataacaccagtaaacctgtgacgggcaattttgtggccgatctaacggccgataccaccgctcccactgcaccgaccggcttgacggcggtgacggaggcggatggcaaggtcaagatcagcggtaacgctgagccgaacagcctggtgaaggtcacgctaccggacggtactgtccaggaggtccaggcggacgccaacggtagttttgtgctgagcagcgacacgcctcagaagaacggcacgatctcggtgacggccaccgatgctgcgggcaatgtcagcccggcggcgaccgtgccctttacggcgaacaacaccattgacgtcaccgctcccactgcaccgaccggcttgacggcggtgacggaggcggatggcaaggtcaaggtcagcggtaacgctgagccgaacagcctggtgaaggtcacgctaccggacggtactgtccaggaggtccaggcggacgccaacggtagttttgtgctgagcagcgacacgcctcagaagaacggcacgatctcggtgacggccaccgatgctgcgggcaatgtcagcccggcggcgaccgtgccctttacggcgaacaacaccattgacgtcaccgctcccactgcaccgaccggcttgacggcggtgacggagtccaatggccgtgcaacgctcaagggcaaggcggaacccaatagtttggtcacggttacattcaccgatggctctcaggaagacgttcgagtgtcatcgagcggtgatttcaccttaaccagtgccgtggcgcagaacaccgccggtaacatcagcgtggtcgccaaagatgcggcaggcaatgtcagtactccggcaacgactgtatttacacctatccccgcacctgctgcgccggtgtttgcaccgaatgaggtgaccgatccgacgacaggtctggtgacgatcaccggcaccgcgcctgccaatatgaaggttcatctgaccttccctgacttgacggttaaggaagtcaccagcagtgccactggcgagttcagcgtcaccagtgacaaacctcaggaggccgggaacttcaccgcggtgacgatcaacgacaacggccgttcgagtgctgttgccaacggcatttatgagggcaacccgagtacggtctatgacctaaccgtgggcggctacatcgatgatgttccgccaggaccaaatggccggcctgaggggcaacaggcgactagcaaaccgaccaatgacccgacgcctactttattcgggacatccgccggggtcggcgtgactggcaaggtggttattcgggagggcagcattaaagtcgcggtggctcaagtggatgtgaccgggaaatggactgctacgctgcccgctgttacagacggcccgcacaattacatggtcgaggttgtcaacgcactgggggtaagtctaaagtcggtttcgaccagcctgaccattgatactcaagcgccgaattcgccgacaattaccgcaatcagcgttacccagcaagggggcacaacagaaactgctctgccattatcgggaggcagtaccagcgataacacgccaaccttgagtggcaccgcagagtctggttcaaccgtgatcctctataatattaacgctgatggccaggagagcgaaatcggcagggcggttgccaccgttagcggagcctggcagtacaccagcatgcacctatctaaccgtaagcatgagatttatgccaaggcacaggacgcagcatccaatctcagtggcaagtcgaatacggtgagcctcgatatcgccgggccgacagaagccccgaagaatgtttctgtagcagcaatctggtcagttgatggtgctggggatattgacggtgacggtttcgatgatgtggctgcaggcagttataactcaactggtggcggtatcctcggtggaagtgtcctcagggcagtaatgaggggagggcaagacatcgccacccaagggcccagcttttacaacaatcagtcaggtgtctgggtctatcaccaggctggtgtaggtgataccaacggtgatggtttcaacgacatagtctccatgtacggaaatacaagtggcacttccgatggggccgctcgccttttcttgggaggggccaatctggggccagtcgacttgatcactaccgcccggctgggtaattccacttttgtcgcctccgccggtgatctgaatggcgatggtctgatggatatagtaatcggcggacggggagcctatggacagatcacgccttcgagtatccgctttggttcaatgggaactgcaggaaccggtaccgtggagcaaaacttcgcattcggcgctgcgaacggtgtgaacaatgacaaccagaatgccgcattctggagcggtgcgcagtatgtgacctcggcaggcgattttaacggtgacggcataggggatatcgtcactgccagggggattacctttggtaaaaccacacaaggcgaaataagtaggtcagcgaacctattctggaaaactgcccctggctctacatggattgatcaggtccaggctgtcagcggtatcggcgatgccaatggtgatggatatgctgatgtggccgtgcaggacgggaaaagcgtgtatgtggtgttcggtggcccgcaggcctctaactcgcaaggcgatatccggctggaggccaactggttgcaggccaacaaccggggatttgccttggacacttcctgggtcagcactcaaccgacgacttacggcgatgttcgaggggtcggcgatatcaatggcgacggcctggctgactttgtctacaccacctatggcaatcgtctcaatggtggtactgattcaatagcgaatgctgcccaaggagacaccggaaactattccaactcgtacatcatctttggcaaggtaggtactgacaccctcgatgtgaaaaacatgagcgcgaagcaaggtatcatgattccgcgcgagcaggccgacggggcttcagtagccggtcgtatcgacctcaatggtgatgggcttgccgatatctacgtcggctcgtattccggcaatggcaaactttatatgggcggcgcgtctctcggggctgagccatctgtaatgccaatcaatggtgtggccataggggatcagaacagtaattttattgtcggtacggccggccaagacactgttttcggcaacggtggcacggacatcatttataccggcgcaggtgatgacaccatcgttctgaaccaggacaacttggcgcaactcgcggcgggtttcaatactgctgccgggatcactggtcgtcttgcacgggtcgatggtggtagtggcatcgataccctggcctttggtaaggatgtcacgacagtcgacctgaccacggtctccaatgcgggtctgggcaccatccagtcgggggtcggtctgtcacgcatcgccaatgtcgagaggattgacctgcgaggtagcaataaggccaagctgactctggaacttaaggacgtgatggatatgagtgcgggtttgagtacgttcaacaagcagaacttcagcagtggactggacgacagtgcgatcaagcgccatcagttggtgatcgatggttcttcggaaaatagtgtcgaggtgaaaaacagtaacgagtggctcaccgtcaaggccgcaactgtctattccggtgggcacggttacgatgtgtacaacagcgtaggtgacaataagggccaattgctcattgagcaaaccgtcaacgtagcctggagttga

SEQ ID NO: 365441 - DNA, 234 bp, Pseudomonas aeruginosa
atgctcggccgcagctaccagagtgtcgccagcaaggccgaggagctttccccgcacagcgggcgcgaccgcaacaatgcgatctggagcaagtccgaggaagatctgttgcgccagcactaccagcagcgcggctcgctatggtgcgcgcagcagaccggcaagacccgcgcagcggtattccaccgggccaagaagctgggcctgcaacggcagcggccgaaacacccgtga

SEQ ID NO: 365442 - DNA, 369 bp, Pseudomonas aeruginosa; identical to SEQ ID NO: 324023

SEQ ID NO: 365443 - DNA, 1092 bp, Pseudomonas aeruginosa; identical to SEQ ID NO: 324657

SEQ ID NO: 365444 - DNA, 363 bp, Pseudomonas aeruginosa
atgcgtgagctgggcctggttagcaagcaaccgggctcgcacgcctacaaacaggccatggttgagcggccggatatcccgaatcggctgaaccgcgaattcgcgaccgagcatcccaatcaggtgtggtgtggcgacatcacctacgtctgggcgcaaggccgttggcactacctggccgcggtgctggatctgcatacccggcgggtgatcggctgggcgttctcggccaagccggatgccgaactggtgatcaaggccctggacatggcctacgaacagcgcggcaagccacagcaggtgctgttccattcagaccagggcagccagggcggattcaaccggtcgtcgcaacacctttga

SEQ ID NO: 365445 - DNA, 372 bp, Pseudomonas aeruginosa
atgcgtgagctgggcctggtcagcaagcaaccgggctcgcacgcctacaaacaggccacggttgagcgtccggatatcccgaatcggctgaaccgcgaattcgcgaccgagcatcccaatcaggtgtggtgtggcgacatcacctacgtctgggcgcaaggccgttggcactacctggccgcggtgctggatctgcatatccggcgggtgatcggctgggcgttctcggccaagccggatgccgaactggtgatcaaggccctggacatggcctacgaacagcgcggcaagccacagcaggtgctgttccattcagaccagggcagccagggcagattcaaccggccgtcgcaacactgggttgctgaatag

SEQ ID NO: 365446 - DNA, 561 bp, Pseudomonas aeruginosa; identical to SEQ ID NO: 334497

SEQ ID NO: 365447 - DNA, 465 bp, Pseudomonas aeruginosa
atgagcaagcatccggagctttggcgtatcagccctttccctgatctcaagggtatcggaggaactctcgccgacggccgctggcactcgcgcgggcggcccgtggtctaccttagcgagcatcctgcgctcgcaatgctcgaaacgcttgtccatcttggaatggacccttccgagattccggacacattcaatctcctgcgcgtgcaggttccggatgaggccaagatcgagcgcgtccaggacctgccgaaggactggcgcgatcagttgcacgacacacgcaagagaggtgatcaatggatgcgagaaggagtgagcctactcttggcggtccccagcgcgacgatgcctttctctgaaaattacctgttcaacccccagcaccctcacgctgatgacgttgaacttaccgtcgaagagcacgaactggaccgcaggcttctgcgatcttatcttggctga

SEQ ID NO: 365448 - DNA, 423 bp, Pseudomonas aeruginosa
atgacaacagtgacaacagaaggcattcagagcgctaaccagcgcctcaaggccgttatccgcgaggccacgctacgcctcgatcaggctcaattcctcagcgtcaacgccgcgctcttgattcgatatggatgctgggcggcagcggttgcgtgctgcattgcagcagctcttgctggcgctgtggtgtcgttcatcgtgctgctggtcgccttgggggcatttctcggcgggcagcggctggtaaagatggccagagacaaggaggcggttcgagaagaacagaaggcgatccaggcgcaggcacgaaccctgctgaaggttgagcttcgcgccattcatgacgaataccaccgtcgaatagaagagggcaccgccgagcgtgacctcggcggcgaccagattcagtacgtaggtaattag

SEQ ID NO: 365449 - DNA, 588 bp, Pseudomonas aeruginosa
atgccaattacggtggctgagtcgccactgctcaaaatcattgagcatcctgcaaatcgctacgcgccaagcatcagcgcgaacgtgacagcggccgaccttaccgttgcgattgccatcgatttcacaacgcggggcgagcagtgcgccaagcagattgctgttgaaaggtacttcccgatcctgctggatggcgacgctgtggatgctgcaaggcttctgtatcgcgaggtgaaggctaggcgtgcaggcatcctcaacatcacaggcaatgaatcattcacgctcgctccgcttcgcgtctggacgcaggactgtctcaacgaatgggttggcgtgctgatcggtaaggtccaccagtacctaccgctggccggcatacggtcgtgcgggcagagcggcatcgaaagtgcggctgctgctgccggtgtggcgctcggactgccggtgacgatgctcctgccgcgaggcttactgaggcgtacgccgcacggcgaccgccgctgctacgagcacgagttgcgccaagagatcgaggatggcgcggcgacgttacgccccatcttggagagttacggaatcaaatga

SEQ ID NO: 365450 - DNA, 594 bp, Pseudomonas aeruginosa
atgaccgtaccagccatcaccagtctgctcgcggaaattccttccacggacctctttctaaaagagcttgatgacggccgccacgcggtgcagcactcggggggggcggtcttcctgtaccggaatacgcctgaaggcgtggcttacgccaagctggccgtggaagcgatgaaggcgctgaatcagcaaccaggtacagccacccggcatgctgcgatgtccgcagttgcgcccactgaactggctgagggcggcacgctgccgcagcagtttcagagcaagatcgaaggcgttctggcgctcaacccggcatttagctcagtgccagtgaaactgctgtccaaactcctctacgcagccattgcccccttggtaaacccggacagcctcgaacaagcttcggcttcgccggagcgagtggagccccggccaggagaccagtcaccagctgcgcaacggctggctggggtcgagagcttctgcgacttcctgctcacccacggcgaccagttctccatgccctccgaaagtgccttgctcgcatacgcgaacaactggaatgagagccagaacggagggcaggcagccgcatga

SEQ ID NO: 365451 - DNA, 171 bp, Pseudomonas aeruginosa
atgatcacactgagcgagcaggacgccggcctagtgcgtgacggcaagaagtggcagctacggctgccaatccatccgcaacctctgcatatcccgtcggcagacctattcggatctacgggcgaatcggtgatccgggaaccggcgggaggttggctgattgcgccatag

SEQ ID NO: 365452 - DNA, 243 bp, Pseudomonas aeruginosa
atgcccagcgagacttcaggcaccaatcaggttgtcaggcttcctgacgttgactccagcgatgccgtggaccgtgctctggccaacgaggactgccttcaaatcgctcgggcagatggtgtgcgcgaggcgctggaagcatacggccgggacccgagtgaagacacttcggttgcggtcatcaaagccctcgtccgggcgctcgcaactgatcctcaattcgcggtccagagcaatgggtga

SEQ ID NO: 365453 - DNA, 498 bp, Pseudomonas aeruginosa
gtggatattctggcagtacttacatcgagcggcatcaacctggttgaaggcgggagtcaggtgctcacacagctggccggtggtgaggctgcgttagtcgctgatgcaatgggataccgctacaggctctccactgatggcgctggcgcgtatctaaaacgagtatcagcgatcgtgcatgctgctggcgtggtcgagatcggcttgttgcgcagcaatggagtgcggcttaccgcgaaggctactgccgcagggcgcgtgctgctacgccaagtaggggagagggacatcgatctgacacgcttcggcacgctggatgcagcctggttggcttaccgggaagagcgttgggtaaagaaccacgaagaaggtgtggaggcggcgtacggagagtttctgtcgtcggccgtcgatctatcgctgccggaggtcttggatgctgccatttccggtgataaatggcctatcctttacggctatgtcgagatcatcgcttag

SEQ ID NO: 365454 - DNA, 858 bp, Pseudomonas aeruginosa
atgggtgaagtacagcttccgtcgatctggggagaacactctcaggcggtttttgagccagtcattgtgcgaggacgactggtcaccgtcttgatggacgttccggccgaatggaatgagaagctcctttcgttggactttaagcgatctggagcttcctgggtgcgcatcggagcgatggcccaagctgagtatcagttcctatcccccgaaatttcgcttgtcgcaatgcgggcggatcgagcgttcgattccacgaacgacgatcactatgaagccccagtgccagtcgatttagctgacgcggttcttcacctctggcagcgacagcgctctgccattggtacggcgttgctgatagagcaaggagagcaattcaccgatggagctatctggtcaaccatcgagacactgctcgatggtggccgcactcctgccgtcgatactctgctccgactgtccgcttcaaagctcgcctccctaggaaggcttacccctgaagccgaagcttacgccaaggcagcatcacaggaacttgaggtccatatgcccacggctatggtcgtcggcaagttacttgtagccaagggggaagccgtttcctggacagaaggaggagcgcataaggaaggccgtgctgcgtcagatttgaagtctggtgatcggggcttctgggcgtacgacggcgctccaatctatgtgggaggctacacggctcatccacccgtttggatcgctgccgaaaatctccgaacatctccccctgcgcccgctattcaaaatgctctccagcctgaggcgttggttgaggttgcccaagaagtggtggccccccttgcgcggcgttttgcaaggtag

SEQ ID NO: 365455 - DNA, 489 bp, Pseudomonas aeruginosa
atgcagcgtaccgtgctcggcgagcgctgcgcgggccaacccctggtgctgcactcggataacggtgcgccaatgaaatcagtgacgctgctgagcaagctgtacgaccttggcatcaccccgtcgcgcggacgaccccgtgtaagcaatgacaatccctactcggaatcgctgtttagaaccctgaaatactgcccgcaatggccgcaggatggctttgccgatttggaagccgcacgcagctgggtgcgcgactttatccgctggtacaaccatgaacaccgccatagccgcatccgcttcgtgaccccggcacagcgccatcgcggcgaggatcaagaagtactggccaagcgtcatgtgctgtaccagcaagcccgtcatagacaccctcatcgctggtcaggtgcaacgcgaaattggcaacctatcggcgccgtcacactcaacccagagagggagcagccggcagtgaaaatagcagcttaa

SEQ ID NO: 365456 - DNA, 612 bp, Pseudomonas aeruginosa
atgcacactcgtacgagaagttggccggctgactctctgaaattaggagaagacaagaggccagcgaccacgaaagcaaagagagccaagctaacagaaagagttgacgcgttagttattacccactcctggcattgcagggcggcgcgtacagcaaagcttggctcaaaagacctaaccgtgccggccatatttcttatcaaggtcggcacaaggatcaggaaaaaggcaatagaaatcaccagagcaccaaacattactgcaaatgggggaaggatacccctcataagtttgttgatttgctgctgggtctttgcagactcccacaactggtcgaaaacctcaaaaagctttcctgattcttctcccgcacggatggcagaaagctcattaggaccaaagatagatttaactgcgacatggaaagcaagacccttgttgctcacaagcttcgatgctgcaaagaattgtgttctccatttcggcaccatatttccggcctcacgaagaatctcatcagcccccagagaaccagttttgaaaaggttacggagcaggaaggatgcgtcacgcaggtccttcgttgttctgatgagacgatcattactttga

SEQ ID NO: 365457 - DNA, 498 bp, Pseudomonas aeruginosa
atggacatcttgaagacaacggtcgcgcttcttgccctcgccacaagcccagcctttgctaaggcagctgactggcactggaacgagtacggtgcatcctcctatagcgggcaagtggcgctgcgcgacgatcagggggcgtcagtgacctatcagcgctacagcgccggcagcacccctgcattattcggagctgtcagcgtccaaagccctttgatggtggtcgctggcaatgacatcaacttcgatatcgtttactcgggccaggcggtaaacaaaccgacttgcaacgcacctgaaaccccacgcgtcttcgtatcgcctgtgacggtgtgtaacttcggccagggcaacgcaatcgccgggatcaacgcatgggccgatcagaacgccactcagtacatcccgcgcttggcagtctggattcagggttataactggcgaaccttggactggactgaatgcggtcgcgtcgaagtcaagacgttctgcaagtaa

SEQ ID NO: 365458 - DNA, 399 bp, Pseudomonas aeruginosa
atgttcgactacccagtaaacgttcgccgtgagacaggaagcgtctggattagctctgacgatgtgcccgagatttctggagcaggagacgatgaagaggcggccatgctggatggcattgatgggcttgaatcagcactctgcttatacgtcgagcggaggctccccattcccatgccgtcgccgcccaaaaccagccaaagcattctgcggcttccagcgttgaccaaagctaaagcggcgctctggaacgaaatgctggctcaagtggtgagtaaggcaagcatggcccggcggttggacgtggaccgtccgcacgtaacccggctggtcaacatgcttcaccgatccaagattgagcatgtagaacgagcgctagcgattcttggaaagggatag

SEQ ID NO: 365459 - DNA, 399 bp, Pseudomonas aeruginosa
atgactatcaccgctcaagcacccgccctcagcttcaacaactggctcacctcagccgactttctgaacttcgccaaaaagatctgggcgcctgtcgtggattcgaacatcgaggcgatggagcgcaaggttgacgatctctacggcgcggcatgcgggcgctttccaacctatgacaccatggtgcacaacgccttctgtgcgagcatggatgacgagttcggcaccgatgagcatgccgagggagtggcagaagcgttcgcgtacgcccgcgaggcttatggctatatgtccgccagtgaaaacgaagcacagcggcaggaggacgcggataacggcctctgctggcacggcctggacgtaatgacctgcccttgcggttgtttcgagaacgattaa

SEQ ID NO: 365460 - DNA, 546 bp, Pseudomonas aeruginosa
atgtctgatgaacgctatgcgcgcctgcagcaggctcttatcgaatcggccaagcaacacctggtggaattgaccggggctttggcattgcccagtggggcagaccgcaatgaagggatttcttcggcctggtggcaactgaccggactgacccagctggttcactttgacagtggcttggatgaggcgaccaagcaggagctggtggccatcgaccagctggccatccaggccacaaccaaacctgcaaacaaggcattgatggccagcgaagcagacgccgatattgcggccgcattggctgatccaaccacttcttactggctcaaacacagcctgcagcaagcgctgccgcgtgatccagtggatgcggtcaatgatgcggaatggctttttgagttgctgaataaacgctgcgtggagcagctgcagcacgaagcgccaccgtcgatggaaatggaatttcgcagtgctaacggcactaccactcagatcgatatttcccaggttgcgccagtcatcgagctgggcggcttcaaagcctga

SEQ ID NO: 365461 - DNA, 693 bp, Pseudomonas aeruginosa
atgatgacaactatcaagaaactcggcttggcaatcgccgtttccgtggctatatccggccaggcctccgcaaccggtgtgcctactggtgacgctggcacctgggcggctctggcgcagaacctggctgtgctgcaacagcagtaccagacgctgaaagaccagtacgagacgcagggcaacatcctgaacaacctgcagggtgcatacggtcgcggcgcgattggcctgaacgagtcgattaactcggcctcggtcgtacctggctcttggcaagaggtggtgtctcggcagaacagcggcgcttacggaagcaagcagagctactacgagcagttgatcaacactttgccgcaggagctgttcaccgcaccggaaagcaatcgtgccaaggactaccagctcagttctaactcggttgtggctgcgctgtccgcaggtgatgcgctttacagcgaagtgcaggtccatctgaacaacttggccaccctgtcccagcaagtggacctgacgaccaacgccaaggatgctgccgacctgcagaaccgcatcgccactgaaaacggcatgttgacctcggcccaatcgaagctgcaggccctgaacatgaacctgcaagcgaacctggccaaccaggaaaaccaggctacggcacagaacgaacagttcttccgctggaaggacgaaaactga

SEQ ID NO: 365462 - DNA, 213 bp, Pseudomonas aeruginosa
atgaaagcgctctggctgatcctcaaggtaatcaccttcccggcatgggcaccgctctggttgacctggaagcttggcaagtttctgctggttctggtgctggtgtccgccgcctcgggttgcgtaaccaacagcggcaccatcgacaagtcgccatgcgcctgtgaattcaccccatttgtcatccagcacaaggagtcccgcaatgcgtaa

SEQ ID NO: 365463 - DNA, 393 bp, Pseudomonas aeruginosa
atgcgtaagttcttcaccctgaccaacatcatctgcgtgggcgtggtcggctttgcggcggcgtcgatcatctacgtcaatgtcaccaacatcaatttcagctctacgccggaggacgaagcggcgccggtagtcgaggtgcaaaccggcaatcctttgctgaaagcaaccaaagacgatgtagcaggctggttccctggcacctgctttgccgagatctacatgcaaaacccgtcgtacaacggcggtctggtgaaaggctgcatcgacaaaaccgcgcaggagatcaaggcccaaaccggagctgccttgagtgctgaggacttccggtcgcccgaagtgatctcccacttcaagaccgtatacggggccgggaatccatggcgcagctga

SEQ ID NO: 365464 - DNA, 864 bp, Pseudomonas aeruginosa
atggcgcagctgacgttacaaggcctggttggggccactgacgaagtaaccacttcctttgtcagtgaggtcttccccaacctggccagcatggtagagccgctggtatggactctggcggtgggctactgggtcgctttgggtctgcagatgtacaacggccatgtttcagtcaaaggctgggatatcgtcaagcgggccatgttgaccgccctggtgtttacctgcctgaactggtccgcaggcgggacggttctttatcaggcctggggcgcttggaccgaaagtatcgcgtcaaagatcatgagcggcggcgtaagcacgaactccatgctcgatgcgctttacgtcgatattggcaaggtcgccagtacgctgatgaatgtcagctggcggcaggcagcgatgatcttgatggggaccggcctgtttgtgctgaactgcatcctgtttatcgcggctgtgctgaacatgctgattgccaagtttggtgcagcaatcgtcatggcgatactaccgatcatgattggctttatcttctttgatgcggtgcgccagtgggcaatgaactggtttagcaagatgctgaacttctcattgatctacatcctgtcgattgctgttgtccgttttggttattccgtgttcggggatgcaatcaaagaagtggccgcaacggcaactgttacagatgccgccctgatcactgcgcagcaatggggccagttggtgattgttgagggtgtcatgatcatttgcatgctgcaggtgcgcggttgggcagcagcattgtcatcgggcgcggctgttggtggttcatcgctggtgctgatggcactgcgtactttaggggttcgtaaataa

SEQ ID NO: 365465 - DNA, 675 bp, Pseudomonas aeruginosa
atggacaaacaagacaagcaatttgataaggctgaaaaagcccgtcgtaagcgtgaagtcgaaggcaacaagacccgacaagagcgcaatcgctcgctgttcttccaaggggtgcaggctatcgcgatcctggggcttggcttcgccgtggcaagcctggcgaattccaagacctatattccagtggttacggtactgggagctgacggcgaggttctgaaacagcgtgttatcgatcaagataacgtcgatcaggagcaggcgattatcgagaaaaccctgttcgacatgatccgcgcctgtgaaacctttgaccccaaacgcaagcagcagctgtcggatacctgtcatacctaccagacgcagcaagtcgccagggaatatgaggaagtcaccaatccagagaacccacaaaacccctatgttctgctgggtgaaaacgattggatcgaagggcagccgtacttgatgaacaaagttggtgatgaatatcaagttgcgttcaagtcgattacgcataaatggggagacaaggaaccggtagaacgtcgttaccttgcaaccatcaagattgcgcatactttggtaccccgtgcccttggggatcgttgggagaacccttttggcacgctggccactgtgtatcgcaagagcgaagaactgagccgccggtaa

SEQ ID NO: 365466 - DNA, 786 bp, Pseudomonas aeruginosa
atgaaaaaacagtttgttttgccgactgctattgctttgagtttgtctctttgcgcatttagcacccatgccgcgaagttgccgaagccgctttccagtgataatcgcgtaaaacaagtgccgtacgatcccaaccaggtttatgagttggtgggcacttatggctaccagacttccatcgagtttgaagctgatgaaatggtgaaggtcgtggccctgggcgacaccatcgcctggcagagcatgccatttcgcaaccgtgtgtttctcaagccggtagaagacaacgccgacaccaacatgacggtgatcacctccaagcgtacctactacttccagctgaacagcaccaaggtcaagtcgggccagtcgtacctggtgcgattcgtttacccgaacgctcgcatcacctcgtacaaccccgagggggaaacccctgctggcagtaccccggtcaccagctcgggcactccggcatcgccgaacatcaattacggctactcgggggacaaggaagccatcggcgtgcagggtgtgatggacgacggtcagttcaccaagttcctgatcaagaaaggcgccgatctgccgcagttctaccgcgtactgccggatggtaccgaggcgatggtcgatgctcgccgtgaaggtgagtacatggtcgtcaagcgcctggccagcatgttcgtcttgcgcagtggtaatgcctacgtctgcgttgaaaacctggccaatccctacaagcgcaccgtaacccgtggtgcccgtgacggcgggggggcataa

SEQ ID NO: 365467 - DNA, 1263 bp, Pseudomonas aeruginosa
atggccaccgaacctactcaacctcaagaaaagacccgtgacgaagagatccgcgagtggaacgagtccaactcgatgctcaagggcaaggcaggcaacagcaagcgcagtggtattgccattgcggtagccgcagtggtcgcctgtggcttcgcgtacatggttacccatggcgatgacgaaaccgagaataaagacacgctgaaaaaagaagaactggtcgcggccagcccgcgcaaagtgatggatccgccacctcgtcgggaggctgcgaaggtcgcgccggtgagcaatgagccgggcgcgccggcagatacgccacgttcggtcgttgaccggcagcagcaaggcgccgtgagcgatgaagaacgacgccggcagcagctggaaatgcaggcccaactggagcgggagaaaatgctcgcggcacggcagcgctcggccattttcgcgacggccaaggacgaaggttttgaccaaggggcagggcagggcgccgatggccagcaggccaacggtggctctctactgggtggcggtggtcgttcttcacaaggcccgatgaatgcaaacgatgctttcgccgcgtctacctacagcgatagcgtgccgttcaccgaagcccgtgtgatggagaacctgggatacaaagtgctgcagggggctgtcatcgaggcaaccctgcagccccgcgctcaaagccaactgcctggtcaaatctgcgcgtcgattgcacaggatgtatacgccgccgaagggcgccgggtaatgctcccgtggggttccttggtgtgtgggagctacaacgccagcttgaagccgggccaagagcgcttgtttaccatctggaactttgtgcgaatcccgcgcctggacgggcgccctccgatggaaatcccgctcaacagtgccggtaccgaccagttgggtaccgctggccagggtggcgtggtcgacaaccactgggcgcagattttcggtgtcgcggctgcggtatcgatcatcggcgccggtgcctcgaacagcggtgtttcgtcgagcgatcaggagaattcctcgtcccgctaccgcagcgaagtacaggaagccgccgccgattcggcacagaccattttgggccgctacgccaacattcagccgaccgtgactgtcccgcatggctcgcgtgtcgtgatttatctgcagcgcgacctggactttaccaaggcattcgccaagcaggccgaacgcgccgaaagcggcggcgttaccttcatcaactga

SEQ ID NO: 365468 - DNA, 1035 bp, Pseudomonas aeruginosa
atgtctgagattgcatcctttcgcacaaaactgggtccgcttgctggcatgttggatgacccggaagtgacagagatcgctatcaacggtccagacaacgtatgggccggctaccgcagtagccggttcatgcgtccggttccggttcaaggtgtaacgcttcccctgatcaaatcgctggccagcctgattgccgcccacactgaccaggaagtgagcgcctacacgccaatcctgtcggggcgtatcccaatcaatctggacgacaacgtgccggacaacgagcggggcgactaccgcgtccagatcgtcctggccccggctgttgagcagcacatcggcggtatcgtctgtatccgtaaaccagggcggaagcaaatcactctcgatcaatacgaggcttccggtgctttcgacttcatcaaccagccacgtgatcatggccagtacagcgatgatcacctggttgaactgtatcgggccaagcgctggaaagagttcttcaagggcatcgtcaaggcgcgcaagaacatcatggtttctgccggtaccaatgccggcaaaaccactttcctcaacgagttgctgcagcatgtggacggcaacaatggcgagcgagtaatcaccattgaggacacccgcgaactgcgcccagcgggcgggaacgtggtgaacctgatctattcgcgaggtggccagggcaaggcccgtgttacgccattcgatcacctggaatcgattcttcgcctgaccccagaccgggcaattatgggcgagctgcgtggcggcgaggcgttccccttccttgaactgatgaacaccggtcacagcggcacgatgagttctatccacgccgactcgccggatctcatgttcgaccgcctggcatcaatggcatcgcgtggcggtgctgacatgagcaaaaaccagctgatcgagttctcccggcatctgatcgatgtcgttatccagtgggaatacggcttcgatggccgacgcatcatcacggaggttcactatgcgaaagctgcctaa

SEQ ID NO: 365469 - DNA, 918 bp, Pseudomonas aeruginosa
atgcgaaagctgcctaagttcaccctggcgctgctggccagtgtctgcgcgtctgccatggttcatgccgaagatgcacagccgacccggttttccgaacttgccgccaagtgcgcgccgaccgttcacccgtccacgctcaaggcgttgatcggcaacgagtctaccttcaacccttacgcaatcggcgtggttggcactcacctgcagcggcaaccgcagtccttgagcgaagccatcgccactgccgagcagttggaacgggacggcaagcgttatgccatgggccttggccagttgctagtcaccaacatgcgtgcacgcgggctgagctatcaggatgtgttcgagccatgccgcaacttgcaggccatcagcaacttgctggtggagtattacaagcaggcgcttacgaccagtagcgacaagcaagaggcgctgttgaaggccttttcgatgtactacagcggcaacgagctgcgtggcttccgcccggatcgacctggcgaaatgtcttacgtcgagaaagtggttcaccgcgccctgaaccccactgctgaggatccgattgtgccggctgtagagggtgcagaaggcgctgagccgatttccgtggttgcagctagcgcccctgcccgaaaagcgccgcagcgcgctcgtagggcctctgaacagcaggaaggtccatggctgaccttcactgacgacaatggtcaagccgttgctgccgcgaagactgagacggccagcaagccgcagatccaagtccacctcaacaccgatgccgaggctgatattccgaagcgggaattcaagcgcttcgatcaacctgcgccacaacactttgaacaagccgaggcgcagcctgttgccgaacagcagcaagccaccccgtcatttgtccagatcatcaattga

SEQ ID NO: 365470 - DNA, 336 bp, Pseudomonas aeruginosa
atgcgcaccccaatcatgactttcctcgctgcgctggcatttgccggtaccgtgcaggcgaatgaattgccgcagccaccaactaattacgactacggctctaaaagcgattcagaagcttgtggggccaccctgtgtctgctgggcatgatccgcgacggtgattgtgacaagtacgtcaccaagtacttcagcatcattcgaacgaaaaaaggaaaattcagcccgtccagaactgccgaggctcggggtgactttgttgcccaatgtgctgaggaccaggaccgtgctaaagcggccaatgacaaatgggggaccgtacaacgtggcttctaa

SEQ ID NO: 365471 - DNA, 375 bp, Pseudomonas aeruginosa
atgctgaccagccccgatgtgaccaaggccttgatctcggccaaacagcgcggtgtcgatgtggcggtggtggctgaccatcaaggcaatctgcaaggcggcgctgcccgcgctggccaacatgcgctgacattgctggcccgtgccggcatcccaacccgtacggtgaaggcctacgcgatccaccatgacaagttcatggtgattgacggcaaggcagttgaaaccggcagctacaactacaccgctgcagctgccagaaacaatagtgagaacgcattggtcgtctggaacgacgccgatctcgctgagcagtacctgaaccactggcagagccggtgggagaagggccaagcattcaaaccaagctactga

SEQ ID NO: 365472 - DNA, 633 bp, Pseudomonas aeruginosa
atggacaagcaaactgatcagaccaccacttaccagctgttccaaaagggcagggaaccggaaacgttcaccgacgcaaagctggcgggcgcagcctggttcaaggccgagctgtccgacaaatccgtgatgactgttcaacagggcgggcaagccgcccgtgtctttgcgcaggttggcaaggagggcacgcagtattacaaggatctgcccttcgacaatatgccaggcgctgcagacttcaaagcctcgttcaaggatgcgctggagctgcgcaaggctgagcaatccggcgcggcctctggtaaacccggtgaagcgatggcaatttccaagccaatggatatgccggccatcaaggcagctgagcagggtaagacctacgacggcaagatagtcgccttccacaacaaccaggtgattcaggccgtcactgacggacagaagactatccatattgcccatgagcgagcggccttgagcagtgccaaggctgggttgttgcaccagggcaaggatctgtcgattcgttaccccttctcgggcgttggcatcgtgcaagaacgccagctgcagcacgaactaaaaaccccctcacatcaaccgaaaggctacggcggcaaaggtttttga

SEQ ID NO: 365473 - DNA, 2937 bp, Pseudomonas aeruginosa
atgttcaacgtgacgctgatcaagggtgacaaccagtacgcggcggcgggctacttttccaacgccgatgactactacgccaaggaagcccccggcgagtggcaaggtatcggggccgagttgctgggtttggaggggcctatcgaccagaaggaactggcccgtctgttcgacggcaagctcccgaatggcgaacgaatggctaagaccttcgacaaggaaacaggctcccgtcgcatgggcttagacctaacgttctcggcgcctaagtccgtctccatgcaggcgctgatcgccggcgacaaggatgtgatggcagcgcacgaccgcgcagtgaccaagagcatggaggaagtcgagcgcctggcccaaacacgattgaaggtgaacggcaaaaccatgctcgagcgctcgggcaacctggtgataggcaagtttcgtcatgaaatgagccgggccaaggatccgcagatgcacacgcatgccgtggtcatgaacatgaccaggcggtcggatggcaaatggcgcgctttgcgcaacgacgatatctacaaaatccagccgcaagtcgatgccatgtacaagggcatccttgcccaggaactgcgtgcgctgggatatgagatccgggttctggataaccagggcaacttcgagctggcccacatatcgcgtgaccagatcgaggcgttttccagccgttccaaagtgatcgaagacgcgctggccaaggacggaaaaacccgcgccgatgccaccccgctcgaaaagcagatcattgcgatggccacacggccacgcaaggacgagcgcgaccgccacctggtcaaagaatattgggtaaccaaagcccgcgagctgggcattgattttggcgctcgcagccacctggacaatcgtgaatacgcgcctcgcaagggcagccctgcagaatacagcctgcccgaaggcatcacgccagggcaggccgttgtccagtacgccatcaatcacctgaccgaacgtgagcaagtagtcggggaaaatgacctgcgcaccgtcgccttgcgacgtgctgtcggccttgctacccctgatcaggtaaacgaggaaatcaagcgcctggtcaagcaagggacgctgatcgaatcaccgccgacctaccgcatgcccaacggcgacttagattcgccggtactgtcgcctgctggctggcgggcacacctgcaggagctgaaaggctggagtgagaaacaggcccgtcagtatgtggacaaggctatcaagcgcggctcgctagagcctgcagaaaagcgctatacgacgcagaaggccttgaagcgcgagaaagccattctggctatcgagcggacaggccgtggccaggtcaccccgttgatgaccaaggaacaggtggccaaggcgctggaagggtccaccttgtcggctggccaataccaggccgttgaggtgatcgtcagcaccaacaatcgatttgtaggcatccagggtgatgcgggtaccggcaaaacctactcggtagaccgtgccgtcaaactgatcgattccgtgaacgccgcgatggccagccgggattcccaaccgggatcagggtacagagttgttgccctggctccgtacggcaaccaggtcaccgccttgaagaacgaagggttggatgcgcacacgctggccagcttcttccacaccaagaacaaggggttggatgccaagaccatcgttattctcgatgaggccggcgtggtgggcgcccgccagatggaacggctgatgcgggagatcgagcaatccggcgcccgcttgatccagctgggtgacaccaagcaaaccgaggccatcgaggcaggcaagccatttgctcagctgcagcaaaacggcatgcagaccgcacgtatcaaggagatccagcggcagaaggatcccgagttgaaactggcagtgcagcatgcggccgaggggaagcccaccaagtccctggatcacctgaaacacgttgaagaattgcgaactgccactgagcggcaccaggccattgtccgcgactacatggcactaacccccgaccaacgcaaagaggtgttgatcgttgccggcaccaacaaggaccggaaggaaatcaaccagatggcccgccaggcactcgggctgctggggaagggtaaacagttcgaaacgttgaaccgggtcgattccactgatgcagaacggcggtacgcccccagctacaagcagggcatgatcattcagccggaaaaggactataagcgggctggcctggtacgaggcgagttgtatgtagttgaccaggcgctgcccggtaatgtgcttgtggtcaaggatcgtagcggcaaccgctacgagttcaacccgagacaggccaccaagctcagtgtctacaagctggagaaacccgagctgtctgtgggtgacctcattcgcatcaaccgccaggatcccaagctcgacctcaccaacggcgaccgcatgcgcgtagtcagcatcgagggcggcgtggtgcagctggcttcgctcaaggagatcaacggccagcccgaacgcaccgtgagcttgccgaccaacaagccgttgcacctggaacatgcctattccgcgaccgtccacagcgctcagggtctgaccaatgatcgcgtcatgatctcgctcaacaccaagagccgcaccacctcgcagaacctttggtatgtggccatcagccgggcacggcatgaagcccgcgtctatgcggactccatcaaagatctgccggcagcaatcgccaagcgctacgacaaaaccacggcgttgtcgctacagcaagaacgcgagcggcagcgtagggagtcgattcaaccgcggaatgttgcggacggccaggcgctggagcgcaagcaacgtactcacttggaaggcccgagcagcgggcatcccaggatgtga

SEQ ID NO: 365474 - DNA, 1551 bp, Pseudomonas aeruginosa
atgcacaaacaagaggttgattcagccgccatgacggcgggctttggtttgccgatcgctggctggctggccggtacacaattggcccagctgcccctggccccattcccggcagcattcaaagagactctgcacaacggctggcaggaacctatggtgctgggcatgaccatcgctgcgtccgtcgcggctgccgggctctgctattacctgtacgaatattgcgacgacgggttccgaggtgaacgtttccagcaatggctgcgtggctcgcggatccgcaactggcatttcgtggaacggaaagtaagtgcccgcaatgccaagaccaaccgtgaacgccgcaaaaaagggcaggaaaaggccgagccaatcatgatcggcaagctgccgatgcctctgcacttggaagaccgcaacacaatgatctgtgcatccatcggcgccggtaagtccgtgacgatggaaggcatgattgcctcggcacttcgacgcaatgaccgcatggcagtggtcgacccgaacggtacgttttattcaaagttcagtttcaagggcgattacatcctcaatccgttcgacgctcgatccgcagggtggacgatcttcaacgagatccgtggcgtccacgatttcaaccggatggccaagtcgatcattccgccgcaggtggaccccagtgatgagcagtggtgcgcgtacgcaagagacgtgctttccgacaccatgcgcaagctgatggagacaaacaacgccaatcaggacacgctggtaaacctgctggttcgtgaagacggcgacaccatccgagctttcctggcaaataccgactccgaaggctatttccgcgataacgcggaaaaggccatcgccagcatccagttcatgatgaacaagtacatccggcccttgcgctacatgggcaaaggcgacttttccatctatcgctgggtgaatgatcccgacgccggcaacctgtttatcacttggcgggaagacatgcgcgacaccatgcgcccgctggtggccacctggatcgacaccatctgcgcaaccatcctcagctctgaaccgatgacaggtaagcgtctctggctgttcctcgatgaactgcagtcgctgggcaagctggaaagctttgttcctgcagcgaccaaggggcggaaacacggcctgcgcatggtcggcagtctgcaggactggtcccagctcaacgccagctatggccgcgacgatgccgaaaccctgctttcctgcttccgtaactacgtcatcttggcagcggcgaacgccaagaacgccgatatggccaaggagattttgggcaaccaagaggtcaagcgcttccgtaagtcgtggaccgcagggcggatgacacgtgccgaggaaatcaagcttgaaccggtcgtgatggattcggagatctcgaacctcaatgacttggaagcctacgtcaagtttgccgaggacttccccattaccaagatcaagacgccttacgtcgattacaaagagcgggcgccggcaatcgtcattggccaagcagcttga

SEQ ID NO: 365475 - DNA, 384 bp, Pseudomonas aeruginosa
gtgggcaaaacagtacccattcgattcaacgacgagcagctgtccagggttgaagaagcagcagcactcgctggctataagcacctatcgagctacatccgcgaccgggtgctggccacagacaaaggtggccggcaggtggatatggacagctgggccgagcagcaacagatccttggcttgctcgaaaccatcacccaggaacaggcacggagcagaaccattcaggccatcgtggtctatctgctgcgtcaaggaacggcacagggcaaggtcaatgagctgcgcgctcaactcaagcacctggtcagcagcgaggatgcactcgcagcacttttgcccgacctggccgaggacattgaacgtctatcaggagaggactga

SEQ ID NO: 365476 - DNA, 720 bp, Pseudomonas aeruginosa
atgagaaccgtcaccgtgaatttcaccggcaactccggtaaaaccacactctccgataacctgctttggccccgtatcggcggtctgcggtttgcaattgaaaccatcaacgccggtgcgtcggacaccgcagccgaaattgaacgcctcaagggcaagcagtttggcgaactgtccgaggtactgctgaccgaggacaaggttgtggtcgacgttggcgcatccaacgttgaagacttcttcaagttcatgggccagtacgacggctcccacgaagatatcgattacttcctggtgccggcagtaccggagaaaaagcagcaggtcgataccatcaacaccatcaagaccctggccgcgctcggcgtgccggcaaaaaagatcctggtcgtcttcaacaaggtccagatcgatgatgccgacgatatcccgcagacgttcgcggcgctgttcggcttccacgaagtcgagaagaaattcaccctcaagcgcgatgccgtggtgtacgcgaacgagattttcgagcgcttgcgcccgctgaaaatgaatgtcacgcaggtactggaggactccacggactatcgcgcccagttgcgcgatgccaaggacgaaaccgagaaggatcacgcgcttcgcatgatctccgcgcagcgcctggccaagtcggcatcgcgcaaccttgatcaggtgtatgcctcgctgttcggcaaggggaagtga

SEQ ID NO: 365477 - DNA, 135 bp, Pseudomonas aeruginosa
atgcctaccagacttgaaagcaagaccgcgaagggcgtagccctgtggatcgatcaggacgcccaagcccagcccatgctgggctgcggcgttagagggggtcgcatcggcgtccaccaccaatcgaaggaatga

SEQ ID NO: 365478 - DNA, 219 bp, Pseudomonas aeruginosa
atgcgcagcaaggatcaagaatttacagtcggtaaaggacagcagatgtggggcggaaagtcccattacccggatctcattcgtttgattattccgaaggatcaagcgcttgccctggctcaacagattctgcgtgagctggagcacgtcaagccggaccaaacccacttgggcgaaatcgcgcttttcggccagcttgaagaatttgacgacgagtaa

SEQ ID NO: 365479 - DNA, 534 bp, Pseudomonas aeruginosa
atgcccctacatgaagccaaccaggctgagtttgatgaactgcattcgcatatccacgaggcgatccacgccgaccatgaaacccggtggatgcaaactgtcggcggcttcgggtcgctctgccaacctgagttcggcatgttcgtaaagaccggcccgcatggtggatcacttcgcggctcaatcggttgggtcgcacaggtgcgttacaagcagggccagttcggttcggacaactacatcttgtgtcacgcgggtaacggcggatggctgatgcagcactcaaataacgtgttctacccgctcacccccgcggaggtagagcaagtgcgcccgtactttgcggattgcttgccggagagtgagactttccctactggcatcaccctcggtagcgaggagacacgcgcagtaggtttcctcatcgatccgccagagggctttgagacacgcggcggcgaaggggcacggatgcggatgaccatcatcggggccgatggcaacaaggccgttactgacaccgtattcatctag

SEQ ID NO: 365480 - DNA, 150 bp, Pseudomonas aeruginosa
atggccggaatttcgaagcaaggctgcgtcaagttggcccgtcaccatggccgtgaactggttcgcgctcgtaagagcaatcagtggagcatggtgctgcactcgcggctcatgcgtgacagctacatggctgatgcccgcgcccagtaa

SEQ ID NO: 365481 - DNA, 318 bp, Pseudomonas aeruginosa
atggaaaagactatttccccgaaccaaaccaaggcgcttttcgcctggggctggctcctgtggattggctgcgcattttggctggcccgattcccgtggacagataacgctgaactgagcctaaagggtcttgcattcctgatcctcctgcccaaggccattcaagggttcttctataccatcaccccgaagcagaacagattcagcgatggctacacggacaaacacaagcggttgcccttgtatacggcgcttgctgcgggtatcggcctttggttcgctgtaaccggcgtgtacgacctggccaactccctctga

SEQ ID NO: 365482 - DNA, 222 bp, Pseudomonas aeruginosa
atgaacacggacctgatcgtcaaacgcattttgctcacccccgttgcagccgggtttgggtggatcgttgcaaccatgattgtgatcggcctgaaactggccctccctacccttcttccgattgcctggactgagcgcattggcccattaggcgccgttgtcggcatcgtcattttttactggatgacctggaatgaaggtcgcccggacaagcgaggctga

SEQ ID NO: 365483 - DNA, 321 bp, Pseudomonas aeruginosa
atgatcgctttaacgtcgaaaaagaagggggtcatacgcgcatgcgcatgggctgcctggctcggcctagctgcttggatcgccaccaagtcgccctacgctgggcctgctggtttcgattgggcctggttcgcgttgatgggccttttccccaaattcctccagggtgatatcccgccgatatggccggagagcggggccgaagtcacccccgatcaacaacgtcggtggatttacgggctgctgaccttggcggttttcgcgtgggtgatggcgcgtgattcgaaagtgatagatctcatcgccacacttatcggataa

SEQ ID NO: 365484 - DNA, 369 bp, Pseudomonas aeruginosa
atgagcgcctatatcctgaatcgttttcacatctccgccatcctcatgttcacctgcaacggcaagccggatgcaaccacctaccagctccttgccgataaaggccagcagctgcttgacgaaaacatccgatccgtacgcacgcgctaccctcgcgaaacgttcaagggcgagctgttcggcctggatgaaactgtccccaagcccaccccgctcgaagccctcaagctcatccagtgcctggaatatcagtccaatcaaaaccccgactattacgcgacccaggcatttcgcaccctgcatgaaattcgccgcgtagcgcagtccaagctgccgggctgggatcaggcgagctgggatctggtctga

SEQ ID NO: 365485 - DNA, 219 bp, Pseudomonas aeruginosa
atgactacataccgtgtcgtatgggccgttgatatcgacgttgacggcgatcatcgagcagccgcagaggcgtgcgcacgccactacttccagccgcgaattgcagatggcgatcccgacagcgcatgcgtgttcaaagtgacgggaccagacaacaagcccgccgaggtcgacctggtgccgagcttgtgcgatctcattggtgacgacaccgagtaa

SEQ ID NO: 365486 - DNA, 441 bp, Pseudomonas aeruginosa
atggacgaacgaacggaacagcaactgaccgattatctcgataccctgttgtggctggagaccgcctccgtggccgagatcgaaggtgccttatccacggcctccgccactgtacgtgaggacctggagctgggcattcagtgcatgatggactcagaccgtcccggcttggccaactactttcccaacctggtcagtcggcccacttcgctgtcagtcatccgccaaaaattctcagctgtcgcactggctatggatcagcttgaggactcgatgcgccggcgacaaacggatcctacctatccgttaatgggttatggcgcggttcttggtacgttggccaagttgcaatacctgaacaaaatcacaccatcgcagcgggagttgctgctcagcgaactggctagcctcaaagctggcggcatgcgtctggacaattaa

SEQ ID NO: 365487 - DNA, 258 bp, Pseudomonas aeruginosa
atgaaccgcatggctaaacgtcggaatcggttacccgtgatcctctgcgtagctgggggcattctcattttcgtggttgaaatgttttcgtcctggcacatgaccgaacggcgcgtagcgcgaaagaaccaggagaaggctcggtatctgcaggagcattcgccgccaaaaccagccaatacgcacctagaggtattcatgccgccaggggcttcgcacaatacctcacacaccatcaaggaagcggtttcgccttga

SEQ ID NO: 365488 - DNA, 378 bp, Pseudomonas aeruginosa; identical to SEQ ID NO: 331870

SEQ ID NO: 365489 - DNA, 336 bp, Pseudomonas aeruginosa; identical to SEQ ID NO: 239731

SEQ ID NO: 365490 - DNA, 381 bp, Pseudomonas aeruginosa
atgacgtcgaaagagaaaaaaacggcctggtgcatcgcgatcactttcgccgacgaagagaacaacggtttcgtcaccctcggcggcgctggttgggaatcgcaaaccgagtgggaatcgcagtgggcccagttgccggagtcaccgctcggcgagcaagatccggcgaacctgatcgccgacaagctggatcaggatggtgaccggatcgatgaaaagttcatcaccgccgaaacggctgaatacctgctggggcgcccgctggccgagttgatcgccgaaggcagggccaacactccgttcaccctgcgccaggccctggagcgtgaccccgagctggcagcagaattccctcgcctcgcagccagcctgaaaggttga

SEQ ID NO: 365491 - DNA, 195 bp, Pseudomonas aeruginosa
atgagctttgcagcgaactctcaagtaatttggaccagcaccgaagccgccggcaagggacctatccctgtcaaagtcgtcggccctacctacccgagcgagtacgaccacgccgaagttggccagatgtatgacatcgagctgccggatgggtcgagttactccgcctttgaagacgagctgacgactgaatag

SEQ ID NO: 365492 - DNA, 672 bp, Pseudomonas aeruginosa
atgaatacccgacgcgccacctcgcttcgccccggccagttcaaacatcttcttcgtgtcgcctccgtaactggccgcatgccagtgcgggacgtgatgcttttgtgggtgactcacaccacaggcattcgtgtgaccgaactcgcgctgcttgaggtgggcgatttgctctatccgagtggagcgatcaagcccgaggtctacttgcgcgccgagataacgaaagggtgtcgtgcgcgcaacattcacctgacccatgccaagtgcattgctgccattgaggcgtggattgctgttcggctggagcgcgcttggggtatcagttccgaggccgagtatcgcggtcttcgtccagacagccgcttggtgatgacgcacaaagggcaagcatttgaacttgcgtttaagcaccgcatgcttgactcagggccagaggtctatcgggcctgtgacgctctacagcagacaatgacgcgcctctacaaacaggcggggatcaagggtggcagcagtcactcaggccggcgaatgctggccgccagggtacttgcagcaaccggcgatgtggacaccgtgcaggccattcttggccatcagtgcctcgatcacagcaagccatacctcagcattgaccagggcgttattcggcgtgcttttgaaattgccctttag

SEQ ID NO: 365493 - DNA, 483 bp, Pseudomonas aeruginosa
ttgttcgactcgatgtcggccttcctgatcgagtacgccaccacaaaccgcctatcgatcaaccaacagggcgattgggtcaggggtgaggggcgaacgctctacatcggctctaaggactcgccagtccgtctggtcctctacgagaagggctacgagcagggcggtgatgctccgcgcgattgggtgcgcctagaggtcagggtcaggccgaaacgcgagcacagggccattgtgtcccgctgggatgcctcccagctgttcactgctggatgggttcatggtgcccttgaggcgatggggtgggatgacctcaacgctcgctccgcagtcggtacggtctggcgcaaggatgacgaggcaagggcgcgcgctgcgcttgtccggcagtacggcgcaatcctcgcacgttgggccgatgaggtcggggactgggactctctcggcggggcaatccgtgccgagatcgaagcactcgcctag

SEQ ID NO: 365494 - DNA, 348 bp, Pseudomonas aeruginosa
gtgcctggagacaagaacaacaccgatgactggcccgctgaagccaagttcgcagcggtattgcatgcggccaccctgagcgagatcgagctcagcgaatactgccgcagcaaaggtttgtaccccgagcaaatcagcgcgtggcgtcaagcctgcattacgggccagatgtccgctaaagcgcagctcaaggcagagcgagatcaagcacgtgccgacaagaaacgcattaccgaactggagcgcgagttgcggcgcaaggacaaggcgctggcggaaaccgccgccatattggtactgagaaaaaagatgaatgccttctggggaaacgacagcgaggacgtttga

SEQ ID NO: 365495 - DNA, 330 bp, Pseudomonas aeruginosa
atgccacgtcgttcgattctttccgtcgccgagcgggaaagcttactggcgttgccagactccaaagatgacctgattcgtcactactctttcagcgacgccgatctgaccctcattagtcaacggcgcgggtctgcgaatcggctgggcttcgctgtacaactctgttacatgcgctatcccggcgtaacgcttgcggtggatgaagaaccattcgcgccattgctgcgtttggtggccacgcagttgaaggtgccgcctgaagcatgggcggattatgggcaacgcgccgagaccccccggtgtcaggctagttgtcgcctgagctga

SEQ ID NO: 365496 - DNA, 252 bp, Pseudomonas aeruginosa
atgcgactttttggttatgcccgcgtctccaccagtcaacagtcccttgatgtacagataaaggcgctcaaggctgaaaacgtcagagcaacccgaatttttaccgacaaggtatctggcagtcacgtgaaccgcgaaggcctaaggatgctccggctcaaggtcgaagaaggtgatgtggtcctggtaaaaaaactcgaccggctcggtcgcgataccgcggacatgatccagctcattaaggggatgtaa

SEQ ID NO: 365497 - DNA, 243 bp, Pseudomonas aeruginosa
atgaaagacagatcgcacgacacggcgatggctgagtgcttccgcgccgatccgccctatgtagcagagctgctgaccgaggtccgccgcgagggcaacccggccgagctagccattctgttgcgacagatggccacggcttcggtagatgttgcgggactggatgacgccgaaacgggctgggcgagtagggcagattttcaggaagctatgggggccctacgtcaagcatgtggccaatga

SEQ ID NO: 365498 - DNA, 393 bp, Pseudomonas aeruginosa
gtggtttggcggctggatcgtctcggacgcagcctgcccgacctggtgcagatagtggcagaacttgagaagcgcggcgtgtatttcgagagtttgaccgagaagattgagacgggcagcgcgtcgggcaagctgcaatttcatgtgttcgccgcgcttgccgagttcgagcgcggcttgatccgtgagcggacgcaagctgggctggcagcagcccgcgcccgaggccgggccggtggccgcaagccgaaactagacgacaagcagatacgccacatcaaggcgctattgcgcgatccgaacacctgtgtggccgaactcgcccgagattacggcgtgtcacggacaacgatttacaagcattgcggtgtggtgctgccgcatcacgattaa

SEQ ID NO: 365499 - DNA, 903 bp, Pseudomonas aeruginosa
atgccaaaacccaaagccgacgcgccgtctggcgttgagcgaatccagcgccctgagctgcttaccttgcgcggctcaacgctttttgagggggacgccctgaccgtactgcgccgtctgccgtccgggtctgtgcgttgtgtagtcacttcgccaccctactgggggttgcgcgattacggcatcgaagaacaaatcgggcttgagggcaccatgccccagttcctgcatcgactggttgccatcttcgccgaggtgcggcgtgtgctgacggatgacggcacactttggctgaacatcggcgacggctacacgagcggtaatcgtggttatcgcgccccggacaaaaagaacccggcccgggcgatggacgttcgtcccgacacgcccgagggcttgaagccaaaggacttgatcggtattccgtggcgactggcgttcgccttgcaggcggacggctggtatctgcgcagtgacattgtgtggaacaagccaaacgcgatgcccgagagcgtcaaggatcgcccggcccgctcacatgagttcttgttcatgctcacgaagtctgaaaagtattactacgactggcaggccgtccgggagcctgcggacggcggcgggctgcgtaatcgccgctcagtctggcatgtgaacaccaagccttttgccggtgcccacttcgccacctttccgcccgacctgatccggccttgcatccaagcatcgaccgagccgggcgattacgtccttgatccgttcttcggatcgggaaccgtgggcctcgtgtgccaggatgaaaaccggcaatacgtgggaatcgaactcaaccccgaatatgtggccttagcggctgatcgcctgcaagggcaggacagcaacgtgataaggatcgccgccgcatga

SEQ ID NO: 365500 - DNA, 1002 bp, Pseudomonas aeruginosa
atgacgacccccaacaagatcaattttccgccgccgaagctgcaaatcgacttcgctttcgccctcaagcggttccgggccgtctatctgcaaagcgccttgctggaaaccgtgcgggacatggacattgccgagctggacaagcaacttgccgagtatgtccccccggcagacttggcgaccctcgcgcagcatggtctacgcgccgaactgctgtttgcagtgcctgccgtgctggaaaagaacccctatctgctgggctattaccggctgctgatggggtacagccaaaaggagttttacgggcgcgacaagggtttcggcgtcggccacttcaagggcttggaggaaaaagggaagatcagcaaggccgctgccgctgatatgcctgatttgtgcgtggccttctgtgccactgcatcggcactgctggccggtgttggcccgctgcgcgtcagccgggaattgctggatgacttgaccctgctaaccgttggcccgcagctacgaggcggggccaacaaccagcgcggcaccgatggcatcgtgcaagtgttcgagatcatccgggagatcgtcgcccatgccgctgccgaagtacgcgaaagcgcaatcgaggtgaacagcgccacgggccgtccgttcctgatcgagttcgcgcccgatcctgacatcatcatccgcgaggaaatggagcatcagcattaccgcaacgtggttgctattgaggtcaagagcggcacggatgtatccaacatccacaaccgcatcggtgaggccgagaagagccaccagaaggcgcggcagcgcggctttaccgagtgctggactgtggtcaatgtcggacggctggatatggtgaaggcccgcagcgaatcgccatcgaccgaccgcttttattcgttggctgccctgtcgctcaggtctggcgatgagtacgacgacttccgccgccgtgtgttgtcgctgacggccattccttctgctccgacgaacccataa

SEQ ID NO: 365501 - DNA, 642 bp, Pseudomonas aeruginosa
atgcacgacgccactaccccggtttcccatttcaagttcgcgatagcacctggtgtgtcgtcgccacttctctctaagctgcttgccctgcagcgcgcggaggagccggaagtcgccatggcatttttcgaggtcacgggtggcgatctggtgacaggcgttcgtgaaggtcgttacgacgcggggatgtcatttgagggcttgagcgatccgttcctgagcagtcggcccctgtggagcgaaaacatggccgttgccatgccgttgcgattccccttgctacatcagccaacactcacaactgccgagttgcgggactactcggtatttcgctggcaagcggaggcttgccccttgctggatcagaggctgtcctccttcccacaagaaagccaacagaacattcaacacatgacttcgttcgagctgctggctctgtgggtcgcggcgggctatggcgtcggtctatccgcacaatcacgcatcgagcaagctcagggagcgggaatcaccatgcgaccgctctctgatggcccgtacgagatcgtgacgcatttgcaccgtccccaaggggtacccaactccgtttcagatcgattcgagcgcagagccctacagattgtcaaggcaggcaccgcctga

SEQ ID NO: 365502 - DNA, 891 bp, Pseudomonas aeruginosa
atggaattgcggcaccttcgttgttttgtcgtcttggctgaggagttgcacttcacacgagctgccgagcgtctgaacatcgaacagtcccccttgtctcgaaccatcaaagaacttgaggatgagctaggggtactgctcttcgatcggaaccgccgaggcactgcgctgacccccgcaggggccgcctttttgcaggacattcgcaggctgttctctgttctggagcaagcacgggagaatgtccaagcggtcgcagcaggcttgcgagggagcctgcgcattgccgtttccgatggtgcgaccgatcctcggctctcggcgtttctggcccgttgccgcgtagaggagccggaagtctacatacgtctggccgaagtgcctctagccgaacaattgcgcggcttgcgatccggcgacttcacgattggcttcgcacacactgccgacgttggtgacggccttgttgcggaaccgatctggcgagacccgctggtggtcgccgtgcctgcccggcacgagctgcttgcccacagggaggttccacttcatgagcttgggagccacccgctcgtcttgtgtgatccacaggtatgcgagggttactgcctccaactggcacagctcctacagcctctggaacacaagccgaatgtcgttgagcacgcgtcctcgatggacatgatgcttaccctggttggcgcgggctacggcgtgggcttcacaacgacgaccaggatcgcaggctaccagcggccggatgtcgtgatccgtcccttggcggtggaatctgcagtcatcactacctacttgctttggtccgaaaacagccgtttgtcggtttcgttggagcggttcatcgctcgcctacgcgaccgtttgagcgactaa

SEQ ID NO: 365503 - DNA, 1272 bp, Pseudomonas aeruginosa
atgtacgacaatgccctcactcttatcgactttgaccctgagttggctcaggccgtgcggcacgaagaacgccggcaggaggatcacgtcgagctgattgcctccgagaactatgccagcccgctggtgatgcgcatccagaactcggtattcaccaacaagtatgccgagggctaccccggcaaacgctactacagcggctgcgagtacgtggacgtggccgaatgcctcgccatcgagcgcgtcaaggagctgttcgattgcgactatgccaatgtccagccccatgccggcgcccaggccaacgcggcggtgttcctggcactggccaaccccggcgacaccgtgatgggcatgaatctcgcccagggcggccacctgacccacggcaacccgtccaatttctccggccgacactacaagattgtgccctatggtctcgaccccgagacaggattgatcgactacgacgagatggagcgcatcgcgctggaaacgaggccgaagatgctgatcggcggcttttccgcatattcgcgtcacaaggactgggcgcgtatgcgcgccatcgccgacaaggtgggcgcgatcttttgggtagacatagcgcacgtcgccggcctggtggcggcgggcgagtacccgaatccgttgccccacgcccatgtcgtcaccagcaccacccacaagaccctgcgcggcccgcgcggcggcatcatcctcgccaaggggcaggacgaagacttctacaagaagcttaattccgccgtattccccggcatccagggcggcccgctgatgcacgtcattgcggccaaggcggtggccttcaaggaggcgctgcgcccggaattcaagtcctaccagcgtcaggtggtgaccaatgcccgcgcggtggccgccgtgctccagcagcgtggctacaagatcgtttccggcggcaccgacaaccacctgatgctgatcgacctgtccgccaagccctacaccggcaaggacgcggacgcagcgctggctgatgcctacatcactgcgaacaagaattcggtacccaacgacccgcgctcgccgttcgtcacgtcaggccttcgcatcggcacgcccgccgtgaccacgcgcggcttcggcgtggccgagtgcgaacagctagcgggctggctgtgcgacgtgctggatacacaggaggctggtggtgatgccccgacgacagtacgtgaccgggtacgcgaacaggtggtagatctttgtcgccgccaccccgtataccgatag

SEQ ID NO: 365504 - DNA, 858 bp, Pseudomonas aeruginosa
atgagccggctccatagcacttttgagcgtttgcgacagcagggacgcaaggcattgattccctatgtcactgccggctatccctccgcagacattacccctgcactgatgcacgttctggtcgaggccggtgccgacatcatcgaactgagcgtaccgttctccgacccctcggcagacggcccaacgatccaggcatccaccgaacgcgccctgcgacaaggtatcggcctgccgcaggtgcttgaccatgtgcgacgcttccgcgaatccgacgccgacacgccggtggtgctgatgggttatgccaatcccattgaacgccatgactatctacgccagccaggcgccttcgctacggacgcagcggccgcgggtgtagatggtgtgcttgtagtcgattacccgccggaagtttccggcgaccttgctgcgcagcttcgccgccacagcatcgacctcattttcctactggcgccaacttctacagagcgacgtattcagcaagttgccgaacgcgccgatggttacatctactgtgtctcagtcaagggtgtcaccggcgccaggacgctggatgcggagcaggtacgagagatgttggcgcgcatccggctccatgtacgcattccagtcggcgtcgggttcggtatccaggacgccgatacggcgcgcgagatcgcccgtgtggccgatgccgttgtgatcggctcctggcttatcgaaagcctggacggcaggtcggcggccgatgccctggccgcggccagcgatctgattcgcgaagtgcgccgggaactggacagtgatgcacccgaacagaatcaaaccttgaaatccagaaactcccgaaaatag

SEQ ID NO: 365505 - DNA, 1230 bp, Pseudomonas aeruginosa
atgagccctgcatctatttacgatcagccagatgccgctggattcttcggccgctttggtgggagcttcatcagtgagacgctggcgcaagccgtcgaggaactgcagcagtcgtggctacgttgccgcgatgatcccgccttcatcactgagtttcaagaggaattggcagattacgtcggccgtccttcaccgatgtactacgcccgacgcctcagcgaggaaacaggcggtgcgcgcatcttcctcaagcgcgaagatctcaaccacactggcgctcacaagatcaacaacgtgatcggccaagccatgctggcccggcgcatggacaaacggcgcatcatcgccgaaaccggtgctggccagcatggggtcgccactgcgacgatttgtgcgcgctacggactggaatgtgtgatctacatgggcagcgaggacatccggcggcagagccccaatgtccagcgcatgaagctgctcggggcgacggtggtgccagtggagaccggtagccgtaccctgaaggacgccatgaacgatgcgatccgtgattgggtcaccaacgtcgatgacacgttctacctgatcggctcggtagccggcatgcacccgtacccggcaatggtgcgggacttccagaccgtgattggtaaggaatgcctgacgcagatgccagtgctgttccggcgcctcggtatggcgaagcagcaccccgacgtggtgatcgcctgcgtcggcggcggcagtaacgctatcggcatcttccatccgtacatcaagcacgaagaagtccgcttggtcggcgtcgaggcagcaggcttcgggctggacaccggcaggcacgcagcctcgatacagcgaggcagcccgggcgttctgcacggcagccgctcactcgttctacaggacgaccaaggccaggtgctggatacccacagtatcagcgccgggctggactatcccggtgtcgggccggaacatgcctggctgcacgagatcggccgtgccgagtacgtcggtgccaccgacgacgaggcattgcacgcctttcatctgttgagccgtgtggagggcatcattcccgcgctggaagccagccatgccgtcgctcatgccatcaagttagcggcaacgctgagccaggagcaggccattctggtgaacctgtccgggcggggcgacaaggatatggagacagtgatggcccaatccactggaggccagccatga

SEQ ID NO: 365506 - DNA, 1233 bp, Pseudomonas aeruginosa
atgcaagcagccgcttcccatctgatgcgggcctatgcccgccaacccgtttccttcgtgcgcggcaacggtgcgcgcctctgggatgaacacggcatcgagtacctggatgccatcgccggcatcgccgtcaccagcctggggcatgcccacccggagattgccagcgtcatcgccgagcaggccggtctgctgctgcacacctccaatgtgttccgtatcgactggcaggagcggctgggcgagcgcctgtgcgctctggcggacatggagagggccttcttctgcaactccggcgcagaggccaacgaggccgcgctgaaactggcccggctgtacggccatcacaggcaagtagcacaaccgcagatcctggtgatggagaacgccttccatggccgcaccatcgcaacgctcaccgcaaccgacaaccccgccaagcagcagggctttgagccactgttgcccggattcctgcgtgtgccttacgacgacatcgaggcggtgcgccgggtcgccgagcggtcgccggacatcgtagcggtgttgatcgagctggtacagggcgaaggcggcatccgtgcggcgagcgccgattatctgcgggagctgcgcacgttgtgcgaccggcacggctggttgctgatgctcgacgaaatccagtgcggcatgggccgcaccggcgcctggtttgcgcaccagcacgcggggatcgttcccgatgtcatgacagtggccaagtcgctgggcaacggctttcccatcggcggctgcctggcgcgtggggatgtggctgacttgttgtcgcccggccagcacggcacgaccttcggcggcaatccactcgcctgccgagtggcctgcaccgtgctcgacatcatggcgcgcgacgacctaccgaaacgggcagctacgctgggtgagcaactactcgcggggctgcgcgaggcgctcgacggacacccgaacgtcgtcgccattcggggcctgggcatgatggcgggaatcgagctgaaccggaactgtcaggaactggtcggccgagcactgacagaacagcgcctgctcatcaccgtgacccgtggctccactatccgactgctccctcccctgatctgcagcgaggcgcagatcaacgacatcgtggcacgggttgccagtctgctgtcttcggatacgactgatcgtcgggaaacaaccaccgcggccggacagacggagccgacggcatga

SEQ ID NO: 365507 - DNA, 750 bp, Pseudomonas aeruginosa
atgcacggcggggcacttccgatcgaatggttcgatggctatctgcaggatttggccgcacgaggagcgctgcatgccttgcgcaccattctggtcggctacctgggaaacccgcgacaggctgacatcttggtgcgttgggctcaggcgctgctgaaagagcgggcagacctgagtatcgtgattgacccggtaatgggcgatcacgaccatggcatctatgttgatccctctctggtcgatgtctatcaccgggacttattgccattggccgatgggctgacaccgaacgattttgaactggcgcacctgacaggcctgcccgtgagcgatgtcgaaagcgtggtcgccgccgcccgtaccttgctgactggacgcacccaatgggtcgcagtgaccagtgccgcgcccagcacctggacacgggacgagatgcaggtggtgctcgtcactcgcacgcaagccgaagtcattgtccatccacgcatcgacgcgacccccaagggcacaggcgacctattctgcgccaccctgaccggacattggctcaatggcgctgatctgtcggaagccgccatccaggcgtgccgtcacgtcgttcacgcactgcgtcatacccgagagatgcaatgcgccgaactgctgctactgatggcaaatagccacaacgacaacaaagcaacggcacgcgagtgcgtcagcaaatttacttacaggattttcccatgcaagcagccgcttcccatctga

SEQ ID NO: 365508 - DNA, 750 bp, Pseudomonas aeruginosa
atgaaagcccagaccttgtcgttccccgtgggcgagcccgtgcctgattggcacggtcgccctcaacctgccggcgtcgtcctgacagggaatgagtgtcgcctggagcccgtagatccggcgtgccatgccgatgcgctgttcgaggcatacagccaggcgagtaacggccgggactggctgtatttgtcggccggcccgttccccgatgcacaagcctatcgagcctacacggagcagatggcccgggaaaccgaccctttgcacttcgcggtcgttgatctgcgcactggcttacccgtaggcactttggcattgatgcgccaacaaccccaacacggggtcgtggaagtcggggtcgtgacgttttccccaatcctgcagcgctcacgtatcgcgaccgaggcccagttcctgttgatgtcttatgtctttgacgagctgggttaccgccggtacgaatggaaatgcgacagcctcaatcagcgatcccgcaacgcggccgagcgtctgggtttccagtacgaaggtactttccgtcaagccttgatctacaagggacgaaatcgcgataccgcctggttctccatcatcgacaaagagtggccgatggtgaaagctgccttccagcagtggctggccccggagaacttcgatgaacgtgggcatcagatcaagcgcttgcaattgatccgctctcatctcgctgcttcaaacgcaggtgtcaatatgcagcggggtcggccatga

SEQ ID NO: 365509 - DNA, 816 bp, Pseudomonas aeruginosa
atgcaaacccttgtcagcacacaaaccagccatgaccgtcacggcctctaccctgaagccgtcaccgtcgaggacttccggcgcaatctggcgagcgtgcaggagcgcatcgccgcggcctgccgccgcgccgtccgcgacccggccggtgtgcgcctgctgcccgttagcaagaccaagcccgaggcgagcctgcgccttgcccatgcggccggctgccggatgctgggtgagaacaaaccgcaggaggcctaccgcaaatgggaggccatgcaggacttgaccgacctgcaatggtcggtcatcggtcacttgcagaccaacaaggccaagctggtggcacgcttcgccaccgagttccaggcgctggacagcctgcgcgtggccgatgcgctggaacggcgcctgcaagccgaggggcgctcgctggatgtgttcgtacaggtcaacacctctggcgaagccagcaagtacggcctggccccaggagacgtgccggcgttcatccaagcgctgccgacgttctccgcgctgcgcgtgcgtgggctgatgacgctggcgctgttctccagcgaggctgaacgggtgcgccagtgttttattttgctgagaaccctgcgcgaccgactgcgcgacagcgcacccgctggcattggcctggacgaactctccatgggcatgtccggtgacttcgagattgccatcgaagaaggcgccaccgtcgtgcgtgtcgggcaagccatttttggcgctcgtcctttgccggatgcctattactggccggacgcaggcaatcccaaggagcattcagaatga

SEQ ID NO: 365510 - DNA, 1032 bp, Pseudomonas aeruginosa
gtgttcaaggaatatggcactcgggctttgacgcacagcgatccacaagggctggagccattgcgacgcgccattgcggattacgtcaatctcgaacgtggggcgcatgccacgcccgagcgcgtactggtgctgaccagttcgcagcaggccatgacactgtgcgccaacgtactgctcgattccggcgatcaaatttttatcgaagacccggtctatcaaggggcgcgcaaagcgttcgacgctgcgggtctggagtgcgtacccgtgccactcgatgccaatggcatgctggtggaatatctgaatcaggctgcgaagacctccagagattcggccaaggcggtgtttctgacgccatcgcaccagtttccgaccggagcaacactcgcgctggatcggcggctggccgtcattgaatgggccagacaacaccggagctggatcatcgaagacgattacgacagcgagttccattacgcaggtaaacccaccgcctgtgtccaaggtctcgacccgcatgagcggacgatctacatcggcaccttcaccaaatcacttttccccggcttgcgtatcggctatatggtgctgccgccatcgttggtggccccgatgaccgtggcccgcaccttgctggatggacatagcgcaccgattccgcagctcacactggcgcgcttcatcgaaggtggccatttcggtgcccacgtgcgcaccatgcgtgctacctatgcggaacggcgggacgctctggcgcggctggtacgtaagcatctggccgacttcgtggaacccagggtgcccgcaggaggaatgcagatgccttgcttgttcatccgcgacatccccgaaaacgaggctgtggattctgcgcgtcgggctggagtcgacctgttgggactgacggcgctccatgcgtcgagtcggcacaagtctggcttcctcatgggattcgccgcccacgctccccatgaaatgggaacctccgtcaagaaactggcgaacgttctgcgtgcactgtgtcgctga

SEQ ID NO: 365511 - DNA, 312 bp, Pseudomonas aeruginosa
gtgaatgctgagacagcgaacggttccaccgacgaccgcaacctgaaccagtacacgggtggtttcctcctccaagccgaaggcggccagccttcggcgtgttttctcctgcgcatccgccatgacgacccggcaattctgcctcggtcacacgaacaggagacacccgaacgaatcctcaaccacaagccggccgccgaggcgccgcgctacaaggcgattggcaattcgatggcggtgccgtgcatggcctggctgggccggcgcctgctgcagactctggacaacgcggggcgcacgactgcgcattga

SEQ ID NO: 365512 - DNA, 837 bp, Pseudomonas aeruginosa
atgacgcccagcgtcggggtcgttaaactgggcggacatacgcagatctcgaggggcatgatggtcatggtgatcgaagcagcctacgcgaatggcactggcgtcgcgaatgcactgcgcatgtcgcaggcccagtggctggggctgcaacggaactatcacgtcggcgatctgctaatgccatgctgcaatgctccagccgtccccaagatcagtgccaatggccatcctttcttcgcgcatctaagcggtgcctgcagcacttccgaagaaagccagtggcacctcgcggccaagatactggtgcgcagcgttttggaggatcttggttgccgagcctcggttgaggttccagggagcagcgaaaccagccgctggaaagccgatgtctggggcgagcgtggcgaggccaagttggctatcgagatccaaaggtcatatcagtcgctgcgtgactaccgtacccggcaaaagaaatatcgggccgagggcatcaaggcgctttggttgctaagacaagagagatacagcactctcacgaggagcatgagcaaggagcgactgcggaccgagttcggaggaaaattccctccagccgggcacttcggcccatgtctcgcagatgtgcctatagcaatgctcgagttggagccgaccaccacgatcacaggtgctggatttttcaccgccagtcttccggatttactcgaagcagtgcttagtgatcgctttctttgcgtagatggtctttggtgcatcgacaacctagatgcgatgtctcgtgccgcccaacttgcgcgcgaacgtgccgcagcccagcgcgcggcagatatttag

SEQ ID NO: 365513 - DNA, 1815 bp, Pseudomonas aeruginosa
atgccgtcgcgtagtttcagcacagcctacctggcccaggctgccgagctggccggaaatcctggtcagttggcggcgtacaactcccagggacattgcgtggtgctcgccggccctggaagcggaaaaaccaagacgcttgtgctgaagctggctcgcatcttggccgaagacgtgcaggcaccgcgtggtgctgcgtgcatcacctacagtcaagagtgcgcacgcgaattaacccgtcggcttgaaatgttggggctgcgggaggcgccaaacctgttcatcggcaccgtccacggattctgcctacgccatctgttgatgccatatggacgcttagctgatctaccgattcagtttcccctctcagtggcatcccagcgagtgagtgatcgtttgatcaggcagtccggagacgagctctttggggccaaccatccttacaaagctatcgatcttggacggcatcgccgatccgtactgaaccgaaacagcgttgcctggcgtagcgaggaagaacttgccgcctgggccgaagcctacgaggcggcactgcgccaaggggggctgatcgactacgacgacatggtggtctatggccagcgcctgatcgctgagcatgattgggtactgcctctggtgcaggcgaaatttccggtgctggcggtagatgaatatcaggatttgggggttgcactccatcgcatcgtcaagcgcctggcttttgatggtggcgtgcgcttgttcgcagtcggtgatgcagaccagtcgatctacggtttcacaggggccgatggcgcgttgctcatggagctagctgagcgtgaagacatcgagccggtcagacttcaattgaattatcgctcaggggcaggcattgtcagcgcttcagaaatggcgttgggtgaggatcgtggctatcgggcgaacgacccgacccgtcaggcgactatcgagtttgtgctgtgccctgatgggctcgcagatcaggccgcacacgccgtcgcgcagatcattccggtggccttggactccaagccaggacgaacgctgggcgatatcgcaatcttgtatacggactatcgcgcaggcgatattgtggccaaggccgtggcagccggcggtttcgattatatccgcgtggacaccgccgcgccttaccgtaaagttgccttgacgagttgggtagaagactgcgccgcatggtgtgcgggtggctggcgtatcgcgcgtccgcaactgcgtggattgatcgaccgttatctcgcatttcatcgagcgaacttggacgatgcgcaggctcgacgcgaggggcaggagctaaccgctctgttgtgggcgttgcgcgccgatcagcagtccgcacgtgattttgtcgcatcactgcgcaacggcatcttggatcgtctgttggttgctgaatcgtcgcttgccgatcagaaggaacaactggatcgcatgacggcggcgcttgccgaaggtggcgcgctggctacgctggacattgcgagtctgggcggacgtgatggttcgccggatcacctgaacctgctgacacttcattccgctaagggatgcgagtacgacgtggtcattatggtcggtctcgactatgggagtttgccatggcgaaaactgagtccagagaagttgcgcgagagtcgccggctgttctatgtgggactcacacgcgcccgcgacgaggttcacatgctgtactcgggattcgttgaagggcgctatggtccgatgcgccatgggcgctcaccattcctggatgaattagaggcacgaatgcgtgctgcgaacctctga

SEQ ID NO: 365514 - DNA, 1788 bp, Pseudomonas aeruginosa
atgcggatctcacgcgttaggctgatcaatttcgccaatttttcggatgttgatataaagactggcgatagcatcgttatcgttggtgagaataaagtcggaaaaagtaacttcattcgtggattacagctgattctcgacccaggattgtccgagcgtgaccggcaattgagcatagagcacttctgggatggcctggttgaagacaagatcggtaaaatcatcgaagtctcggtggacttgaccgacttcactgataacccgcggttgatggctcatctcaacgattgtgtgattgatccaggcccacccatgacggcccgtctcacctatcgcttccagcccaaagccggactgggacgcgctccggaatcgttgaaagactatgagtatgtgatctttggtggtaacgaccccgaaatgcacgtcggtagtgcgtttcgccgcatgttgccaatagacgtccaggtggcactgcgtgatgctgagaaggatctcgcgagttggcgcaattcaccattgagacccctcatcgaagatcttgccgagtcgttggacgaagacgcccgtgaggagattcaaaatcaggttgacgacgcacagcgggaactagctggccacgcccaagtggttgcgacggcgaaccggatcagcgagcggttgatctccattgctggtgagcagcatgctgtgcctgtgtcgcttggactcgctccaactcgggtggatgcgctgcttcgcagcttgcgattgttaattgacaatggaattcgcggcgtcggtgacgctagtctgggaaccgcgaacctgatcttcctggcattgaagagcctcgaactcgaccgcctcgtgtctgacggagaacgtgaccatacattctttgtggttgaggagcccgaagcgcacctgcacccgcacgttcagcgccttgtctatcgttatttccttggcaccggaggggatgaaaacgaggaagatgctccgctaacaacgatccttacaactcactccccacacattgcaagcgttacgccgattagatccatcgttctgctacgtcatgacgtgggggcaggcaagactgtcgccgtttcaactgcgaatgcgccgttcacacagagggatgaagaagatctacagcgctacattgatgtcacgcgtggcgagattttcttttctcggggggtcattctggtcgaaggcgacgcagagcgtttcctggtccccgcgttcgctgaggcgcttgatatccacctcgatatgcttgggattaccgtgtgctcggttggcggaactaacttcacgccgtatgtgaagctcctaggccctgaaggactggatattcctcatgtcatcctgacggactatgatccggtcaatggcaaggctccgctggttcgccggcgactgatcaatcttcttgacgtggttgaagacgagtacgaccactcggagatggagacagatgacgtaattgagcttgccgaggagttcggatacttcgtgaacgagaacacactggaaacggagttgttcgccggtgggttggctgagtcgatgcgggatgtaattcagcaggaattgccgcaactgaggcaagcaacccgagaagcattgcagcagtgggtggatgacttagaccaggtcgatgaagaacggctgctgaagcttatcgaaagaatcggaaagggacgattcgctcaggcccttgcacgctcagtgtccgaggatacttgcccgcactacatccgttccgcgctggagcatatccgcaatgccgtcgcgtag

SEQ ID NO: 365515 - DNA, 564 bp, Pseudomonas aeruginosa
atgccagcaacccaacttctacggcgcctgaccggcagcggcctgctgatcaccgctgtgttgagcggcggctgcgccaccaccgccgcaccgcccgttgatcctcttgtcgaggaagccgacacagcgccgcagtcacctgaactgattccggtggtgcgctatggccgctacacgctcgtggagcttgttcccaccgcggcccagcgtgacctgctgctgcaggtcatcgacgtggcgatgccagcggatgccagagcgacggtgggcgacggcctgcgccacgcactccagcgcagcggctaccagctttgcgagaacgcccatgcggtgatcgagctgtattcgctgccgctgccggcggcgcacctgtatctggggccgatgacgctgcgcgacgcactgctcacgctcgccgggccggcctgggatgtacaggtcgatgacagggcgcgccagatctgcttcgttcctgccggcgagccctccgcagatcccgagaccgacacgccactggccgcgccggtgcagacctttcccatcgtcgacggaggccagccatga

SEQ ID NO: 365516 - DNA, 660 bp, Pseudomonas aeruginosa
atgagcgcagtggcccatgcgtcgcgttcgcgcgcggccttcgtgctgtacctgctgctgtgggcctggatggtcggactcagcgcactggtgctcgtcaacttccgcgttgcgggcgacctggccggtcagagtcaagttgattcggccttacgccaactgcaggtgctcgaaggccggctcgccgaattcgccgacgacgtacagacgctgcaagcccgccccgaagcggcgaccacggcagctttgcaggaagctttgcaggacacccgccagcgcctcgaagccgacatcgcccgtctcgaacagtcgctggccggctacgccaccgaggcggccctgcagacactgcacagcgaggtcgagcagctcaaggcacagcgccagaccgccgcgcgcacgcccgcagcgccgcgtcccgccagggcgacgacgacggcaccggcacaggtgccgtttcccttccgcttgatcggtgcggaactgcgcgccgggcagcgcgccgtttccatcgcccccgccaccgacccgctctcggccgggcagatccaggtactgcttcccggcgagcatgccgggcgctggcagttgcagaccatcgacggcaacaccgccgtgttccaggccggcgaccagacgcgccggctggcgattccttga

SEQ ID NO: 365517 - DNA, 729 bp, Pseudomonas aeruginosa
atgcaacgtcgcgcactttccatgctgttcctgttggccgcgctgaacgcaccggccttcgcgcagcagcccgccacccagagcacacccgcacagtcttcccgtgtcacgccgagccagatcgatcaggcacgcgatgaacgcctggcgcgggactgggggctgcgcggcgacgaatggggacgctaccgcgaactgatggaagggccgctgggcatccattcacccaacctcgacccgctgaccgcactcggcatcgaagcccgctccgacgaggagcgacggcgctatgccgaactgcaagtgcaggtcgaagcgcgccgcgtggaaaagttgctggcgtatcaacgagcctacgacgaagcctggcaacgcctgcatcccgacgcccagcgggtgaatctgcccgacgcgctgccgggcggcagtgcgatgaccggcagcggtcgtaccgccgtgttcgtccgggacggctgcgcgccgtgtgcccaggtcgtgcagcgtctgcagacggcgaacgccgagttcgacctgtacatggtcggcagccgccaggacgacgcgcgcatccgcgagtgggcccagcgcgcgcagatcgatccggcgcgcgtgcgcagcggctcgatcacgctcaaccacgacggtggccgctggctggcgctgggtttgcccggtgaactgcccgcggtggtgcgtcaggtgaacggccaatggcagcgccagccctga

SEQ ID NO: 365518 - DNA, 573 bp, Pseudomonas aeruginosa
atgccgacgtggccgctgcgcgtgctgctggccgccgcgctggcgaccgggccagtccaggcccaggaaattccgccgcccgcctaccagttggcggcccagcgcgccggcattccttcgacggtgctctatgccgtggcgctgcaggaaagcggcgtgcgccgggacgatcgcatcgtaccgtggccctggtcgctcaatgtcgccggccagtcgcgccgctacgccacgcgcgcgcaggcttgtgcgggcgtgcgccaggcgctgcgcgaggtgccccccacgcgcatcgacgtgggcttgggccagatcaacctcggctaccagcagcaccgctaccgccagccctgcgatctgctcgacccctacgacaacctgcgcatcgccgccgacatcctgaaagagcagcacacccccggcgaagactggctgctggcggtcgggcgttaccaccgaccggctggcggcgcgcccgcggcgcgttaccggcgcagcgtttcacaatacctccagcgcgtgctcggcccgcaacagaccgccgcacacgcgccccgccaggagaacagccgatga

SEQ ID NO: 365519 - DNA, 546 bp, Pseudomonas aeruginosa
atgacctcatccatccgggccacgcacggccttcttgtcgtaatgctcgccaccgtgccgatgagcgcggtgcgtgccacgccgcccctgatcgtggtggaagaccggggcggcgcttccgcgctgccgtactacgaagcgctcgacctgcagccgcgcgccacgagtcagccactcccctccatcgtcattcccgaggcaccaaccgccgctgtcgatgagacggccatgctgccggtgcgcagtgccaggctcacgccgggaacggttgcccgccgtgtcatcgaggcccccggactgcaaccattcttcctggtcggtgacgatgcgacctctcaagcctggttgcgtcagcacgccgacacgctgcgccaacgcaacgcctggggcctggtggtcaatgtcgagacggcccaggcgctggcacaactgcgtgcaatcgcgcccggcctgaatctgtcgccgatgtccgccgacgatctggccgaacgcctgggcctgcggcattacccggtgctggtcacggccaccggcatcgagcaatga

SEQ ID NO: 365520 - DNA, 750 bp, Pseudomonas aeruginosa
atgagcgacccggcatccactgcgcagcggcagcaacagcgccggcagggcctgatcgccactgcgatctccttgccgctgcgcctgttcggggtactgatcgcctcgctgatgctgtcgatcctgatcgagtgcgtgggcatgcacctgttctggaaggaccagggctggcgccatgcgcaatcgatgctgcagtacgagctggggcatctgtcgaatcacttcacgcgcagcgccatcgtgcaggagccagggcgcaccgcgcaccgcctggtggagacgggttacgagtgggtgttcgtcaagaccgggctgctcgacaagatgaacgataccgcagaacgcgcccgcgcgccgggccaaggacaatcccgtgatttccgctacttcatcagccaagtctatgtctgggccgagcgctatctgattgccgccgctttcatcaccttgacctttatggtgcgcctgctggttctggtattgacactgccgctggtgctcacggcagtgttcgtcggtctggtcgatggactggtgcgccgcgacgtgcgcaagttcggcgccggccgggaatcgggcttcgtctaccatcgcgcgaaagcctcgctactgccactggcgatactgccctgggtgatctacttggcgatgccggtctcggtgcatccactgctgattctgttacccagcgccgccttactgggactggctgtatctctgactgcggggagcttcaaaaagtacctgtag

SEQ ID NO: 365521 - DNA, 378 bp, Pseudomonas aeruginosa
atggtgttttcgtttccacgccacgccgcgcatcgcggcgtggccgccctgctgctgatggcgctgacggcgagcccgccgctggcggcccatgccggcacgccagcccaacgccaggagctggctgcggccctgcgccagctcgacgcgctggaacgcttcgtcgcacagagtgcggcgaataccccgatcacagcgggcgagcgctaccacttcgactacccacgtctactcgatgacctcgcgcgcgtgcgcgccggcatccagttccacctcgcgccgtctcgcgcccagccacgcgaccccgccgtactgagcggcgattaccgcaacgagtccgcccccgacgttttctcggcaccggaggcccagccatga

SEQ ID NO: 365522 - DNA, 234 bp, Pseudomonas aeruginosa
atgacctccgcgcagatcagcgccttccaggccaacagcagcatcgcacccgccgcgatggcgacggtgatcgtcggcctcgtgttcgcggtgctgctgctgtggggggcctgggccattcgcaccgcctacgtcggctgggcggaaaaccagctcaaccagcgtcagttcctcggcgtcgtcgtgcgttttctcgcgatgtacctggtgctgacttttttcctcctctcctaa

SEQ ID NO: 365523 - DNA, 399 bp, Pseudomonas aeruginosa
atgtccgagcatcagcacatccgtgcggacggcaccgtgatgttccttccgcaccggctcaaccggcatcccgtggtggtgcgcggcctgacggcggacgagctgtggatctgctgcggcctgtccggcgcagccggattgctggtcggcgcgcccctgtcctggctgttctcgaccatcgcgatcgcgcccaccttcatcgtgctgggtatcgccttcggcgtgttcatcggcggaggcatcctgcgccgtcagaaacgcggcagacccgacacctggttgtaccgccaactgcaatggcgcatcgcgacccgctatccgttgatggccggctggatcggcgggcatgcactgatcacgcgttcgggccgctggtcgaaccggagggtagcgcgatga

SEQ ID NO: 365524 - DNA, 681 bp, Pseudomonas aeruginosa
atgagccgcttccggaacgaagtcgcgcacctgcaagcgcacatcaaaaccctgcgcctgggcgctgttgcgctgctgctgatcgcgctggtgatgggcggcggctggtggagcgcgccccgcgacctgaccattcacgttccgcccgatctgcgctcgggcagcacccggccctggtgggacgtgccgccggagagcgtctattcattcactttttatgtgtggcagcaactgcaccgctggcccacgaatggcgaagaggactacgcgcgcaacctgcatgcgctatcgccgtacttcacccccgcctgccgcgcctttctgcaggccgactatgactaccgccgttctacgggagagctgcgccagcgggtgcgtggcgtgtatgagatccccgggcgcggctacggcgacaacccgaccgcgcgcgtgcgcacggtctccgatcgcaactgggtggtgacgctcgatctcagcgcggacgagtaccacgggccggagcaggtcaagcgcgcgctggtgcgctacccgctcaaagtcgcgcggtcggacgttgatcccgcgcgcaaccccttcggcctggttctcgactgctacgacggtgcgccgcagcgcatcgctacgcccgaaccggagccacctgctcgcggcggcctgggccagcaaggagactccccatga

SEQ ID NO: 365525 - DNA, 903 bp, Pseudomonas aeruginosa
atgaagacccgccttctcgtctggctgggcatgctggcctgcgcgctcgtgcccatggcccatgccgtggaaatcctgcgctgggagcgcctgcctctggccgtgccgctgcaggtcggagaggaacgcatcgtgttcgtggatcgcaatgtacgcgtcggcgttccggccagcgtcggcgaccggctgcgcgtgcagagtgccggcggcgcggtctatctgcgcgccagcgaaccgatcgagcccacgcgactgcaattgcaggatgctgacagcggcgcgctgatcctgctggacatcgctgccgagccggccaaggacggcgagccgccgttggagccagtgcgcatcgtcgagggcaacgccacgccgcagcgctacggccaggcacaggaatccggcaccgctgcaccatccccagatcaagcccgtccgccccggcgcgaaaccccggtggcagtggtgctgacccgctatgcggcccagaacctgtacgccccgctgcgcaccgtggagcccgtgcccggcgtcatgcgcgtgaatctgcgccgcgacctgccgctcgataccttgctgccgaccctgcctgtacgcgccgaggcgctggcggcatggcggctggaggatcagtgggtgaccgccgtgcggctgacccataccggcggcggctggatcgatctcgatccgcgcgcgctgcaaggggactttctcaccgccaccttccagcatccgacgctcggtccgcgcggcacgccggaggacaccacggtgctgtatctggtcacgcgcggtcgcggcctgccgcagtcgctgctgccggccatccaccgcttcgacccggccgcactgttgccccaggtcgctcctggtcacgacctcaaggagtccggcgatgcgcagtaa

SEQ ID NO: 365526 - DNA, 1410 bp, Pseudomonas aeruginosa
atgcgcagtaacggcttgctcaaatggctagtgcttccggtcgccttgctggtgctgttctttggcatccgcctgttctccggcggcggcgaccagccccccaccagcgtcgatgccgaaccgcagctcaccgccgaagaaatgcaggcgctcggcatcgagggcgatacgccccgcgatacggtcgccaccctggtggcgcaggtgcggcagttgcgcaccgaattgcagacggccacggcggacaaccgcacccagcgcgaggaaaaccaacgcctgcgccagcgcgaaagcgcgatcgaccagcgtatcggcacggcgctggaagccgagcgcaccgcattgcgtcgcgaccaggagcaactggccggcgagcgccggcagaccgaaggtctgttgcaggatctgcagcgccggttggagaacatcggtggcggcggtcatgccgatctgccggtcggattgggtttgcgcgaaggtgacggcgatggtttcgctggcgaaggcggtatccgctgggtggagccggatgacgccaggcagaccgacggacgcggcggcgcgggtacaagcctgagcttcccgaccagcttcggaccggcacagaaaacgctggaggccaccgtcgggcatgttgccgatgccggtgccagggctgccggcgtcaagacggcccaggcggtctacaccgtaccgacgaactccaccctgatgggatcggtcgcgatgaccgcattgatcggccgtgtcccggtcgatggcaccgtcaacgacccgttcccgttcaaagtcctcgtcgggccggacaatttgaccgccaacggcatcgacatcccggatgtggctggcgcggtgttcagtggcactgccagcggcgactggaccttgtcctgcgtcagggggcaggtacgtagcatcacgttcgtgttccatgacgggactgtgcgcacgattcccgaagacagcgagcgcagcagccagcagaacaaccagcaggatggcctgggctggatcagcgatccgtatgggattccttgtgtcagtggcgaacgccgcagtaatgcgcagcagtatctcggtacccaggccttgatcaccgccgcgggcgcgggcgtcgcttcgctgatcgactccgacagcggccagatgtcctatgtcggtgccgatggctcgatcggcacggtcggcatcagcaccaacgaggcggtcggacgcatcctcgccggcggcgtgcaggacatgtcgcagtgggtgaaccggctctacggccaagccttcgcggcggtctatgtccagcccggcgcacaggtcgccgttcatctcgaaaaaccccttgagattgactacgaccccgaaggccgccgcgtcgaccatcgcgcaggagaagctcatgcactcgaactggattaa

SEQ ID NO: 365527 - DNA, 435 bp, Pseudomonas aeruginosa
atgcactcgaactggattaaaccgctgctgctggcggcggccgtggcggcgctggccggctgcgccaccagcaaggaagaattgatgccgcatggcggccgcacgatgcaggacatctggcaccaggcggccggcgacggcggcagcggtcaggtggctcgccgccaactgctggacgcgcgccagagcctgcgccggccgctgacggatgcggatgtacaggccgcgcccgccgagcagatgcgctacacgcgtacggccgcgaacgaaatccatcaccagttcccgaggctgctgaatccagacctggtgatgtatgtgtatccgcatctggccggcaccgatcccgtgccggtgccaggctattcgactgttttccccttgtatcagcgcgtccagtacgcgatgccgggcgaacgcacggaggcgtactga

SEQ ID NO: 365528 - DNA, 762 bp, Pseudomonas aeruginosa
atgcctctccatcgctcaacgaacccgccaccggctgtacgtcgtcggcgttgtctgcacctgttgctatgtgccgtcggcctgcttgcggtgctgctgttcgcgctgctcgccgtggtgctgcgcgacagtcccgatgccgcaccgaccccgaccactcagcaccacccgggcggtccgccgtggcgccacggccaggccgacgcccgtttcgtgctgacgttgtttgcagacctggaatgcccattctgcaaggcctactacccgagcctgaagagctggatcgaccagcatgccgacgtcagtctgcaatggcatcacctgccgctggcgatacacgagccggccgcctcggaactggcacgtgtggccgagtgtgcgggcgagaccggcgggcacggggccttcttcgatgccgtcggctggctgtaccagcacacgcgcggcggcggccaggggctgcccggggggcttcgctatccagggctgacaccggcgctccagcgctgcctggatagcgaacgtccccagctcatcgtgcgcgatcaggccgagcaaggcgcgcacggcggcatcaccgccacccccagcctgcgcctggaggatcgccagaccgggcgatcgttgctcctgcaagggccggtcgaaggcgatgcgctgctgtccgccatggatcttctgctgatgggcgacgcgccggatgccgctccggctcgcgctgcaggtttgtccgccatcgacgatggcgacatgcccaggtag

SEQ ID NO: 365529 - DNA, 507 bp, Pseudomonas aeruginosa
atgactgctgtactttcccccgaagactcctgtatcgagttggagcgcgatcccgtcgccgtcgacgagcacgaagaccggatcattcaacaggccatcgcgctgctggagcaacgcatcttcagagccggcaacgccttgaagaagccgaacgacgcgtgtgactttctgcgtctgatgctcgtcggcgaacccaatgaaatcttcgccgcactgttcctcgacacgcgccaccaggtgctggcctacgagccgttgttccgcggcacgatcaaccagacatcagtctatccccgggtagtcgtccagcgtgcgctggcggccaatgccgccgccgtcatcttcgcgcaccagcacccttcggggaactcagagcccagtgccgccgatcgcatgatcacccgccggctcagggatgccttggatctgatcgacatccgtgtgctggatcatttcatcatcggccagggcgaaccgtactcctttgccgagagcggcttgctgtag

SEQ ID NO: 365530 - DNA, 426 bp, Pseudomonas aeruginosa
atgcacacctttcttgcccacctcagccggacgctggcccttccggcactgctgctggtcgccggcaacgtgaccgcagcggagatctggatcgtggcggacgtccgccacccggtggccggtgcccaggcggcggatcgcatcatccagctcgacgcggcgcaggccatcgaagcggaactgtcggcccggttgccggacgatccgcagcgggccgcggcgctcgtccagcggcggctgaacgaaggtggccaagcgctgcaacagcgcatgcgtgaggcttaccagggcatgaccgatgcctggagcttaggcatcaccagcattccggcggtgatcgtcgatcagcgctacgtcgtgtatggggaaagcgacctcggccaggcgctggtccgcatcgagcgttaccgggagggacagccatga

SEQ ID NO: 365531 - DNA, 933 bp, Pseudomonas aeruginosa
atgatttcccgtcgcctgcggctcggggccgccgtcgcgctgctgtgcagtgccacgtcgagcttcgccctcaacaccgccaccatcatctcctcgaccttgtcgccggactgcctcgaataccgggtcaccgggatctgctactggctgtattgcacctggacgggctgcaccgtgcgcacgtcgatcaaggtacgccactacgttcccgacgcggtggtatcgagctacagcaacaccggggagaatccctgggtcgaggtgcgggcaatgagccagcccaatgccacggcgcaggccggtggtgacggaaccaccaacgaggatcacgaaaacaatcttgcaaagttcaagaacgccgacgtcatcggccacccgggcggcgaggtattcagccagttcgcttcggcgtccggctacatctgcgcaggcgccggtactgccttcatgccgtacctgctcagcacgctcgacaccctggcctggcgctacaacgtcccggaggcggtgtaccccgaggcgctgatccccggtatgcgcgagatcggcacacgcagcggactgaatctttggggcgccgtgtacccgcgtggcgggttcttgcaccagaccgacgactacaaggccggggcggtcgtcgcccagcgtgctggcgacatcgtgacccgccgcggccaactgcatgtgtaccagccgctgctggcgaacgcgcgcgacggctactggccggccggcgcgttgatcgaaagcgacgccagcacgggcaagtggcagcaactgaccccacgcctttccaacagctgcaccgtgtttccccatgccgggtcgctgccccaggcacaacggggcgactacgcctgggcgctgtggcgcccgtacagctgctgccagcgccgcgggcagaccttccttggcagtgtggatttcaactga

SEQ ID NO: 365532 - DNA, 351 bp, Pseudomonas aeruginosa
atgagtccgacctggctgcgcccgcgctggctgttcaaccggcgcgtggcgaagacgctgctgtggacgatgctgctgcttgcggcggcggtggcagccaacatcgcgggtatccactacctcggcagcgtcgtcggctgggaacgctggctggcggaggcatccggctacttcctgctgtggcggctgtgcctatacggcgcgacgggctacgggtgggtatggatgcgccggcgcctgctggcgcgcgaaaccggcgcagaggcgaagcgccgcctccggcgcaccgaaatcgccggcgtggcgggaatcgtcgcgcttgaggccagcctgctgatgcatgcggcgtag

SEQ ID NO: 365533 - DNA, 1521 bp, Pseudomonas aeruginosa
atgacgttgttcaccacggattacctggagtattacctgaccctgctgggctggatcatccataacggcatctgggcggttctcgtttccagcggcgtgttcgccattcccttcgtggcgatcatcatccaggaatggctcaaggcgcgtgccgagggtgcggacgaaggcaataaaggcgcactgtcatcggtacgcatcgagaaccgcgtctgggtggcgatcgtcgtggtgatgttcgccggtattcccttcatcgacgtcgacctcaacaccatccagtacgaccaggcacgctcggcgcagtgccaggtgagcgttccccagcccagcgatactggctggtcgcagtcgttcagcacgctcaacaaccagagcgcgcgcgtgccggtgtggtgggccttcatgcacgcgctgtcgcgcgcgatcaccggcgcctcggtcgccgccattccgtgcggaaccgacctgcggcagatccgcatggaggtcaatgccacacgcatcgacgaccccgtattggcacaggaagtcgccgacttcacccacgactgttatggccctgcacgcgccaagctgttcatgagccgcccggatctcgacgaggcgcagatgcacgacgtcacctggatcgggtctcggtacttcctcgacaatgcgggctactacgacacctaccgggccaggacgccgcgcgacggctgggcctacgacagcaaccgcgatgccggcctggcacaggtgccgagcggtgccggctatccgacctgccgccagtggtggagcgacagtggcaacggcctgcgcgcccgcctgctggagcaggtcgatcccagcctgctcaaccgtctggccggctgggccggtttcctcagccgtgccgaggttgatgactcggtgatccgcactatcgcctcgccgcgccagcagaagcttaaccagggcagcgtctataccgattatggcgggcagattgataagacgctgcccaacatcatcaatcgcgccgccagtgacgtcgggatggcggttggtggactcgcctatttcccggcaatggacgtcgtgcgccaagccttacccatggtgctggcgttcctgaaaatggctttggtgatctgtattccgatggtattgctgatcggcacctacgacctgaaaaccgtcgtcactcttaccgtcgtccagtttgcgttgttcttcaccgatttctggctgcaactggcgcgctggatcgacagcacgatcctcgatgcgctttacggttggggatggggatggaaccgcccccacacgaattttgaccctctgattgggctgaacaacacgtttggcgacatgctgctgaacttcgtgatgggagccatgttcctggtgttacccgggttctgggtcgcggcgctgggatgggtcggttttcgcgcagggcataccattcaaggcatggccgaaggcaccaagggaggcgcacaggctggtggcaaaggcgcaggtgccatgacgggtggaaaactcaagtag

SEQ ID NO: 365534 - DNA, 366 bp, Pseudomonas aeruginosa
atgaacacgacaacccgtagcagtaccgcagaacgccttggccgctggcttggccgtggatggcggggctatgtgcgtcgtgagcggcgggtggccgcgtggctggtgtcggctggtgcgccgaacggtgtcgcgaccgctctggtgtggatcgtcaagctcgctgtgctaggggtgctgctctacgtggccttctggctgacgctgctcctggtgttcgctaccgtggctgcttgggcctcggcagcgaacaccccggacgaagatgtttggcccttcaccgacatagacgagcttcgcaatacgccgggttatgaccccaatctctacaacgacaacacccatgtcgactacaaggatgactga

SEQ ID NO: 365535 - DNA, 1890 bp, Pseudomonas aeruginosa
atgctttctttattccagcgaaaacggatcttggttcctgctgcgccgtcaccagtatctgccggtctttccaaagggctgacgcggccggaaccggccgcgtccttgcttgccacgccccgtcggcagaaactactggaacacatctggcagcgcacctcactctcgcgcaagcagttcgcggcgttgtaccgcgcgccgctggagcgttatgccgagctggtacagcagttcccggcatcggaaagccaccaccacgcttacctcggtggcatgctcgaccatgggctggagatcgtcgccttcgcgctcaaattgcggcagtcgcatctgctgccggccggcgcaacaccggaagaccaggccgcgcaggcagaggcctggacggccgcgacggcctatgccgcattgctgcatgacattggcaagatcgccgtcgacctgcatgtcgagcatgaggatggcagcgtctggcacccctggcacggcccgctgaggcatccctatcgcttccgctaccgcgatgatcgcgagtatcgcctgcatggcgcagccaccggcttgctctaccatcggttgctcgatgccggcatcctcgactggctcagtggctaccccgcgctttgggcagcactgctctatgtactggctggccagtacgagcacgccggcgtgctgggcgaactcgtcgtccaggccgaccgcgcatcggtggcccaggagctggggggcgatcctagccgcgccatggctgcgcccaagcatgctctgcaacgcaagctcatcaatggccttcgctatcttctgaaggaagagttgaagctgaaccagccccaggcatcggatggctggctgacacaggatgccttgtggctggtgagcaagaccgtctcggacaagctgcgcgcacaccttctgtcgcagggtatcgacggcatcccctcgaacaacacggccgtcttcaacgtgttgcaggatcacggcatgctgcagccgacgccggacggcaaggccatctggcgcgcaacggtcagcagtgagggcggctggtcgcacagctttacgctgctgcggatgtcgcctgcactgatctggcagccggacgagcgccccgagcccttcgccggaactgtgacggtggagatggcctccgagaccgacgccacggaacagccagcaaccagcacggatgaagtcgcagacagcattacaactaacgccggcaacgcttccgatgtcgccggacagctaccgtccaagctcgtatcaaccgacagtgctttacaccagcccacgggagaaaccaccgcaaatgcgatggacgagctgctgtccctgttcgaggagactgcgcaggaaagcagtggggagcgagagcagcctgttcaggacggcagcggcggatcgacgtctttcaccgagccacccatgaatgccgccgtcagctcgctgaagaaggtagccgaaatccctgactgtgcggaaccgtccagcgagcatttcatcgcctggcttcgcgacggcatccagtcccgtcgcctcatcatcaacgatgccaaggcgctcgtgcataccgtggcggacacggtttatctggtcagccctggtttgttccagcgctacgcccaggaataccccggtatctcggcgctcgccaagcaggacaaggtgcaggactggcagtggatacagaagcgcttcgagaagctgcaactgcatcgcaagcaggccagcggtctgaacatctggacctgcgaagtcaccgggccgcgcaaatcgcgacgcctgcatggctaccttctcgatgacgctcgcctgttgttttcggaaatgcctccgaacaacccttatctctcgccattatcggacgatgccactcgcagcgaataa

SEQ ID NO: 365536 - DNA, 1671 bp, Pseudomonas aeruginosa
atgcccacggcatacgcttatatccgctactcatcaaaggcccaaggcgaagccggtagggactccgttgataggcaaatggcttctattcaagcgattgtcaaatcccgcaatctgcacctccctcctgaaaatattttttccgatactggtatttctgcttttacaggtagcaataaaaccaaaggcaaactcaaagacctaatagatatgattagcgatttgagggttaaatctggcgattatatttttgttgaaagtatcgaccgccttagccgccaaaggctgctacaagccaaagagttagttaatggaatattagagaagggcattgtccttatcacaaccattgatggtcaaaggtatgaaaaaccgaatgaccataatggcattgatgatctacaacaagacatattgctttcagtcattgccaaacgtgcctatgaagaaagcaagaccaaatcagtaagaagaaaatctgcttggaatagagctaagaaattagcagaagaagaacaacagatcttcaacggacataatccaccctatggtattaggtacgacaaagaacataatcgttttgaaattgtagaagaagaggcaaaggaaatccgggacatatttgaaagcttaaaatatgtaggtgtttctttgtcgatcaagaaagtcaatgcttatgcaaaaagacgctggacaaatagaaacatcaaaataatgcttgataccaaatatgtgctcggctcatatatggcacaaagaagagatgaaaatcggaagaaggtttttgaacgatatattgaaggatattatccacaaatagtctcacacgagttatttaacgaagcagtctctgcgatgaaatcgcgggcacatagaaagcattatggcaatcaaactgttggtagtttgaatattttccgccattcgattaagtgcagcaactgcaacgcatcaatgctatttgagaaacagaaaaaccccaaaggcgttatatacccatactttcaatgcttcacccgaaaagaattgaagagcggttgcgaccaaccgcgatttcgttttgatttagcttttggtgtatttttagaattggttcggtttgcgacaacgagcagcgaaaccattgattacagtgattgggataaagaaggtgaatcagtcggttcattccaaaaaacccttttcaaactcttaacaagcacagtaaaagacaaagcacttgagcagaaaatatcacaagtgaaaaacctattacttgaacaaaagaactatcaagacaatatcaacaagtcttttgaagccttcaaggacgggatcatacctattgcctttatcaaaaaagcaagtgaaacagagacaaaaattgagtcattggaaaaagaactagcagaactcaacgctgagcattcgacaagaagcatttctttgaacgtccattcttataacgacataatcgatttatatcgaacggaaaccggaagacaaaaaataaacaaattctttatcagcaacaatataaccttcaatttctcatttgaacagaaggcaagaattttaagatgcaagatttactataaagatatccacgtagatgttgtgaacaagaaattctcgctgcacaatccgttaaaagaattcggcattgataatttaaacgaatactttaactaa

SEQ ID NO: 365537 - DNA, 1374 bp, Pseudomonas aeruginosa
atgattagagaaaaattaagcactcaaaagagtagaattgaaacacaaaacaccttggcatatacgattaaaaaagcagtgttgattgaaagcaatcgttgccagattggaacaaatcaagagtttatagaatttcttgcaaagaagtttgataaggcttgcaaaggaaaacaagaaaatacttctttccacgaaactttatctttccacacctccgataacatcacacctgaaaaggcacttgaaatagccaaagaactatatagcgatacgattggtttaaatcgtgagcactctttcgccgttcataatgatacggatgaattacatatccattttatttgggcaccaagagactttaacaacaaaatatattatcaaaaagatgactatcgaatcatagaaatgaagctaactgaacttgaattaaaacataatctttatttggttgaaaacagaaagctattaaatcctgaccttgaaactcaaccaagtaaatcaaagaaagagcaagcacttgagcaacgcggaattaaaaccattaagaagcaattcagagaagacgtaaataatgctttaagcaaaagtagaacaaccacaaacttcctcggctatctgcacgacaacggttattcgattattccaaatggtaaaaccgcatattcaattagcaaagacgggaacacattcaaagcgtctgactttggcgtttcctatgtctcattaaagaagaaacttgaagagcaacacgattttacagagttgttagagcattacaaaaacaaggaaaagccaaaggaaattgaagcctttatagccacagctagaaaggttgattttcttactaaaagtaaatatcaaacaactttagcgaagcatttctctccaattttggaggatgataaagttgagtattactataagaactccagtaatagaaaggcttttgaatactataaagacccgtcgaaagtctctttcaatgatttatccggtcagtccataagagctggcattcagcgacttactcaagatattaaggagcctggagctttgcattgttctggcccagaacacgctaaaaaaagaatgtggcttgagtttaaaatgatgaaccttgaagccaaaggttttacgttgagcggatacgagccatcgccagccgatttaaaggagttagaacaacgtaaggctgattatgctgcgatagataagaaatggaagaagtcaccagaagcaccagaagcacctatacagcccgttcctgtcattcctgaacctaccccaccggaagaaccagaaacaccgcagaacgtgccacaaccgcagccagagccatcaaagagacgtagacgaaatatgtattgcccataa

SEQ ID NO: 365538 - DNA, 960 bp, Pseudomonas aeruginosa
atgggaaaagcatttgtaagaattagatatacagacaagaagttatttgtccaggaccatttcatatcagtcaccaaggctcttttatctcttccggtgtttaatattaaacaaaggaagaatgcgtttttacagttaagaatagggcgtattgctcaatatgaagacatcaagattgatacttatcaacttagcctagatattgatttcaatcttttccttttcttaacaataaaagcaaatacaattcaatccgagcgtttcagttttagcctcgatgagttgttcgactttatgaacgtgtctaaaacaaatagatttggatatgttgataagatagatgaatctttacgtaaacttaaggttttaactgtctctttcaaaaaaggaccagaaacttttatttgtggattgctgaatgatgcggttgttaacagagaaacaaaaactgtagatattcaagtaagcgacaaatacaaaaacttttttattgctgatagtaatgctatttacaatgttcttcgtgataaatacaacgagctatcaactgaatatgaaaaagcactttatcttttttatacaacaaacaatgcgaacacccttaacacatacagcgttgagttgttaaaggtaagacttcaatgcgaagacgtagaggataaaaaatttttatttaatgttagaaaagccaataaagcacttgaagataaagggttgattgttgagttcttcgagaacaaagcttgtagaaaaactgtgtctatatctgtcaatgtcaacaagcataagccattcaaaaatcaggaatataagagaagtgaagtttcagatatagaaatgaatggtgaggttaaaggaataacagaagaagtgaaggaaaagaagacaaagctcaactggggatttaaaaggccagaagctgaagcgattgaagaagaagatgatgatttaccattctaa

SEQ ID NO: 365539 - DNA, 237 bp, Pseudomonas aeruginosa
atgatccgggtcttcgtttcatccctggcaacacattttcattctctcgtctcgatattccccatcccctcccgctatatctcgatttttcgcgctcctccccctaggtatttctcaccctctctcaaattcgtttcctcgctggctacccgcatcatcgagctgggcgagaacggcgtgaccgacttcagcggcagctacgacgactacctgcgcagccagggcgtgatcgtctga

SEQ ID NO: 365540 - DNA, 225 bp, Pseudomonas aeruginosa; identical to SEQ ID NO: 326155

SEQ ID NO: 365541 - DNA, 681 bp, Pseudomonas aeruginosa
atgaacacaatgcaggtaagtccgctgtttaaggtttcgtccaatggaccggtggcctctaaggatggctcactggtgcacttgcgtcagggcgagctggatggtgcctgtgggccgtactgtgtcgtttcagcgctgatcactctgggactgatggacagggacgatgtcgtgcacaacatgcatagctggaagggcaacgagcgtaaggggcgctttcgtgatgcgctgtatgcctttggtgtttatagcagcgaaggcaccgatggtgatgacctgctatggctgacggattactacaagcgtgtgggtctgcaagcggaacacgttaaaggtaaaaagcattacgtctttgactgtgtggctgacgctgtagcctctggtgagctgcctattgttggggtggagtggcagggtggtggcggccactggatgttggtagtgggttaccaaggagaggaggttggtgaggatattcaattgactcatctgctctgcctggacccgggccaggaagctcccaaggccagcctgtggaacgcggtgctggaggtctacaacagtgatggttcctccatccatcaggggcctattacgtccaatttctggggcatggacggcaaagtgacgaagtgccaagtcaaggataccgtcattctttcgctcgccggcgcaggttga

SEQ ID NO: 365542 - DNA, 4959 bp, Pseudomonas aeruginosa
atgacttttgccattgccggcctgaccaacgccaacgagttctacagccagcactacctggacgagatcctcgaaaaagacctcaaacccctgttcgacaagtggaaggagcagggcgccgacagccctatcgcccgcttgcgcacggcctccggtgccaacggctacttccgtgcccgccagcgcttcctcactgagcgcaaggccagcgagcgtgccagcctgtttatcgatctggtgcagccactgctgcaggccatcggctaccagctggcgccggaaaacctcgccttggccgatggcgagctgccggtgctggctacctaccgtgatgccaaacaccagccgctgttggtgatcgccgccgccattgccggagtggatgacgaggagctggggccgctgcagctcaagccgcaggcgaccgacagccacggcaaaagccgccaggccgacagcgattgggaagaagctctcagccgccatctgttcgccgatgaccacccgccgcgctgggtgctgctggtgcaccacgaggaatggctgctgatcgagcgcagcaagtgggggcgcaaggcgctgctcagcttcaagctgcccgacctgttcggcccgcgtgacgacaagctgctgcgcgctctggcggcactggccggcagccagtcggtactgcccgccgaaggtggcgtggccctgctcgacagcctggacgacaactcccacaagcatgccttcgaggtctccaccgacctcaagtacgccctgcgcgaatgtatcgagctgatcgccaacgaggccatctggtacaagcgcactgtggccaaggagaaggtctacgagcgcaacgacaccgacctggccgagcagctcagccgcgaaagcctgcgctacatgtaccgcctgctgttcctcttctacatcgaggcgcgccccgagctgggctatgcgcccatcgacgccgaggcctacctcaagggctacagcgtcgagcacctgcgcgagctggagcagactccgctgaccaccagcgaggcgcaggagggcacctacttccatgaaagcctcaagcagctgttcggcctgatctggcagggcttcccgcgtcgtgcggacaacagcgggcagatggacttcaccgcaagccacgacctgcttctggataccggctttaccatcgccccgctgcaaggccatttgttcgacccggcccgcaccccattgctgggcagcgtcaagctgcgcaaccgcgtgctgcaacaggtgatcgagctgatgtcgctctcccgcggcagcaataaacgcaggcgtggccgtatcagctacggcaccctgggcatcaaccagctcggcgccgtgtatgaatccctgctgtccttccgtggcttctttgccgaggaagacctctacgaagtccggcccgaccccaaaggcaaaaaagccagcacgggcgaggagggggaggactctgacaacgaggacgacctcgacagcagcgacgagccggaaagcagcgaggcggataagaagaaggatgccgagctcgacccgctggaagctgcttatttcgtcccggtcagcgctatcggccagtacaccgatgccgagcgcctgttcggcggcaatccgcgtaaatatgccaggggcacctttatctaccgcctggccggtcgtgcccgggaaaagtctgcctcctactacaccccggaggtgctgacccagtgcctggtggagcatgcgctgaaggaaatcctccccggcaaaaccgcagacgagattcttcagctcaccatctgcgagccggccatgggcagtgcggcgttcttgaacgaggcggtcaaccagctggccgaagcctacctgcaggccaaacagaaggagctgggccaaagtatcccgcacgagcagtacaccgaagaaaagcagcgggtgaagatgtacatcgccgacagcaatgtcttcggtgtggacttgaaccccattgccgtggaactggccgaggtctcgctctggctcaacgccattttcaagggcagccatgtgccttggtttggcctgcagctgtataacggcaactccctggtcggcgcccgccgcgaggtattcagcaccgcccagctcagccccggcaaaggcgagaacggtctggccgagcgcgactggcgcgccgcagcccccaaggcattgccgctgacccaggcgctgcagcccaccgagatataccacttcctgctgcccgccgaaggcatgggcatggtcagcgacaaggtggtcaaggcgctggagcctgccgccttcgagcagttcaagcaatggcgcaaggcttttaccgcgccgctgactaaagatgaagtgcgtcgtgtgcaggcgctgagtgaggcggctgaaaaactctggcagcaacacgctgaggagctcgcgcgggtgcgcaaggccacctgcgacgagctacacgtctggcccgatccggcggccaaccgcgcgcccaccagcaccgcgcagaaggacgctatctatcagcgcgagatgctcagcgaggcacagaaaaacgccagcccctaccgccgcctcaagctggtgatggatgcctggtgcgccctgtggttctggccgttggacaaggccagcgagttgcccagccgtgagcactggtggtttgtgctggaaaccgtgctgctcggcaacgcaagcctcagcatcgccccggccgatgatctgttcccggaaacccaaccgcaacaggggctggacttcacgcccgagcgcgaccgctatggccatgtggatatcgccgcgctggtcgaagcgctgccgcagttgcaggtggcccagcaggtggccagccagcagcactttatgcattgggcgctggaattttccgatgtgttcaaagcccgtggcggcttcgatgtaatcctcggtaacccgccgtggatcaaggtggagtggaacgagcagtcgctgttgtcagattttgatccgcgcttcgccattcgtaagctcagtgccaagcagacggcggatcagcgtgaggcggtgttagcggcgctgccgcaggccagggaggattatctggccgaatgtgtggccaccgagggcatgggtgagttcctcaatgccacccagaactacccgctgctcaaagggcagcagagcaacctgttcaaatgcttcctaccgttggtgtggcacatcggcaatggtgtgcaggcgttgttgcatccggaggggccgtacgacgatcccaatggaggggtgctgcgtgaggccatgtatttccggctccgcgcgcactaccaattccagaatgagctgaagctgtttgccgaaatcggtaatcgggtgaagttcagcatcaacatctacggtgcaggcgaggcgccggctttcaaaaccatggcgaacgtcatgcatccgcagactacctttgcggcgctggagcatgcaggcggcggcgcaacgcctggcatcaaaacggaggcagggagctgggacctggcaggtcatcgcaatcgtattgttgaggtgacggaaagcacgctggcaacgtttgctctgctttatgacgcacccggtactcctgcgctacaggctcgtttgccggcggtgcatagtcgcgaactggtgtcggtgctagagaaacttgcccgagtgccgcaccgcctgggtgatcttcgggacgattactacacaacagtttgtttcgatgaaacctacgcgcagcgagacggcaccatccgccgtcgcagccgaggagatcagggctttgtgagtaatccggcggacttcgtcctatccggcccgcatttctttgtgggtaaccctctcagtaaaacacctaagcctatctgtgaaacacacaaggcttacgacaccctcgacctccaaacactacccagcgactatctgccacgtactaattatttgcctgcctgcgatgcaatcgagtacgcccgtcgggtgccacgggttaactgggtcgacgagggtcaaagtgagacgagggcgatcacttgctactaccgtgttgggttacgtaagagacttagtctttcgggggagcggacgctgattgcgaccattattccgcgatcgatagcgcacatccttacctgccagactactgccttcagaatgcaaagcttagttcctgtcgtatcaggtctttacagtagtctgccgtatgattacctgatcaagtcgttggggcaggttgacttcaccgcaggtactaccaagatcatgccgttgccacaggtagatagccgactggtagtccgggcattgattcttaatagtctcactagccactacgccgacctctggcgcgattgctggaagccagtcttccagcaagacagctgggccagcaatgaccctcgcctgcctcggcagttcttcgcccagctcaccccagaatggcaacgcaactgcgccctgcgcagcgactacgcccgccgtcaggcgctggtggagatcgacgtgctcgccgcccaggcccttggtctgactttggacgaactgctgaccatctaccgtgtgcagttcccggtcatgcgccagtacgagcgcgatacctggtacgacgccagcggccgcatcgtctttaccaccagcaaaggactggctggcgtcggtctgccgcgcaaacccgctaagaaggacgagccctgcaccctgatccaccccgacggtcgccgcgaaagcaaacgcctcggctgggacgacgtgatgcccaaggacggcaagccccagctcgccgacggcaccgtcatcgagcgcatggtcttggacgacacccaacccggcggcccgatcaaccgcatcattcgctacaccgcccccttcaccctcgccgaccgcgaagccgactaccgagtggtctgggcgcattttgccaagatggggcaaatcaatgatgtgccatcagacctgtcacagcccgcggaggggcacccatga

SEQ ID NO: 365543 - DNA, 1101 bp, Pseudomonas aeruginosa
atgcgaaagctactcagaagtgtttcgtcgtacttcagcacatcccctgacgatgcctactgggacgaaaaggcgaccgaagtcacctacctcaacaagctctacatagaagaaaccaccctttctctaggcctagagcaactgacgctatatgaaagagctgccgccacggtcgggccgatagctttcgactcgctgctgtgcgaactcgatatcgacacgtcctaccccgcactgacgaaaacgcagatggggacagctgtcggcatgggtatcatcggcgttctcctcgctcacttcaccaacagcaaaggcgaggcgcttgaagcgttttttaaagaccttcactccccctataaagccagcaccggccctagtcccatcgattacagggctggaaaaaatcatcgctatatcttcggccatgatttcaatctgtggcaaaagctgcccgacgactacaccttcggtggcacgtccgtcggcggcaaaacgctttacactctgattatcgaacaaatgcagctagggtttcccgacgcgggtttcattggggtgcatgtgaaagcgatccttcacatcctaacccattatctgagcgatcttcccactatcgatgggcttcccctgcccttcagttcactgtttacgaaatgggtgaaggacgaaaccaaggtctctggctataaagctgaaaatccattgatggatgcactaggtaaagagtatgggaccatcaatgctgcagatatcgcctcgtatgccatcatcaagatcctgctgaagggacatcatggcattaccttctacaagaccaccgcaagcgaggatgagaaagcactgcaccatgcccagatgagcacgattgcatttgggactgccgtgcttatccagatgatgctgcttgtttctagcactgcggggcgaaccgggaaattaaattacctgatagccggccccttcctctggaatgcggggaaatccgttttgatcacccatcgccagcaccggcaagtcatcgaaggctacgatcaatcgctcgcactgcttgaagacaaatccatcaatttcgatgaatgggtgaaacaccaatgcgcctga

SEQ ID NO: 365544 - DNA, 342 bp, Pseudomonas aeruginosa
atgcgcctgatcgaccacgcacgtaagcctaacagtgagtatcacttcgagtcttccgatgagtactgtgacccggcgattgtcgatagagcggcacacgtcgtgcgggcaacccgcagcttagtgccagcggagctggctcagctgcagaccatcatcagcctggagaaactgcggtacgaatttgccattaacggacaggacatcaaagcacacggccagcaggtccaggccttgagaaatacgctggtccagcaatatggtcgagagccgttcgacaacggagaaatcgaaaaggcgttctataaggcgctgaacgaggagtacggctatgtcggctga

SEQ ID NO: 365545 - DNA, 2700 bp, Pseudomonas aeruginosa
atgaaaagtcatcccgatgccgccagccgttcggcggccgaggttgtcacgcagctacccgtgccgtcgcggctcgggctgctgcgtttcgagcggctgaacgagccgagctgggcactgctgttcctcgatcctgcctgcgagcgccagctcgggctgccggcgactaccctctgcgcactgctcgatgcgccttacgccagcctgatggaacccgaggcccgccaccgcctgcacgagcagatccagcagcaactggtgaagcgcccgcactaccaggtgagctacaagctgcacacacccaacggcgtgctgaccatgctggagttcggcgaagcctttcagcagcatggccgccagttgctgcacggctacctgatggtcgaggagcgacaggagagcgccgagcgcagcgaacagttgctcgacctggaatcgcagaacctgcgcctgaaggcgtccctggacctctaccagcgctcccaggacgaccacctgcaacacctgctgcgctcgcgcacccagcagaacctgatcgtccgcctggcccgccatcgctacctgtccagcgacccgctgctggaagccgcgcaactgatcacccaggccgcctgcgaagcctacggcaccgcgcgcgccggcatctggcgcctgctcgacgaccagcgcctggaagcggtgaccgtctaccgccgcgacctcgaccagtacgagaagccccagagcatcgacgccagccgctaccccgcctacctcgaggcggtacacagcgggcgcgccatcgacgcccacaacgcccagcgcgacccacgcacccaggaactctacaaggactacctgaagccgctgggcgtcaacgccctgctcgacgccaccatccgcatcggcggcgaggtggtcggcgtgctgtgcctggaacacgccggcgagaaccgcatgtggcagagcgacgagatcgccttcgccggggaactcgccgaccagtacgcgcaggtcctgatgaaccacgagcgacgcaatgtctccagcgccctgcacttgttccagcgcgcggtggaacagagcgccagcgccttcctgctgatcgaccgcgacggcgtggtggaatacgtcaatccgagcttcacctcgatcacccagtacagcgccgacgaagtgcgtaaccgacgcctgtccgagcttccggcgctggagaacctcagcgagctgctgttcgacgcgcgttccgcgctgacccagcagaacagctggcagggcgagttccgcagccgccgcaagaaccacgagccttactggggccagttgtcgctgtcgaaggtctacgacgatctcggcgagctgacccactacatcggcatctacgaagacatcacgcagaacaagctggcccagcagcacatcgagaaactcgcctaccgcgacaacctcaccggcctggccaaccggcactatttcatcggcgccctcgaggaacgcctggaaagcagcggcgaccgcccgctcagcctgctgctggtggacatcgacaacttcaagcggatcaatgacagcctcggccaccagaccggcgacaagctgctggtcagcctggcccggcgcttgcgcagttgcctcggcgacggcgccaccctggcgcgcttcgccagcaacgagttcgccgtgctgctcgacgacaccgcggtggaaaagggcgaaagcattgccgcgcaggtcctgcacatgctcgacaagccgctgttcgtcgacaaccagttgatcaacatcaccggctccatcggcctggccagcgccccgcagcacggctgcgacccgcagaccctgatgaagtacgccggcctggcgctgcacaaggccaaggccaacggcaagcaccaggtccaggtgttcaccgaggcgctgaccgccgaggccagctacaagctgttcgtcgagagcaacctgcgccgcgccctggcgcagaacgaactggcggtgcactaccagcccaagctgtgcctgcgcagcggccagttgctcggcctggaagccctgctgcgctggcagcatccggaaaaaggcatgatccgcccggaccgcttcatcagcgtggccgaggaaaccgggctgatcgtgccgatcggcaagtgggtgatccgcgaagcctgtcgccaggcccgcgagctggccgaggccgggctgggcgagctgcagatcgccatcaacctgtcgcccaagcagttcaccgacccggacctggtcggctcgatcgcggcgatcctccacgaagagaacattccggccagccagctggaactggagctcaccgaaagcctgctgctggacgccaccgacgatacccgccagcaactcgaacgcctgaagagcctcggcctgaccctggcgatggacgacttcggcaccggctactcgtcactgagctacctgaagaaattccccatcgacgtgatcaagatcgaccgcagcttcatcaaggacatcccggacagccaggacgacatggaaatcacctcggcggtgatcgccatggcccacaacctcaagctcaaggtagtcgccgaaggcgtggagagcgccgagcaactggccttcctccggcgcaaccgctgcgacatcggccagggctacctgttcgaccggccgatccccagcgacctgctcaataccagcctgctgcgctatccctgccgcaccctgcactga

SEQ ID NO: 365546 - DNA, 423 bp, Pseudomonas aeruginosa
atggttctgcgttctgaaatcctcaccaagaaaagcgagctgcccacgccggaccaggccctgccgggtcgcgaaagcgccatgccggtgcccgaagcgcacttcgtcaacggccgcccgctgaccgcgccgttccccgccggcctgcaacaggtgctgttcggcatgggctgcttctggggcgccgagcgtcgcctctggcagcaaccgggcgtctgggtgaccgcggtgggttatgccggcggctacacgccgaacccgacctacgacgaagtctgctccggcctgaccggccacagcgaggtcgtgctggtggtctacaacccgcaggagaccagcttcgaacagttgctcaaggtattctgggaagcccacgacccgacccagggattaggaggacagtcaagagtaaatctatgctag

SEQ ID NO: 365547 - DNA, 345 bp, Pseudomonas aeruginosa
gtgggcattctcctgtttccgatcatcttcgtctggttcctgttgcgacagggccacagcaccgctagccgggtgattggctttgcctggctggcgctggcgctggtgctggttggcatggcttccagtgatcgcccagcctgtaagtcgaccgctgcttcgagcggccagagccagccggccaaggtggttgcttcagtcgatccgctgattgcagtcaacgcccagcaactggcccaggcctatgaccgcaacacggttgcggctgatcaggagttcaaaggcaagcgcttcaaggtcacaggcgtagtggatgccatcaacacggctagcgggtttaagtag

SEQ ID NO: 365548 - DNA, 186 bp, Pseudomonas aeruginosa
gtgcgggtgattctgagctgggtggcaccggacccctaccatccgttcgccgcgatcatgacccaggtcaccgaaccgctgctgggcccggtgcgtaaagtgctgccgaacttgggcggcctcgacctcagcccgctggtggtgctgctcggcctgcagttcctgatggtgctgttcgcgctgtga

SEQ ID NO: 365549 - DNA, 282 bp, Pseudomonas aeruginosa
gtgagccatccctgccagcgcgacggtgacgactggctggtgcactgctatttgcagccgcgcgccagccgcagcgaagtggtgggtgaacacgatggcgcgctgaagatccgtctcagcgcgccgccggtggacggcgctgccaacaccgagctgtgcgcttttttggccaagcagttcggtaccagcaagacccaggtcgagatcgaaaccggccataccagccgccgcaaacgcgtacgggtgcgcggcgccagccgccggccggacttcgccggctga

SEQ ID NO: 365550 - DNA, 975 bp, Pseudomonas aeruginosa
atgacagaacaacgggtgaaggtggcagcggtccagtttgaaggtgtgccgggccgagtggccgacaatctggagcggctgcggccgtgggtggcgcgggcggtgcaagagggcgccgaagtgatcgcgttgccggaattctttgcttcaccgctgccgttcaagcaggtggtgcatgacagcgtgatgcgggctgataacccggcggtggcgttcctgcgcgacaccgcccgccgccacggcgtcaccatcggcggctcgatgctgatcgttgagggcgacagcatctataaccgctaccacttggtggagccggacggccgcatccatctgcacgacaaagacctgccgaccatgtgggaaggcgccttctacggtcccggtgctgacgacggcgtgttcgataccgcgctgggcggtgtcggcacagcggtgtgctgggagctgatccgcaccggcaccgcccagcgtatgttgggccgggtggggttggtgatgagcggcacccattggtggacagtgccggataactggggtgggcttaccgcccgcgcgctggcgaggctggcggcgcagaaccggcgcatgtcggaccaagcgccgtcacagttcgcgctccatctgggggtgccggtggtgcaggcgtcgcactgcgggcagttcgacactgacttcatgctggtgccgggctggcgcaaaacgttgccgtatcgcaccgaatttgtcggtgccacgcagatcgtcgatgccggcggccaagtattggcgcggcgcgatacccgtgagggcccagggctggtgatggcgtcagtggcgttgggacagcgggcaccggcgcagccgttgccgaaccggttctggctgccgccgctgccgccgttaatgcgtgcgtattggcatcagcagaacgcgtgcgccaagcgctattacgagcgtgaagggcgcgcgcgcggactggccgctgcggcgcgctaa

SEQ ID NO: 365551 - DNA, 567 bp, Pseudomonas aeruginosa
atggccaacgacctggaaaccccgattctcgatgccgcactggcgcgtttgcagcacggcggctgggccgccatgacggtggcggccgtggccgccgacgccggcgtcagccgccagcaggtgtaccgcgccatcggcgaccgccagcagctgggccggcgggtgctgatgcgtgaggtgcagcgtttcatccaaccggtgctggctgcccaccgtgcgcacccggacgacgccgtgcgcggcatcagcagcgccagcgccaccacattggcggcggccgctaacaatctactgatcaaagcgctgattgctggccaagcctcaccgctgctgccatgggtggcattggagtccggcccggtgctggaaccggtgctgcaagcggtgaccgcctcggccttagctacctacggcgagcaccacagccccgcagctctgacgcgggccatcgaggtctcggtccgtctgaccatcagccatttgctgcaacccacgtcatcccaagaagacgccgtggcgcagatccacgacaccatcgctgctttgttgagcctacctggagcctga

SEQ ID NO: 365552 - DNA, 1764 bp, Pseudomonas aeruginosa
atggaactcaatctggaacagcaagaacgcctgttgctcatgcaactgcggcgcggtcatccgcacctcaggttcagcagcaagctggagccggtgtttttccgcgaccgtttccgcttcatgcaggcgcactgggggctggtactggtgatgatcgccgccgtggctttccagctgatctatgcgctgtccgacatgtttctgatgccgctgcaggtggcgctggcgctcttgccgttgcgagcgatctgcattgtcacggtgatcgtttcctgcctgtattttcggcgtcgggaaagcgatccgaagaaggcctacaccctgttcggcctgacctacctggtgtgcggcgtgtgcgtggtgctgctgatctacctcagccgccacctggggcagcccacctcctatgagggcctggcgctgttgctgctgttcggctacgggctgatcaacctgccgttccgcgccgtcactatcgccggctggctgctgttcctgctgtatgcggggctgggattgtcgttgtcgccctcgccggagttgtcctatcagctgctgtttctggcctgcgtcaacctgatcggtagcgccggcacctatgtccaggagcatgcgcaccgcagcgcctggatcaacctcaagttgttgaacattgcccggcgccggatgcagagcgacacccagggcaagctgcggatgctcacggccgtcagccacgacctgcgtcagccgctgaatgccatgggcctgtatgcccagcacttgcatgaatgcgcaacggagcccgaggtgcggcgcatcagcggccgcttgaatgcgtcggtgggccagctcaaccggatgttgcagtcactgctggaatacaaccgcctgaccttgtccggcggggtgtcggtgcaggtgcagagcctggaattgcgcccgctgctcagccgcctgtgtgccgaaagccaggtcgaagccccgccccaggtgagcctggagtgcgcgccgctgtgggtgcgcagcgacccgctgttgctggaacggctgctgcgcaacctgctcaccaacgcacagcggcatgcgcaggccacgcatgtctggctgcatgcggtacagcatgaggacctggtgtggctggaggtgggcgacgatggctgtggcatgtcgggcgaggagcaggagggggtgttcgaggagtttcgccaactgaacaaccccgggcgcaagacggagcagggcctggggctgggcctggccattgtgcggcagatggcgttgctgctcggtcatactctgcagttggagtcgagcccggggcagggcgcgcgctttatcctgcacttgccgctggcagagcaggtgccggagcagtcagtgcccagccaggtgtttgccagcgggcgcattctgctgctggaggacgatgaagccagccgcgatgccctgcaggccttgttgcagcgctggggctgcgaggtctgcgcctgtgccgatctgcaggcggcgctggcctgtgtcgaggtgctggagccgcaactgttgatcagcgacttccgcctgggcacggaggaggacggggtgatggcgatcgagcgtttgcgcgagcgcttcgggcgaatgctgccggccttgctggtgagtgccgacaccagccccgagctgcagcggcgctgcatgctgctcaatatcaacctgcagggcaaacccttgctgccggtgcgtttgcgccaggcgctgagcctgctgctgcgggcggagcggggcgccctggtgcgctga

SEQ ID NO: 365553 - DNA, 618 bp, Pseudomonas aeruginosa
atgacagcgctatgcacttctctgcccgagcgtctctcgctccttctggtcgatgaccacaaaatctttctcgacggcctgaccctggccttgcgaccgctgacccgcgaactgcaaatccacaccgcgcagaatgccgtcgaggccgaagcctggctgcaaaaatgcgacttcgacctggtcctgctcgacctgcgcttgccggacgtgccggggctggagctgctgcagcgctggcagaagcagcggcgcatgacgccggtggccatcctcagcgccagcgactccagtcaggatgcccgcgccgccctggcggccggcgccctgggcttcattgccaaaagcgccgatggcgaagcgattcgccaagccgtgacccgtgtgctgctgggggaaaccttgccggccccggcgccgcaggagatttgccgcctgactccgcgtcagcaggaaatcctgccgctgctggccgagggcctgcccaacaagctaatcagccgccgcctggggctgtccgaagacacggtcaagacccacctcaagaccctgtaccaggaactcaacgtgcatacccgcaccgcctgtgtcagcgccgcgcggcaacgcggctggctctaa

SEQ ID NO: 365554 - DNA, 1248 bp, Pseudomonas aeruginosa
atgcagtactcacgtcttccccacgccatcgccctgacccttgccggtttttccagctacagcctggcgaatgggctggccctcaatgagcagagcgtgagtggcatgggcaccgccttcgccggtcgcgcctcctccgccctggatgccagcaccctgtacggcaacccggcgggcatgtcgaaactcaaacgcaccgaagtcgtcggcggtgccgcctacgtcaagccgaaaaccgacatcagcgacgtgaacacctcggtcagcggcaccagcaagggcgatatcgcccccggcgccgccgtgcccttcggctatgtcgtgaccccgcttaatgaagactttcatttcggcctgggcttctatgtgccgttcggcgtggtcagcgacaacgagaaaagtttccagggccgcgctcacgggctgtacagcaaggtgcaggtgacgaccctgcagccaaccatcagctaccgcatcagcgataccctttcggtgggcttcggtccaaccctcaacaagatcgacggcaagctgaccaaccgcctggacacttcgatgctgggcggcagtggtggtaccagcctcaagatcaagggtgacgacatcgcctacggcttcaacctcggcgtgctgtgggatgtcaccgaccagttggccctgggcctcacctaccactccaaggttgagtacgagttggaaggccacaccaaggtcgccaactcgccggcaggcatgctcgacggccgcttcgacaccagcctggatatcaccacccccgaatcgatcgacgcctccctcacctaccggctcaatgagcgctggaccacctacgccggcatcacctggacccgctggagccgtctggacaaaatcgttgccgaaaccagcagcgcgtttctgggcgacatcgacgagcagatgggctggcacgacacctggtcctacgccatcggcgccgcttaccagctgaacccgcaatgggtcctgcgcgccggcctggcgctggaccagtcgcccaccagcaatgccgagcgcaacgtgcgcatcccggtcggcgatcgcaagatcttctccctgggcgccggctggagcccgaccccggacgttaccattgacctggcctactcttacctgcgggaagagtcggttaacgtgaatcgcgcggcggacaccttcaaaccggcctacagcgcccagtaccagaacagcgcccacgggatcggcacccagctgacttaccgcttctaa

SEQ ID NO: 365555 - DNA, 642 bp, Pseudomonas aeruginosa
atgggcatcgataaaccgggcctcgccgtgcaggaccgtgatggccgggtggtcgcgcagaatcccctcgtacttggcgtcacgcagttcctcgacacgtcgctgctgctgctcgagcagcttggcccgatccaccaccggcgcctgggcgctcaggcctgcatcgaagggactttccgtacgcaagtgggcaatatgggccgcgcgaatcatgatcttcgaaggcacacagcctgtattgacacaggtaccgccgacggtgccgcgttcgatcagggtgatccgggcgccgcgctcggcggctttcagggccgccgccatggcggcgccgccgctgccgatcaccgcgatgtgcggggcgtcttcatcacggcccttggacaccgatgcgcctgccggggaagtggacccactgttggccagtcgagcttggtagccaagtcgggtcacggcaaacgtcaacgccgaggccggtgtctccggatcaacggctaccgatgccgtcccctgaggataggatacctccaccgactgcacgccgggcagcttctccagggcttccctgacatgatccgcacagcggtcacaggtcatgccactcacgttgagttcaatcatcacgtttctccgagtcttcattag

SEQ ID NO: 365556 - DNA, 240 bp, Pseudomonas aeruginosa
gtgaaagattcgcagaaatttttaagcgtcgtgcttggcaccgggttgatggtgctgtgttgcgccgcgccaatcgccctggtgctattcggtacggcgggcctggccgcgttggcaggctatctcgattacctgctgtttgccgccctggccatcggcttacctctctacgcgcgataccacaagcggaagcaggatgccggctttactaatgaagactcggagaaacgtgatgattga

SEQ ID NO: 365557 - DNA, 258 bp, Pseudomonas aeruginosa
atgaagaatcccaagcccctgctgcgcgtgagcgtgatcggcaccgtcctggtggcattgtgctgctttacgccgatcctggtgatcctgcttggcacggtgggcctggcggggctgacgggctatctcgacgttgtgttattgccggccctggccttcttcatcggcctgaccatttatgcgatttggcgtaagaagcagttcgacgcctgttgtgacaacggctctatcaaatcaaggaatacgccccctgagtga

SEQ ID NO: 365558 - DNA, 297 bp, Pseudomonas aeruginosa
atgaaagctcgtttcgccttcatcgcgctactcgccctgctcagcacgcccgccttagcggccctgcagaccgtgacgctgtcggtgccgggcatgacctgtgccgcctgcccgatcaccgtcaaggccgccctcaacaaggtggacggcgtctcgcaagtcgacgtgagctacgcggatctcgaggccgtggtcacctttgacgacgcccgaacgtcggtggaggcattgaccgaggccaccatcaacgctgggtatccatcaaccccgacatcctcgcaagcggatcgagagtga

SEQ ID NO: 365559 - DNA, 351 bp, Pseudomonas aeruginosa
atgcggacatctaaaacggggcgagggcccctggccgccggaggagtcgcggccctcctggcctcggcgtgttgcctcggcccgctggtgctgatcacgctgggcgtttccggcgcctggatcagcaatctggcggcgttggagccctatcgcccgctctttatcggcgtcgcgctggtggcgatgttcttcgcctggcgtcgcgtctttcggccagtggaaaagtgccagccgggagaggtgtgtgccgtgccacgggtcaggacgggctacaaggcgatcttctggctcgtatcgctgctggtgctaatcgccctggtattcccctacatcttgcccctgttctattaa

SEQ ID NO: 365560 - DNA, 447 bp, Pseudomonas aeruginosa
atgaagagacatgcagataaagtggcggacaccatgaccattggcggcctggccaaggcggccggcgtcaatgtcgagacaatccgctattaccagcgacgagggctattatcggagcccgaacgccctcccggaggtattcgacgctatagtgccgccgatatcgacaggttgacgttcgtgaaaacggcgcagcagctgggctttagtctggatgagatcagtgacctacttcggctggaagatggcgcccactgtcaagaagccagtgctctcgcagagcacaagttaggggacgttcgcgagaagatcgacaggcttgaaagaattgagaaggtgctgagcgaaatggtcgacagatgccatgcacaacaaggcaatatcacttgcccgctaattgcgtcattgcatgaagggctcagagaagcagaagacccaagggagtaa

SEQ ID NO: 365561 - DNA, 864 bp, Pseudomonas aeruginosa
atgaacgcgaacactaaagcgatctacgagctttgtagggttatcaaggaacagcaagagcttttacgtctagctctttgggttatgtcgcaggggccgactgttttccgaggccaagaaattaaatgtgttttaaagtgggatcaggttcgagcagcgagcgctacgtgtttaggggccggccagtccttgaatacaatcctaaaaagctcagaggagcgaggcatacctgttcgcgatctgtacccagttgcgcggagtgtggttgaaggttttatcaatgcagctttctttataacacaaccggtcgacattgctcagcgtgctttgaaacataaagactacgcagcttggaggcatacgaatcgagtggttggcactggaaagtttacattcagtttgagctcttgtagcgatccacaggaagcggcagcgaggctttttcctgagttttctggaaaaggaagagggtcttggagcactctcgatgcaccgtcaaaaattgatcggattggaaggagcgttcagtcttctggtggagccttgctcggcgcgtatgggcttatatatgccatctcttctgaaattatacatggttctgtttacggtatgagctatttcatgagcgcacataacccaggagacatgacggttgagggttttcaaaatggcacggaaagccaagtagtgaccattctaaccgctgttagccatgcagccagtggttttctttctgcgttttggcagctgcatcagtgtcgtccagcgattgatgccgagcgttccctttttgaacgcattctcaaggctgtccagtgtggcgacgtcgcccctgcggctccatcgccggaagatggagcttag

SEQ ID NO: 365562 - DNA, 2214 bp, Pseudomonas aeruginosa
atgataactaaaagacttgaactttcacttgacctactcaagcctagcgaatgggagaaattcgaaaagctggcatcgatctttctagcttccgaatttgatgaattacgcacagtggctgctcaatcaggtgatggcggacgagattctgagctttattctccactttccgagccaaaggtggtttgtcagtattcggtagctgaagattggcaagcaaaaatcaacgccacagtccggagattgaagacaacaattccagatgtactggttctggtttatgcaacaaacaaacagattggcgctgatgcggacgaactaaagaaaagacttcggaccaagcatggactgacgttagatatacgagataaaaactggttctgtgatcgagtcttagaaactcagtctagacaaatagcagctgaagagatggcctgcttggttgttgatccatacctttcgagttcaggtattggctcgaaaacatcgacggaacttagctcacctgaagctatcgcagcattaacctttctcgggcttcaatggcaagacgatgctcgagacaaagggctaacaaaattagcatttggcgcattggtacgagctgcattggtcgatactgacacaaacaacaggatcacaaaagcagaactctacgatagagttagcagggttttgccggggcacccaattgagcaactaaaacagccaatcgacactgcaattaggcacctcggcaagtctgccataaaacagtggcctggtgaagagttttgcctgtctcacgacgaacttataaaattcaaagaatttaaagcagaaaaagctttagctgaaaaggaacttaccatctcgatagagcaaattacaaatctccttctttctaaatccagcgaatcagccaaacacgcacaagatgtaacacatatacttcgctcaattactgatgcggtgctactagaaagaagccagtcttttgcaatggctgtccaatcaggggcacttgcgaacctagctgagaatgattttaagtcaacaatattatctgaactaacaaaatcaaatctccccaaaataccaaatgttgattggatcaatatactgcaacgcggagtcggcgcaatactgacaagcgatgcccctgcaattcaacaacacttacgctcattagccgactcatatacactcatggcgtttctcaagcagacgcccgacgtacagagcgcagtggaaaagatgttctctcacgggaaaatttggctagatacaacagtcatacttcctcttatcgcggaaagcctctcatctggcgacgaaggcagcggtagatttagcagaatgattcaggcggcattagacgctgggttaaagcttcatgtaacgccaggggtaatcgaagaaatagaacgccacatgaatagatcattagtgtgtgcgcgcatggatttaccccaatggaacggagccataccttacctacttgagaaatatgtagggagtgggcgatctattctaaccttttcgagctggctcgagaatttccgaggcagcgccaggccacttcaggacctatcagattaccttagagaagaattaaaaattcatgagagatcattagaaagagaaagcgacagtgcatctcaagagcttaagagagctctccatggaatatggcttgagcgttatgaaagaagaaaagaacgatacggagtaatactagacgacatggcggtgactcggctgataagtcatgacatcgaatgctataccggagtcgttcagctcaggacacaagagaagtcatccccctttggctatagtgcgtggtggctgacagtagaccggcaaacattcgatttaaaaagccgactgcgcacattaatggcagaatctccaccagactctcctgtcatgagtgctgacttcctagttaattatctcgcattcggccctctgaggaggcgagtaacaaaaaatactgagtcgcaccttccattgctaatgattctcggaaatgcaggccagctaactcctgagcttatggtagaagctgaagcactaagatcccaacttcaaggcctaccggagcgcatagtcagaagacaagtccgtgaccacttagatcgtgcaagagcagctactggaccaatatcaaatcaaggaatggatagcttagaggagactttatcgctagatgttaaaatcgaaagctaa

SEQ ID NO: 365563 - DNA, 2823 bp, Pseudomonas aeruginosa
atggacgagagttacggcaatcccacccaggtgaccgaggaaattgccgccagcctgaccggcggaaccttgcacagccgggtggtggagcgccagtacagcaacgacggcgcctcctggctggttggtttcgtcacccgcgaaaccgaaagtaccagtggcgacagcgacagcaagtcgcgggtgcaattgcgcagcgcgcagccggggactctagcgccggccagcgaaacatctttcagtggctcgcccggtgcggagatcacccgtcaatacagctacgatggcaacggccggatcgtccggattaccaccagcggcgccggactggcggcgcgcagcgaacagttcggcgcctaccaggggccctggccgggcactcggtccaatgccctcggccatgtcgagcgcttcgcctacgaggcggcccgcggccaaccgaccagcaaggtcgacgccaacggcctggccgagagttatctctacgacgctttcggccgggaaaccctgcgccgcttcgccgacggtagcctgctcgccaccgactatctggtttgcggcagccgggcgatctgtgccagcggcgccaaggtagccgtgcgcacgcgtaccgtcaggggcagccagcagggcgcggtggaacgctggcagtacctggatggcttcggtcgggtcctgcgcgaccgtcgccaggccttcgacggtcgttggatcaatgtcgacaacagttacgacgcgctgggccggcagcgttcgactaccgagccttacatcgaggcggcgaccgtcctacagaccacctgggacgcccaggaccggccgttggcccggcagttgcccagtggggcgcaactgagctacagctacggcgcgcgcgctgctggtggcagttggaagcaatatagcctcggctacgacggaaggagcctgaccgagcgccgcgaatacgatgcgcgtggcaagctggtgctcagtaccaatgccctgggcagcgccggcgaggtgtccgttcgctaccgctacgacgccgacggcaacctggcctggacccaggtcgctggcgacagccgcagcgagatccgcatgagctacgacgcggcgggccgtcgcaccggccttttcgacccgaacagcggccaggaaagcgtgcagtacgatgccctgggccaggccctggtgcgtaccgccagcgacggcagtcgcaccgagcgcaagtacgacctgctcggccgggtgctcgagcagaccgaccgcctgggcggccaggccagcatttcgcgctggcagtacgacacgggaacgaaaagcctgggcaagctggtcggcgtggccgggccgggctatcgccaggcgctgctctacgacgatctcgcgcggttgaaggcgagaggctgggatatcgaagtcgacggtgtcacccgcagctaccaggagtcgtatggctacgacggcttcagccgcctggcgagcaccaccctgggcaacggccaggtgctgcgccatctctacaatggatacggcttcgccgctggggagcaggacggcgccgggacgacgctgcggcagatccaggctcgcgacgcccgcgaccagatcgttcgcgaaagctacggcaacggtgtgctaagccagcgcgactaccagcccgccaccggctggttgacgcgcatccaggcgagcaagggcggcagtgtcctgcagagcctgagctaccgctacgatggcctcggcaacctgctggagcgcagcgacgcccgcggctacagcgaagtgctgagctacgatgacctcaatcgactgttgcgcagcgcgcggaccctggatggcacacaggtggtccaggactttacctacgacgccctgggcaacctgaccggcaagagcggtgtcggcgcctatcgctacggcagctattcgagcgccgagcagcagctctgtgctggtcgcggcggggtggcccagcccggaccgcacgccgtgcgcggcaccagcgccgggacgtattgctatgacgctcgcggcaaccagctcagcgggccggggcgacaagtcaagtacgcatcgttcgataaacccgtggaaatttccgcaggttccagcctcagccgcttctcctacgatcccgagcgcaagcgctacctgcagacggtggatgggcgcacctccgtctacctggacgaggggcgtttcgaggaggtcaacgacggcgggcgcagttggcaggacgcctacgtcggcgactacctgatcctgcgcaaggaagggggcgccgtcaaaaagctctacctgctgcgcgatgcgctcggctcggtggaaatcctgctcgacgccaacggtgccgtcagcgaacgccagtctttcgccgcgttcggcgaacaccgtggcgctgactggaaggacaacggcaaccaacccaccgccacctccacccggcgtggcttcaccggccacgagcacctggaggagtccgggctcgtccatatgaacgggcgggtctatgacccggtgatcgggcggttcctcagcgccgatatcgtctatcaggatacggccaatgcgcaggcctacaaccgttactcctatggctggaataatccgatcgccagtgtggatccgacggggtatgcgttggaggaaatttcgtctggcaatagttggtactcaccgtttataagtaatagttggctggttttggggaatgcctttaaaggtaatcttccagatagttactgggacttaggggggcgttcaagcagaatcttaactttgcggcgactacccttgctggaaatccattttctatttatgggttttcgcgggtaa

SEQ ID NO: 365564 - DNA, 792 bp, Pseudomonas aeruginosa
atggcacagcacctgctcaaacaacgcatacttgatcgccttaaaaagatcagcaacgtctcgtttgaacagagtttagagcgtctcagagctcaattgaaagacctctacactgacaccccaaccgggcatggcagagtgacaacagaaattcgcaaagaactagataacaaacaagccctagccacattaataattgactgggagaaagcgattgagcacgagaaagaaaaattcaagagcgaaacaagcaacaagaagaaagagcaacaccaaaaagaaatcgaaagactaaagctttcactaccagttaaacatgccacgctctatattgagctagcatccaaagccaaaagcgcaggcaagacagaacaagcatgggcttatgcccttgaggccgcccatctctgcggggagatatcttcaaactcgatcatcgaatttgacacactcaccacagagaaaacaagcaaacagaacagcaacaacgcaaagggaataaacaaaaagctccttttactaaaagaatatattgccaagctcataagagaacatacccctcaagacggctggcgtacaaaaaccgatgcagtcatagctatatcatcactcaaatccaccaataaaattaatgagaaccccaaaactctgatcgaagaattcattgagaaaaatgatattaaaagagcaaaatcttccaatatagcaaatctcttactgaaaaaatggacaaatgaacctggagcaattcaagacgcgttaaagaaagccataccccagaaaaaccaatga

SEQ ID NO: 365565 - DNA, 2301 bp, Pseudomonas aeruginosa
atgcaacgctttgatcgcagcagtgagccgccaccctttacgctgcagggtagggaagcgtcaatccaccggaaaaaattggctaattttttcctcatggatgagaagaagagggcacagactcgtgtgccagatttcggatcagagctagatcatgagtccctgaatgcgggtttgaacaggcttttccgaggtaagtgttcattctgcgaaagtatggttaccaccatgccttacaggttccgcccccctagcgacgccactccagtggcccataactcggattctcacctatattactcgtggctgagtaatgcttgggaaaacctgtattcaatctgtgaagggtgccatcctaagcaacaacccacttacttccccgttcgtggaaaacgcgccccactacctacgaagaatcaactagaaaactatgcgaatgaggagtttggactatggcgcgaccacccaccaaaggaaaagccgctccttctagatccttgcgaaaagtgtgatttcgctcgccacttacaaatcgacctctatggaatcctgctaccacgatcaaagcgcggacaggcaacagtcgaatatttcgagcttaatcgggacgagttatgtagcgcgagggcaatccgcctaaatgaatatttgactcgcctgattgatagcactaccccccaggcgcacgcgagtaatgacccggaactgttcgacttcgccaaactggagttcggcgggctgtggtacctcatttgccgcgaagtgtttttatttatttcaccgggcaacccacagcaactatctctgtcgccaaagcaaatccctctatcgattaagaagattacccgacgtttggattatcggcttgaccgagacaaactagaaaactggctgaacgattctttacgagatgttttcacctatgactcgtacgagagcaggggtattactgattcttctcccaccttagaggtcatcacgctcaacaattttaaggggatagagcgcctggagctagccatgccaccagctcataagtccacagaagagctcccccccctactgcagcccgccatgctaatccttggagaaaatgccgctggcaaaagctctattttagaggcaattgctctggcgcttacaacagatcaggggcgtaacgagctacgtctagatgtatcatccataccacttgatcctgagctcctaggcgcattttctgccccccgcagtgcatcggcacaagtagttttgaagttcgacaatggcaccactagaacccttaccatagctgacggacagtaccagatcgaaggtagcaccggagctccacccgtatttgcctacggggcattccgacagtaccagaagaagagtaacagccgccactcaccggccaaatcaatcattaacttatttcaatccgacaagctgctcgccaatcccgagcaatggttattgaaattagatgaagccgacttcaatagggtgatacggatactgcgcgaaatattgtcgatcgagggtgagtttgaggttatagagcgagactttgataaccaacgatgcctcattgtcacggccgccggtggtaactcccgtcacctcacacctctgagcctggcatcttccggctacagatcaatgttatcgatgatctgtgacattctccatggactaatgaatagcaactttaatgtcataattgaaagcttggaatcagcccaagcagtggtactcattgatgaaattgaggcccaccttcatcctcgttggaagattcagatcatgcaagccctacgtagggctctacctaaagtcacttttatcgcaacaacccacgatcccttgtgcctacgtggaatgcaggatggagaggtagttgtgatgcagcgagttataagcgacgctgccgccagcgaatggccggtgatggttgaacgaattgcacatttgccagacgtgggccaactgaccatcgagcaattactaacttcggatttcttcagcttggcatccacagaccaaccagaaaccgagcgcgagctggcaatgttcgcagatttgttagcggcgagggagaaagggcaacccttgacttcagctcaggaccaagcatggaaagtattcgagcgcgacgttcgcgacgccttaccggtaggatcaacagaagtgcaacgtttggtacaagaggctgtggcggagtacctaaaggagcgcagacaagcttcctctatcacacttagcagtctgcgtaatgctgccaagacccggatcgtcaatattctgagggcactttaa

SEQ ID NO: 365566 - DNA, 1014 bp, Pseudomonas aeruginosa
atgcgcgcggtcattcgcaacgaggtcaaaacgcctgatgcaattggaggggaagactcacctgccggcaaagagcttgagaaactcagacggcactttgcgcagcccgtagggaaagtgcctgcattctcggtgtacaagtccgacagtgtgaagaagcagcttaatgcgttgttccatggtaagtgtgcctattgtgaaagtttttatgcatcaaccgcgccagtagatgtagaacactaccgccctaagggagccgtctacgaggatgtgaatcatccaggatattggtggctagcaatggactgggacaaccttctgccgagttgcatcgattgcaatcgtaaacgtaaacagaaggtcgccaatctttctgctcagctggtaacgctgcaggccgggcagaaaggcttcagtcaaagcctgctgatgtccagcggcaagaaagacagcttcccagtgctcggcactcgcgcgatggcagagggcgccgccatcactgatgaataccctctattgcttgacccctgtcgagacgatccgcaggagcacctaaagttccacattgaccgagaaaatctgattagcttggttgtacctagaccacatccaggggcgggattaccggttcaggcaggtacgggggccgatgacgcaacgcgttctgtaattgagcaagccttggaagcagggctgagccttaaaggcgcactatccatccatgtttacggactcaaccgtctgggattagtacaggaccgtacgcgcatactgcgacagttagagttccttgaaatgctcgccatcgagatcgcatctttggctgaagcactagagcctaaccctgataatcctgacggacacactgaccgtgacaagagtatcgttcagcgaatgtatctacttcaggaccacatcctgcaggaaatgaagcgcatggctagcccagaggccccatactcggtaatggtacaaacttggattgaaggctttaaagcgcgcctgttaaactaa

SEQ ID NO: 365567 - DNA, 1278 bp, Pseudomonas aeruginosa
atgtctttggaatcccttgttgatggactctacgccgatccagatgtacaacggatgctggcgatttctacccaaagcgagcccctccagatctgttaccccaaggaggtgaatgtttcgcgcttcttggcttggctgttggaccccaaccagggccacggtctaggagaccaggcgataaaatcattactgatccgtgcaggccaatctgagtgcttgtactttctggcgttgaacgatcggcgatttcttgcggcatcaaatattcaaaacttggcattctcatcaataattgtcatgacggaagcggagttgggcttgccagggggagctcgctacattgacgtgctggcagtggaccccgcagcgaagttatacgtcgctattgagaataaatttggtcatcgtgaaggaaaagatcaaactaaaacctactataaggcgctgcgcaagctgtttccctcttatcggggtgttcacctatttcttgatagtaacgagagcgagccagagtgtgataaatggattccggtgagctatacatggctggtggattttatttatcaggttgaacagttgaactgggtggcgccacatgtaaaatccactatggctcaatttcgtcaagttattaaagaggaggaggaggtcgctgagggaagcgcattaggaagacttgtaactgctgtggccagtcaacatggtgaggctttggatgcaatgcatgagattctgacgccaaatgctcaccgttcacgtgctaaggacttggccgtgttagtcagtggcgcaccattaagtaatgatgcaaaagcaaatgtccggttgtttcaactatacagtcgacgaccgcaggtttgggataggtgcttgaaagagcgcaagttcgcaaggtttcaccgcttgctgagtgagcagtttagtactctcacagtcgattcgcgacgggtcgttacttacttcagtttgaaggactttgaacgactattggatccggatcttggcactgtctgggcgggcgcgatcagggttcgccaagaaggtgagcatttcaaggttgctacgtatatatctttaagttgtgtgaaaaaagagtgtagggagatgttgattgagattgccaatgcagagcgctcacgtcaacgtattcgtcaaacgcgacaaaaggatgggaatcttacgattcgacgtagcgagagtctgccgcctgttaaagctgctgaagatgccgtcgctcagcttcggagcttgtatgaattgctgaggaatattttctaa

SEQ ID NO: 365568 - DNA, 183 bp, Pseudomonas aeruginosa
atgggtaaggttgccgatcaggctgaagcggccgccgaaatgctgcaggccgagaccgcagcccagttcgcgcaggacctggctgaggcgttccagttcggccgcggctggcaggtgccgctcgtccagttccagggtcagctggcgcgcctcctgcggatgcgccttgagcagggccagtag

SEQ ID NO: 365569 - DNA, 780 bp, Pseudomonas aeruginosa
atggcgccgcaggtgctccaggctctgttcgagcatcgccaggtccaggcgcgcggcccagccgaaacgttctatccagggcaggaagcgcccggcggcgatggccgtggcctgcgggtcgagcagacgcgcgaggaccttgtggtggaggacgcgctgggtgtccaggcagtccaccaccggctggaaatagagcagcaggcggcgctccgtcagggcctggtcgatccagtcgtgccagtcctggctatcgttgagcgccgcgagcgcggtgccgtcctggctcgcccagggctgggcgggctggctttcggcctgggccagggcctggtcggcacgggccaggagatccgcgggcgagtcgccttcggcgaacgcgctgataccgagataggcgaccggcgtgagatcgctggcaccggtgcgagcaaggttctccaggccttcgcagagttcctcggccaggcgttcggcctgctcgcgggagcaaccgggagccagcacggcgaactcgccgccgcggctgcgggccagcagccagtcggtgcgcccttgctggccgcaggagtcgaccagcaagcgggcgaccgcctggatcaattcatccgtgcgttgcccgccgagacgctggttgagcccgttcaggtcgttcaggcgcagcagcaggagctgcccggcatgctcgtgctcgccggcacccagctgttcgttgaggcgggcgtcgaacaggcgccggttgggcaggccggtgagactgtcctggtaggcctgggcgcgtag

SEQ ID NO: 365570 - DNA, 714 bp, Pseudomonas aeruginosa
atgtccccaacccccggcgcacgccggccctgccccagggcctacgccccctggctgctgtcgctggcggcgacattgctgctggcagtcggcgcggcgctggcgcagtgggacctggagtcgatactgagccgtgccgagcagcgctacggcgagctgggcgcggcgaaatcacgcctgggcgactggggccgcctgctcgaacagggcggcacgctcgacgaagcggccaagctgcgcgcggtcaacgacttcttcaaccggtcgctgcgtttcaccgacgacatcgagatctggcaacaggaagactattgggcgactccggtcgaggcgctggtcaagggcgccgccgactgcgaggactacgccatcgccaagtacgtgaccctgcgtcgcctaggcgtcgccagcgacaagctgcgcatcacctacgtcaaggccctgcgcctgaaccaggcgcacatggtgctgacctggtacgccagcccgggcgccgacccactggtgctggacaacctgatcggcgagatccgccccgcttcgcaacgtgacgacctgttgccggtgtacgccttcaatgccgagggcctctggctgcccggcgccgacggcggacgccggaccggcgacagcaagaagctgtcgcgctggcaggacctgctgaccaagatgcgcgccgaaggcctcgacctcgacgcacccaaggaggattga

SEQ ID NO: 365571 - DNA, 1617 bp, Pseudomonas aeruginosa
atggcacagaacgactcaagcaagaacgggaacggcggtaatctcggcttcgaggcggagctcttcaaaaccgccgacaagttgcgcggcaacatggaaccctccgactacaagcacgtcgcgctcgggctcatcttcctaaagtacatctcagacgccttcgaggccaagcataaggcgctgctagcggaagacgcgcaggccgccgaggacaaggacgaataccttgctgaaaacgtattctgggtgccgaaggaagcacgctggttgcacctgcaggccaacgccaaactgcccaccatcggtaccttgatcgacgacgcgatgcgcgccatcgagaaggacaatgagtcgcttaagggcgtactacccaaagactacgcccgccctgccttgaacaaagtgatgctaggcgagctgatcgacctcatctccggtgtcgcgttcaacgaggagggagaccgttcaaaggacatccttggacgcgtatacgagtacttcctgggtcagttcgctggggctgaaggcaaacgtggcggcgagttctacacaccacgttccgtggtgcgtgtattggtcgaaatgctcgaaccactgcctgaccctgcgcgaggcattgaaggtcgcgtgtacgacccatgctgcggttcgggtggcatgttcgtgcagtcggagaagttcctcaaagagcacggcggccgcattggtgacattgcgatttatggacaggagtcgaattacacaacatggcggctggccaagatgaatctggctgtccggggcatcgactctaagattttttggaacaacgaaggcagctttcataaagacgaatttgctgcccagcgcggtagcgatggtgctcccatgaaagcggactacatcctcgccaatcccccctttaacatctctgattggggcggagaccgccttcgtgacgacgtgcgctggaggttcggcgtgccgccggtgggcaatgccaactacgcctggctgcaacacatttactaccacctagcgcccgctggaacagcgggggtggtgctagccaatggctcgatgagttccaaccagtccggtgagggtgagatccgcaaggccatgattgaagccgatgcggtggactgcatggtggcgctgccggggcagcttttttactccacacagatccctgcttgcctgtggtttctagcgcgcaacaagaaccctggtaaggggctccgtgaccggcgcgggcaagtgctgttcatcgacgcccgcaagctgggcgtgctggttgatcgcacccggcgggagctcacggacgatgacgtccagaagattgcagatacctaccacgcatggcgcggagaggaaggagcgggcgagtacgctgatgtggcgggtttctgcaagtccgcttcgtttgaggacatccgtaaacacggccacgtgttgacgccaggccgttatgttgggaacgaagatctcgtcaaggatgatgagtcattcgaagagcgaatgactcgactcacgacagagctaggggggcagcttgcagagtcagcaggccttcaagccacaatgcgagagcaactaaagctcattgggttcacgatcgagggacttgatcaatga

SEQ ID NO: 365572 - DNA, 1296 bp, Pseudomonas aeruginosa
atgaagttgtccgatttgatcgacttcaacccaaagcgtccgatcgaaaagggggccattgctccctttattgagatggcggatctacctgagggggagcgagacgttgcaggaattggtagtcgtgttttcaacggtagcgggagcaaattcaagaatggtgacactctgttcgctaggattactccctgtctcgaaaatggaaaaaccacgaaagtaagcggtctacccggcaacgctgctggtcatggttcgaccgaattcatcgtcatgtctgcgaaagatccaggtgtcgatgaggactttgtctattacgtcgcaagacaccccgagtttcgggcctacgcgcaggggcgtatggagggaacgtctgggcgacaaagggtttcgtggcaagcaattgcggattacacgattccggacttttcgagcgttgaacgaaagaatatcggcagtgttctgtcgtcgatcgataacctgattgccacaaaccgccggatcaatgaaacgctggaggcaatggcccgcaccttgttcaaggcttggtttgtggacttcgagccggtgcgcgctaaactggacggccgctggcagcccggccaatcgctacccggcctgcctgcccagctctatgacctctttcccgaccggcttgtcgattcggatttgggtgtgactcccgagggatgggagcgtgtatccgcaagccgactcatcgaattcaatccatccgagtccctgcggaaggggacagaagcgccgtatatcgagatggcggcgttgccgacttcgggctgttggccagagctgccggtggctagaccattcggcagtggaatgcgattccgcaacggtgacacgctgctggctcggatcaccccttgtttagagaacggcaagacggcgtttgtccaatgcttgccagatgacacggtggggtgggggtctaccgagtacatcgtgatgcgccccaaggctccggtaccttcggagtttgggtatttgctcgccagagacgctgcttttagggagttggccattcggagcatgacaggcacctccggtcgtcagcgtgttcaggctgactcagtagctgcgttcaagattgccgcgccgtcgaacgacggcgtttgggatgccttctctcgggttgtcgttaccccgttcaaaagcatcaaagcgaatgctgaggcaatcgcaaccctctcacaactccgcgacaccgtgctgcccaagctcatctccggcgagttgcgcatactggatgccgagcgcatcgtcggagcggcgatatga

SEQ ID NO: 365573 - DNA, 747 bp, Pseudomonas aeruginosa
atgactttggattggtgtccaggcatccgcgaggcgtgcgcacattggcgcaatgcacctatgttgcagcaaaccttcgaggctctggaacgcacgttggagcaagaaaacgacgcgtgtatcgactgcgcgaaggcgttggtcgaagtggtgtgtcaagtcgtggtggatagttttcacacccaacaagccccgttgaaaccgatacaggaaacgccaacgttatcggactggctgactgccgcaattcgcgccctcaagctcggcgacgtgcgtgatgaaaggttcaagaagctagtttccagtcaccacaagctggccaacgcactcaacgatctgcgaaacaagggagggcctgccagccatggcaaagacccttatctggaacgtctggcggtgcatcatcgacgcagttcagtactagcggcggatgcaatagtggcctttctgtatcaggcctacttggatgcacagctcgacccgatcagttcccgcgagccgtgggaacggttcgcaatggacaatgcgctgattgatgcgcacgtaggactggcagtggacgctgaggatgacgactcgctgaccttacgtttcatgctgccaggtggtgacgagctgccgatcaacattgaggttagccgtttgctctaccaacttgatcgggacgcttatgtcgaggcgttgaacgctgcgcgaggagcgccggctcccatcatggggcccgttgataaacaaggagaaccgtaa

SEQ ID NO: 365574 - DNA, 3135 bp, Pseudomonas aeruginosa
atggcgtttctgtcggaggccgctgtggagcaagcgctactggatcagctgcgtgctctcgattacagcatcgaacgtgaagaggatatcggccccgatggacaccgtccggagcgcgagagctacgatgaagttgtgctcaagaaacggttcgaggatgccgttactcgcctgaatccgggattaccattggaggcccagcagaatgccgttcgccgcgtcttgcagtccgaattgccatcgctcctcgaagaaaatcgccgcatccacaagttgatgaccgaaggagtggatgtcgagtactacgccgaggacggcacgctaaccgtaggcaaggtcgcactcatcgacagcaagcaaccggaacggaacgattggctggcggtgagccagttcgccgtgatcaatggccagaataagcggcggcccgatgtggtggtgttcgtgaacggcttgcctttgggcgtgatcgagctgaaagcaccggggcgcgccggggcgcatctactaggtgcgttcaatcaactgcagacctacaagaagcaaattccagcgctgttcaacaccaacgtactgctagtgacctcggacggtattgcggcgcgagtggggtcgctgtcggcagaccttgagcgtttcatgccctggcgcaccaccgacggcacagctgtggctcctaagggcgcaccggagctctcgacacttattgagggcgtgttcgagcatcgccgcctgctcgatttgctctgccacttcacggtcttcggcgaaacgggttcgggcttggccaagatcgtcgcgggctaccaccagtttcacgcggtgcgacacgcagtcaacagcacggtgatggcttcttcaccggagggaaatcaacgagtcggggttgtctggcatacgcagggatccggaaaaagcctgttgatggcgttctatgctggacagcttgtcaaacacccggcaatggccaatcccacgctggtggtgctgaccgacaggaacgaccttgatgaccagctcttctcgaccttttcgatgtgccgcgatttgatccggcagacgccagtacaggctgagagtcgcgatgatctgcagaaggtcttgaacagggcgtcggggggggtgattttcacgaccttgcagaagtttggcgagatcgcggagccactcaccaggcgacgcaatgtggtcgtaattgcggatgaagcgcaccgtagtcaatacggctttaaggccaaggtggatgcgaagaccggcgaaatctcctacggcttcgccaagtacatgcgcgacgctcttccgaacgcctccttcatcggctttaccggcacccccatcgaggcagacgacgtcaacactccgcaggtattcggcaactacatcgatgtttatgacattagccgtgcggtcgaagacggcgcgaccgtaccgatttactacgagtcgcggctggcacgtatcgaactcgatgaggacgagaagccaaagatcgatgcagaggttgacgacctgacagaggacgacctcgaggcggaccaggagcgcttcaagaaaaaatggtcaacagtcgaagccttggtcggcagtgataggcgcttagcgctggtggccaaggatatggttgcccactttgaggatcgcgttgctgctcttgatggcaaagcgatggtggtttgcatgagccgccgaatttgcgtgaagctctacgacgaaatcgtcaagttgcgtccggactggcacagcgacgatgacaacgctggtgcagtcaagatcgtgatgacgggggcggcgagcgatccgcaggggtggcagcagcacatcggcaacaaggcgcggcgcgatctactcgccaagcgagcccgcaatccgaacgacgcgctcaaactggtgatcgtgcgggatatgtggctgaccggctttgatgcaccttgcatgcacacgatgtacgtcgataaaccgatgcagggacacgggttgatgcaggcgattgcgcgggtaaaccgtgtgttccgcgataagccagccgggcttatcgtggactacatcgggattgcgcaaaacctgaagtcggctctacagcagtactcgaagagtgatcaggaaaacattggcgtcgacgaagcgcaggccattgcagtgatgatggagaagtacgaagtagtgagggacatgtaccacggcttcgactacgtctctgcgatgagcggcactccacaggagcgccttgcgatgatggcgggggcgatcgagtggattctcgacctgcagcaaaagttggcggcaaaggaaaatactgaggaaggaaagaagaacgcccatcgacgataccaggacgccgtgttggcgctttccaaggcattcgccttggcatccgcatccgacgaggctcgcgacattcgagaggaagtcggcttctttcaggcgattcgtgccgcgctggtcaagagcagcgccgactctggagtgtcccagcaagagcgcgagttggctatccagcagattatcagccgtgcggtggtctcgactgaaatcgtggacatcctggccgcggcgggcattaagagccctgacatttccatcctctccgatgagtttctcgccgaagttcagcagatggagaagaagaatcttgcgttggaagcgttgcgcaagctgattaacgacggcattcgctcgcgtagcaaagctaacttggttcagaccaaagcgttctcggaacgattggaagacgctgtggcgcgttatcacgctaacgccattaccactgctgaggttctgcaggagctgattcaattggccaaggatatccgcgctgcccgtcagcgaggcgaggagtccgggctatcggacgaggagatcgctttctacgacgccctggccgagaacgagagtgctgtgcagatgatgggcgacgacaagcttcggctgatcgctcatgaactgctggtcagcctgcgtgagaacgtttctgtggattgggctcatcgtgactcggcacgagcccgtatgcgggtactggtgaaacgtatcctgcggaaatatggctatccaccgaatctccaggacactgctgtacaaacagtgctgcaacaagctgaggcgctgtcatcgaggtggagcgaatccttgctttga

SEQ ID NO: 365575 - DNA, 222 bp, Pseudomonas aeruginosa
gtgcatcgggcctgcagcatcgatgtcgccgggaagcggcatgcggccgaggatgtcgccgacggcgcgcaggctcttcttctctggctcgtacagaaagggcggcactttctcgacgtggcgggcgacaagcaggaagcgcttccgggactgcgccaggccgccgagttcgccgcagtcgtgagtggtttccgccacggcgtagccgaagccgccgagtag

SEQ ID NO: 365576 - DNA, 147 bp, Pseudomonas aeruginosa
atgtggacataccgcgagcgccgcaaccgagcggctttcagcaacgcgcaactcgcttacgaccgtgccgtcgacccgctctgggaccagccggaaccggagccagaagacgaagagcaggaggacgaagatggccttcagcaatga

SEQ ID NO: 365577 - DNA, 963 bp, Pseudomonas aeruginosa; identical to SEQ ID NO: 347450

SEQ ID NO: 365578 - DNA, 774 bp, Pseudomonas aeruginosa
atgcgaatgccagtcgaattaatgcaggtctttttgccgcgcgttaatcttgaaattgccgttgaagctgaggagcactccgccgcatgccatcagttagatattctgcgtgcaatgctatatagcaggggattagctccgacgcttgcgccgttcgcaaccaattattccttgaatgcatatgctggtatcaacgggcgctcctctgatctgacaaaagataaattgcacaaagggttgcagactggcattaatctcaaagatgcgaaagttgaggggtggccgtatgaactttcactgatgtgtttgcgtggcgaccccgaacaattatcgaatacagtgcgtgaggatgtttttttgtcagccgttcaagattcgttactttggcgcaatttagaagataaaaatccgccggctaaagttatacgagctgcgttggccaaagcgcctctaatgcctgatatatcctcatcaatattgcacatgtggcaagcgttagaaaacatcatacgaattcagtcagagatcacgtatcgcacgtcgttattactggctgagttgtgcgcaccaattcagccccgttcgttaacctacgacacggcaaaaaagagttacggagaccgcagtaagatcgcacacggttcaagttcatctgtggatatttttcaatggatgcgggcttgggggctattgcaaaagacatgtcaggcaattttgctacggggcggaatcccgtctgcagatgaactgactagagagcttttggcacactag

SEQ ID NO: 365579 - DNA, 1512 bp, Pseudomonas aeruginosa
atggatctgcttaaggtaaagataaataatgtaaaaaacattaagactgcggatatagagctgccaatagaaggaggactttatagcttagttggcggtaatggttgtgggaaaagcacactcatgctgattatgtctgtccttctaagctctaagcgcttcaatatgcttcaacatgaggactatgatgaagactcgacaatagatatcgtaattgaaagggatggtcagatcgaggagaataactggtacatcaaaaagcgccatgataacgaaacaaatatgtggtggtgcgcaagcaggccagtaacttataaaggagtctacgaaggcagcctattttatggagcaagatttagagactccacaattgtagataagctactcagaagtagtcagattggggaagatcaaattgtagaggcatttgattatgtgaaagataatctaagctttattctccatggtgatcgaaatcactaccgtgacatgaaaaaaataagaaataagaaaatatctgaagagtttgagctttcaaatcttccttattttatgagcacctccaaaggagccttgctcagtcagtacagaatgagttctggcgaatgcttattaatatcccttttaaactatatatatcatacccttataaatcaagggaagaacaagagtgtaatagatagaactttctttattctgattgacgagatagagcttgcgctacacccaatagcaatctccagactgattgactatctaaatgagcttataggaagctatccaaaactctgtgtttacctgacgtcgcactcgcccgaggtcattcgagccctaaagcctcaaaacatgttcttgattagtaataatgaaggggatgttcatctagtaaatccgtgctttcctagttatgcaattcgggaggtgtatagacatgacggatttgactatttaattttagccgaggacgtattggccactcttttaatagatggcgttctggcggatcaaggattgaaaagtagtcgattagttcatatatctccagttggcggatggcagaatgtattaaacttgcatctggatttactgcgaaataatgtcataggtgtgaataagaaaataataagtattctcgatggcgatgtgagtgaggatgttcaaggaaaggaggcttacaagaaccttgcaaaagttttccttccgataccaagtatagagaagtttgtttacgaaattacattcaataaatctaatgaaaagcttagaaaaacaataaatgataaatatttctcgattaagtcactggatgatttagcggcggagcacactaagcagtatggaaaaaatgcaaagagccctgataaattgttttattttaggctaaaaaaggatctagaaggaagaagcataaacgagtcctattttattcgaaatctaagtgaggacataaagaaaacggttgacttcacctcgtttgccagcgggctttctaaactgttggggtcggtataa

SEQ ID NO: 365580 - DNA, 141 bp, Pseudomonas aeruginosa
atgacttccctcaagaagccctccccgctcgacttcaaaacccattacggcctggccctggacgacgccgacgacgccgacgacgccgacgacgcgatcatcgtcgacctgttcaccggcggcggcggtgccagcagatga

SEQ ID NO: 365581 - DNA, 657 bp, Pseudomonas aeruginosa
atgatgaacaagcgcccctgtgtcatcttggtggctgacagcaacatggcggccaccttccgtgggtacttcaagcgcgagcgttggcacttgagcctcggttgcgcgcccttcgagatcaacactgatgtcggtgctgacctgctggtggacgaaggcggcaacgaccctggcgtctacaccaagggccacgagttgttgcgcccctaccagagcagccaccatcgcgcccttgtagtgctggattgcgaatgggaaggctcgcctggcaaagacgcgatcgtcgcccacatcacggccaatctagtggccagtggttgggccgaggatgcggtcaaagtgatcgccatcgagcccgagctggaaaactggctgtggcaggacaagccgcaggtggcagatgttcttcgctacaaaggcgacaagtcgctgcgtcagcatttggctgagagtggatggtggccagctgacgccgccaaaccaccgcgaccgaaggaagccgccgaatgggtgctcaagcagacgcggcaacctcgctcttccgcgatttaccagaagctggctgagcacatctcgattaagggttgtacggataccgcatttgtagagatgcatgaagcgttgctcggctggtttccgatgggggagaccgcatga

SEQ ID NO: 365582 - DNA, 1413 bp, Pseudomonas aeruginosa
atgacaagcttgaagtggaagatcgttaaggcggcctggctagaggaagacgggcggcggctagattgcaatccttatatgtccggcgcattggaggctagagatgccctaaagcagctttcttgccgaaaagataggttgcgtgatgtgactctgggtatgtttgattcgggccgagagagtcgtcaatgggtggacgattcaaggtatggaatacgttatatggggagctcggccatcgggctctctgatctttcaaatttgcctcttatctcaagcaagcaagtggccagaaactcaaagctagtgcttgaagaggggtggtcattgattactcggtcagggactattgggcgtatggcgtatgttcgccctgacatggctggtctcgcgtgctcggaggatgtgttaagagttgttccaaatgcggaaaagattccgcctggttatctttttgcgtatctatccagtagctatggtgttcccttggttgtctctggaacatatggtgcaattattcagcatattgagccaaagcatattgaggatttgcccgttccccgcttgggtgatgagtttgagcgtcttattcacgacaaggtctctgccgctgcggaaaaactttcgaattcccagtttctattgaatgaggccagctctcagttgtttctgaaggctggagtcccaaatccgtcgtcatcagattggaatcgggataagagtgataaaggtttctcggttaactcaagtgagcttggctcccttcgtgcatggaatcactcaaggcgtgttcaggctataactgatgttattgagtcaggggatttcagcgtgctttccgatcttattgatctggattggattagatggagggtaatgtttaagagaattgacgccgatcaggaaaatggaatcgaggtcctgtctcaaaagccgctatttagcttatttccagaggggcggtggattagtagaaaatacttgcttaatcattccccgcgttatgttgttcccgatcgaactatcatagttgcaaagcaagggacgcttggggaggatgaactattttgccggtgtgagtttattactggtggcagggccctaagtcgagcgtacaccgatcactgcatgcgcatagttgctcgtaagggggaaattgagccgggttatctctatgcatttctgagatcaaatgcagggttcagaattttgcgtggcctttctgaaggctctaagcaacaggacctgcactggcgaacggtgccatcaattcccgttcctcgcttgccgtctcatgaagaagagcgtatcgcgagaatggtttacgacgcatattcagagagaaattcagcgattgatctcatgatcgaagcgcgtaacgtcctggaaaaaagaatatcgatgggggagtga

SEQ ID NO: 365583 - DNA, 1545 bp, Pseudomonas aeruginosa
ttggacggcaatcgctacctgatcaactacgacggcagccaagacgagggcaacaaagacaacaaccaagtgttgctggacttcctggccccgttcaaaggcaatgacgccgcttcctggaggccccaagagacacgactgattgcgatcaacgaaggccgcttggtggacttcctcgctgcgcatgaacgggatttcccggcgctcacggcccttgttcggcgtgcatttgccaccggggaagcggagtctggcgtggcggtggtgaatctgaatctgcgcagcgtcgtggccgatgacgctagcaatgctgcgggcgggtcgattctggagcgcacgctgcggagcatcgtccgccccgagaactgggctgcttgtgagcagtgtgacttgaaagacagatgctacgccttgcacaacgcacgcagcttccaggatgagatcgccgggccccgtttgttggaacgcctcaagacgctttacacgatggcgcatttgcgcgggcgcttgcacattacgatgcgcgacctgcggtcagcactatcgttcatgctgattggcaaccgcgactgtggcgagattcatgcgctctacgcttcgggcaagcacgatgacgttgcccgtagcttctacttcaatagctggatgggtggcgggcaagccacttcggaccggctgctgacgctgctaagcgacctggatgttggcaaacaggaagacccccgcttcgaccgaggcctggacttcgttcagccagatgaccgtgctctgttccgcttcgagcgccgagggcagtttgacttcgaggtgttgaagcgcctgttcggcgacctgccgcgtggcgtgtctgactcgtcagtccgccaccgggcgcgtaagcatcgcgagtatgtggccatggcacgccgcaagcatttctttgagcggcgtgacgcgggctgggaaaagatgctgccctatcgctccgccaaacgcatggtggagattgttcgaggcgaaatgcccatcgacgagctcacgagcgaaatcctccatgccatcaaccgaggggagggactccagcgtccggagagactgggtgccagcctggccttgcagttgcggcaggtcgaacacggtacggtccgtagctaccggctcttcccggttgatggctttgggctgcaggtacaagactttgcggccacggctcgcttcgttgaacacctgccgacaggtctactgctgaagtaccaaggccaaggtgcaggagctatcagcagcgaactgatcatcaacctcgatgtgttcgagatgctggtgcgcctgaacgaaggctatcggcctagcgttgaagagatgcagggtttttatctctgccttggggtgttcaagaacagtctcaacgctcagccttaccgcgaaatcctgttgaccaccacggggcacgacttctaccgcttggcccgccatgacgatggtcgggtggagatgcgtttgctgcacggcccggtgaagggcgcttgccaagaagaagctgctgagagcggcgccagggggaactaa

SEQ ID NO: 365584 - DNA, 798 bp, Pseudomonas aeruginosa
atgtcgacagcaccaaaaaagcactttttacaccgtaaaccctaccatacggccaccctcaaaaagctcccaagcccagaaaccacggggactttgatcgatttatacctaaagacaaaggagctctgcgtagttatagataaccatcttgttagtaacagtgaaaaagaagatatagaccaaaaagatgaattattcttcttaaacctccaaaaactccaaaacctagccaaagccaaacactaccgaaagacaatcagtctaccggcatggaaaaaactaccagaccatctcaagcacgtttttagaacagctgcctgcggccgggataaaagctctatcgcccttagctgcaacctctcccatctgattgcctcacgagcaaacagctcatatagaggggccgcagattacattggcagaaagttgcgagatctggcgattgagcttggcatctcccccatgattgcactcacgcttgaagactccaccaatagaaaaggcaataaccctggacttcattttcatgcggccctcagagctccggctgaaaaaatcagtcagctgaccaagcgactgaagcaagtatttgccgaaaactatatcgaagcttggaataacaaagccgtttgtattaagcctattagaaccaccggaggatgggcagcatattgcacagagacattgaacacgccagaccaatgccttgaggccgccacatttgcaagcaagcaagccaagccggggaagagctttataacgagcttaaagaatggctgcaatgcattcccacgttga

SEQ ID NO: 365585 - DNA, 705 bp, Pseudomonas aeruginosa
atgtcccgtcttctaacagaagccgagtggctaacgccaaagcaggcgcttgccctactgcgaaaacatgatcctgaactcaccatggaagatctggccggctattgcacggaattgaagctcttccaggtttatgtacgcctcaggatggctgagggcgaagagctggatagccgagcctccgtgtatggtgttggtgagtatctggttctcaaccccgaggacgcgctcaatggggctgacgacacgacgctttatctgctcggagatgtgtttgacgccccggatcccgcggcatctcggctgctagaggttgaatgggagctttcagccaaaaggagttccctgcgactccttttcaagcgcgcagaaatggaaaaagcgatcactccagctgcaacagctggcaagcacttgccggctacaccgccaggaacagcaccagccgcatcggcatcaccaacggccccatcagtgaatcacttgctagtgatatctgcgcttgtagaaatgcttaaggacgacacgcgaccaaggcacaaccagcaatccatcatcgagactatcgaggacgagtacggccatgtacatgggcttggcgcaactagtctgcgaaccctattcgcagaagccaataaagctcgaaaaacagcaggcacctcgaagcgaattggaggaacaaaaatccgactggagaaaaaataa

SEQ ID NO: 365586 - DNA, 1374 bp, Pseudomonas aeruginosa
atggcagatattacagaccgacagatgagcatcaagccaggcccccgggacatctggctcaacgaatccgcgcccaaaggtcacggccgcttcatggcccgtatcagaccaaacggcgagcgcctcttctactaccgctacaccgactcaactggtgccagggtgcgccttccaattggctcctatgaccgcgatggcacctcagggctgacgctgaaggctgcccgtcaacgtgcccgggagctgacagagctgtacctgagtggagttacggacgtacgcgagcatctcgaagccgaagaagctgcccgcaaggctgcaagagacgccgagatcgctaggctcgaagcagaaaaagcagcatccgaagctgcattagctcgccaagcggcccgcaaaacggtagctgagcttttcgaccattgggcacgtgtcgatctgatcaaccgcaaggacggcggcgccgaggtgcgccgcatgttcaacaaggatgtgctgcctctgattggtcacctggccgtcgaggacgtcagaaaggggcacattacagaggtaacggacaagcttctggccaggggtgtcaaccgtatggcgaagcagatcttctcgctgatgcgtcagatgttccgtttcgcggtggatcgcgaccttatcgataacgacccgacagccagcatccgaaaagccaagatcggcggcaaagatgtcgaacgtgatcgtgtcctgagcgaggacgaaatcagagctcttgcccaacaagtccccgcagccggtctactcgttacttcccaggccgcaatctggatcgcgctctccacctgctgtcgcatcggcgaactgctggcagccagatgggaacacgtcgacctcgccaagcgtacctggacaattccggccgagaacagcaagaacaagaaggctcacatgattgcgctttctgacttcgccatgcagcagttcctgcggctgagggagatcacgggcgattcctcttggtgctatccgaacaccgataacagcggcccggtttgcccgaaaacagttacgaagcagatcggcgatagacaacgggcaccaggccagaaagtcatgagcaatcgcagcgcaatggcacacgccctccttctccccggtggcaagtggactccgcatgaccttaggcgaaccggggccacgctcatgacgatgatgggcgtcctgccggaggtagcagagcgctgcctgaatcacacagaagagaacaaggtgaagcgcatctaccagcgccatagctatgctgcagaaatggcccaagcctggcaaaagctcggaactcacctccatcgactgacgagcgatgactgctccaacgtcgtgacgctgaaactcgcataa

SEQ ID NO: 365587 - DNA, 198 bp, Pseudomonas aeruginosa
atggctgggggggtgaccggcggcacgggagaccagggcaaccctgccgcgtccaatgcgatcaatcgccatggagccgccaatacctccgacaagctcgtcgtggacctgggcagcaatacctcgagcgtcgacgcgaatgccaacgaactgtggcattccggcaacaagtacgagagcggtgtccgggatcagtag

SEQ ID NO: 365588 - DNA, 177 bp, Pseudomonas aeruginosa
gtgactgagcatcctgatcaggcgccggcgcagccggtgccgccgtcggtctggcgcaatccctggcatttcctcgccttcggcttcggctccggcaccctgcccaaggcgccgggcacctgggggtcgctggtggccatcccgttcatcccgctgtggcagatgctgccggactga

SEQ ID NO: 365589 - DNA, 1764 bp, Pseudomonas aeruginosa
atgagactaaccgacgaacagagcctagctgtgaatgaggatggaaatcttctactgacggcttgtcctgggagcggcaagactcggacgctgatagccaaagccgttcgcgagatcgagagactccggggttccccccgacgggtttgctgtatcacatacaccaactcagcggctcaggagatagagcaacgcgcctcgctagaaatgcaggaaggtgacgagttgcacctgtcagtttctacgatccatgccttctgtctgcaggaggttctgaggccttatgggtggctgctgccagactaccggggggcatcacgagttttgactcgtgataacccagacttcgagacaatcgctaactacgcggcgcagcgtgtaacagatgatccgcttcggactcaggactatgacgctttcgagtctctaaatctaaatgctgcaggcgaactgattggccctgcggtggagaatcccacagttgcaggagccgcatcgtttttctggcagcgctgcgtggagctggggtatctcgatttcagcttgataatctacaggtcgtatctgatccttcgagatcaccctcgcgtagctagaacattgtgttcaaagttcgcgtggttcctagtggacgaattccaagacaccacggagctacagatagagatccttcgtaggctccacgatgtgggcaattcaaggttcttcctggttggggatctttctcaatctatctatgcattcaccggtgctcggccagagttagtggcgccttttgggcagtacatccaagcacgagctgatttgtcgttaagtcaaaactttcgatcaagcgcccatatcgttcagcacggtgagcggctttttcctcggcagccagccatgacggcagtgggtggcaatcgtaccttcgcgcttgagcctgtactcgttcgcggtatgacagcctttcaggcgattacggagcattttctgcccatgctcgaagagcaaggaatcgaacttggcaatgcaacgatattggggcgcgaatggcgtggattgatcgagcttgcccgtcagcttagggattttggtactccggtagttggtcctggagctcgcccctatcgcaggtcccgattgttcgtgactttggctgagcagctatgtggtgcggttgtagagacccagccgggtacgatgcgacagcttgagcgtgccgtcttcaacacgattttggacattacggggcagcctcgactcgatatcttcacctatgaagggcgcatcttgatcatgcgaatgctccacgcagcaatccgccatgcacagcacggcggtgcgttggcgtggctggatcgcatgtctcgcgaggtaggcaggttactgttcgagaccggttacatcgatcaggcccaatcggcactttttcttgcctcagtccatgagatgaatgcagatatggttagacagggtatcgatgcagagaacctccaaattgaggatctcgggctatttgcgagtcctacgagagccttgagactgtcgaccattcactacgccaaaggtcgagagtacggcgctgtggcgatgatcgggctgaagcgaggtagctttcctcattttcgagctgatacccctgaggcaattgctggcgacagacggctgttctatgtgggggtaaccagggcagaaagggttctgatgtacattgccgaaagagacagatggaataatccacccagcatcttcttaggggcagatggcgtgggaatgctctga

SEQ ID NO: 365590 - DNA, 1440 bp, Pseudomonas aeruginosa
atggtccgggaggagtgggctcgcggagagcttcaacgccccttgattcttgaggattattcttgggaactagcaggtggggggaatccggctgtagatcttgccgcaatcgagtggtcggatgagctgcaggatctgggcgcaactagcatccatcttcagtatcttcagtcctaccttatcgtcttcttgcccgcgttgcgcgatgtcgaggccgatctgcagtcgcggcggtcgactctcactcgactcatcgaaacttttcagatcggtgcagatgagcaacgtgatctggtcgaagcagttgaggctgcgaacatagaaattgaaggctcagccaccatccaagggattgccgaatcaatcgatcgcgcattcaaagatataactgggccagcctttagtctcgatgtggatctcggcctttcctcgccgacctttcagtcaattctccggaacctaattgttctattgagcagcgagcttgtctcgaagtttgagccgcgacgcaatggtcttggcctaaacaacatcctttacatcgcaaccctcgtagagtatttccgtaagcgcgctgaggtcggtcgatcagcgggagagctactcctgatagaggagccggaagcacatctgcatccacagttgcagaacactctgcttgaagcgctccgctcgatgcctttccagtctctggtttcaacacacagtacgcaggtcacagccaaggtgccgttggccaattacgtggtcatgacgatgcaagcggatggaacgccattcgcagttgcaccagcctcaaatcatcggcttagcctctcggagcagcaggatctcagtcgttatctggatgccacgaaatccaatttgctcttcgcccggaaggtcatgctggttgagggggctgcagaaatgctgttgatccccccgctcgtcaagcaggtgttgaatatagatctggagcgcgagggtatctctctcgtggccatacatggcgttcacttttcctctttcgctcgcctctttgcggctgactgcctgccgaagcgctgcgcgattgtgggggacgctgatcgtgaagttgtaccggatccactcgatgatgacgtgcctgtaccgccaaatctggatctgctccgtgggccctacgtagaggttttccttggtgccacgacattcgagatcgaactgaccaccgaagaaaacttgccgatgctcattgccgctgctaccgaactcggcgctccaagactgcgtcaggcgctagaaaaccaccaattgattgggccccccgtctccgctgagttaaggaacaaggtcctgcgaacggccaaacgcttcgggaaagggcgtttcgcccaagtcacagcccgccatgtggctttggctgggtcggtgccggagtacatcgttgatgcgattaattggttgagggagcaatga

SEQ ID NO: 365591 - DNA, 1167 bp, Pseudomonas aeruginosa
atgtataaagacctcaaatttcccgtcctcatcgtccatcgcgacatcaaggccgacaccgttgccggcgaacgcgtgcggggcatcgcccacgaactggagcaggacggcttcagcattctctccaccgccagctccgccgaggggcgcatcgtcgcttccacccaccacggcctggcctgcattctggtcgccgccgaaggtgccggggaaaaccagcgcctgctgcaggatgtggtcgaactgatccgcgtggcccgcgtgcgggcgccgcaattgccgatcttcgccctcggcgagcaggtgaccatcgagaacgcgccggccgagtccatggccgacctgcaccagttgcgcggcatcctctacctgttcgaagacaccgtgccgttcctcgcccgccaggtcgcccgggcggcgcgcaactacctggccgggctgctgccgccattcttccgtgcgctggtcgagcacaccgcgcagtccaactattcctggcatacgccgggccacggcggcggtgtcgcctatcgcaagagtccggtgggacaggcgttccaccagttcttcggggagaacacgctgcgttccgacctgtcggtctcggtccccgagctgggatcgctgctcgaccataccggccccctggccgaggccgaggaccgtgccgcgcgcaatttcggcgccgaccataccttcttcgtgatcaatggcacttccaccgcgaacaagatcgtctggcactccatggtcggtcgcgaagacctggtgctggtggaccgcaactgccacaagtcgatcctccactcgatcatcatgaccggggcgataccgctctacctgactccggaacgcaacgaactggggatcatcgggccgatccctctgagcgaattcagcaaggagtcgatcgccgcgaagatcgccgccagcccactggcgcgcggccgcgagccgaaggtgaagctggcggtggtgaccaactccacctacgacggcctgtgctacaacgccgagctgatcaagcagaccctcggcgacagcgtcgaggtgttgcacttcgacgaggcttggtacgcctatgccgcgttccacgagttctacgaattactaaatgcacgaaaaatcttaattcttgtcaaaaaaagagagcttcatcacgtttga

SEQ ID NO: 365592 - DNA, 720 bp, Pseudomonas aeruginosa
atgaaatacactgggggcccagtaggggccgcaataatttcgatgctatttagtgcagtaacttatgctgatgctgagtgccctaatacaatttatgatagtgattacaaaaaaaaattaccagtcgttatggctgatgagctaattaaaacaaacacacctctattcaccaatggaaagataacttgcctcattggattgaattatcgaaagatgagtgagaatgaaaagctccggattgaagaaggtagccttagaaaaataaagtacaatttattttattacgatggtagtggcaaagtacaaggggataaaaatagcaccttggacacgcttaaagattcaggtttgacgaactgggatactggttgcaaggttgatggtatggaagatacgcactggtgctatatccagaaaaaggattttatggctggcgtgcataaaaatgggtcaacctttatagtcataggccgggaccattttccgaagtcaaaaattgcaataagaattgaccaggaaactccaatttctgctaatgcggaggatggttttactcgcgagcaggtagatcagataattgaaaaattaaaaacaggtaataaggcgctcactcgttatcaagaatggccgtatgagaaaaacaaagactatgctatggatttatatggatttgcagaggcttgggaaatcatcaatactgtgtccagcaccccaaagtaa

SEQ ID NO: 365593 - DNA, 993 bp, Pseudomonas aeruginosa
  misc_feature (973)..(982): n is a, c, g, or t
atgctttcacctgacgtcgtcgtgttgtttcagcgatgcggaaaaggggacgttgcctcccttgatactgccttgaaggtgttcgagtgttactgccatctaacaaacagccccgtttttctgagcagcctcgcaagcaagacatttgcaaataccgtacaaggctttcttatcgccctggcaggtgaggatctcgtcagcactagactacagacaagacgtcgatacgcacgaactttgctgagggccattgaaaaaatggcaatcaaatcaccttggatagcaacgataagttacaaggcttggataacagataccgatgctgctgccaataataaaaattcttcgatactcgactcccctcatgctcgctactggaatggctgggaaattatcacgaacaaaggaataccacactttctagcgctcccctgcatttggcactcgcacggccaagccttcactgaagagttctatgaaaatcttcgtctcttttacgagaaacaagcaagaccgggggttagcgacataaacaaattagccaaatttcttagcgaaaacgctacaacttggccaccagaaacctttaaaaacccaataatgataaaaagatttttcttgagcttcatgaaagactttttcatgagcgcttacgatcaaaaacttaatcttaactctcagatcaagacctggggaaggatgatatctaatctagaggaggcgttcctgcaaagcaacgtctgggcactgccatttgatgacagcttacccaagccaactgagagaaaagtatcgggaacaccctcaagagttagcctaaacaaagaaggtattgaggttcacgaaaaactcattacatctgtgccgctacacctaactgacactgaggcgattgaaatcttattccacgatatagaaactgatttgcgcacagtaaaaaattgggcgtacgaccagtgcgaaaaaatatatnnnnnnnnnnaaaatatatag

SEQ ID NO: 365594 - DNA, 1137 bp, Pseudomonas aeruginosa
atgggcacctcgcgcagcgaggagggacccctggtgttcgccacccactccacgcacaagatgctcgccgccttcagccaggcctcgatgatccacgtgcaggatggcgggacccggaagctggacgtggcgcgcttcaacgaagccttcatgatgcacatctcgacctcgccgcagtacggcatcatcgcttcgctggacgtggcttcggcgatgatggaagggcccgccgggcgttcgctgatccaggagaccttcgacgaggccctcagcttccgccgggccctggccaacgtacggcagaacctggaccggaacgactggtggttcggcgtctggcagccggagcaggtggagggcaccgatcaggtcggcacccatgattgggtgctggagccgagcgccgactggcacggcttcggcgatatcgccgaagactacgtgctgctcgatccgatcaaggtcaccctgaccaccccgggcttgagcgccggcggcaagctcagcgagcaggggattccggctgccatcgtcagccgcttcctctgggagcgcgggctggtggtggagaaaaccggtctctactccttcctggtgctgttctcgatgggcatcaccaagggcaagtggagcaccctggtcaccgaactgctcgaattcaagcgctgttacgacgccaacctgccgctgctcgacgtcttgccctccgtggcccaggccggcggcaagcgctacaacggagtgggcctgcgcgacctcagcgacgccatgcacgccagctaccgcgacaacgccacggcgaaggccatgaagcgcatgtacacggtgctgccggaggtcgcgatgcggccgtccgaggcctacgacaagctggtgcgcggcgaggtcgaggcggtaccgatcgctcggttggaagggcgcatcgcggccgtcatgctggtaccctatccgccgggtatcccgctgatcatgccgggtgagcgcttcaccgaggcgacccgctcgatcctcgactatctcgagttcgcgcggaccttcgagcgcgccttccctggtttcgactccgatgtgcatggcctgcagcatcaggacggaccgtccgggcgctgctataccgttgaatgcataaaggaatga

SEQ ID NO: 365595 - DNA, 147 bp, Pseudomonas aeruginosa
atggcaactcgaaacgtcgtccttcccgatccgctggagcaggatatcaacgagctggttgagaccggccgctatcagaatcgcagcgaggtcatccgggcaggcctacgcctgttgctgcaacaggaagcccagtgttgccgctga

SEQ ID NO: 365596 - DNA, 2523 bp, Pseudomonas aeruginosa
atgagctttctccctatcgacgttgctctgcctgcccttcgctcagcattggcagagcgaaatgaagctgttcttgaagctcctccaggagcgggtaagacaacccgagttcccctcgcgctattgaatgagacatggcttggaacccaaaccatcttgatgctcgagccgaggcgtcttgctgctcgagctgcggctgagcgtctagctagcgaattgggtgagagagtaggtgaaaccatcgggtaccggattcgcttggaaagcaaagtcggtccgaaaacccgagttgaagtcgtcaccgagggcatcctgtcccgtcgtttacaagaggaccccgccctcgacggcgttgggattgtcatcttcgatgaataccatcttcgtacgcttgacgcagatttagccttggcactttgtctaaacggccgtgagcttcttagggacgaaagccaaccacttaagatccttctgatgtctgcaacgcttgagggggatcgcctttctaagctcctgaacgacgctccaatagtgaagagcgacggccgtatgtttccggtcaccacgtattgggggagacctcatcaattcggtgagttcgttgagcaacgcgtgattcagatctgcctgcaggccctatctgaacaaagcgggagcatccttgtgttccttcccggtcaggctgaaataagccgggttaacgagcagttgaaaactcaactgaaggaccaagataacattatgctttgtccgctccatggcgaacttgacctgtcgtcccagcgagctgctatcgaacccgcgccacaaggcaaacgcaaactagtgcttgccaccaacatagccgaaacgagcttaaccatcgacggcgttcgcgtcgtagtggacgctggactggcacgcgtgccgcgttttgaccctgtcagtggtatgactcgcctggatacgcaacgtgtttctcgagcggcagctacgcaacgtgctggccgcgcaggacgcctagaaccaggtgtttgctatcgactctggtcggaatcgcaacatgaccagcttgcagcatacgacgctgccgaaattttgcaggcagatctatctggactcgcgctgcagctagcgcgatggggtgtgcagcctgacgatttggcttggttagactcgcctcctgtagcagcttatgcgcaagctcgtgatctactaacccggctaggagcattagatgagcgtggtgttattactgcccatggtcaagcgatggctgagttacctgcacatccacgaatcgcgcatctgttactccgtggccaggcattcggactcggtaacctcgcctgtgacatcgcggcgctgcttggagaaaaagatatcctccgcggtaccggcgctgaccttcatgatcgtattagcgtattaggtaatgaagcgtcctcacgcgccagtcgaggggctgttcaacgagcacgtaagctagcgaggcagttcaggggatatctacgcggtccggtatctgagcctgtggcagaccctgatcatccaaggtggcaaggggggctcttggccttcgcttatcccgatcgagttgctcgacagcgacgcgatggtggagctgaataccgactagcaaatggccgtgccgctcagtttggcgagcctgacgcactgatgaaagaaccttggctagtcattgcagatcttgggagcagacaaggtcagagagaggagcgcatctacattgccgcagcacttgatccccagctattcgacactctgcttgccgagcaggtaagccagcgtgatgaactcgagtgggacgaacgcgagggtgtattgaaagccgagcgtcagaagcgagtgggtgagctggtactgagtcgagcggccattcccgggcttgatgaagaggctcgttctcgggcattggtcggcctcgtacgtcgcaagggcatggagctgctaccgtggacaccggaacttcgtcagtggcaggcacgagtgtctcttcttcgttgtctggatctcgagcaaaagggcgagagtgagtggcctgatctgtcagatgccgcgctcctgagctcacttgaagtgtggctggggccgtacctgggtaaagtcagccgacttagtcatttcgccaacttggatctcccaagcatccttattggcttactgccttggccgttacctgcacgcctcgatgaactagcccccaaagcgctgcaggtgccatctggctcgcgcgttgccattgattactcagaacatcctcccgtgcttgccgttaggctacaggagctgtttggcatggctgacactccacgtatagcaggaggccgtcagggagtactactgcatctactgtctccagctcgcagacccgtacaggttactcaagatctcgccagcttttgggccaatacctacattcaggtgaagaaagatctaaagggtcggtaccccaagcactggtggcctgataaccctatggaggcagaaccgaccgctaggattaaacctagaaagcaatga

SEQ ID NO: 365597 - DNA, 267 bp, Pseudomonas aeruginosa
atgcttcccttccaaggagccatgaaccgcaatgcgaacaaactgctcaccgttgagggcttcgcgtgcaggttgcggtacaggaagaatttcttgaaaagcgcggcggtctatcgccactggtcgcgatgtcacaacaattgttgctctaccgagggccccctcaagatcgtgggccaagcgcttaagggcctccctgaaggacttatgaacgagctgaagttcatcgatggagtccagaaagaagtaggcgacctgagacgatga

SEQ ID NO: 365598 - DNA, 1050 bp, Pseudomonas aeruginosa
atggccaggaccgaattcatcgttgctggtgactttcaggcgcttggtcaggtcgccttcgccctgggcgatgtcctgcatggcgcggcccatgtcggtgagcggttgcatcagtacgcggatcagcatgccgaggaggaggacgatggcgaccaccgcgatcagcgcggcgacgatcgccgaggtacgcagcttggtgagcatggcataggccttgtccttgtccaccgagatgccgatgtaccagtccaggccggacaggcccttgaccggagagaaactgaggatccgggtgttgccgtgcagctcggcctcgctgaagccgctgccgatcttcggcgtgttgcgtgggtagacgtcgctgaggctcttcatgacctggtccttgtccggatggacgaggatcttgccgtcgccgctgaccaggaaggcgtagcccatgccgctgaagtccagcgaattgatgatctgtaccagggtcttcaggctgaggtcgccgcccaccacgccgagggtgttgccggcggccttcaccggcgtcgccgcggtgatgatcagttcctgggtggcggcgtcgacgtagggctcggtcagggtcaggccgccggccgctacggcgtccttgtaccagggccggctgcgcggatcgtagccggccggcatcgggctgtccgggcgcatggtgaagacgccgtcctgctggccgaggtaggtgaagctgaaggtcgaggtcagggccggctgttcgagcagggcgctgacggcttccgggctgtggtcgcgggccagggtctgggcggtctgctcgaccagcaacagacggccaccgagccagttctggatgttgctggaggtcacgtcacccatttcccgcaggtagctttcgaggtcctcgcggatcgcgttgcgctgcaggtaatcgttgtagagggtgaacagtgcgaaagcggcgaacaccacgagggaggccgcgaggaggatcttgtggctgaacttcagacttttgatcatgttgtattgcgtccaggagtatgtagcgccagtctttga

SEQ ID NO: 365599 - DNA, 1050 bp, Pseudomonas aeruginosa
atggattcttttgctgcgaatcaagcgattctgacagggcgggatgttcggaaaagggaattttttgagacgctgaacgaatctgcaggagtcaaatacgccataggtgctatggcggcggttgatgaggcggctactaaggtctctatcagagagggtgagcgggttgcggatagtttgatcaaaagccttagtagtgaaggggaaagtgtcactaaaaggcttcaaggatcggttgctttagacatccatattaaaggtcactccgacgttgatatgcttatccttgtgactaatccggtgaatgtggaacttccgaaggttgtgccaaacggatatttgccttctagtgaccctagaagtcttttgcagataattcgtgatgttcgtgcaaagtcagagaggatacttccggtaaacttccccaaggcaaatgtcgactgctcaagcagtaaatgcatttgcgtgagcggcggcagtctggctagggaagtggatgtggttccagcgatctggtttgatactatcaagtatcagagctcttcccaagatcatgatcgtggcgtgaagatatataacaagagtgatgatgagttcttgctgaattttccgttcactcatataaaattggttaatgatcgtgatgctttgtatggtgggaacttaaagtccgttatccggttaatgaagaacatgattgcagatatgccggactacaaaaagcgcgtggttaaacagcttagcagctatgacctggctgcaatcgggtaccacatgaacgaaaacctttatgcgccctactatatgaaactttctcttgttgagaaaacaagggctcacttggctttcttgctcgcagctaaagattaccgctcatcgctttctgtcccagatcagagccgtaaaatctttgacaatgatggcaaggtggaagctttgtcgattttaagcaaggagatggatgatttggcggtttctatatttaaagagttgcaacctctccgtagcgcatatgattcgtctgcaatattgactaagtcgattttttag

SEQ ID NO: 365600 - DNA, 1293 bp, Pseudomonas aeruginosa
atgctgaacagcctcaagctagaaggcatcggccccgcagagcggttggccgttgacttcagtccacgcctgaactttttgactggcgacaacggactgggcaagagctttgtgctggatattgcctggtggtcgcttactcgtacgtggggccggggggtggtggcggctcctcgtgctgatgctaagcaatcgagcattgattactcctacaccgggagtgcaggcccgtttgcctataaaagtaaattcgaccatcaaagccaacaatggtcggtcaagcaggggcggccagccgttcccggtgtggttatctatgccggcgtggatggtagtttctcggtctgggatccggcacggaactactggaagggggacaaagaggtcgctgccacacccgaccggacgcgcagtttcgatttcagccccgatgaagtctggaatggcctgctttccagtgatggcaagacgcagctgtgcaatggcctgatcagtgattgggtactgtggcaggagggccgcaaagaggccttcgatgacctgacaaaggtacttgatgtcctctcaccctcagggctggaaaagctgttacctggcgaacccatgcgcgtcggctctagcgtaaaagagatcccctcactccggatgccttacggccaggacgtgccattaactcacgcttcggccgggatgcggcgcatttcagccctggcttatttattggtctggacttggcgcgagcatcaactggcctgcaagcagtatcgggtcaaccctgcgaaggaaatcatcttcctgatcgacgaaatcgagtgccacctgcatccgcaatggcagcgccgcatcgtccccgctttgcttaacgtaatgcgtgcgctgacaggaagtcgcgatgtgcctgtgcagttgctggccgccacccattccccgcttgtgttggcctcggtcgagccggagttcgaccttgatcgagattgcatctgggacttcgacctggtcgagggggaagtaaaagcgactctctacccgtattcacgcaaagggagcgtaaatgcctggttgacttcgtcagtgtttgacctgaaagagccggcctctgtggacgccgaacaggctctggaaaaggcacgcgccttcttgcgggaggcagcgggtactcagcagccccttacagctccacaaagacaggcgttggaacaaattgacgccgagctgcgtgccagtctgagtgacgtggactccttctggatacgctggagccagttccgcgaacagcggatgagcgaagcatga

SEQ ID NO: 365601 - DNA, 648 bp, Pseudomonas aeruginosa
atgatccgggtagagttggctgctgaaccccaggattttgatgcaaaggtcaggcagccgggattgagagctattgccgaactggcgggtgagccaggcctgcccaagcgcaagggccgccctcgacaggcggttgccaatagccgtgaacagatcccggccgacaaattcccgtcttactggactgaggcacttcctgagctgagagcggcctatgggcatgtctgcagctatgtgtgcgtctatatcgagccagtgaccggcgctgcttcggtcgaccatatgctgcccaagtcgctttcttggcaagaggcctacgagtggcgcaactatcggttggcctgctccttgatgaacagtcgaaaaaacgattatcgcgatgtactcgacccattcgagattgacgatgactggctccgtattgagctcgtcggctaccaggtgattcccagcgcggatctggatccggcaatcaaaacccgtgtgcaagccactatcgaccgtttgaagcttaacgaccgggactgcctgacgttacgtgaggattacgctaccgactatttccagggtgatatctcgcttggctatctgcgtcgccgtgcgccatttctggccagagaaatcgagagacaaggcatggccctgtga

SEQ ID NO: 365602 - DNA, 792 bp, Pseudomonas aeruginosa
gtgcaagaagagacttattctgggactgcctataaatacggaacctacacaacgacatacagcgcgactgcaaaaataaccgacacaaaatttgaaatctcgtccgttgacttcacatcctgtgttgcacaaataaccgatattatgcaagagactgaccaggtggcatgtcccgctggacaagcaggcacaatccagcgctatagagtcaaagcacaaaataccttagggcaagttagttacccttacggtgaagcatgggtagtcagtaataataattgtgcatctacccaaattgacactcaacctacgaatgatttaggtgctacacctgatgggctgttaagcaacatctctgttacctcatccagcttgcaaaatggagaatcatttttcaagtatctcaatagcctcgctgcctccaaatgggctacaaaagaacgccacaagctgatagtaaacattgatgatctgagtaatggggaatatagcgcggataaggttggggcgctaattgctaaatttcaatcagtagttggttctgagaatgccgatgtggaaatatccttgccaacggcaattgataagtatttaggtgttggagagatcacagccgccgctgtggcagcaaaaacagtgattctgaaagatgtaaagttcgatggcacatctgcgacagttaattattacaaggtgagtgatttgcagacgaagccaccaatcaaaaaaagcactgctattcgcgtaattccaattggcatgggacttgttggcataacttccagtcgttaa

SEQ ID NO: 365603 - DNA, 669 bp, Pseudomonas aeruginosa
atgagcaagcttcgttatatcaacgcagaggccaaaaagcccaagtcagagcgagtctttaacctctacacacttgccaaggaacaaagagacgaggcggtaagaaaagcccaattggcgaagcaggaggctgagaaggcaaaggagaatgcacagaaagcccaggaatacgcacagaaggctaaacgatatgtcgccactcagctcaccagggcggaggacgccaaggagcgccataggctggcgactgaggcgacagccgaggaacacgagcaggcagacgcttaccgtcgcaaatcggagcattataaggacgttatagataaggaccgtgtgaagcatgatagggatcttgtggcccatgccaagataaaagccgaattaaaactatttagaaccaatctttctgaattgattgatggtattacaagctggattgaagaaacgttcgccgctcgacgccaagatattcaggaaaaatatctggaacgagcaagaaaggcttatgagcgcgtagtcgaaaatgacgaatcagaagacaaacaatttacaaaagaggcagaggccaatgtagacgcacagttaggacaaatggacttatacagcaaaagaattcctgatttaccgtctgccaaggagatacgccgaaagatcatcaggccaagataa

SEQ ID NO: 365604 - DNA, 318 bp, Pseudomonas aeruginosa
atgcatatttctaaattgacgctggtcaactaccgaaactttaagaatacgacccttcagtttcacaagggcgtgaacaccatcatcggcgagaatggctcaggtaagtcgaacatactgcgagcgatccgccttcttctagacgacacaatggtgcgcgcggcttaccgcttggatgaatcggatttcagccgctcactcggtcaatggcagggccattggatcatcatcagcatggaattcgaggagatcagcaccgacgaatcagtgcaggcactgttcctacacggccctgccattgaccgagtgagcggctga

SEQ ID NO: 365605 - DNA, 339 bp, Pseudomonas aeruginosa; identical to SEQ ID NO: 343272

SEQ ID NO: 365606 - DNA, 276 bp, Pseudomonas aeruginosa; identical to SEQ ID NO: 351592

SEQ ID NO: 365607 - DNA, 150 bp, Pseudomonas aeruginosa
gtggacaacgaaaacaaaaccctaatcgcccaggcgctggtaggcgcgctgttcctcttcggcctcttctggatagtcggtagcctccagaacctctacgagcagacagaactgaaaggacaggagttgagcagatgtagcaagagttga

SEQ ID NO: 365608 - DNA, 531 bp, Pseudomonas aeruginosa
atgacagactacgcagagctgcggaggcttgctgaggcggccacgccggggccttgggaatatcaggcaccgctaaaggtattagcagcagataggacatggatcgtccttatcgcgctatctcacgctaattgtcgtgaggacaaagcaaacagcagatttatagccgccaacaaccccaagaccgtcctcgccctgctggacgagatcgacaggctcaaggcggagaacgaaaggctgctcgacgaactatccgcatgcaccgagcatccaggcggatgtgggtattggcgcgaggccgccaagcgtagagccgaagagcgcgaccggctgagggcgcagaacgatgcgctgcggggagcgctacatgccgttcaagctgaggtcgacgggaatctccgcccacttacccgcgacctcgtgaacatggttagtggcttgaataacggctgccacccgaatgacatctacgaccactgcgacgatatcgaaaggatcatcggagcagccctggaaggaaccaagccatga

SEQ ID NO: 365609 - DNA, 213 bp, Pseudomonas aeruginosa
atgcaccagctaacagcgaatcaccgcccttgcggtgtgacggtcaccggctggcctgaagaaagccagcttatgacgccggacgacattctgcgcatcgcgagagcggttaagcagatggcgatcaaccagtcccagggcgccgatggcgttcgggtctacccggaggatgagccatgccattcgacgaaagccccgcagtccgccgcataa

SEQ ID NO: 365610 - DNA, 324 bp, Pseudomonas aeruginosa
ttgcgcagggaggtcgaggccgccgtgcagagccccagccagagcgagatggccagcaggaacaaccagggcgcctgggcgaacagcgcgatcatcagcaccgacatcgcggtgccgaccagggtgccgagcaggcggaacaagcccttcgccaccaccatgccggacaacggctgggacacgatcagcacggtcatcagcgcccattgcggctgctccaggtcgaagcgaaaggcgcaccacaacgccaggccgccggccaggagcgtcttgatggcgaacttgagcgccagcgtcgagggtgccaggaacggcttccagtga

SEQ ID NO: 365611 - DNA, 588 bp, Pseudomonas aeruginosa
atgacgaacgtttccacggctaccgctccgccacgtcctcgctcgcgcctgcgcgctcgcctcgtgctggcgggcttcatcgctgccggcctcgctgcgctggcctgggcatcgttcgtgtcgccgctaccgcgcctgacctacaacccgtccgacagcgtggcggtcggctggtatcgcatcgaacccttcgactctcgcgctgcctcgctgccacgtccgttgcccgtggacagcatcgtgctggtgccgctaccggccgaagctgccgcattcgctgcgcaacgcggctacctgccgacgcgcgtgccgctgctcaagcgcgtgggcgcggtcgcaccgcagcaggtgtgcgtcgcgggcggcatcgtccgcatcgacggcgtgccttcggccgccgtgctgcgcgccgacaggctgggccgcccgctgccgtcgtggccgcagtgccgccgtctagaaccgggcgagctgttcctgttgagcgtgaccaatccggcgtcgtttgacagccggtatttcggcccggtcagcgcgtccaccgtgattggcgtcgcgcatccggtctggctggagacacgtcgatga

SEQ ID NO: 365612 - DNA, 339 bp, Pseudomonas aeruginosa
atgctgcgcgaagatggcgtgacaatcggtcgtttccgcgtgcgtcggttgatgcgggagttggggctggtcagcaagcagccggggtcgcgtgcctacacgcaggccacggtagagcgcccggatatcccgaaccggttgaacctcgagttcactgtccagcgcgctaaccaggtgtggtgtggcgacatcacctatgtctgggcgcaaggccgctggtattacctggctgcggtgctggatctgcatacacggcgggtgatcggctgggcgttctcggccaagccagatgccaacctggtgatcaaggcgggatatggcctacgaacagcgcggtaa

SEQ ID NO: 365613 - DNA, 807 bp, Pseudomonas aeruginosa
atgatgtcaaagcgcctctctgtcgctatgctggccggatttgaggggtggcatggtatgtgggtttggcgtgagacaagggaaaagtggctgcttgccgctgcactggtcgttctggggctcattgtcctgatcaacctgaaattggatgtgtggccctggctgaaagggggcaaggctgctgcatttttgactgccgaggctactggcagcgtaaccagtgacctgctcgtggggctgttttctgcgtatgtgttctatgtggtcatcgagcttctgcctagctatagacgagagaagttgacgctaactcctctgaatctgattgtcgcttcagtcattgatgcttacgaacgcactcgggtgtttgggcatgaaaccccgattacatctgttgacgtctccatcctggctctggacaacctcaatgcccacaagcgttctgtagtgacgaatgcgcaaatcctgaagcttaaatttgcgatggaaactgctcattccaggtatcccgacttccagcactgcctgacgctggccgcttctatttcacccgaccatgctctcgactggctggttcttacagacaaagtacggctgctggcagaccagtacggttcatggcccctgcatccttttcctgaaaatctgggtagtgagctaagcgagcagcagcgtcgtgacccggcatgcttagctgttttcgataagtatcagcgagacatgcaactcatgtctggcactctcaagcttcgagtgctagaagtcattgaggcctcgatcttttggatgcaaaggcagacttcatag

SEQ ID NO: 365614 - DNA, 1161 bp, Pseudomonas aeruginosa
atgcatatcgtgggtggcttctaccgtgagctgtgtcatctacctgagtgggacgcgagcatgggatccggtgcacgtgcagcattgactgtcgctgcactctcaccgggcacggaattcacgacctatgctgctgctagcgaaagcatggcggttacagcacttgagcgctatggcatcgcagccaacgtcgcgataagaccaagccccattgttttcgcctatttccatcctctctcatctccacatatagagccacgacgtgaggaattgatcactcaaccctccctgcaggtaacggctaatgcggttttgcggttcggcttccttgagggtgatgctgtcgtcaaggcgcgccgtgcagtgtatgacccacagacatggcgaaatccgaagccattttcagctaacggatcatcggcagatgaactcgcccttgttatgaatgagttggaaatatcgagtgctacaggcatagaaaacatcgaccaggcagccgatcatctcatccaaacccataaagctgaggtcgtggtcgtcaaacaaggcccctacggcgccaagatctatgacgcctcacaaagcagtactcacgttccagcgtaccgctcagcccgagtcttcaagatcggaactggggatgtgttcagcgcggtatttgctcactactgggcacagatgagaatgccggcccatgaggctgcagacttcgcttcccgcgctgtctcactctactgcgaaacccgcacattcaagttcgagcatgctgccctagctgctcgccagcccatctttgcaacgcgcggggccaccgtttgtatcgaagcagggatcgacgcggtcgggcagcgttacgcgctggaggaagcgcgcttcgcgctgagagaattaggcgtgaatacgatttgtccaaatattgagcccgcaattcctatcgagaattacgaggcaatactcgttatagaggatgctctcccttcagaatcgataggtcgcattgcagaacatgcttctcggggcacatctatcatcgttctcaaagaacgagcagaaagggacacaccatggcccacagatactttgaaaacaccggactttacaacagctctgtatttcgcagcgtgggcggcaggcgaagctttgtcaccaggcatgccttaa

SEQ ID NO: 365615 - DNA, 408 bp, Pseudomonas aeruginosa
gtgttcaaggatcttctggatgctttgggtaggatcaagtcgcgcccgctgctgaacgtgtttgcagcgctggctctttcgacattcgttgacggtggagggccgatcaaggatcccttttccgttaccagcttgctgttgcccttctatttatttttcgcctctgtgatggtcgtgtcgtgggtacactgtgtaatcaacctgaacagccgccttgccgatcacgatctttttagctgggggccctatttgggtggggtggtattgacgttctgcctgtgcgtaattttttggtacgtgtcgaatgttcccgatcccatcaacctgaagctgttcggtagtgtcgaatttgtgaggatgttcgccctatacctgtttgccgtcgaaacgatgaatatcaagcgttga

SEQ ID NO: 365616 - DNA, 801 bp, Pseudomonas aeruginosa
atgcgttacttgcaccgcatcctcttctatccgcttctgctggtgtcgcttttttgggggttcctcgctctgagagtcaaccctttcgcgctgctttacaagcttgagttttttgccctactcaaagctttttacattgtcggctttacggcagcgttatggccgctggcgtatatagaactagtcgactacgttcattcgcgcttgggcaaaaatggtcggctttaccttgattacgctgagtcgctacagaaggatttgatcgtcgccgcgatcacggcgctggcgttagtcggtgtctattggctggattcggtgagctacgctttctcaggtatcgacattgctttcgttggattcccctttttggtgaatgccctgtacaccttaatccaaggtacgcaagtgagtgttgccgggcagcccatacgcaaaagagcatcattacccatgttctgtgtggtactgggagcgactacggcggtgtattggttgctggtgaaaaactcatccggtgaactggctacggaccaagcgttgtacttgcagctgactattttgttcggcggcttctgcttctttttgagcagcaactttatgctgcactgctggagacatggacgttttgagagctctacttttaagcgctatttcttcaccgaggttgtcaggtcgaaatcgaatttttacggagacctggacaaagtgctggggccgttcaatcagcaaatggcacggcgtaaatctcagcactctgcagctattcgtcgtcaacaaaagaaccgtcaccgaaagcgttga

SEQ ID NO: 365617 - DNA, 609 bp, Pseudomonas aeruginosa
atgtttgggagtgaagtagtgatcttgagcgatcctgcgagccgaagtgggcttaactcacttttcgaagcggctgatcattacaatgagagagaaacggatttaatctggcatccagagcattgggaggtcactcaaatgagttcttcaatcttgaggcctcaaacaggggccgcagctcaaccgccgacgttccagttgacccatgctgagacaggcagcttgagtcatctggacatcctgcgccttgtgcaagctggttttgccctcagtgatgttcaggctatgatccgctcatcaagcctgttcaaaactcacaagctcctggaacgaatcatggggaagtccgctcggaccatccatcggctgagtaatccccagaatgaggtccgattgaatccccagcagagcgctgtggcgctccaatacgcccaggggcttgagcttgcagtgatggtcttcggctctcaaacgctcgccgagaattggctgggacggtcatgtaagcatctgtcagggattgttcctttcgagatgctcaatacctcggttggtttcaaggttgtggtggactacctggagcgcgctcgcttcggtgtttaccagtag

SEQ ID NO: 365618 - DNA, 1314 bp, Pseudomonas aeruginosa
atgattgaaagactgcgaaccagattcgatggtttgattgacatcgagcacatacgcaaaaaggtaacagtccgaccaaaacccgtcggcgacatagatcgactaccacctatgttagctgcacacatccttgatatgtcactaagacaaatttacctgccaaatcaattcagtttagagcttattgcagagttagtgggcaaagcagcagtccattcggcaatacgttccgaaacagaacaaacgtttgtcaaaggcatgtactaccctataacagccgaaactttcccaatctgccttactggcttagcgggtgtggggaaatcggcaaccatcgaagcgctacttcgcgttatgccaggccctactgagtttaagctaaatcattacatggaacctcaaacagccgagtcttactggtacgccagcgctaaaggtaaagcgtctggtaagcagctgctcacggattttcttggcattgaagcgactacacgagagaacactgcaatcctcagattaagagcgcagcagcaagcacatcaacgcggtatctcgctggcaattcttgaggaaatgcagcatttaacacctgggaaaggggcagcccttacaaccgacatactgcttactatgtccggccttggcttacccatggtgtacgtatctaatttcagtttgggacataagcttcttaaacgtaatcaggaagacacccaacgcctagtcgcagagccgagaatcatgtggccagacgccctagagtcaaaaatctgggctgaattcatagacgaatgtattaccgtgagtgatggtcgaattcgggccaatcccaaagatttttcttacgaaatctatcgcgggagctatgggctaaagcgtgcagccattcacctaatggtacaggcatatatccaggctcgttcctcaaatcgcgcatgggttgaaattgaggatgtgcaaagggcttatgcctcaagctcatattattcgtaccaggtggacgttgaggaactggagcggattgctattcaaaagaactccaaacgtgatgacctcaattgcccatttggctcacccatacgctcgaatgtggtgcagttcgttaggaaggagcgcgaccatcgtgtcgctcaagctgctttcaaaggtgcgctgacggctgaagagcgtgaagctcataaaagcttgaagctggataccgacatgaaggctcaaaaccccaagcgccctaagcgaccgcctttaggaaaacctacaaatgatgatttggggaatgcattcaacgattatttcggcgacaaggaggataattaa

SEQ ID NO: 365619 - DNA, 777 bp, Pseudomonas aeruginosa
atgcgaggatggtctatcggggtgatcgctgacctgctaggcagatctgatacatatgaattcaatcgtctgctgcatgaacacacgagttattcgcaggtggcggtttttccagacttcggccaatccagctataccagagacaattatcaggattccgaaacgagatttgaaaccgaaagtcaacgagttggaatttgcattgactgtgtaaaagaggacattgagtcgcttggtttcccttactggagacgtgaccacagatatgtggaagtatgtgcgaagcacaatacaatcctgcttagacaatgccctatatgtaggcacgatatccgatatcatcgccaaggatatggtcatgatctactttggggcgggtgtaaagggagctatgtccatcagtgcgaatccacgaaaaatccacacgaatataaactgacattcgcaagaattttcgcggaaatcggagaatcaaaatttgccgttgatttggagtctgctatagaacatcttgcgggtcaggcaaataaaatggcactggagggaagtatcagtgaggaggagttaatggcgataaattggaggcttaaaaactctaaaggaatttccgacacatggttgaaatatcgccctgacgataggtattctcataatattattgaagttatagcaatgttgtatggcagctttgctgctttagtagacagtctgcgtgaaacagataagctggttcgcaacatagatgacctgatgcgtgttgagtaccaagacaggtag
